United States Patent Application Publication US 2023/0026259 A1 - sequence listing, part 40

SEQ ID NO: 128511 - DNA, 8488 bp, Homo sapiens
  Payload ID: 5154
  Gene Symbol: DNAH14
  Gene Name: dynein, axonemal, heavy chain 14
  ENST ID: ENST00000327794
  CDS Start-End: 1-4444
tgaattatttggaaacagttcacaagtaggcatcaacctaccaactggtgaatgttccatctttggatattttgtggatatagagcaatgtgaattcataccttggtcagatttagttcctaatgatcagacactaattcaaagaggaacttcattactaactaatcttcaaagatctggcggaaacttcttgaagataacagaatgtggagaatgcattaattataccgctaccagagacacaacatgcctttcttttctcatgagccttcttttaaagaattcctgccctgtacttctcacaggagaatctggtgttgggaaaactgctgccattaatcaaatgcttgaaaagctagagggtccaggagcatttgacataaaacatggttcaattttaggagacaccctattatatagtgaaataaaaaaatcaagtagcctaaaacagaatatcaccatcttgattcctgaaactcataagacagcaactggaagttcagataatcccactaaaaagccagaagttagaactaataaaaagttacttaaaaataatgatcataaaggagttgtagtctctacaataaattttagcaccaatgtaacagctgccaaaaccaaggagatgattcttaagaagttaataagaagaactaaagatactcttggagcaccaaaaaacaaccggattctaatatttattgatgatatgaatatgccagtatcagatatgtatggagcacagccacccctggaattgataagacaattgttagatttgggaggagtttatgatactgaaaaaaatacatggaagaatattcaagatctgtctatagttgcagcttgtgttccagttgtgaatgatatcagcccacgtcttctcaaacacttttccatgctggtattacctcatccttcacaagacatcttatgtactattttccagcttctcctaggattgctgcaagctgacaggactgttgttaactccaaagagatggctgctctgctctttgttcatgaagccacccgagtatttcacgatcgcttaattgatttcactgataaaagccttttctatcggttgctttcaagggaacttgagaactgttttcagattcagtggacccaagaaaacctgatgaatcactcaactgtatttttggacttcttggatataaacaagactcatagaaaaaagatttatcagaataccagtgactataataaacttgccagtgtacttgatgaattccaaatgaagttgggttcaatttctttggagctttctcattccatggtgttcttcaaggaagccatagaacacatcataagagcaacaagggttcttcgacaaccagggagtcacatgttactgattggaatagatggatgtgggaaaaaaacatgtgcaaccttggcctgttatttgacagataataaactataccgagtgcctatatctcacaaatgtgcctacatcgaattcaaagaagtctttaaaaaggtgtttattcacgcaggattaaaagggaaacccactgttctgatggttcccaatttaaacatagaacaagactcatttttagaagatttgaactacatcatcagttcaggaagaatacctgacctgtttgaaaatgttgagctggattctattgcaatgaaaatcagatatcttactgaacaatctggtcatatggataataggcaatctttactttcattctttcaaaagagaatatataaaaatcttcatatttttgtgatcatgagtcctgaaggacctagcttccgccaaaattgtagagtgtatccttctatgattagctcctgcacgatcgattggtatgagaggtggccagaagaagctctccttattgtagctaactcattcttaaaagaaaaggtcaattttgagaacagagagaacttgaaagaaaaacttgccccaacatgtgtccaaatccacaaaagcatgaaagacttgaacagaaaatactttgaagaaactggaagattttattataccactcccaatagctacttgcaatttatggaaacatttgcacacattttgagggcacgagaggaagagatgcaaacaaagagggatcgcttccatatgggtctatccacaatcctggaagcaaccactctagttacagaaatgcaagaagagctcttgattcttggccctcaagtagaacaaaaaacaaaggaaacagaaactctaatggaaaaactacggaaagattcacaagtagttgagaaagttcagatgcttgttaaacaggatgaagaaattgtggcagaagaagtaagaattgtggaagattatgctcagaaaactgccaatgaactaaaaagtgtgctgccagcctttgacaaggcaattgtggctctgaatgccctggataaagctgatgtcgctgaattaagagtatacacacggcctcccttccttgtactgactgtcatgaatgcagtgtgtattcttctgcaaaagaaacctaactgggcaacggcaaagttacttctttcagaaactggtttcctgaaaaaattgattaaccttgacaaggacagcatacctgataaggttttcgtgaagctaaaaaaaattgtaaccttacctgatttcaacccacacaagatttcgctggtttctgttgcttgttgctccctgtgccagtgggttatagctttgaataactaccatgaagtacagaaggttgtgggccctaaacaaatccaagtagctgaagctcaaaacgtccttaaaattgcgcgacaaagacttgctgagaaacaaagaggtttacagctggttgaagaacatttgctgtttttacaggcagcttacaaagataccgttgctgaaaaacaactattagcaaatcggaaaacaatggccagcaggcgctttcagtgtgcgtcagtcttactaactgtcctggaagatgagaagatcagccgatggcataatcagggactgcctcatggtcagtattcagtagagaatgccatcttgatcaagaatggccagcagtggccactgctgattgacccacataggcaagctcacaaatggatccgtcagatggaaggatccaggctgcagaagctctccattgaagacagcaattataccaaaaaaattgaaaatgctatgaagacaggagggagtgtcctcctgcagaatctccttgagacattagctccaggcttaaaggcaattctgaaaaaggatatctatcagaaaaaaggacactatttcataagggttggtgatgctgagttcgaatacaattcaaattttaggttatacttatctacagaaatagacaacccccattttcttccatcagtttataactttgttactatgatcaacttcactgtaacattccaaggtttgcaagatcaactcttgtctactgtggtaactcatgaagttcctcatttagaagatcaacgttccaagttactggagagtatttcccttgatgccataactcttgaagaactagaggaaaaaacattaaatttactgcagaaagcactaggatccatattagatgatgacaaaattgtagataccttaagaaaatccaaaatgacatcaaacgaaatttcaaagcgcatcgaagcaacaaaaaaagctgaaagtgaaatccaagcaatacgtaaaaactatctccccattgcgacccgaggcgccctgctctacttcctagtagctgatctcacacaaatcaactacatgtaccagttctccctagactggtttcatcaggtttttgtttcatcagtagtttccaaaagcaaagaacaagaacatagttttaaaagggagaaagtgtctccaaaagaagttcatgagtttataagtatttcaaaagaacccaacctggaaaatgagaaaaatctcttagataagcatattaaaagtgcaatagacatgttgacaaaaagtatttttaaggtggtttcttcagctctatttaatgaagataaactttgcttctcttttcggctttgcactgtaatcatgcaaaacaatgctaatggaaatctaatacaggatgacattggattcctaccagaagaagaatggaacatctttttatattctggcatattgataaatattaaaagtgcattatcccagtctagacttactagcacatttgaaataggtgaaagtcaacatcttcagtggctgtcagattccaggtggaggcagtgccaatatgtcagcactcacctggaaccattttcacttctgtgcaaatcccttttatcaaacgtatcacaatgggatacttttaagaacagtaaagcagtttattctctgatcagcacacctttctcttcagaaaatgcttcattggaggaaaatacaaaaccaccagaggaaagtaaaagttcttagaccagaaagtttaaacaattcagtgagaaagtttataactgaaaaaatgggaaataagtatcttcaaagaactggagttaatttgaaagatgcatataaaggatccaatgccagaactccgctgatacttattcaaactcatgggatcgaccttaccaatatcctcctgagatttgcacaagagttaaaaggaacaacacatcatgtgaccataatttctctgggccgtgaccaagcagctaaagctgaagacctcattttaaaggcactaacaaaaacacaacaatgggtcttcctccagaactgccatcttgcaacatcatttatgccaaggctttgcacaattgtagaatcttttaatagtccaaacgtgacaatagaccctgagtttcggctatggttaagctcaaaatcatacagttcttttccaattcctgttcttaaaaagggtttaaagattgccgtggaatctccccagggattgaaaagtaacttacttcagacatttggatgtactgggagtggagaggttgccattaaggtgttggaaaattccctgagaggacagcccagcatttcgtggcaagcactgcgctacctgattggagaagtgatttacggtggccgggtgattgataattgggacaagcgatgcttgaagaccctactctacaaattttgtaatcctgaagtgctgaaagatgacttcagtttctccagtgatgggatatgtctgccagttccaggatctgcaagcataaaggactacatacacattatccagtccttacctgatgatgaccttcccgaggtcttaggaatacacccagaggccatcaggagctgctgggagacccagggcgaaaagtttattgaaaatctgattgccatgcaaccaaaaactaccactgccaacctcatgatcagacctgagcagagtaaggatgaactggtgatggaaattctatccgacttgctaaagcggctgccactgacagtggagaaagaagaaattgctgttggaactccaagcacattgaagagcatgatgtcaagctccatttgggagtctctttctaaaaatctcaaagatcacgacccccttatccattgtgtcttgctaacctttttgaagcaagaaattaaacgatttgataagttattatttgtcatacataaatccttaaaagatcttcagcttgctataaaaggagagatcatcctcacccaagaattggaggaaatatttaactcttttcttaatatgagagtgcctacattgtggcagaaacacgcctacagatcttgtaagccactgagttcctggattgatgatctcatccagcgactgaatttcttcaatacttgggccaaagtggcttatactgcaatacagcgtcggtatatgagatttgtcacagtttggaagcagtctattccatcaactagccaaaaatgcaaacaccctgaggattcagagaacaatttctttgaagggtttccttcaagatactggctcccagctttcttctttccacaagcctttcttgctgctgtgcttcaagactatgggaggtcccgaggaatcgctgtggatgccctcaccttcacccaccatgtgatttccaacaccactgacaaggatgagaagttctccgtatttatgccaaagaaactcaacatagtcaggagagcgtttaagggttctcacagtttctggtccactggggatacttcttgttttccggtgctttcatagttgcattctgggatttggagtgggaggaggtggtggacactcatgctgtttggcctctgggtcctggtcttcctctcctcagcactcatcagactgcactaagatgattccgagactacccagaattagtgaacgttaggaacatgtcagaagaaggatggaactgggagagtttgtcctacaaggcaaaagactctgaggagaaaaagaaatattgaaaagggtgatacatgaagaactagactctaattctgctagaactccaaccagggggacctccaaggggaagacacatgcagttgatctaaattgatgatgatggtggcgtgtccttttatagacagggagttccctgtcactggagctttaggagaaatcaggtgactgcttggcaagagtattgacgtggaagaaagctcaggttcagatgtgttttcgactggaggtttatccaactgtttatttaaaatatgggtccaaaactgctctggctgttggaaatatcgagatgaacaacgtaaggcctctgccctctagaagatcccaatctacctgataatgatggcactgatgcttgctagccaacactgactaagtactatgtgctaagctctttacctgcattatttaatcctcacaaattagcctcattctgtaggtcaggaaactaaggttcaaagaggcagatcataagctttgaacccaccaagtctagctgactctacacccatagcctaacctcttcctacataacccattagacatgaaaaggctaccgagaggcagatgtgcaccagggccttttcttatgactcacagagggagcacaggggtatggactgcccgcctaagtttgctttttgcctctattcatctaatcagatgttctcacttatttctgctttatacaaacaaccagcttccactgagttgaagtaagattacttccatttattctgagtggctctttgaagagttaaatcactccaaaaggggctgtttacaaattacctacagtttagatttttcagaggaaaaacccatgtaagctatgaccaagttacacaagtataaatggaagtgacattgtcaaatgcgttagattaacttcttccaagattgttaggaaaggacaacactagaacaaatgcagtataggaaaatttgcatttatataagttaaggggaagagaagtaaaaagcattatacaaagcaattcccagtaaaattcttttttttttttttgagatggagtcttgctctgttgcccaggctggagtgcagtggcgtgatctcagctcactgcaacctccgcctcctgggttcacgccattcccctgcctcagcctcccgagcccggctaattttttgtatttttagtagagacggggtttcaccgtgttagccaggatggtctcgatctcctgacctcgtgatccgcccgcctcagcctcccaaagtgctgggattacaggcgtgagccactgcgcccggccaaaattcttttatagaataagccaaaataggaagtgcttaatatgagttcagcttgcacctccaggtagtcacattccagagtggacaacacagaaggcatcaccaggcacagcacaggctgttccacactgcctcccctgtgtcaacaagctggcccaggctgcatcaagggagagctcaggacagcggtgcccaccccttctcttcagagacctgccccatcagaggagatggcagagccctccagggtggcctggtacttggccaccagctcctccaggctgggcatccctccagcacacctgcaggagagcatgtggcttcacaggcctacctcaggcacacctggagtcacctggaattggagctgcaggcaactaaattttctacttcacagacctcatcagaaactcattttacttaaccctttatcattaaaatgtaatcctctatttaacctatatcattcaaaaatatatggaacccggccgggcatggtggctcacacctgtagtcccagcactttgggaggcgaagagagacggatcacttgaggtcaggagttcgagaccagcctggccaacgtgatgaaacccgatctctactaaaaatacaaaaaattaggcgggcgtggtggtgtgctcctgtaatcccagctactcaggaggctgaagtgggagaaccgatggaacccaggcggtggaggttgcagtgagccaagatcatgccactgcactccagcctaggcaacagagcgagaccccatgtcaaaaaaaaaaaaaaaaaa

SEQ ID NO: 128512 - DNA, 612 bp, Homo sapiens
  Payload ID: 5154
  Gene Symbol: DNAH14
  Gene Name: dynein, axonemal, heavy chain 14
  ENST ID: ENST00000328556
  CDS Start-End: 1-612
aaatgctaatatctgctgaaggggaaggtctcgtgctgccaaagaaaattcgtgtaagaagtgctgtagaacagtggctggtaaatgtagaaaaaagcatgttcgatgtgctaaaaaaatttttaagtcaagggattgaagactggaactgccagatgttttcccaatgggtgttatctcatccaggacaagtggtacttactgtgagccagatcatgttttataatgattgtgttaaaagttttgtgagttcttattcaagagaaaaattggaaaaagtccacgctggtctgatgtgtcatctagaagaggttgcagacctggtagtgctggatactagtaactctcgaacaaaagctatactaggggcattgcttatcctttatgttcactgcagagatatagtgataaatttactacttaaaaatatcttcaatgcagaggattttgagtggacaagacatttgcaatataaatggaatgaaaaacaaaagttgtgctatgtgtctcaaggaaatgccagctttacttatggctatgagtacttgggctgtacctcaagattggttattacgcctctcacagaccgatgctggctgactctcatggaag

SEQ ID NO: 128513 - DNA, 929 bp, Homo sapiens
  Payload ID: 5154
  Gene Symbol: DNAH14
  Gene Name: dynein, axonemal, heavy chain 14
  Uniprot ID: Q0VDD8
  ENST ID: ENST00000366848
  CDS Start-End: 34-720
ccagttcctttatagttttgttcagaaaaacatatggagacgtttatacccattgatttgacaactgaaaatcaagagatggacaaggaggaaaccaagacaaaaccaagacttttaagatatgaagagaaaaaatatgaagatgtgaaaccattagagactcaaccagctgaaatagcagaaaaggaaacattggaatataaaacagttagaacattctctgaatctttgaagtcagagaaaacagaagattaccttagagaaagtataattcaacaacatatggtttctccagagccagcttcccttaaggagaaagggaagtcaaggagaaaaaaggatcaaactcatgcttgtccaaatgttaggaaagccaggcctgtgtcctatgatagaacagaaccaaaagatgatgatgtgataagaaatattattaggctacgagaaaagcttggttggcaaactatattaccgcagcacagtttgaaatacggaagctccaaaattgcaattcagaagattactttaaagaaacctttggaagatgatggagaatttgtttattgccttcctcggaaaagtcctaaatccctttacaatccatatgatcttcaggtagtatcggctcatactgctaaacattgcaaagaattttgggttattactgcttcatttatctcaaagagatacttggtcatttgtggagcagtttatatataagaatctccttgggagcatgttatttaatagtgaagtttttccttttgtgtagagatttaggtttgaagattcaactttaataaattttttcatctatcaaatactttgttaatacttggggtaaatttttacaggaagaactacaaaacaagcatttgctagcttaatgggaactataataataaagaaaagaatattctttattggca

SEQ ID NO: 128514 - DNA, 2215 bp, Homo sapiens
  Payload ID: 5154
  Gene Symbol: DNAH14
  Gene Name: dynein, axonemal, heavy chain 14
  ENST ID: ENST00000366849
  CDS Start-End: 188-1480
ggttacggccaggaggcgtcggagcctggcgtggtagggctgtgctgcgcggtccttcccattcaccctagtctggcgctcgccggcgtgggcgggccggaccttcgccgcttccaggaagggccacaacggccgtcggaccacggcgcggcggccagttcctttatagttttgttcagaaaaacatatggagacgtttatacccattgatttgacaactgaaaatcaagagatggacaaggaggaaaccaagacaaaaccaagacttttaagatatgaagagaaaaaatatgaagatgtgaaaccattagagactcaaccagctgaaatagcagaaaaggaaacattggaatataaaacagttagaacattctctgaatctttgaagtcagagaaaacagaagattaccttagagaaagtataattcaacaacatatggtttctccagagccagcttcccttaaggagaaagggaagtcaaggagaaaaaaggatcaaactcatgcttgtccaaatgttaggaaagccaggcctgtgtcctatgatagaacagaaccaaaagatgatgatgtgataagaaatattattaggctacgagaaaagcttggttggcaaactatattaccgcagcacagtttgaaatacggaagctccaaaattgcaattcagaagattactttaaagaaacctttggaagatgatggagaatttgtttattgccttcctcggaaaagtcctaaatccctttacaatccatatgatcttcaggttattaatatagttggtagtgtaaaggaagtagaactcatacctactttggaatggctatcagaaagaagacattactatttattacggcaattcaagatattttctgatttccgaatgaataaagcatttgttacctggaaattgaatgttaaaagaattaagacagagaagagcaggtcatttttgtaccaccatctttttttggctgatgacttgtttcaaacctgtttggtttatataagaggactttgtgaagatgcaattaatctcaaaaattataatgaccatgaaaataatctatctgccatatgccttgtaaagctggatagttctcgaacatattctctagatgaattttgtgaagagcagttacagcaagctacccaggcattgaaacaacttgaggacatcaggaataaagcaatttcagagatgaaaagtacttttctaaaggttgcagaaaagaatgaaatcaaagagtattttgagtcaaaactctctgaagatgacacaacacatttcaagctgcctaaatatagacgtttattagaaacatttttcaagtttgtaatgctggttgactacatatttcaggaactcattcgtcaacttatgaacactgcagtcacactacttttggaattatttaatggttctgctggaatgccattttcagtggaaaaaaagaatgaaaatcttatcaggtaaattacttttttgaagtcaaaaagtaacttacaattataatattttaacattgccacatatggaggaaatattcaataatttaagctagagtttgaaaattctccttgtggcagagtacatgtactcatttttgctattaacagaacttattatttggtaataccttacttaatatcggtgctataggatgcgcagtaaaatttgaatttcacataaatggtaaataattttagtatacttcaagtattacctatgttaaaattattgtttatctgaaattcagatttctctgataatttagcaaatatattttttatttgttatatctggcaattctgtgcctaagtatactctgtcttccaggttcagagttagtttttaaagatatgtgagaattctggaaggagctacaaagtccaattggaatttgagtcaattccaagaaatatctgttgaatattttcccaatgaaaaaactatctgaaaaacatttttaccttctaaacactactgttaaaaacaaagcatttttcttattttccacaactggatatatctactgtaactggtgaaacaggaatattaattgaaatgatggcatactttgtagctggtaaacaggactatgaattgaaatgttggcatactttaatttctatttatcaaaatttaataatattttaggctaattaaagttttataactaggtagctgaaaatatatcaattcaaaaaa

SEQ ID NO: 128515 - DNA, 1103 bp, Homo sapiens
  Payload ID: 5154
  Gene Symbol: DNAH14
  Gene Name: dynein, axonemal, heavy chain 14
  Uniprot ID: Q0VDD8
  ENST ID: ENST00000366850
  CDS Start-End: 209-895
aggcgtggctcttggtcaggcggttacggccaggaggcgtcggagcctggcgtggtagggctgtgctgcgcggtccttcccattcaccctagtctggcgctcgccggcgtgggcgggccggaccttcgccgcttccaggaagggccacaacggccgtcggaccacggcgcggcggccagttcctttatagttttgttcagaaaaacatatggagacgtttatacccattgatttgacaactgaaaatcaagagatggacaaggaggaaaccaagacaaaaccaagacttttaagatatgaagagaaaaaatatgaagatgtgaaaccattagagactcaaccagctgaaatagcagaaaaggaaacattggaatataaaacagttagaacattctctgaatctttgaagtcagagaaaacagaagattaccttagagaaagtataattcaacaacatatggtttctccagagccagcttcccttaaggagaaagggaagtcaaggagaaaaaaggatcaaactcatgcttgtccaaatgttaggaaagccaggcctgtgtcctatgatagaacagaaccaaaagatgatgatgtgataagaaatattattaggctacgagaaaagcttggttggcaaactatattaccgcagcacagtttgaaatacggaagctccaaaattgcaattcagaagattactttaaagaaacctttggaagatgatggagaatttgtttattgccttcctcggaaaagtcctaaatccctttacaatccatatgatcttcaggtagtatcggctcatactgctaaacattgcaaagaattttgggttattactgcttcatttatctcaaagagatacttggtcatttgtggagcagtttatatataagaatctccttgggagcatgttatttaatagtgaagtttttccttttgtgtagagatttaggtttgaagattcaactttaataaattttttcatctatcaaatactttgttaatacttggggtaaatttttacaggaagaactacaaaacaagcatttgctagcttaatgggaactataataataaagaaaagaatattctttattggc

SEQ ID NO: 128516 - DNA, 1984 bp, Homo sapiens
  Payload ID: 5154
  Gene Symbol: DNAH14
  Gene Name: dynein, axonemal, heavy chain 14
  Uniprot ID: Q0VDD8
  ENST ID: ENST00000400952
  CDS Start-End: 203-1564
ggctcttggtcaggcggttacggccaggaggcgtcggagcctggcgtggtagggctgtgctgcgcggtccttcccattcaccctagtctggcgctcgccggcgtgggcgggccggaccttcgccgcttccaggaagggccacaacggccgtcggaccacggcgcggcggccagttcctttatagttttgttcagaaaaacatatggagacgtttatacccattgatttgacaactgaaaatcaagagatggacaaggaggaaaccaagacaaaaccaagacttttaagatatgaagagaaaaaatatgaagatgtgaaaccattagagactcaaccagctgaaatagcagaaaaggaaacattggaatataaaacagttagaacattctctgaatctttgaagtcagagaaaacagaagattaccttagagaaagtataattcaacaacatatggtttctccagagccagcttcccttaaggagaaagggaagtcaaggagaaaaaaggatcaaactcatgcttgtccaaatgttaggaaagccaggcctgtgtcctatgatagaacagaaccaaaagatgatgatgtgataagaaatattattaggctacgagaaaagcttggttggcaaactatattaccgcagcacagtttgaaatacggaagctccaaaattgcaattcagaagattactttaaagaaacctttggaagatgatggagaatttgtttattgccttcctcggaaaagtcctaaatccctttacaatccatatgatcttcaggtagtatcggctcatactgctaaacattgcaaagaattttgggttattactgcttcatttatctcaaaggttattaatatagttggtagtgtaaaggaagtagaactcatacctactttggaatggctatcagaaagaagacattactatttattacggcaattcaagatattttctgatttccgaatgaataaagcatttgttacctggaaattgaatgttaaaagaattaagacagagaagagcaggtcatttttgtaccaccatctttttttggctgatgacttgtttcaaacctgtttggtttatataagaggactttgtgaagatgcaattaatctcaaaaattataatgaccatgaaaataatctatctgccatatgccttgtaaagctggatagttctcgaacatattctctagatgaattttgtgaagagcagttacagcaagctacccaggcattgaaacaacttgaggacatcaggaataaagcaatttcagagatgaaaagtacttttctaaaggttgcagaaaagaatgaaatcaaagagtattttgagtcaaaactctctgaagatgacacaacacatttcaagctgcctaaatatagacgtttattagaaacatttttcaagtttgtaatgctggttgactacatatttcaggaactcattcgtcaacttatgaacactgcagtcacactacttttggaattatttaatggttctgctggaatgccattttcagtggaaaaaaagaatgaaaatcttatcaggtaaattacttttttgaagtcaaaaagtaacttacaattataatattttaacattgccacatatggaggaaatattcaataatttaagctagagtttgaaaattctccttgtggcagagtacatgtactcatttttgctattaacagaacttattatttggtaataccttacttaatatcggtgctataggatgcgcagtaaaatttgaatttcacataaatggtaaataattttagtatacttcaagtattacctatgttaaaattattgtttatctgaaattcagatttctctgataatttagcaaatatattttttatttgttatatctggcaattctgtgcctaagtatactctgtcttccaggttcagagttagtttttaaagatatgtgagaattctggaaggagctacaaagtccaa

SEQ ID NO: 128517 - DNA, 13548 bp, Homo sapiens
  Payload ID: 5154
  Gene Symbol: DNAH14
  Gene Name: dynein, axonemal, heavy chain 14
  Uniprot ID: Q0VDD8
  ENST ID: ENST00000439375
  CDS Start-End: 1-13548
atggagacgtttatacccattgatttgacaactgaaaatcaagagatggacaaggaggaaaccaagacaaaaccaagacttttaagatatgaagagaaaaaatatgaagatgtgaaaccattagagactcaaccagctgaaatagcagaaaaggaaacattggaatataaaacagttagaacattctctgaatctttgaagtcagagaaaacagaagattaccttagagaaagtataattcaacaacatatggtttctccagagccagcttcccttaaggagaaagggaagtcaaggagaaaaaaggatcaaactcatgcttgtccaaatgttaggaaagccaggcctgtgtcctatgatagaacagaaccaaaagatgatgatgtgataagaaatattattaggctacgagaaaagcttggttggcaaactatattaccgcagcacagtttgaaatacggaagctccaaaattgcaattcagaagattactttaaagaaacctttggaagatgatggagaatttgtttattgccttcctcggaaaagtcctaaatccctttacaatccatatgatcttcaggtagtatcggctcatactgctaaacattgcaaagaattttgggttattactgcttcatttatctcaaaggttattaatatagttggtagtgtaaaggaagtagaactcatacctactttggaatggctatcagaaagaagacattactatttattacggcaattcaagatattttctgatttccgaatgaataaagcatttgttacctggaaattgaatgttaaaagaattaagacagagaagagcaggtcatttttgtaccaccatctttttttggctgatgacttgtttcaaacctgtttggtttatataagaggactttgtgaagatgcaattaatctcaaaaattataatgaccatgaaaataatctatctgccatatgccttgtaaagctggatagttctcgaacatattctctagatgaattttgtgaagagcagttacagcaagctacccaggcattgaaacaacttgaggacatcaggaataaagcaatttcagagatgaaaagtacttttctaaaggttgcagaaaagaatgaaatcaaagagtattttgagtcaaaactctctgaagatgacacaacacatttcaagctgcctaaatatagacgtttattagaaacatttttcaagtttgtaatgctggttgactacatatttcaggaactcattcgtcaacttatgaacactgcagtcacactacttttggaattatttaatggttctgctggaatgccattttcagtggaaaaaaagaatgaaaatcttatcagaacattcaaggacaactcttttcctactggaaagacaacaaatgattgtgaagaacttgttgataattcaaagttacatgctatttctgttcaaaagtcagaagtaaaaacagacactgatattaatgagattttgaatagtgttgaagtggggaaggatttgagaaaaacatatgcaccaatatttgaagtaaatctatgcttgagaattcctgctgagagtgattcttcagaaaattctaaagagaactttcatgagtctgaccagtgccctgaagagtgtgtgatgtttgaagatgaaatgtcagaaaataaagacaattgtgtcaaaaaacactcaagtgaagaattgctcccaaaagccaagaaatcaaaagaaattagttacaatcttgaagatattatttcagacacagaaattgagactgagtttgagaataaatacatgtattatgaatttccagaatttcctacaaatctctttatagatcccaacagattggagttttcagtaaaaattcaaaatatgttgactaatatggaaaaatgtataaccacaattactcctctttgccaagatccccagctgtctatcttcattgatttggtttcaataatggatttacctaataagacaggaagcataatacattataaagagcagaccagatggccagattgtcacatcctttttgaaacagatcctgcctaccaaaatataattgtgaatctcctgactattattggtaattcaatgggcctagttaatgcttacagccacaagtttataaagtattgtaccatgacagaaaaggccaaaatcatgagtatgaaaatatcatctatgggagaattaacttcaaaagaatttgaagctattctaaatagattcagaaactattttagacatattgtgaatatggccattgagaagcgtattggtattttcaacgttgtaagtcttgattatcaatcagaatgcttactgtatattgacaacgtcatacatatgagccacaccctcatacaatctgtaattgaaaaaaagaacaaaaatttattggaagttgtggaatcatcattgcagcagctggaatgtgatcccactgaaatagaagaatttctggagcattttatttttttgaatgcaatttcctcaaaaatatctaaattagaaaaagagttcttaacaatgtctcagctatattctgttgcaaagcatcaccagatccatatttcagaagagcaaattgccatattccaagttcttcttcttaagtttagtcaactaaaatcatctatgaagttaagtaaaataaataaagacactgctataactaaattcagagataacttggaagcatgtatcagtggtctacatgttgatgttggcaatttaaaagccaagataagaactcctcttctgttatgtgctggtactcaagtgtcaacagcaatggaaatgatccagactctctcaggggaagctgcaagtttaactaacaaagctaaagcatattcacattatcaggattgtttcagtgattctcaatctcatatgcattctgttaatgtggaagaaattacacagattgtgctttcagagatctctgacattgaaggtgacttgactttgaggaaaaaactatgggaagcacaagaggagtggaagcgagcctcttgggaatggaggaatagttctcttcaaagtattgatgtagaatcagtacagagaaatgtttcaaaactgatgcacataatctcggtactagaaaaaggtttacctaaaagcgatatggtaacacatcttaagcaagtggtaacagagtttaaacaagagctgcctatcattatagctctgggaaatccctgtctcaagccaaggcattgggaggctctccaggagattattgggaagtcagttccgcttgataaaaactgtaaagtagagaatcttctagctctcaagatgtttcagtatgaaaatgaaataaatgatatgtcaacctcagcaactaatgaagctgctcttgaaaaaatgctatttaagattattgatttttggaacactactcctttgcctttaattcttcaccacacagagatttactctatcttcataattccatctatagatgacatatcagctcagttagaagagtctcaagtcatacttgcaacaattaaaggatctccccacattgggcccattaaggatcttgtgaatgaatgggatcaaaacttgactctcttctcttacacccttgaggaatggatgaattgtcaaagaaattggctttatcttgaaccagtctttcattcttcagaaatacgaaggcaactcccagcagaaacagaacttttctctcaagtgatttccatgtggaaaaaaataatgtcaaaaatacaaaacaaacagaatgctttgcagataaccacttctgcaggagtccttgaaattctgcaaaattgtaatatacatcttgaacatataaagaaaagccttgaggattaccttgaagttaaaagattaattttcccaagattttactttcttagcaatgccgagcttcttgatattctagctgatagcagaaatcctgagtctgtacagcctcatcttgtgaaatgctttgaaaatataaaacaattattgatatggaaacaagacattggccctcctgctgtaaaaatgctaatatctgctgaaggggaaggtctcgtgctgccaaagaaaattcgtgtaagaagtgctgtagaacagtggctggtaaatgtagaaaaaagcatgttcgatgtgctaaaaaaagagagatatatatataacattatcttactttttcagagccagatcatgttttataatgattgtgttaaaagttttgtgagttcttattcaagagaaaaattggaaaaagtccacgctggtctgatgtgtcatctagaagaggttgcagacctggtagtgctggatactagtaactctcgaacaaaagctatactaggggcattgcttatcctttatgttcactgcagagatatagtgataaatttactacttaaaaatatcttcaatgcagaggattttgagtggacaagacatttgcaatataaatggaatgaaaaacaaaagttgtgctatgtgtctcaaggaaatgccagctttacttatggctatgagtacttgggctgtacctcaagattggttattacgcctctcacagaccgatgctggctgactctcatggaagcactacacttgaatctaggaggctgtcctgccggtccagctggtacaggaaaaactgagactgtcaaagatctagcaaaatccttaggcaaacattgtgtggtcttcaactgttttgaggatttggattataagatagtgagaaaatttttctttggactagttcagtcaggagcatggagttgttttgatgaattcaatctaattgatttggaagttctctctgtcattgcctcacagatcctaacaattaaggctgcaaaagacaactattctgccaggtttgtactggaaggaaaagaaattcgtatcaatatgtcttgtgcggtatttatcaccatgaatcccagatacggaggtggagtagagctcccagataacttaaaatctctgtttcgcccagtggcaatgatggtgccccattatcaaatgattgctgaaataatattgttttcatttggtttcaaatctgcaaattcactctctggaaagctaactaacctttatgaattagcgcgcaaacagctctcacaacaggatcattataattttggcttgagatctctgaagatagttttaataatggctggaacgaagaaacgggagtttaaatgtctttctgaagcagatgaaaccttgattgttatcgaggctataagagaagctagtttgccaaaatgtcctcctgaagatgtcccactttttgaaaatattataggagatatttttccagaagtgacagttttgaaagtaaatcaacttgccttggagaaagtaatatatactgcaactcagcaattgggtttacaaaactggtcatctcagaaagagaagattatacagttttataatcaacttcaggtttgtgttggtgtgatgttagtgggcccaacaggtggaggaaagacaacagtcagaagaattttggaaaaagcattaacgctattaccaattgcagacttcttatcagttgcagaaagaaaatctgcttcaaagatttcagaaagaaaaggaaaagtagatatttgtgttttaaatccaaagtgtgtcactctcagtgaactatatggacaactggatcctaatactatggaatggactgatggattattatcagcaacaattcgaagttatgtatattttaacacaccaaagaacacaaagaaagacattgatctcagactaaagtcaagaatctcagatttatccaatgttttcaaacttgattcctctgatacaacagagactgatgataatatttttgaggagatagagaaagttgttaaaattccagaaaatcacaattttgattggcagtggattatcctagatggcccagtggacaccttttgggtagaaaatctgaactctgtgctagatgatactagaacattgtgcctagcaaacagtgagagaatagctttaactaataaaataagagtgatttttgaagtggacaatctctctcaggccagtcctgctactgtcagccgatgtgccatggtctatatggatcctgttgatctgggatgggaaccttatgttaagtcatggcttctgaaaacttctaaaattataagtcaatcaggagtggattgtcttgaattcatgattaaaaatagtgtcacagacggactacaatttataaggaatcgtcagaaatttcagccatatcctatggaggacataacagtcgtcataaccctctgcagaattcttgatgctttctttgacttcatgggtaaaaatggaggatttgaacaaagtgatgatttgaatgacacgtcatctaaggaggcaaattcccaaagagagtctgtcacattcaaggatatagaaaagagggatgaaaatacatggtatccagagaaaaatcctgataaattaacaaaaattattcaaaagctttttgtgtttgcctttacttgggcatttggaggagctttaaaccgtgaagatgaacacagagaaaatataccattttgtcccagtcttgaacctgattctcttgcaaaagtaacatacgattttgacaaacttgttcatgaattatttggaaacagttcacaagtaggatggaagcactggggtcagtcacagggcagacggagaaaggggaactgcatcaacctaccaactggtgaatgttccatctttggatattttgtggatatagagcaatgtgaattcataccttggtcagatttagttcctaatgatcagacactaattcaaagaggaacttcattactaactaatcttcaaagatctggcggaaacttcttgaagataacagaatgtggagaatgcattaattataccgctaccagagacacaacatgcctttcttttctcatgagccttcttttaaagaattcctgccctgtacttctcacaggagaatctggtgttgggaaaactgctgccattaatcaaatgcttgaaaagctagagggtccaggagcatttgacataaaacatggttcaattttaggagacaccctattatatagtgaaataaaaaaatcaagtagcctaaaacagaatatcaccatcttgattcctgaaactcataagacagcaactggaagttcagataatcccactaaaaagccagaagttagaactaataaaaagttacttaaaaataatgatcataaaggagttgtagtctctacaataaattttagcaccaatgtaacagctgccaaaaccaaggagatgattcttaagaagttaataagaagaactaaagatactcttggagcaccaaaaaacaaccggattctaatatttattgatgatatgaatatgccagtatcagatatgtatggagcacagccacccctggaattgataagacaattgttagatttgggaggagtttatgatactgaaaaaaatacatggaagaatattcaagatctgtctatagttgcagcttgtgttccagttgtgaatgatatcagcccacgtcttctcaaacacttttccatgctggtattacctcatccttcacaagacatcttatgtactattttccaggctcatttgggaatttatttctccatcaataacttcacacctgaagttcagaaaagtaaggatcagataatatcttgttccctagctatataccatcaagtacgtcagaatatgttaccaactccaacaaaatgtcactacatgtttaatcttcgagatatgtttaagcttctcctaggattgctgcaagctgacaggactgttgttaactccaaagagatggctgctctgctctttgttcatgaagccacccgagtatttcacgatcgcttaattgatttcactgataaaagccttttctatcggttgctttcaagggaacttgagaactgttttcagattggaatagatggatgtgggaaaaaaacatgtgcaaccttggcctgttatttgacagataataaactataccgagtgcctatatctcacaaatgtgcctacatcgaattcaaagaagtctttaaaaaggtgtttattcacgcaggattaaaagggaaacccactgttctgatggttcccaatttaaacatagaacaagactcatttttagaagatttgaactacatcatcagttcaggaagaatacctgacctgtttgaaaatgttgagctggattctattgcaatgaaaatcagatatcttactgaacaatctggtcatatggataataggcaatctttactttcattctttcaaaagagaatatataaaaatcttcatatttttgtgatcatgagtcctgaaggacctagcttccgccaaaattgtagagtgtatccttctatgattagctcctgcacgatcgattggtatgagaggtggccagaagaagctctccttattgtagctaactcattcttaaaagaaaaggtcaattttgagaacagagagaacttgaaagaaaaacttgccccaacatgtgtccaaatccacaaaagcatgaaagacttgaacagaaaatactttgaagaaactggaagattttattataccactcccaatagctacttgcaatttatggaaacatttgcacacattttgagggcacgagaggaagagatgcaaacaaagagggatcgcttccatatgggtctatccacaatcctggaagcaaccactctagttacagaaatgcaagaagagctcttgattcttggccctcaagtagaacaaaaaacaaaggaaacagaaactctaatggaaaaactacggaaagattcacaagtagttgagaaagttcagatgcttgttaaacaggatgaagaaattgtggcagaagaagtaagaattgtggaagattatgctcagaaaactgccaatgaactaaaaagtgtgctgccagcctttgacaaggcaattgtggctctgaatgccctggataaagctgatgtcgctgaattaagagtatacacacggcctcccttccttgtactgactgtcatgaatgcagtgtgtattcttctgcaaaagaaacctaactgggcaacggcaaagttacttctttcagaaactggtttcctgaaaaaattgattaaccttgacaaggacagcatacctgataaggttttcgtgaagctaaaaaaaattgtaaccttacctgatttcaacccacacaagatttcgctggtttctgttgcttgttgctccctgtgccagtgggttatagctttgaataactaccatgaagtacagaaggttgtgggccctaaacaaatccaagtagctgaagctcaaaacgtccttaaaattgcgcgacaaagacttgctgagaaacaaagaggtttacagctggttgaagaacatttgctgtttttacaggcagcttacaaagataccgttgctgaaaaacaactattagcaaatcggaaaacaatggccagcaggcgctttcagtgtgcgtcagtcttactaactgtcctggaagatgagaagactcgatggcaagaaacaatcaatcaaatagataacaaattagaaggaattttgggtgacatacttctttcagcagcgtgcattgtctacagtggaattttaacaccagaatttcgccagttgattgtgaataaatgggagacattctgcattgaaaatggcatttctttgtcttccaaattctctttaattaaagttatggcacaaaaatatgagatcagccgatggcataatcagggactgcctcatggtcagtattcagtagagaatgccatcttgatcaagaatggccagcagtggccactgctgattgacccacataggcaagctcacaaatggatccgtcagatggaaggatccaggctgcagaagctctccattgaagacagcaattataccaaaaaaattgaaaatgctatgaagacaggagggagtgtcctcctgcagaatctccttgagacattagctccaggcttaaaggcaattctgaaaaaggatatctatcagaaaaaaggacactatttcataagggttggtgatgctgagttcgaatacaattcaaattttaggttatacttatctacagaaatagacaacccccattttcttccatcagtttataactttgttactatgatcaacttcactgtaacattccaaggtttgcaagatcaactcttgtctactgtggtaactcatgaagttcctcatttagaagatcaacgttccaagttactggagagtatttcccttgatgccataactcttgaagaactagaggaaaaaacattaaatttactgcagaaagcactaggatccatattagatgatgacaaaattgtagataccttaagaaaatccaaaatgacatcaaacgaaatttcaaagcgcatcgaagcaacaaaaaaagctgaaagtgaaatccaagcaatacgtaaaaactatctccccattgcgacccgaggcgccctgctctacttcctagtagctgatctcacacaaatcaactacatgtaccagttctccctagactggtttcatcaggtttttgtttcatcagtagtttccaaaagcaaagaacaagaacatagttttaaaagggagaaagtgtctccaaaagaagttcatgagtttataagtatttcaaaagaacccaacctggaaaatgagaaaaatctcttagataagcatattaaaagtgcaatagacatgttgacaaaaagtatttttaaggtggtttcttcagctctatttaatgaagataaactttgcttctcttttcggctttgcactgtaatcatgcaaaacaatgctaatggaaatctaatacaggatgacattggattcctaccagaagaagaatggaacatctttttatattctggcatattgataaatattaaaagtgcattatcccagtctagacttactagcacatttgaaataggtgaaagtcaacatcttcagtggctgtcagattccaggtggaggcagtgccaatatgtcagcactcacctggaaccattttcacttctgtgcaaatcccttttatcaaacgtatcacaatgggatacttttaagaacagtaaagcagtttattctctgatcagcacacctttctcttcagaaaatgcttcattggaggaaaatacaaaaccaccagaggaaactgaacttttgaatgaaaataaagaaacgtgtaatcctataaattttccctgggagaaactcacttcatttcaaagacttattttggtaaaagttcttagaccagaaagtttaaacaattcagtgagaaagtttataactgaaaaaatgggaaataagtatcttcaaagaactggagttaatttgaaagatgcatataaaggatccaatgccagaactccgctgatacttattcaaactcatgggatcgaccttaccaatatcctcctgagatttgcacaagagttaaaaggaacaacacatcatgtgaccataatttctctgggccgtgaccaagcagctaaagctgaagacctcattttaaaggcactaacaaaaacacaacaatgggtcttcctccagaactgccatcttgcaacatcatttatgccaaggctttgcacaattgtagaatcttttaatagtccaaacgtgacaatagaccctgagtttcggctatggttaagctcaaaatcatacagttcttttccaattcctgttcttaaaaagggtttaaagattgccgtggaatctccccagggattgaaaagtaacttacttcagacatttggatgtactgggagtggagaggtaacagaagagatatttgaaaatcctgactgtggacaatggtggaaaaaacttttatttagcctatgttttttcaatgctgtaatcaatgaaagaaaaaattacggaatattgggctggaatattgcttataaatttaattcttcagacttgggggttgccattaaggtgttggaaaattccctgagaggacagcccagcatttcgtggcaagcactgcgctacctgattggagaagtgatttacggtggccgggtgattgataattgggacaagcgatgcttgaagaccctactctacaaattttgtaatcctgaagtgctgaaagatgacttcagtttctccagatctgcaagcataaaggactacatacacattatccagtccttacctgatgatgaccttcccgaggtcttaggaatacacccagaggccatcaggagctgctgggagacccagggcgaaaagtttattgaaaatctgattgccatgcaaccaaaaactaccactgccaacctcatgatcagacctgagcagagtaaggatgaactggtgatggaaattctatccgacttgctaaagcggctgccactgacagtggagaaagaagaaattgctgttggaactccaagcacattgaagagcatgatgtcaagctccatttgggagtctctttctaaaaatctcaaagatcacgacccccttatccattgtgtcttgctaacctttttgaagcaagaaattaaacgatttgataagttattatttgtcatacataaatccttaaaagatcttcagcttgctataaaaggagagatcatcctcacccaagaattggaggaaatatttaactcttttcttaatatgagagtgcctacattgtggcagaaacacgcctacagatcttgtaagccactgagttcctggattgatgatctcatccagcgactgaatttcttcaatacttgggccaaagtggcttatactgcaatacagcgtcggtatatgagatttgtcacagtttggaagcagtctattccatcaactagccaaaaatgcaaacaccctgaggattcagagaacaatttctttgaagggtttccttcaagatactggctcccagctttcttctttccacaagcctttcttgctgctgtgcttcaagactatgggaggtcccgaggaatcgctgtggatgccctcaccttcacccaccatgtgatttccaacaccactgacaaggatgagaagttctccgtatttatgccaaagaaactcaacatagtcaggagagcgtttaagggctcagcttcctctcacactggagtttacatttttggtttattcatcgagggggcaagatggaatcgtgaacagaaaatactggaagactcgctgcctctggagatgtgctgtgattttcccgacatatactttttgccaacaaagatttctaccaaaacaccaaatgcttccaaccagacagattcagaactctatgcttttgaatgcccagtttaccagacacctgagaggtcaagaattttggcaactaccggtttaccaacaaactttttaacatcagtgtatttatcaacgaagaaacctcctagtcactggatcacaatgcgggttgcattgctttgtgagaagaatgaaaaataa

SEQ ID NO: 128518 - DNA, 898 bp, Homo sapiens
  Payload ID: 5154
  Gene Symbol: DNAH14
  Gene Name: dynein, axonemal, heavy chain 14
  ENST ID: ENST00000450490
  CDS Start-End: 1-898
gcactggggtcagtcacagggcagacggagaaaggggaactgtgggcatcaacctaccaactggtgaatgttccatctttggatattttgtggatatagagcaatgtgaattcataccttggtcagatttagttcctaatgatcagacactaattcaaagaggaacttcattactaactaatcttcaaagatctggcggaaacttcttgaagataacagaatgtggagaatgcattaattataccgctaccagagacacaacatgcctttcttttctcatgagccttcttttaaagaattcctgccctgtacttctcacaggagaatctggtgttgggaaaactgctgccattaatcaaatgcttgaaaagctagagggtccaggagcatttgacataaaacatggttcaattttaggagacaccctattatatagtgaaataaaaaaatcaagtagcctaaaacagaatatcaccatcttgattcctgaaactcataagacagcaactggaagttcagataatcccactaaaaagccagaagttagaactaataaaaagttacttaaaaataatgatcataaaggagttgtagtctctacaataaattttagcaccaatgtaacagctgccaaaaccaaggagatgattcttaagaagttaataagaagaactaaagatactcttggagcaccaaaaaacaaccggattctaatatttattgatgatatgaatatgccagtatcagatatgtatggagcacagccacccctggaattgataagacaattgttagatttgggaggagtttatgatactgaaaaaaatacatggaagaatattcaagatctgtctatagttgcagcttgtgttccagttgtgaatgatatcagcccacg

SEQ ID NO: 128519 - DNA, 10524 bp, Homo sapiens
  Payload ID: 5154
  Gene Symbol: DNAH14
  Gene Name: dynein, axonemal, heavy chain 14
  Uniprot ID: Q0VDD8
  ENST ID: ENST00000445597
  CDS Start-End: 1-10524
atggggaggcgatcacagtggatctgggctatgaggtgtcagatgctggtaccagtcctaagtctgcacataggactggctcgtgctctgggatgtggctgcattgcttccaagatagaatgcctcataagatgtaatgcaccctttcctctgctggatgctgttggttctgtggcatcacaggagttgcagtctctgactggcaccgtcggtgtcacatcgggggccgccgcgtacccgcggtggaatctcgcaagagccagggcccctcctcacctgcccggcacccaggatcccttgcgccgcgttcgggaccccacccccattgtggcctcttcgccagggcgcaggcgtggctcttggtcaggcggttacggccaggaggcgtcggagcctggcgtggtagggctgtgctgcgcggtccttcccattcaccctagtctggcgctcgccggcgtgggcgggccggaccttcgccgcttccaggaagggccacaacggccgtcggaccacggcgcggcggaaaaacatatggagacgtttatacccattgatttgacaactgaaaatcaagagatggacaaggaggaaaccaagacaaaaccaagacttttaagatatgaagagaaaaaatatgaagatgtgaaaccattagagactcaaccagctgaaatagcagaaaaggaaacattggaatataaaacagttagaacattctctgaatctttgaagtcagagaaaacagaagaaccaaaagatgatgatgtgataagaaatattattaggctacgagaaaagcttggttggcaaactatattaccgcagcacagtttgaaatacggaagctccaaaattgcaattcagaagattactttaaagaaacctttggaagatgatggagaatttgtttattgccttcctcggaaaagtcctaaatccctttacaatccatatgatcttcaggtagtatcggctcatactgctaaacattgcaaagaattttgggttattactgcttcatttatctcaaagctggatagttctcgaacatattctctagatgaattttgtgaagagcagttacagcaagctacccaggcattgaaacaacttgaggacatcaggaataaagcaatttcagagatgaaaagtacttttctaaaggttgcagaaaagaatgaaatcaaagagtattttgagtcaaaactctctgaagatgacacaacacatttcaagctgcctaaatatagacgtttattagaaacatttttcaagtttgtaatgctggttgactacatatttcaggaactcattcgtcaacttatgaacactgcagtcacactacttttggaattatttaatggttctgctggaatgccattttcagtggaaaaaaagaatgaaaatcttatcagaacattcaaggacaactcttttcctactggaaagacaacaaatgattgtgaagaacttgttgataattcaaagttacatgctatttctgttcaaaagtcagaagtaaaaacagacactgatattaatgagattttgaatagtgttgaagtggggaaggatttgagaaaaacatatgcaccaatatttgaagtaaatctatgcttgagaattcctgctgagagtgattcttcagaaaattctaaagagaactttcatgagtctgaccagtgccctgaagagtgtgtgatgtttgaagatgaaatgtcagaaaataaagacaattgtgtcaaaaaacactcaagtgaagaattgctcccaaaagccaagaaatcaaaagaaattagttacaatcttgaagatattatttcagccacaattactcctctttgccaagatccccagctgtctatcttcattgatttggtttcaataatggatttacctaataagacaggaagcataatacattataaagagcagaccagatggccagattgtcacatcctttttgaaacagatcctgcctaccaaaatataattgtgaatctcctgactattattggtaattcaatgggcctagttaatgcttacagccacaagtttataaagtattgtaccatgacagaaaaggccaaaatcatgagtatgaaaatatcatctatgggagaattaacttcaaaagaatttgaagctattctaaatagattcagaaactattttagacatattgtgaatatggccattgagaagcgtattggtattttcaacgttgttgtggaatcatcattgcagcagctggaatgtgatcccactgaaatagaagaatttctggagcattttatttttttgaatgcaatttcctcaaaaatatctaaattagaaaaagagttcttaacaatgtctcagctatattctgttgcaaagcatcaccagatccatatttcagaagagcaaattgccatattccaagttcttcttcttaagtttagtcaactaaaatcatctatgaagttaagtaaaataaataaagacactgctataactaaattcagagataacttggaagcatgtatcagtggtctacatgttgatgttggcaatttaaaagccaagataagaactcctcttctgttatgtgctggtactcaagtgtcaacagcaatggaaatgatccagactctctcaggggaagctgcaagtttaactaacaaagctaaagcatattcacattatcaggattgtttcagtgattctcaatctcatatgcattctgttaatgtggaagaaattacacagattgtgctttcagagatctctgacattgaaggtgacttgactttgaggaaaaaactatgggaagcacaagaggagtggaagcgagcctcttgggaatggaggaatagttctcttcaaagtattgatgtagaatcagtacagagaaatgtttcaaaactgatgcacataatctcggtactagaaaaagagatttactctatcttcataattccatctatagatgacatatcagctcagttagaagagtctcaagtcatacttgcaacaattaaaggatctccccacattgggcccattaagagccagatcatgttttataatgattgtgttaaaagttttgtgagttcttattcaagagaaaaattggaaaaagtccacgctggtctgatgtgtcatctagaagaggttgcagacctggtagtgctggatactagtaactctcgaacaaaagctatactaggggcattgcttatcctttatgttcactgcagagatatagtgataaatttactacttaaaaatatcttcaatgcagaggattttgagtggacaagacatttgcaatataaatggaatgaaaaacaaaagttgtgctatgtgtctcaaggaaatgccagctttacttatggctatgagtacttgggctgtacctcaagattggttattacgcctctcacagaccgatgctggctgactctcatggaagcactacacttgaatctaggaggctgtcctgccggtccagctggtacaggaaaaactgagactgtcaaagatctagcaaaatgtgctctgtttgcatttaaatgtaacacagccttaataaagcttccaaactcacttatagttttaacatgctttggactagagaaaacagtgctagtgatgaatactgtaatgtcttttaggtttgtactggaaggaaaagaaattcgtatcaatatgtcttgtgcggtatttatcaccatgaatcccagatacggaggtggagtagagctcccagataacttaaaatctctgtttcgcccagtggcaatgatggtgccccattatcaaatgattgctgaaataatattgttttcatttggtttcaaatctgcaaattcactctctggaaagctaactaacctttatgaattagcgcgcaaacagctctcacaacaggatcattataattttggcttgagatctctgaagatagttttaataatggctggaacgaagaaacgggagtttaaatgtgataccagtgacagtctttctgaagcagatgaaaccttgattgttatcgaggctataagagaagctagtttgccaaaatgtcctcctgaagatgtcccactttttgaaaatattataggagatatttttccagaagtgacagttttgaaagtaaatcaacttgccttggagaaagtaatatatactgcaactcagcaattgggtttacaaaactggtcatctcagaaagagaagattatacagttttataatcaacttcaggtttgtgttggtgtgatgttagtgggcccaacaggtggaggaaagacaacagtcagaagaattttggaaaaagcattaacgctattaccaattgcagacttcttatcagttgcagaaagaaaatctgcttcaaagatttcagaaagaaaaggaaaagtagatatttgtgttttaaatccaaagtgtgtcactctcagtgaactatatggacaactggatcctaatactatggaatggactgatggattattatcagcaacaattcgaagttatgtatattttaacacaccaaagaacacaaagaaagacattgatctcagactaaagtcaagaatctcagatttatccaatgttttcaaacttgattcctctgatacaacagagactgatgataatatttttgaggagatagagaaagttgttaaaattccagaaaatcacaattttgattggcagtggattatcctagatggcccagtggacaccttttgggtagaaaatctgaactctgtgctagatgatactagaacattgtgcctagcaaacagtgagagaatagctttaactaataaaataagagtgatttttgaagtggacaatctctctcaggccagtcctgctactgtcagccgatgtgccatggtctatatggatcctgttgatctgggatgggaaccttatgttaagtcatggcttctgaaaacttctaaaattataagtcaatcaggagtggattgtcttgaattcatgattaaaaatagtgtcacagacggactacaatttataaggaatcgtcagaaatttcagccatatcctatggaggacataacagtcgtcataaccctctgcagaattcttgatgctttctttgacttcatgggtaaaaatggaggatttgaacaaagtgatgatttgaatgacacgtcatctaaggaggcaaattcccaaagagagtctgtcacattcaaggatatagaaaagagggatgaaaatacatggtatccagagaaaaatcctgataaattaacaaaaattattcaaaagctttttgtgtttgcctttacttgggcatttggaggagctttaaaccgtgaagatgaacacagagaaaatataccattttgtcccagtcttgaacctgattctcttgcaaaagtaacatacgattttgacaaacttgttcatgaattatttggaaacagttcacaagtaggcatcaacctaccaactggtgaatgttccatctttggatattttgtggatatagagcaatgtgaattcataccttggtcagatttagttcctaatgatcagacactaattcaaagagataatcccactaaaaagccagaagttagaactaataaaaagttacttaaaaataatgatcataaaggagttgtagtctctacaataaattttagcaccaatgtaacagctgccaaaaccaaggagatgattcttaagaagttaataagaagaactaaagatactcttggagcaccaaaaaacaaccggattctaatatttattgatgatatgaatatgccagtatcagatatgtatggagcacagccacccctggaattgataagacaattgttagatttgggaggagtttatgatactgaaaaaaatacatggaagaatattcaagatctgtctatagttgcagcttgtgttccagttgtgaatgatatcagcccacgtcttctcaaacacttttccatgctggtattacctcatccttcacaagacatcttatgtactattttccagattggaatagatggatgtgggaaaaaaacatgtgcaaccttggcctgttatttgacagataataaactataccgagtgcctatatctcacaaatgtgcctacatcgaattcaaagaagtctttaaaaaggtgtttattcacgcaggattaaaagggaaacccactgttctgatggttcccaatttaaacatagaacaagactcatttttagaagatttgaactacatcatcagttcaggaagaatacctgacctgtttgaaaatgttgagctggattctattgcaatgaaaatcagatatcttactgaacaatctggtcatatggataataggcaatctttactttcattctttcaaaagagaatatataaaaatcttcatatttttgtgatcatgagtcctgaaggacctagcttccgccaaaattgtagagtgtatccttctatgattagctcctgcacgatcgattggtatgagaggtggccagaagaagctctccttattgtagctaactcattcttaaaagaaaaggtcaattttgagaacagagagaacttgaaagaaaaacttgccccaacatgtgtccaaatccacaaaagcatgaaagacttgaacagaaaatactttgaagaaactggaagattttattataccactcccaatagctacttgcaatttatggaaacatttgcacacattttgagggcacgagaggaagagatgcaaacaaagagggatcgcttccatatgggtctatccacaatcctggaagcaaccactctagttacagaaatgcaagaagagctcttgattcttggccctcaagtagaacaaaaaacaaaggaaacagaaactctaatggaaaaactacggaaagattcacaagtagttgagaaagttcagatgcttgttaaacaggatgaagaaattgtggcagaagaagtaagaattgtggaagattatgctcagaaaactgccaatgaactaaaaagtgtgctgccagcctttgacaaggcaattgtggctctgaatgccctggataaagctgatgtcgctgaattaagagtatacacacggcctcccttccttgtactgactgtcatgaatgcagtgtgtattcttctgcaaaagaaacctaactgggcaacggcaaagttacttctttcagaaactggtttcctgaaaaaattgattaaccttgacaaggacagcatacctgataaggttttcgtgaagctaaaaaaaattgtaaccttacctgatttcaacccacacaagatttcgctggtttctgttgcttgttgctccctgtgccagtgggttatagctttgaataactaccatgaagtacagaaggttgtgggccctaaacaaatccaagtagctgaagctcaaaacgtccttaaaattgcgcgacaaagacttgctgagaaacaaagaggtttacagctgatcagccgatggcataatcagggactgcctcatggtcagtattcagtagagaatgccatcttgatcaagaatggccagcagtggccactgctgattgacccacataggcaagctcacaaatggatccgtcagatggaaggatccaggctgcagaagctctccattgaagacagcaattataccaaaaaaattgaaaatgctatgaagacaggagggagtgtcctcctgcagtcctgtcaagcttctacatggaggaaaaagttatacttatctacagaaatagacaacccccattttcttccatcagtttataactttgttactatgatcaacttcactgtaacattccaaggtttgcaagatcaactcttgtctactgtggtaactcatgaagttcctcatttagaagatcaacgttccaagttactggagagtatttcccttgatgccataactcttgaagaactagaggaaaaaacattaaatttactgcagaaagcactaggatccatattagatgatgacaaaattgtagataccttaagaaaatccaaaatgacatcaaacgaaatttcaaagcgcatcgaagcaacaaaaaaagctgaaagtgaaatccaagcaatacgtaaaaactatctccccattgcgacccgaggcgccctgctctacttcctagtagctgatctcacacaaatcaactacatgtaccagttctccctagactggtttcatcaggtttttgtttcatcagtagtttccaaaagcaaagaacaagaacatagttttaaaagggagaaagtgtctccaaaagaagttcatgagtttataagtatttcaaaagaacccaacctggaaaatgagaaaaatctcttagataagcatattaaaagtgcaatagacatgttgacaaaaagtatttttaaggtggtttcttcagctctatttaatgaagataaactttgcttctcttttcggctttgcactgtaatcatgcaaaacaatgctaatggaaatctaatacaggatgacattggattcctaccagaagaagaatggaacatctttttatattctggcatattgataaatattaaaagtgcattatcccagtctagacttactagcacatttgaaataggtgaaagtcaacatcttcagtggctgtcagattccaggtggaggcagtgccaatatgtcagcactcacctggaaccattttcacttctgtgcaaatcccttttatcaaacgtatcacaatgggatacttttaagaacagtaaagcagtttattctctgatcagcacacctttctcttcagaaaatgcttcattggaggaaaatacaaaaccaccagaggaaaaacatactttctgcctgcttctccgtgccataaaccatacaggaacagaccttggtcctgtagggagaggccaatggctgaccagcactgcttgtgacaggcacactgacgtgtgtagcttcagttttgctttaaatgatggagtcccagatgttgaacatgttcaggacatattttatggtcattgtgtagacaaatatcatgtaaaagttcttagaccagaaagtttaaacaattcagtgagaaagtttataactgaaaaaatgggaaataagtatcttcaaagaactggagttaatttgaaagatgcatataaaggatccaatgccagaactccgctgatacttattcaaactcatggatctgcaagcataaaggactacatacacattatccagtccttacctgatgatgaccttcccgaggtcttaggaatacacccagaggccatcaggagctgctgggagacccagggcgaaaagtttattgaaaatctgattgccatgcaaccaaaaactaccactgccaacctcatgatcagacctgagcagagtaaggatgaactggtgatggaaattctatccgacttgctaaagcggctgccactgacagtggagaaagaagaaattgctgttggaactccaagcacattgaagagcatgatgtcaagctccatttgggagtctctttctaaaaatctcaaagatcacgacccccttatccattgtgtcttgctaacctttttgaagcaagaaattaaacgatttgataagttattatttgtcatacataaatccttaaaagatcttcagcttgctataaaaggagagatcatcctcacccaagaattggaggaaatatttaactcttttcttaatatgagagtgcctacattgtggcagaaacacgcctacagatcttgtaagccactgagttcctggattgatgatctcatccagcgactgaatttcttcaatacttgggccaaagtggcttatactgcaatacagcgtcggtatatgagatttgtcacagtttggaagcagtctattccatcaactagccaaaaatgcaaacaccctgaggattcagagaacaatttctttgaagggtttccttcaagatactggctcccagctttcttctttccacaagcctttcttgctgctgtgcttcaagactatgggaggtcccgaggaatcgctgtggatgccctcaccttcacccaccatgtgatttccaacaccactgacaaggatgagaagttctccgtatttatgccaaagaaactcaacatagtcaggagagcgtttaagggctcagcttcctctcacactggagtttacatttttggtttattcatcgagggggcaagatggaatcgtgaacagaaaatactggaagactcgctgcctctggagatgtgctgtgattttcccgacatatactttttgccaacaaagatttctaccaaaacaccaaatgcttccaaccagacagattcagaactctatgcttttgaatgcccagtttaccagacacctgagaggtcaagaattttggcaactaccggtttaccaacaaactttttaacatcagtgtatttatcaacgaagaaacctcctagtcactggatcacaatgcgggttgcattgctttgtgagaagaatgaaaaataa

SEQ ID NO: 128520 - DNA, 589 bp, Homo sapiens
  Payload ID: 5154
  Gene Symbol: DNAH14
  Gene Name: dynein, axonemal, heavy chain 14
  ENST ID: ENST00000433124
  CDS Start-End: 1-380
cattggaatataaaacagttagaacattctctgaatctttgaagtcagagaaaacagaagaaccaaaagatgatgatgtgataagaaatattattaggctacgagaaaagcttggttggcaaactatattaccgcagcacagtttgaaatacggaagctccaaaattgcaattcagaagattactttaaagaaacctttggaagatgatggagaatttgtttattgccttcctcggaaaagtcctaaatccctttacaatccatatgatcttcaggtagtatcggctcatactgctaaacattgcaaagaattttgggttattactgcttcatttatctcaaagagatacttggtcatttgtggagcagtttatatataagaatctccttgggagcatgttatttaatagtgaagtttttccttttgtgtagagatttaggtttgaagattcaactttaataaattttttcatctatcaaatactttgttaatacttggggtaaatttttacaggaagaactacaaaacaagcatttgctagcttaatgggaactataataataaagaaaagaatattctttattggca

SEQ ID NO: 128521 - DNA, 13763 bp, Homo sapiens
  Payload ID: 5154
  Gene Symbol: DNAH14
  Gene Name: dynein, axonemal, heavy chain 14
  Uniprot ID: Q0VDD8
  ENST ID: ENST00000430092
  CDS Start-End: 216-13763
agggcgcaggcgtggctcttggtcaggcggttacggccaggaggcgtcggagcctggcgtggtagggctgtgctgcgcggtccttcccattcaccctagtctggcgctcgccggcgtgggcgggccggaccttcgccgcttccaggaagggccacaacggccgtcggaccacggcgcggcggccagttcctttatagttttgttcagaaaaacatatggagacgtttatacccattgatttgacaactgaaaatcaagagatggacaaggaggaaaccaagacaaaaccaagacttttaagatatgaagagaaaaaatatgaagatgtgaaaccattagagactcaaccagctgaaatagcagaaaaggaaacattggaatataaaacagttagaacattctctgaatctttgaagtcagagaaaacagaagattaccttagagaaagtataattcaacaacatatggtttctccagagccagcttcccttaaggagaaagggaagtcaaggagaaaaaaggatcaaactcatgcttgtccaaatgttaggaaagccaggcctgtgtcctatgatagaacagaaccaaaagatgatgatgtgataagaaatattattaggctacgagaaaagcttggttggcaaactatattaccgcagcacagtttgaaatacggaagctccaaaattgcaattcagaagattactttaaagaaacctttggaagatgatggagaatttgtttattgccttcctcggaaaagtcctaaatccctttacaatccatatgatcttcaggtagtatcggctcatactgctaaacattgcaaagaattttgggttattactgcttcatttatctcaaaggttattaatatagttggtagtgtaaaggaagtagaactcatacctactttggaatggctatcagaaagaagacattactatttattacggcaattcaagatattttctgatttccgaatgaataaagcatttgttacctggaaattgaatgttaaaagaattaagacagagaagagcaggtcatttttgtaccaccatctttttttggctgatgacttgtttcaaacctgtttggtttatataagaggactttgtgaagatgcaattaatctcaaaaattataatgaccatgaaaataatctatctgccatatgccttgtaaagctggatagttctcgaacatattctctagatgaattttgtgaagagcagttacagcaagctacccaggcattgaaacaacttgaggacatcaggaataaagcaatttcagagatgaaaagtacttttctaaaggttgcagaaaagaatgaaatcaaagagtattttgagtcaaaactctctgaagatgacacaacacatttcaagctgcctaaatatagacgtttattagaaacatttttcaagtttgtaatgctggttgactacatatttcaggaactcattcgtcaacttatgaacactgcagtcacactacttttggaattatttaatggttctgctggaatgccattttcagtggaaaaaaagaatgaaaatcttatcagaacattcaaggacaactcttttcctactggaaagacaacaaatgattgtgaagaacttgttgataattcaaagttacatgctatttctgttcaaaagtcagaagtaaaaacagacactgatattaatgagattttgaatagtgttgaagtggggaaggatttgagaaaaacatatgcaccaatatttgaagtaaatctatgcttgagaattcctgctgagagtgattcttcagaaaattctaaagagaactttcatgagtctgaccagtgccctgaagagtgtgtgatgtttgaagatgaaatgtcagaaaataaagacaattgtgtcaaaaaacactcaagtgaagaattgctcccaaaagccaagaaatcaaaagaaattagttacaatcttgaagatattatttcagacacagaaattgagactgagtttgagaataaatacatgtattatgaatttccagaatttcctacaaatctctttatagatcccaacagattggagttttcagtaaaaattcaaaatatgttgactaatatggaaaaatgtataaccacaattactcctctttgccaagatccccagctgtctatcttcattgatttggtttcaataatggatttacctaataagacaggaagcataatacattataaagagcagaccagatggccagattgtcacatcctttttgaaacagatcctgcctaccaaaatataattgtgaatctcctgactattattggtaattcaatgggcctagttaatgcttacagccacaagtttataaagtattgtaccatgacagaaaaggccaaaatcatgagtatgaaaatatcatctatgggagaattaacttcaaaagaatttgaagctattctaaatagattcagaaactattttagacatattgtgaatatggccattgagaagcgtattggtattttcaacgttgtaagtcttgattatcaatcagaatgcttactgtatattgacaacgtcatacatatgagccacaccctcatacaatctgtaattgaaaaaaagaacaaaaatttattggaagttgtggaatcatcattgcagcagctggaatgtgatcccactgaaatagaagaatttctggagcattttatttttttgaatgcaatttcctcaaaaatatctaaattagaaaaagagttcttaacaatgtctcagctatattctgttgcaaagcatcaccagatccatatttcagaagagcaaattgccatattccaagttcttcttcttaagtttagtcaactaaaatcatctatgaagttaagtaaaataaataaagacactgctataactaaattcagagataacttggaagcatgtatcagtggtctacatgttgatgttggcaatttaaaagccaagataagaactcctcttctgttatgtgctggtactcaagtgtcaacagcaatggaaatgatccagactctctcaggggaagctgcaagtttaactaacaaagctaaagcatattcacattatcaggattgtttcagtgattctcaatctcatatgcattctgttaatgtggaagaaattacacagattgtgctttcagagatctctgacattgaaggtgacttgactttgaggaaaaaactatgggaagcacaagaggagtggaagcgagcctcttgggaatggaggaatagttctcttcaaagtattgatgtagaatcagtacagagaaatgtttcaaaactgatgcacataatctcggtactagaaaaaggtttacctaaaagcgatatggtaacacatcttaagcaagtggtaacagagtttaaacaagagctgcctatcattatagctctgggaaatccctgtctcaagccaaggcattgggaggctctccaggagattattgggaagtcagttccgcttgataaaaactgtaaagtagagaatcttctagctctcaagatgtttcagtatgaaaatgaaataaatgatatgtcaacctcagcaactaatgaagctgctcttgaaaaaatgctatttaagattattgatttttggaacactactcctttgcctttaattcttcaccacacagagatttactctatcttcataattccatctatagatgacatatcagctcagttagaagagtctcaagtcatacttgcaacaattaaaggatctccccacattgggcccattaaggatcttgtgaatgaatgggatcaaaacttgactctcttctcttacacccttgaggaatggatgaattgtcaaagaaattggctttatcttgaaccagtctttcattcttcagaaatacgaaggcaactcccagcagaaacagaacttttctctcaagtgatttccatgtggaaaaaaataatgtcaaaaatacaaaacaaacagaatgctttgcagataaccacttctgcaggagtccttgaaattctgcaaaattgtaatatacatcttgaacatataaagaaaagccttgaggattaccttgaagttaaaagattaattttcccaagattttactttcttagcaatgccgagcttcttgatattctagctgatagcagaaatcctgagtctgtacagcctcatcttgtgaaatgctttgaaaatataaaacaattattgatatggaaacaagacattggccctcctgctgtaaaaatgctaatatctgctgaaggggaaggtctcgtgctgccaaagaaaattcgtgtaagaagtgctgtagaacagtggctggtaaatgtagaaaaaagcatgttcgatgtgctaaaaaaagagagatatatatataacattatcttactttttcagagccagatcatgttttataatgattgtgttaaaagttttgtgagttcttattcaagagaaaaattggaaaaagtccacgctggtctgatgtgtcatctagaagaggttgcagacctggtagtgctggatactagtaactctcgaacaaaagctatactaggggcattgcttatcctttatgttcactgcagagatatagtgataaatttactacttaaaaatatcttcaatgcagaggattttgagtggacaagacatttgcaatataaatggaatgaaaaacaaaagttgtgctatgtgtctcaaggaaatgccagctttacttatggctatgagtacttgggctgtacctcaagattggttattacgcctctcacagaccgatgctggctgactctcatggaagcactacacttgaatctaggaggctgtcctgccggtccagctggtacaggaaaaactgagactgtcaaagatctagcaaaatccttaggcaaacattgtgtggtcttcaactgttttgaggatttggattataagatagtgagaaaatttttctttggactagttcagtcaggagcatggagttgttttgatgaattcaatctaattgatttggaagttctctctgtcattgcctcacagatcctaacaattaaggctgcaaaagacaactattctgccaggtttgtactggaaggaaaagaaattcgtatcaatatgtcttgtgcggtatttatcaccatgaatcccagatacggaggtggagtagagctcccagataacttaaaatctctgtttcgcccagtggcaatgatggtgccccattatcaaatgattgctgaaataatattgttttcatttggtttcaaatctgcaaattcactctctggaaagctaactaacctttatgaattagcgcgcaaacagctctcacaacaggatcattataattttggcttgagatctctgaagatagttttaataatggctggaacgaagaaacgggagtttaaatgtctttctgaagcagatgaaaccttgattgttatcgaggctataagagaagctagtttgccaaaatgtcctcctgaagatgtcccactttttgaaaatattataggagatatttttccagaagtgacagttttgaaagtaaatcaacttgccttggagaaagtaatatatactgcaactcagcaattgggtttacaaaactggtcatctcagaaagagaagattatacagttttataatcaacttcaggtttgtgttggtgtgatgttagtgggcccaacaggtggaggaaagacaacagtcagaagaattttggaaaaagcattaacgctattaccaattgcagacttcttatcagttgcagaaagaaaatctgcttcaaagatttcagaaagaaaaggaaaagtagatatttgtgttttaaatccaaagtgtgtcactctcagtgaactatatggacaactggatcctaatactatggaatggactgatggattattatcagcaacaattcgaagttatgtatattttaacacaccaaagaacacaaagaaagacattgatctcagactaaagtcaagaatctcagatttatccaatgttttcaaacttgattcctctgatacaacagagactgatgataatatttttgaggagatagagaaagttgttaaaattccagaaaatcacaattttgattggcagtggattatcctagatggcccagtggacaccttttgggtagaaaatctgaactctgtgctagatgatactagaacattgtgcctagcaaacagtgagagaatagctttaactaataaaataagagtgatttttgaagtggacaatctctctcaggccagtcctgctactgtcagccgatgtgccatggtctatatggatcctgttgatctgggatgggaaccttatgttaagtcatggcttctgaaaacttctaaaattataagtcaatcaggagtggattgtcttgaattcatgattaaaaatagtgtcacagacggactacaatttataaggaatcgtcagaaatttcagccatatcctatggaggacataacagtcgtcataaccctctgcagaattcttgatgctttctttgacttcatgggtaaaaatggaggatttgaacaaagtgatgatttgaatgacacgtcatctaaggaggcaaattcccaaagagagtctgtcacattcaaggatatagaaaagagggatgaaaatacatggtatccagagaaaaatcctgataaattaacaaaaattattcaaaagctttttgtgtttgcctttacttgggcatttggaggagctttaaaccgtgaagatgaacacagagaaaatataccattttgtcccagtcttgaacctgattctcttgcaaaagtaacatacgattttgacaaacttgttcatgaattatttggaaacagttcacaagtaggatggaagcactggggtcagtcacagggcagacggagaaaggggaactgcatcaacctaccaactggtgaatgttccatctttggatattttgtggatatagagcaatgtgaattcataccttggtcagatttagttcctaatgatcagacactaattcaaagaggaacttcattactaactaatcttcaaagatctggcggaaacttcttgaagataacagaatgtggagaatgcattaattataccgctaccagagacacaacatgcctttcttttctcatgagccttcttttaaagaattcctgccctgtacttctcacaggagaatctggtgttgggaaaactgctgccattaatcaaatgcttgaaaagctagagggtccaggagcatttgacataaaacatggttcaattttaggagacaccctattatatagtgaaataaaaaaatcaagtagcctaaaacagaatatcaccatcttgattcctgaaactcataagacagcaactggaagttcagataatcccactaaaaagccagaagttagaactaataaaaagttacttaaaaataatgatcataaaggagttgtagtctctacaataaattttagcaccaatgtaacagctgccaaaaccaaggagatgattcttaagaagttaataagaagaactaaagatactcttggagcaccaaaaaacaaccggattctaatatttattgatgatatgaatatgccagtatcagatatgtatggagcacagccacccctggaattgataagacaattgttagatttgggaggagtttatgatactgaaaaaaatacatggaagaatattcaagatctgtctatagttgcagcttgtgttccagttgtgaatgatatcagcccacgtcttctcaaacacttttccatgctggtattacctcatccttcacaagacatcttatgtactattttccaggctcatttgggaatttatttctccatcaataacttcacacctgaagttcagaaaagtaaggatcagataatatcttgttccctagctatataccatcaagtacgtcagaatatgttaccaactccaacaaaatgtcactacatgtttaatcttcgagatatgtttaagcttctcctaggattgctgcaagctgacaggactgttgttaactccaaagagatggctgctctgctctttgttcatgaagccacccgagtatttcacgatcgcttaattgatttcactgataaaagccttttctatcggttgctttcaagggaacttgagaactgttttcagattggaatagatggatgtgggaaaaaaacatgtgcaaccttggcctgttatttgacagataataaactataccgagtgcctatatctcacaaatgtgcctacatcgaattcaaagaagtctttaaaaaggtgtttattcacgcaggattaaaagggaaacccactgttctgatggttcccaatttaaacatagaacaagactcatttttagaagatttgaactacatcatcagttcaggaagaatacctgacctgtttgaaaatgttgagctggattctattgcaatgaaaatcagatatcttactgaacaatctggtcatatggataataggcaatctttactttcattctttcaaaagagaatatataaaaatcttcatatttttgtgatcatgagtcctgaaggacctagcttccgccaaaattgtagagtgtatccttctatgattagctcctgcacgatcgattggtatgagaggtggccagaagaagctctccttattgtagctaactcattcttaaaagaaaaggtcaattttgagaacagagagaacttgaaagaaaaacttgccccaacatgtgtccaaatccacaaaagcatgaaagacttgaacagaaaatactttgaagaaactggaagattttattataccactcccaatagctacttgcaatttatggaaacatttgcacacattttgagggcacgagaggaagagatgcaaacaaagagggatcgcttccatatgggtctatccacaatcctggaagcaaccactctagttacagaaatgcaagaagagctcttgattcttggccctcaagtagaacaaaaaacaaaggaaacagaaactctaatggaaaaactacggaaagattcacaagtagttgagaaagttcagatgcttgttaaacaggatgaagaaattgtggcagaagaagtaagaattgtggaagattatgctcagaaaactgccaatgaactaaaaagtgtgctgccagcctttgacaaggcaattgtggctctgaatgccctggataaagctgatgtcgctgaattaagagtatacacacggcctcccttccttgtactgactgtcatgaatgcagtgtgtattcttctgcaaaagaaacctaactgggcaacggcaaagttacttctttcagaaactggtttcctgaaaaaattgattaaccttgacaaggacagcatacctgataaggttttcgtgaagctaaaaaaaattgtaaccttacctgatttcaacccacacaagatttcgctggtttctgttgcttgttgctccctgtgccagtgggttatagctttgaataactaccatgaagtacagaaggttgtgggccctaaacaaatccaagtagctgaagctcaaaacgtccttaaaattgcgcgacaaagacttgctgagaaacaaagaggtttacagctggttgaagaacatttgctgtttttacaggcagcttacaaagataccgttgctgaaaaacaactattagcaaatcggaaaacaatggccagcaggcgctttcagtgtgcgtcagtcttactaactgtcctggaagatgagaagactcgatggcaagaaacaatcaatcaaatagataacaaattagaaggaattttgggtgacatacttctttcagcagcgtgcattgtctacagtggaattttaacaccagaatttcgccagttgattgtgaataaatgggagacattctgcattgaaaatggcatttctttgtcttccaaattctctttaattaaagttatggcacaaaaatatgagatcagccgatggcataatcagggactgcctcatggtcagtattcagtagagaatgccatcttgatcaagaatggccagcagtggccactgctgattgacccacataggcaagctcacaaatggatccgtcagatggaaggatccaggctgcagaagctctccattgaagacagcaattataccaaaaaaattgaaaatgctatgaagacaggagggagtgtcctcctgcagaatctccttgagacattagctccaggcttaaaggcaattctgaaaaaggatatctatcagaaaaaaggacactatttcataagggttggtgatgctgagttcgaatacaattcaaattttaggttatacttatctacagaaatagacaacccccattttcttccatcagtttataactttgttactatgatcaacttcactgtaacattccaaggtttgcaagatcaactcttgtctactgtggtaactcatgaagttcctcatttagaagatcaacgttccaagttactggagagtatttcccttgatgccataactcttgaagaactagaggaaaaaacattaaatttactgcagaaagcactaggatccatattagatgatgacaaaattgtagataccttaagaaaatccaaaatgacatcaaacgaaatttcaaagcgcatcgaagcaacaaaaaaagctgaaagtgaaatccaagcaatacgtaaaaactatctccccattgcgacccgaggcgccctgctctacttcctagtagctgatctcacacaaatcaactacatgtaccagttctccctagactggtttcatcaggtttttgtttcatcagtagtttccaaaagcaaagaacaagaacatagttttaaaagggagaaagtgtctccaaaagaagttcatgagtttataagtatttcaaaagaacccaacctggaaaatgagaaaaatctcttagataagcatattaaaagtgcaatagacatgttgacaaaaagtatttttaaggtggtttcttcagctctatttaatgaagataaactttgcttctcttttcggctttgcactgtaatcatgcaaaacaatgctaatggaaatctaatacaggatgacattggattcctaccagaagaagaatggaacatctttttatattctggcatattgataaatattaaaagtgcattatcccagtctagacttactagcacatttgaaataggtgaaagtcaacatcttcagtggctgtcagattccaggtggaggcagtgccaatatgtcagcactcacctggaaccattttcacttctgtgcaaatcccttttatcaaacgtatcacaatgggatacttttaagaacagtaaagcagtttattctctgatcagcacacctttctcttcagaaaatgcttcattggaggaaaatacaaaaccaccagaggaaactgaacttttgaatgaaaataaagaaacgtgtaatcctataaattttccctgggagaaactcacttcatttcaaagacttattttggtaaaagttcttagaccagaaagtttaaacaattcagtgagaaagtttataactgaaaaaatgggaaataagtatcttcaaagaactggagttaatttgaaagatgcatataaaggatccaatgccagaactccgctgatacttattcaaactcatgggatcgaccttaccaatatcctcctgagatttgcacaagagttaaaaggaacaacacatcatgtgaccataatttctctgggccgtgaccaagcagctaaagctgaagacctcattttaaaggcactaacaaaaacacaacaatgggtcttcctccagaactgccatcttgcaacatcatttatgccaaggctttgcacaattgtagaatcttttaatagtccaaacgtgacaatagaccctgagtttcggctatggttaagctcaaaatcatacagttcttttccaattcctgttcttaaaaagggtttaaagattgccgtggaatctccccagggattgaaaagtaacttacttcagacatttggatgtactgggagtggagaggtaacagaagagatatttgaaaatcctgactgtggacaatggtggaaaaaacttttatttagcctatgttttttcaatgctgtaatcaatgaaagaaaaaattacggaatattgggctggaatattgcttataaatttaattcttcagacttgggggttgccattaaggtgttggaaaattccctgagaggacagcccagcatttcgtggcaagcactgcgctacctgattggagaagtgatttacggtggccgggtgattgataattgggacaagcgatgcttgaagaccctactctacaaattttgtaatcctgaagtgctgaaagatgacttcagtttctccagatctgcaagcataaaggactacatacacattatccagtccttacctgatgatgaccttcccgaggtcttaggaatacacccagaggccatcaggagctgctgggagacccagggcgaaaagtttattgaaaatctgattgccatgcaaccaaaaactaccactgccaacctcatgatcagacctgagcagagtaaggatgaactggtgatggaaattctatccgacttgctaaagcggctgccactgacagtggagaaagaagaaattgctgttggaactccaagcacattgaagagcatgatgtcaagctccatttgggagtctctttctaaaaatctcaaagatcacgacccccttatccattgtgtcttgctaacctttttgaagcaagaaattaaacgatttgataagttattatttgtcatacataaatccttaaaagatcttcagcttgctataaaaggagagatcatcctcacccaagaattggaggaaatatttaactcttttcttaatatgagagtgcctacattgtggcagaaacacgcctacagatcttgtaagccactgagttcctggattgatgatctcatccagcgactgaatttcttcaatacttgggccaaagtggcttatactgcaatacagcgtcggtatatgagatttgtcacagtttggaagcagtctattccatcaactagccaaaaatgcaaacaccctgaggattcagagaacaatttctttgaagggtttccttcaagatactggctcccagctttcttctttccacaagcctttcttgctgctgtgcttcaagactatgggaggtcccgaggaatcgctgtggatgccctcaccttcacccaccatgtgatttccaacaccactgacaaggatgagaagttctccgtatttatgccaaagaaactcaacatagtcaggagagcgtttaagggctcagcttcctctcacactggagtttacatttttggtttattcatcgagggggcaagatggaatcgtgaacagaaaatactggaagactcgctgcctctggagatgtgctgtgattttcccgacatatactttttgccaacaaagatttctaccaaaacaccaaatgcttccaaccagacagattcagaactctatgcttttgaatgcccagtttaccagacacctgagaggtcaagaattttggcaactaccggtttaccaacaaactttttaacatcagtgtatttatcaacgaagaaacctcctagtcactggatcacaatgcgggttgcattgctttgtgagaagaatgaaaaataa

SEQ ID NO: 128522 - DNA, 681 bp, Homo sapiens
  Payload ID: 5154
  Gene Symbol: DNAH14
  Gene Name: dynein, axonemal, heavy chain 14
  ENST ID: ENST00000428003
  CDS Start-End: 1-658
gagatttgtcacagtttggaagcagtctattccatcaactagccaaaaatgcaaacaccctgaggattcagagaacaatttctttgaagggtttccttcaagatactggctcccagctttcttctttccacaagcctttcttgctgctgtgcttcaagactatgggaggtcccgaggaatcgctgtggatgccctcaccttcacccaccatgtgatttccaacaccactgacaaggatgagaagttctccgtatttatgccaaagaaactcaacatagtcaggagagcgtttaagggctcagcttcctctcacactggagtttacatttttggtttattcatcgagggggcaagatggaatcgtgaacagaaaatactggaagactcgctgcctctggagatgtgctgtgattttcccgacatatactttttgccaacaaagatttctaccaaaacaccaaatgcttccaaccagacagattcagaactctatgcttttgaatgcccagtttaccagacacctgagaggtcaagaattttggcaactaccggtttaccaacaaactttttaacatcagtgtatttatcaacgaagaaacctcctagtcactggatcacaatgcgggttgcattgctttgtgagaagaatgaaaaataaatgtccatatcaaaccattttaa

SEQ ID NO: 128523 - DNA, 478 bp, Homo sapiens
  Payload ID: 5154
  Gene Symbol: DNAH14
  Gene Name: dynein, axonemal, heavy chain 14
  ENST ID: ENST00000495456
  CDS Start-End: 1-207
gctgaaggggaaggtctcgtgctgccaaagaaaattcgtgtaagaagtgctgtagaacagtggctggtaaatgtagaaaaaagcatgttcgatgtgctaaaaaaatttttaagtcaagggattgaagactggaactgccagatgttttcccaatgggtgttatctcatccaggacaagtggtacttactgtgacatttgcaatataaatggaatgaaaaacaaaagttgtgctatgtgtctcaaggaaatgccagctttacttatggctatgagtacttgggctgtacctcaagattggttattacgcctctcacagaccgatgctggctgactctcatggaagcactacacttgaatctaggaggctgtcctgccggtccagctggtacaggaaaaactgagactgtcaaagatctagcaaaatccttaggcaaacattgtgtggtcttcaactgttttgaggatttggattataag

SEQ ID NO: 128524 - DNA, 428 bp, Homo sapiens
  Payload ID: 5154
  Gene Symbol: DNAH14
  Gene Name: dynein, axonemal, heavy chain 14
  ENST ID: ENST00000474801
  CDS Start-End: 1-393
gattaccttgaagttaaaagattaattttcccaagattttactttcttagcaatgccgagcttcttgatattctagctgatagcagaaatcctgagtctgtacagcctcatcttgtgaaatgctttgaaaatataaaacaattattgatatggaaacaagacattggccctcctgctgtaaaaatgctaatatctgctgaaggggaaggtctcgtgctgccaaagtatgataaatgttacaaactgtttagattctgtacaacgtcattatttaaaatctctgctttgaaatttttgatatattataaaagtgcgctaagcaaactgtttcttcaaagattatatccttacgtaaatatacttttgcctttccatattccctacaatacataatctcacctttgctctaattaaaagttgagaaagca

SEQ ID NO: 128525 - DNA, 13723 bp, Homo sapiens
  Payload ID: 5155
  Gene Symbol: DNAH17
  Gene Name: dynein, axonemal, heavy chain 17
  Uniprot ID: Q9UFH2
  ENST ID: ENST00000389840
  CDS Start-End: 126-13514
gtggcagttggagcccctcgagggaagggagccattttctttcctggtttgggaaagagttgctcatcagtttgcgggagaagctgtttgccttcagctgatacacagtgtaaggaaaggccaagatgacaatggccccggacgtcagactagagtatctggaggaagttgcctccatcgtcctgaagttcaagccggacaagtggagcaagctgataggcgccgaggagaacgtggccctgttcacagagttctttgaaaagcccgacgtccaggtgctggtgctgacgctcaatgcagccggcatgatcataccctgcctgggcttcccccagtccctcaagtccaaaggggtttacttcatcaagacaaagtccgagaacatcaacaaggacaactacagggcccggctcctttacggcgacatcagccccacacccgtggaccagctgatcgcggtggtggaggaggtcctctcttctctgttaaaccaaagtgagaacatggctggatggccccaggtggtctcggaagacatcgtgaagcaggtccacaggctgaagaatgaaatgtttgtgatgagtggcaagatcaaaggcaaaaccttgctgcctattccggagcacctgggcagcctggatggcacgctggagtccatggagaggatcccctcttcactggacaacttgctcctgcacgccattgaaaccaccatcatcgactggtcccaccagatccgggatgtgctgagcaaagactcagcccaggcgctgctggatgggctgcaccccctgccccaagtggagttcgagttctgggacactcggctgctgaacctcaagtgcatccatgaacagctaaacagacccaaagtgaacaagattgttgagatcctagagaaagccaaaagctgctactggccagccctgcaaaacgtttacaccaacgtcactgaagggctgaaggaagccaacgacatcgtgctctatttgaagcccctacggatcctgctggaggagatggaacaagccgacttcacgatgctccccaccttcattgccaaggtgctggacaccatctgcttcatctgggccacctctgagtactataacacacctgccaggatcatcgtcatcctgcaggagttctgcaaccaaatcatcgagatgacacgaaccttcctgagcccggaagaggtgctgaagggcctgcaaggtgaaatcgaggaagtcctgagtggcatctccctggctgtaaatgtgctgaaggagctctaccagacgtacgacttctgctgcgtgaacatgaagcttttctttaaggacaaagagcccgtgccttgggaattcccttcttctcttgccttttccaggataaattccttcttccagcgcatccagaccattgaggaactctataaaacagcaattgagtttctgaagctggagaaaatcgagcttgggggcgtgcgtgggaacctcctcgggagcctggtgacccgtatctatgatgaggtctttgagctggtgaaggtttttgccgactgcaaatatgatcccttggaccctggagactcgaattttgaccgtgattatgctgattttgagatcaaaatccaagacctggataggaggctggccacgatcttttgccaaggatttgatgactgcagctgtatcaagtcctccgcaaagctcctgtacatgtgtgggggcctcatggagcggcccctgattcttgccgaggtggcgcccaggtattcagtcatgctggagctgtttgacgctgagctagacaatgctaagatcttgtacgatgcccagatggcggcctccgaggaggggaacatccccctgatccacaaaaacatgcctcccgtggccgggcagctcaaatggagcctggagctgcaggagaggctagaggtgtccatgaaacacctgaagcacgtcgaacacccggtcatgtctggagcagaggccaagctgacctatcagaagtatgacgagatgatggagctgctgaggtgccaccgcgagaagatctaccagcagtgggtggcgggcgtggaccaggactgccactttaacctggggcagccgctgattctgcgggacgccgctagcaacctcatccacgtcaacttcagcaaagcgttggtggcagttctgagagaagtcaagtatttgaatttccagcaacagaaagagattccagacagtgcggagagtctgttctcagagaacgaaactttccggaagtttgtgggcaacctggagctcatcgttggctggtataatgagataaagactatagtgaaggcagtagaatttctactaataaagtcagaactggaagcaattgatgtcaagttattgagcgctgaaacgacattattctggaatggcgaaggtgtgtttcagtacattcaagaggtgcgagaaattctgcacaacttgcagaacaggatgcaaaaggcaaaacaaaatatagaaggaatttcccaggctatgaaggactggtcggccaacccgctgtttgaaagaaaggacaataagaaagaggccctgttagacttggatggaagaattgccaacctcaacaagcgctacgcagcagtcagggatgctggagtgaagatccaagccatggttgcagaaaacgcagaactattcagggcagacacactgagcctgccctggaaggattatgtcatctacattgacgacatggtcttagatgaatttgaccagttcattcgcaaatctctgagtttcctaatggacaacatggttatagatgagagtatcgctcccctgtttgagatccgcatggagctggacgaggatgggctgaccttcaacccgaccctggaggtgggctcagatcgcggcttcctggcactgatcgagggcctggtcaacgacatctacaacgtagccaggctcatccctcggctggccaaggacaggatgaactacaagatggacctggaagataacacagacctcatagagatgagggaggaggtgtccagcctggtcatcaatgccatgaaggaggccgaggagtaccaggattcctttgagaggtactcctacctctggacggacaacctgcaggagtttatgaagaatttcctgatatatgggtgtgcagtcactgcggaggacttggacacctggacagatgacaccatccccaagacaccgcccaccctggctcagttccaggagcagatcgactcctacgagaagctgtatgaggaggtgtccaagtgcgagaacaccaaggtgttccacggctggctgcagtgcgactgccgccccttcaagcaggccctgctcagcacaatccggcgctggggcttcatgttcaagcggcacctgagcaaccacgtcaccaacagcctggctgacctggaagccttcatgaaagtcgccagaatgggcttgaccaagcccctcaaggagggggactatgatgggcttgtggaggtgatggggcacctgatgaaagtcaaggagaggcaagcagccaccgacaacatgtttgagcccctgaagcaaaccatcgagctgctcaagacctacggggaggagatgccagaggagatccacttgaagctgcaggagctgccggagcactgggcaaataccaagaaactggccattcaggtgaagctgaccgtggcaccactccaggccaacgaggtcagcatcctgcggcggaaatgccagcaattcgagctcaagcaacatgagttcagggagaggttcaggcgcgaggccccgttctccttcagcgaccccaacccctacaagtccctgaataagcaacaaaagagcatctccgccatggaaggcatcatggaggcgctgtccaagtccgggggcctgttcgaggtccccgtcccagactacaagcagctcaaggcctgccaccgggaggtccgcctactgaaggagctctgggacatggttgttgtggtaaataccagcatcgaggactggaagaccaccaagtggaaagatatcaacgttgagcagatggacatagattgtaagaagtttgccaaggacatgaggtctttggacaaggagatgaaaacctgggatgccttcgtggggctcgacaacaccgtgaaaaacgtgatcacgtccctgcgtgccgtgagcgagctgcagaaccctgccattcgggaacgccactggcagcagctcatgcaggccacccaggtgaaatttaaaatgtcagaagagacgaccctggcagatttactgcagctgaacctccacagttacgaggatgaggtccgcaacatcgtggacaaggccgtgaaggagtcgggcatggaaaaggtgctgaaagccctggacagtacctggagcatgatggaattccagcacgagccgcacccgcggacaggcaccatgatgctcaagtccagcgaggtgctggtggagacgctggaggacaaccaggtgcagctgcagaacctgatgatgtccaagtacctggcccacttcctgaaggaggtgacaagctggcagcagaagctgtccacggcggactccgtcatctccatctggtttgaggtccagcgaacctggagccacctggagagcatcttcatcggctccgaagacatccgcacccagctcccgggggactcccagcgctttgacgacatcaaccaggaattcaaggccttgatggaagatgcagtgaaaacacccaacgtggtggaagccaccagcaaacccggcctctacaataaactggaggccctgaagaagagcttggccatctgtgaaaaggctttggcagagtatttagagacgaaaagactggctttcccccggttctattttgtctcctcggctgacctcctggacattctctccaatggcaatgaccccgtggaggtgagccgccacctgtccaaactcttcgatagcctgtgtaaactgaagttccggctcgatgccagtgacaaacctctcaaggtgggcctgggaatgtacagcaaggaggacgagtacatggtttttgatcaggaatgcgacctctcggggcaggtggaagtgtggctgaatcgagtgctggaccgaatgtgctctaccctccggcacgaaatcccagaggccgtggtgacctacgaagagaagccgagggagcagtggatcctggactacccagcccaggtggccctgacttgcacccagatctggtggacgaccgaggtgggcctggcatttgccaggctggaggaaggctatgaaaacgctatcagagattataacaaaaagcagattagccagctgaacgtactcatcacgctgctcatggggaacctcaacgctggcgacaggatgaagatcatgaccatctgcaccatcgatgtgcacgcacgggacgtggtggccaaaatgatcgtggccaaggtggagagttctcaggccttcacctggcaggcccagctccggcatcgctgggacgaagagaagcgacactgctttgccaacatctgcgatgcccaaatccagtattcctatgagtatctgggcaacacgccgcggctggtcatcaccccactcactgacaggtgctatatcaccctgacccagtccctccatctcatcatgggtggagcccctgccggccccgctgggaccggcaagactgagacgaccaaggacctgggcagagccctgggcaccatggtctacgtcttcaactgctccgagcagatggactacaagtcctgtggaaatatctacaagggcctggcccagacgggagcctggggctgctttgacgagtttaatcgcatctcagtggaagtcttgtctgtgattgccgtgcaggtaaaatgtgtccaggatgcaattcgggccaagaaaaaagcattcaatttcctgggagagatcataggcctcattcccaccgtcggtatcttcatcaccatgaaccctgggtacgccggacgcgcggagctgcctgagaacctaaaagccttattcaggccctgtgccatggtcgtccccgacttcgaactgatatgtgagatcatgctcatggccgagggctttctggaagcccgccttctggccaggaagttcatcaccctgtacaccttgtgcaaggagctgctctcgaagcaggatcattacgactggggcctgagagccatcaagtctgtgctggtggtggccggctccctgaagaggggcgaccccagccgggcagaggaccaggtgctcatgcgggcgctgagagacttcaacatccccaagattgtgacagacgacctgcccgtattcatgggactgatcggggacctcttcccggctctggacgtgcctcggaaacgggacctgaattttgaaaagatcatcaagcagagcatcgtggagctcaagctgcaggcggaggacagcttcgtgctgaaggtggtgcagctggaggagctgctgcaggtccgccactccgtgttcatcgtcgggaatgcgggcagcggcaaatctcaggtcctcaaatccctcaacaagacctatcagaacctgaagaggaagccggtcgccgtggacctggaccccaaggccgtcacctgcgacgagctctttggcatcatcaacccagtgaccagggaatggaaagatggcctgttctccaccatcatgcgagacctggccaacatcacccatgacggccccaagtggatcatccttgacggagacatagaccccatgtggatcgagtctctcaacacagtcatggatgacaacaaggtcctcaccctggccagcaacgagcggatccccctgaaccgcaccatgaggctggtgttcgaaatcagccacctgaggacggccaccccagccaccgtttccagagccggcatcctctacatcaacccagccgacctgggatggaacccggtggtgagcagctggatcgagaggcgcaaggtgcagtcggagaaggccaacctgatgatcctctttgacaagtacctgcccacgtgcctggacaagttgcgctttgggttcaagaagatcacgccagtgccggagatcacggtgatccaaacgattctgtacctgctggagtgcctgctcacggagaagaccgtgccccccgactcccccagggagctgtacgagctgtacttcgtgttcacctgcttctgggccttcggtggcgccatgttccaggaccagcttgtggattatcgagtggagttcagtaaatggtggatcaacgaattcaagactatcaagttcccctcgcagggaacgatttttgactactacattgatcctgacacaaaaaagttcctgccctggacagataaagtgccctcctttgagctggatcccgatgtcccactgcaggcctctttggtccacaccacggaaaccatccgcatccgctacttcatggacctgctcatggagaagtcctggccggtgatgctggtggggaacgcggggacgggcaagtcggtgctgatgggggacaagctggaaagcctgaacacggacaactacctggtgcaggctgtgcccttcaacttctacacgacctcagccatgctgcagggggtgctggagaagccgctggagaagaaatcggggaggaactacgggccgccaggcactaagaagctcgtctacttcatcgacgacatgaacatgcccgaggtggacaagtatgggacggtggccccgcacaccctcatccggcagcacatggaccaccggcactggtatgacagacataagctgacgttaaaagatatccataattgtcagtacgtggcctgcatgaaccccacttccggatccttcaccatcgactccaggcttcagcgccatttctgcgtgtttgctgtgagcttccccggccaggaggccctcaccaccatctacaacacaatcctgacgcagcacctggccttccgctcggtctccatggctatccagaggataagcagccagctggtggccgcggccctggctttgcatcagaaaatcacggcaacatttcttcccacggccattaagtttcattatgtcttcaacctcagggacctctccaatattttccagggactcttattttccacagcagaagttctgaaaaccccactggacctcgtccgcctttggctacatgagactgaacgagtgtatggtgacaaaatggttgacgaaaaagaccaggaaacattgcatagagtcaccatggcctccaccaagaagttctttgatgatcttggtgatgaactcttatttgccaagccaaatatcttctgccactttgctcaagggattggcgatcccaaatatgttcctgtaaccgacatggctcctctgaacaagctcctcgtggacgtcctggacagctacaatgaagttaatgcagtcatgaatttggtgctgtttgaggacgccgtggctcacatctgcaggattaatcgcatcctggagtctccccgggggaatgccctgctggtgggggtgggcggcagtggcaaacagagcctctcccgcctggcagcgtacatcagcgggcttgacgtgtttcagatcaccctcaagaagggctacgggatccccgacctcaagattgacctcgctgctcagtacataaaggctgccgtgaagaacgttccctcggtgttcctgatgacagactcccaggtggccgaggagcagtttctggtgctgatcaatgacctgctggcctcaggagagatccctgggctgtttatggaggacgaggtggagaacatcatctcctccatgcgaccccaagtcaagtcccttggcatgaatgacactcgggaaacatgttggaagttcttcatcgaaaaagtgcgcagacagctcaaggtgatcctgtgtttctcccctgtgggctccgtgctgcgggtacgagccagaaagttcccagctgtggtcaactgcacggccatcgactggttccacgagtggccggaagatgcgctggtgtccgtcagcgcccgcttcctggaggagactgaggggattccgtgggaagtcaaggcctccatcagcttcttcatgtcctacgtgcacaccaccgtcaacgagatgtccagggtatacctggctactgagaggcgctacaactacaccacacccaaaacctttctggagcagatcaaactgtaccagaacctgctggccaagaagagaacggaacttgttgccaaaatcgagaggctggagaacggcctgatgaagctgcagagcacggcttcccaggtggatgatttgaaagccaagttggcgattcaggaggctgagctcaagcagaagaatgagagcgcagaccaactgatccaggtggtcggcatcgaggccgagaaggtcagcaaagagaaggccattgctgaccaggaagaagtcaaggtcgaggtcatcaataagaacgtcactgagaagcaaaaggcctgtgaaacagacctggccaaagcagaaccggccctgctggcagcccaggaggctctggacactctgaataagaacaacctgacagagctgaagtcctttgggtccccgccggatgctgtggtcaacgtcaccgccgccgtcatgattctgaccgcacctgggggcaagatccccaaggacaagagctggaaggcggccaagatcatgatgggcaaggtggacaccttcctagactccctgaagaagttcgacaaggagcacatccctgaggcctgcctgaaggccttcaagccctaccaaggcaacccgacgttcgaccccgagttcatccgctccaagtccacggccgccgccggcctgtgctcctggtgcatcaacatcgtccgcttctacgaggtctactgcgacgtggcgcccaagaggcaggcactggaggaggctaatgcagagctggcagaggcacaagagaagctgtcccggatcaaaaacaagattgccgaacttaacgccaacctgagcaacctaacctcagcgtttgaaaaagcaacagctgagaaaatcaagtgtcagcaagaggccgatgccacgaacagggtgatcttactggcgaacaggctggtcgggggattagcatcggaaaacatccgctgggctgagtctgtggagaacttcaggagccagggggtcacgctgtgtggggacgtcctgctcatctctgccttcgtgtcctacgtgggctacttcaccaagaaataccggaatgagctgatggagaaattctggatcccttacatacataacttaaaggtccccatcccgatcacgaatggcctggatcccttgagcctgctgacagatgacgcggacgtggccacctggaacaaccagggcctccccagcgaccgcatgtccaccgagaatgccaccatcctgggcaacaccgagcggtggccgctgatcgtggacgcccagctccaaggaatcaagtggatcaaaaacaaatacaggagtgaactgaaagccatccgcctgggacagaagagctacctggatgtcatcgagcaggccatctcggaaggggacaccttgctcattgagaacatcggcgaaaccgtggaccccgtgctggaccctctactgggcaggaacacgattaaaaagggaaagtacattaagatcggtgacaaggaggtggagtaccaccccaagttccgcctgatcctacacaccaagtacttcaacccacactacaagccagagatgcaggctcagtgcaccctcatcaacttcctggtcaccagggatggactcgaggaccaactcttggccgctgtggtggccaaagagcgcccagatctggaacagctgaaggcaaacctcaccaagtctcaaaacgaatttaagattgttctgaaagagctggaagattcgctcctggcccgtctgtcggctgcgtcggggaactttctgggagacacggccttggtggagaatctggagaccaccaagcacacagccagcgagatcgaggagaaggtggtggaggcaaaaatcacagaagttaaaatcaacgaagcgagagagaactaccgcccggctgcggagagggcatctctgctctacttcatactgaacgatctcaacaaaatcaaccccgtctaccagttctccctcaaggccttcaacgtggtgtttgagaaagccatccagaggaccacccctgccaacgaggtgaagcagcgggtgatcaacctgacggacgagatcacctactccgtctacatgtacacggcccggggactcttcgagagggacaaactcattttcctggcacaagttacgtttcaggtcctgtccatgaagaaggagctgaacccagtggagctggatttcctcctgcggttcccttttaaggccggagtggtctcaccagtggacttcctccagcatcaaggctggggcgggatcaaggccctctcggagatggatgagttcaaaaatctggacagtgacatcgaaggatctgccaagcgctggaaaaagctggtggagtcggaagcccccgagaaggagatcttccccaaggagtggaagaacaagacggccctgcagaagctgtgcatggtgcgctgcctgcggccagatcgcatgacctacgctatcaagaacttcgtggaggaaaagatgggcagcaagttcgtggaaggccggagtgttgagttttctaagtcctacgaggagagcagcccctccacgtcaatcttcttcatcctctccccgggggttgaccccttgaaagacgtggaagccctgggaaaaaaactagggtttaccatagacaatggaaaactccataatgtgtccctggggcagggacaagaggtggtggctgagaacgccctggacgtggctgcagagaaaggacactgggtcattctgcagaatatccacctggtggcccggtggctgggaacactggacaagaagctggagcactacagcacgggcagccatgaggactaccgggtgttcatcagcgcggagcctgcccccagccccgagacccacatcatcccccagggcattctggagaacgccatcaagatcaccaacgagccccccacgggcatgcacgccaacttgcacaaggccctggacctgttcacccaggacaccctggagatgtgcaccaaggagatggagttcaagtgcatgctcttcgccctgtgctacttccacgctgtggtggcagagaggcgcaagttcggcgcccagggctggaaccggtcgtaccccttcaacaacggggacctcaccatctccatcaacgtgctctacaactacctggaggccaaccccaaggtgccctgggacgatctccgctacctttttggtgaaatcatgtatggcggccacatcacagatgactgggaccgtcggctgtgcaggacctacctggctgaatacatccggacggagatgctggagggagacgtcctgctggcccccggctttcagatcccccccaacctggactacaagggttaccacgaatacatcgatgagaacctgccccctgagagtccctatctgtatggcctgcaccccaacgcagagattggctttctgacggtcacctcagagaagctgttccgcactgtcctggaaatgcagccaaaagagacggactcgggggcaggcacgggagtgtcccgcgaggagaaggtgaaggccgtgctggacgacatcctggagaagattccggagactttcaacatggctgagatcatggcaaaggcagcggaaaagaccccctacgtggtagtcgcctttcaagaatgtgaaagaatgaacatcctgaccaacgaaatgcgccgttcgctcaaggagctgaacctggggctgaagggagaactgaccatcacgaccgacgtggaagatctgtccacggctctcttctatgacaccgtgcctgatacgtgggtggcccgggcctacccctccatgatgggcctggcggcctggtacgcagacctgctgctccgcatcagggaactcgaggcctggacgacagactttgccctgcccaccaccgtgtggctggccggcttcttcaacccccagtcgttcctcacggccatcatgcagtccatggccaggaagaacgagtggcccctggacaagatgtgtctgtctgtcgaggtgaccaagaaaaaccgagaggacatgaccgctcctccgcgagagggctcctacgtgtacggactcttcatggaaggggctcgctgggacacccagactggagtcatcgctgaagcgcggctgaaagagctgaccccggccatgcctgtcatcttcatcaaggccattcctgtggaccgcatggagaccaagaacatctatgagtgtcccgtgtacaaaacacgcatccgcggccccacctatgtctggacctttaacttgaagaccaaagagaaggcagcgaagtggatcctggcagccgtggcgctgctcctacaggtttagctcgctcctgcctcacagcccacactccctggggctggaccacaactcagcccttcacctgtgcacctgtgacttattctttacaggaactggtggtggtttttcgttctcttaaataatcaggtgctttgtaaccaagcacatcggaaccagagggtggaggttggtgtggaagaggtggggcagattaaagccagtggagccactca

SEQ ID NO: 128526 - DNA, 13708 bp, Homo sapiens
  Payload ID: 5155
  Gene Symbol: DNAH17
  Gene Name: dynein, axonemal, heavy chain 17
  ENST ID: ENST00000585328
  CDS Start-End: 126-13499
gtggcagttggagcccctcgagggaagggagccattttctttcctggtttgggaaagagttgctcatcagtttgcgggagaagctgtttgccttcagctgatacacagtgtaaggaaaggccaagatgacaatggccccggacgtcagactagagtatctggaggaagttgcctccatcgtcctgaagttcaagccggacaagtggagcaagctgataggcgccgaggagaacgtggccctgttcacagagttctttgaaaagcccgacgtccaggtgctggtgctgacgctcaatgcagccggcatgatcataccctgcctgggcttcccccagtccctcaagtccaaaggggtttacttcatcaagacaaagtccgagaacatcaacaaggacaactacagggcccggctcctttacggcgacatcagccccacacccgtggaccagctgatcgcggtggtggaggaggtcctctcttctctgttaaaccaaagtgagaacatggctggatggccccaggtggtctcggaagacatcgtgaagcaggtccacaggctgaagaatgaaatgtttgtgatgagtggcaagatcaaaggcaaaaccttgctgcctattccggagcacctgggcagcctggatggcacgctggagtccatggagaggatcccctcttcactggacaacttgctcctgcacgccattgaaaccaccatcatcgactggtcccaccagatccgggatgtgctgagcaaagactcagcccaggcgctgctggatgggctgcaccccctgccccaagtggagttcgagttctgggacactcggctgctgaacctcaagtgcatccatgaacagctaaacagacccaaagtgaacaagattgttgagatcctagagaaagccaaaagctgctactggccagccctgcaaaacgtttacaccaacgtcactgaagggctgaaggaagccaacgacatcgtgctctatttgaagcccctacggatcctgctggaggagatggaacaagccgacttcacgatgctccccaccttcattgccaaggtgctggacaccatctgcttcatctgggccacctctgagtactataacacacctgccaggatcatcgtcatcctgcaggagttctgcaaccaaatcatcgagatgacacgaaccttcctgagcccggaagaggtgctgaagggcctgcaaggtgaaatcgaggaagtcctgagtggcatctccctggctgtaaatgtgctgaaggagctctaccagacgtacgacttctgctgcgtgaacatgaagcttttctttaaggacaaagagcccgtgccttgggaattcccttcttctcttgccttttccaggataaattccttcttccagcgcatccagaccattgaggaactctataaaacagcaattgagtttctgaagctggagaaaatcgagcttgggggcgtgcgtgggaacctcctcgggagcctggtgacccgtatctatgatgaggtctttgagctggtgaaggtttttgccgactgcaaatatgatcccttggaccctggagactcgaattttgaccgtgattatgctgattttgagatcaaaatccaagacctggataggaggctggccacgatcttttgccaaggatttgatgactgcagctgtatcaagtcctccgcaaagctcctgtacatgtgtgggggcctcatggagcggcccctgattcttgccgaggtggcgcccaggtattcagtcatgctggagctgtttgacgctgagctagacaatgctaagatcttgtacgatgcccagatggcggcctccgaggaggggaacatccccctgatccacaaaaacatgcctcccgtggccgggcagctcaaatggagcctggagctgcaggagaggctagaggtgtccatgaaacacctgaagcacgtcgaacacccggtcatgtctggagcagaggccaagctgacctatcagaagtatgacgagatgatggagctgctgaggtgccaccgcgagaagatctaccagcagtgggtggcgggcgtggaccaggactgccactttaacctggggcagccgctgattctgcgggacgccgctagcaacctcatccacgtcaacttcagcaaagcgttggtggcagttctgagagaagtcaagtatttgaatttccagcaacagaaagagattccagacagtgcggagagtctgttctcagagaacgaaactttccggaagtttgtgggcaacctggagctcatcgttggctggtataatgagataaagactatagtgaaggcagtagaatttctactaataaagtcagaactggaagcaattgatgtcaagttattgagcgctgaaacgacattattctggaatggcgaaggtgtgtttcagtacattcaagaggtgcgagaaattctgcacaacttgcagaacaggatgcaaaaggcaaaacaaaatatagaaggaatttcccaggctatgaaggactggtcggccaacccgctgtttgaaagaaaggacaataagaaagaggccctgttagacttggatggaagaattgccaacctcaacaagcgctacgcagcagtcagggatgctggagtgaagatccaagccatggttgcagaaaacgcagaactattcagggcagacacactgagcctgccctggaaggattatgtcatctacattgacgacatggtcttagatgaatttgaccagttcattcgcaaatctctgagtttcctaatggacaacatggagagtatcgctcccctgtttgagatccgcatggagctggacgaggatgggctgaccttcaacccgaccctggaggtgggctcagatcgcggcttcctggcactgatcgagggcctggtcaacgacatctacaacgtagccaggctcatccctcggctggccaaggacaggatgaactacaagatggacctggaagataacacagacctcatagagatgagggaggaggtgtccagcctggtcatcaatgccatgaaggaggccgaggagtaccaggattcctttgagaggtactcctacctctggacggacaacctgcaggagtttatgaagaatttcctgatatatgggtgtgcagtcactgcggaggacttggacacctggacagatgacaccatccccaagacaccgcccaccctggctcagttccaggagcagatcgactcctacgagaagctgtatgaggaggtgtccaagtgcgagaacaccaaggtgttccacggctggctgcagtgcgactgccgccccttcaagcaggccctgctcagcacaatccggcgctggggcttcatgttcaagcggcacctgagcaaccacgtcaccaacagcctggctgacctggaagccttcatgaaagtcgccagaatgggcttgaccaagcccctcaaggagggggactatgatgggcttgtggaggtgatggggcacctgatgaaagtcaaggagaggcaagcagccaccgacaacatgtttgagcccctgaagcaaaccatcgagctgctcaagacctacggggaggagatgccagaggagatccacttgaagctgcaggagctgccggagcactgggcaaataccaagaaactggccattcaggtgaagctgaccgtggcaccactccaggccaacgaggtcagcatcctgcggcggaaatgccagcaattcgagctcaagcaacatgagttcagggagaggttcaggcgcgaggccccgttctccttcagcgaccccaacccctacaagtccctgaataagcaacaaaagagcatctccgccatggaaggcatcatggaggcgctgtccaagtccgggggcctgttcgaggtccccgtcccagactacaagcagctcaaggcctgccaccgggaggtccgcctactgaaggagctctgggacatggttgttgtggtaaataccagcatcgaggactggaagaccaccaagtggaaagatatcaacgttgagcagatggacatagattgtaagaagtttgccaaggacatgaggtctttggacaaggagatgaaaacctgggatgccttcgtggggctcgacaacaccgtgaaaaacgtgatcacgtccctgcgtgccgtgagcgagctgcagaaccctgccattcgggaacgccactggcagcagctcatgcaggccacccaggtgaaatttaaaatgtcagaagagacgaccctggcagatttactgcagctgaacctccacagttacgaggatgaggtccgcaacatcgtggacaaggccgtgaaggagtcgggcatggaaaaggtgctgaaagccctggacagtacctggagcatgatggaattccagcacgagccgcacccgcggacaggcaccatgatgctcaagtccagcgaggtgctggtggagacgctggaggacaaccaggtgcagctgcagaacctgatgatgtccaagtacctggcccacttcctgaaggaggtgacaagctggcagcagaagctgtccacggcggactccgtcatctccatctggtttgaggtccagcgaacctggagccacctggagagcatcttcatcggctccgaagacatccgcacccagctcccgggggactcccagcgctttgacgacatcaaccaggaattcaaggccttgatggaagatgcagtgaaaacacccaacgtggtggaagccaccagcaaacccggcctctacaataaactggaggccctgaagaagagcttggccatctgtgaaaaggctttggcagagtatttagagacgaaaagactggctttcccccggttctattttgtctcctcggctgacctcctggacattctctccaatggcaatgaccccgtggaggtgagccgccacctgtccaaactcttcgatagcctgtgtaaactgaagttccggctcgatgccagtgacaaacctctcaaggtgggcctgggaatgtacagcaaggaggacgagtacatggtttttgatcaggaatgcgacctctcggggcaggtggaagtgtggctgaatcgagtgctggaccgaatgtgctctaccctccggcacgaaatcccagaggccgtggtgacctacgaagagaagccgagggagcagtggatcctggactacccagcccaggtggccctgacttgcacccagatctggtggacgaccgaggtgggcctggcatttgccaggctggaggaaggctatgaaaacgctatcagagattataacaaaaagcagattagccagctgaacgtactcatcacgctgctcatggggaacctcaacgctggcgacaggatgaagatcatgaccatctgcaccatcgatgtgcacgcacgggacgtggtggccaaaatgatcgtggtggagagttctcaggccttcacctggcaggcccagctccggcatcgctgggacgaagagaagcgacactgctttgccaacatctgcgatgcccaaatccagtattcctatgagtatctgggcaacacgccgcggctggtcatcaccccactcactgacaggtgctatatcaccctgacccagtccctccatctcatcatgggtggagcccctgccggccccgctgggaccggcaagactgagacgaccaaggacctgggcagagccctgggcaccatggtctacgtcttcaactgctccgagcagatggactacaagtcctgtggaaatatctacaagggcctggcccagacgggagcctggggctgctttgacgagtttaatcgcatctcagtggaagtcttgtctgtgattgccgtgcaggtaaaatgtgtccaggatgcaattcgggccaagaaaaaagcattcaatttcctgggagagatcataggcctcattcccaccgtcggtatcttcatcaccatgaaccctgggtacgccggacgcgcggagctgcctgagaacctaaaagccttattcaggccctgtgccatggtcgtccccgacttcgaactgatatgtgagatcatgctcatggccgagggctttctggaagcccgccttctggccaggaagttcatcaccctgtacaccttgtgcaaggagctgctctcgaagcaggatcattacgactggggcctgagagccatcaagtctgtgctggtggtggccggctccctgaagaggggcgaccccagccgggcagaggaccaggtgctcatgcgggcgctgagagacttcaacatccccaagattgtgacagacgacctgcccgtattcatgggactgatcggggacctcttcccggctctggacgtgcctcggaaacgggacctgaattttgaaaagatcatcaagcagagcatcgtggagctcaagctgcaggcggaggacagcttcgtgctgaaggtggtgcagctggaggagctgctgcaggtccgccactccgtgttcatcgtcgggaatgcgggcagcggcaaatctcaggtcctcaaatccctcaacaagacctatcagaacctgaagaggaagccggtcgccgtggacctggaccccaaggccgtcacctgcgacgagctctttggcatcatcaacccagtgaccagggaatggaaagatggcctgttctccaccatcatgcgagacctggccaacatcacccatgacggccccaagtggatcatccttgacggagacatagaccccatgtggatcgagtctctcaacacagtcatggatgacaacaaggtcctcaccctggccagcaacgagcggatccccctgaaccgcaccatgaggctggtgttcgaaatcagccacctgaggacggccaccccagccaccgtttccagagccggcatcctctacatcaacccagccgacctgggatggaacccggtggtgagcagctggatcgagaggcgcaaggtgcagtcggagaaggccaacctgatgatcctctttgacaagtacctgcccacgtgcctggacaagttgcgctttgggttcaagaagatcacgccagtgccggagatcacggtgatccaaacgattctgtacctgctggagtgcctgctcacggagaagaccgtgccccccgactcccccagggagctgtacgagctgtacttcgtgttcacctgcttctgggccttcggtggcgccatgttccaggaccagcttgtggattatcgagtggagttcagtaaatggtggatcaacgaattcaagactatcaagttcccctcgcagggaacgatttttgactactacattgatcctgacacaaaaaagttcctgccctggacagataaagtgccctcctttgagctggatcccgatgtcccactgcaggcctctttggtccacaccacggaaaccatccgcatccgctacttcatggacctgctcatggagaagtcctggccggtgatgctggtggggaacgcggggacgggcaagtcggtgctgatgggggacaagctggaaagcctgaacacggacaactacctggtgcaggctgtgcccttcaacttctacacgacctcagccatgctgcagggggtgctggagaagccgctggagaagaaatcggggaggaactacgggccgccaggcactaagaagctcgtctacttcatcgacgacatgaacatgcccgaggtggacaagtatgggacggtggccccgcacaccctcatccggcagcacatggaccaccggcactggtatgacagacataagctgacgttaaaagatatccataattgtcagtacgtggcctgcatgaaccccacttccggatccttcaccatcgactccaggcttcagcgccatttctgcgtgtttgctgtgagcttccccggccaggaggccctcaccaccatctacaacacaatcctgacgcagcacctggccttccgctcggtctccatggctatccagaggataagcagccagctggtggccgcggccctggctttgcatcagaaaatcacggcaacatttcttcccacggccattaagtttcattatgtcttcaacctcagggacctctccaatattttccagggactcttattttccacagcagaagttctgaaaaccccactggacctcgtccgcctttggctacatgagactgaacgagtgtatggtgacaaaatggttgacgaaaaagaccaggaaacattgcatagagtcaccatggcctccaccaagaagttctttgatgatcttggtgatgaactcttatttgccaagccaaatatcttctgccactttgctcaagggattggcgatcccaaatatgttcctgtaaccgacatggctcctctgaacaagctcctcgtggacgtcctggacagctacaatgaagttaatgcagtcatgaatttggtgctgtttgaggacgccgtggctcacatctgcaggattaatcgcatcctggagtctccccgggggaatgccctgctggtgggggtgggcggcagtggcaaacagagcctctcccgcctggcagcgtacatcagcgggcttgacgtgtttcagatcaccctcaagaagggctacgggatccccgacctcaagattgacctcgctgctcagtacataaaggctgccgtgaagaacgttccctcggtgttcctgatgacagactcccaggtggccgaggagcagtttctggtgctgatcaatgacctgctggcctcaggagagatccctgggctgtttatggaggacgaggtggagaacatcatctcctccatgcgaccccaagtcaagtcccttggcatgaatgacactcgggaaacatgttggaagttcttcatcgaaaaagtgcgcagacagctcaaggtgatcctgtgtttctcccctgtgggctccgtgctgcgggtacgagccagaaagttcccagctgtggtcaactgcacggccatcgactggttccacgagtggccggaagatgcgctggtgtccgtcagcgcccgcttcctggaggagactgaggggattccgtgggaagtcaaggcctccatcagcttcttcatgtcctacgtgcacaccaccgtcaacgagatgtccagggtatacctggctactgagaggcgctacaactacaccacacccaaaacctttctggagcagatcaaactgtaccagaacctgctggccaagaagagaacggaacttgttgccaaaatcgagaggctggagaacggcctgatgaagctgcagagcacggcttcccaggtggatgatttgaaagccaagttggcgattcaggaggctgagctcaagcagaagaatgagagcgcagaccaactgatccaggtggtcggcatcgaggccgagaaggtcagcaaagagaaggccattgctgaccaggaagaagtcaaggtcgaggtcatcaataagaacgtcactgagaagcaaaaggcctgtgaaacagacctggccaaagcagaaccggccctgctggcagcccaggaggctctggacactctgaataagaacaacctgacagagctgaagtcctttgggtccccgccggatgctgtggtcaacgtcaccgccgccgtcatgattctgaccgcacctgggggcaagatccccaaggacaagagctggaaggcggccaagatcatgatgggcaaggtggacaccttcctagactccctgaagaagttcgacaaggagcacatccctgaggcctgcctgaaggccttcaagccctaccaaggcaacccgacgttcgaccccgagttcatccgctccaagtccacggccgccgccggcctgtgctcctggtgcatcaacatcgtccgcttctacgaggtctactgcgacgtggcgcccaagaggcaggcactggaggaggctaatgcagagctggcagaggcacaagagaagctgtcccggatcaaaaacaagattgccgaacttaacgccaacctgagcaacctaacctcagcgtttgaaaaagcaacagctgagaaaatcaagtgtcagcaagaggccgatgccacgaacagggtgatcttactggcgaacaggctggtcgggggattagcatcggaaaacatccgctgggctgagtctgtggagaacttcaggagccagggggtcacgctgtgtggggacgtcctgctcatctctgccttcgtgtcctacgtgggctacttcaccaagaaataccggaatgagctgatggagaaattctggatcccttacatacataacttaaaggtccccatcccgatcacgaatggcctggatcccttgagcctgctgacagatgacgcggacgtggccacctggaacaaccagggcctccccagcgaccgcatgtccaccgagaatgccaccatcctgggcaacaccgagcggtggccgctgatcgtggacgcccagctccaaggaatcaagtggatcaaaaacaaatacaggagtgaactgaaagccatccgcctgggacagaagagctacctggatgtcatcgagcaggccatctcggaaggggacaccttgctcattgagaacatcggcgaaaccgtggaccccgtgctggaccctctactgggcaggaacacgattaaaaagggaaagtacattaagatcggtgacaaggaggtggagtaccaccccaagttccgcctgatcctacacaccaagtacttcaacccacactacaagccagagatgcaggctcagtgcaccctcatcaacttcctggtcaccagggatggactcgaggaccaactcttggccgctgtggtggccaaagagcgcccagatctggaacagctgaaggcaaacctcaccaagtctcaaaacgaatttaagattgttctgaaagagctggaagattcgctcctggcccgtctgtcggctgcgtcggggaactttctgggagacacggccttggtggagaatctggagaccaccaagcacacagccagcgagatcgaggagaaggtggtggaggcaaaaatcacagaagttaaaatcaacgaagcgagagagaactaccgcccggctgcggagagggcatctctgctctacttcatactgaacgatctcaacaaaatcaaccccgtctaccagttctccctcaaggccttcaacgtggtgtttgagaaagccatccagaggaccacccctgccaacgaggtgaagcagcgggtgatcaacctgacggacgagatcacctactccgtctacatgtacacggcccggggactcttcgagagggacaaactcattttcctggcacaagttacgtttcaggtcctgtccatgaagaaggagctgaacccagtggagctggatttcctcctgcggttcccttttaaggccggagtggtctcaccagtggacttcctccagcatcaaggctggggcgggatcaaggccctctcggagatggatgagttcaaaaatctggacagtgacatcgaaggatctgccaagcgctggaaaaagctggtggagtcggaagcccccgagaaggagatcttccccaaggagtggaagaacaagacggccctgcagaagctgtgcatggtgcgctgcctgcggccagatcgcatgacctacgctatcaagaacttcgtggaggaaaagatgggcagcaagttcgtggaaggccggagtgttgagttttctaagtcctacgaggagagcagcccctccacgtcaatcttcttcatcctctccccgggggttgaccccttgaaagacgtggaagccctgggaaaaaaactagggtttaccatagacaatggaaaactccataatgtgtccctggggcagggacaagaggtggtggctgagaacgccctggacgtggctgcagagaaaggacactgggtcattctgcagaatatccacctggtggcccggtggctgggaacactggacaagaagctggagcactacagcacgggcagccatgaggactaccgggtgttcatcagcgcggagcctgcccccagccccgagacccacatcatcccccagggcattctggagaacgccatcaagatcaccaacgagccccccacgggcatgcacgccaacttgcacaaggccctggacctgttcacccaggacaccctggagatgtgcaccaaggagatggagttcaagtgcatgctcttcgccctgtgctacttccacgctgtggtggcagagaggcgcaagttcggcgcccagggctggaaccggtcgtaccccttcaacaacggggacctcaccatctccatcaacgtgctctacaactacctggaggccaaccccaaggtgccctgggacgatctccgctacctttttggtgaaatcatgtatggcggccacatcacagatgactgggaccgtcggctgtgcaggacctacctggctgaatacatccggacggagatgctggagggagacgtcctgctggcccccggctttcagatcccccccaacctggactacaagggttaccacgaatacatcgatgagaacctgccccctgagagtccctatctgtatggcctgcaccccaacgcagagattggctttctgacggtcacctcagagaagctgttccgcactgtcctggaaatgcagccaaaagagacggactcgggggcaggcacgggagtgtcccgcgaggagaaggtgaaggccgtgctggacgacatcctggagaagattccggagactttcaacatggctgagatcatggcaaaggcagcggaaaagaccccctacgtggtagtcgcctttcaagaatgtgaaagaatgaacatcctgaccaacgaaatgcgccgttcgctcaaggagctgaacctggggctgaagggagaactgaccatcacgaccgacgtggaagatctgtccacggctctcttctatgacaccgtgcctgatacgtgggtggcccgggcctacccctccatgatgggcctggcggcctggtacgcagacctgctgctccgcatcagggaactcgaggcctggacgacagactttgccctgcccaccaccgtgtggctggccggcttcttcaacccccagtcgttcctcacggccatcatgcagtccatggccaggaagaacgagtggcccctggacaagatgtgtctgtctgtcgaggtgaccaagaaaaaccgagaggacatgaccgctcctccgcgagagggctcctacgtgtacggactcttcatggaaggggctcgctgggacacccagactggagtcatcgctgaagcgcggctgaaagagctgaccccggccatgcctgtcatcttcatcaaggccattcctgtggaccgcatggagaccaagaacatctatgagtgtcccgtgtacaaaacacgcatccgcggccccacctatgtctggacctttaacttgaagaccaaagagaaggcagcgaagtggatcctggcagccgtggcgctgctcctacaggtttagctcgctcctgcctcacagcccacactccctggggctggaccacaactcagcccttcacctgtgcacctgtgacttattctttacaggaactggtggtggtttttcgttctcttaaataatcaggtgctttgtaaccaagcacatcggaaccagagggtggaggttggtgtggaagaggtggggcagattaaagccagtggagccactca

SEQ ID NO: 128527 - DNA, 5220 bp, Homo sapiens
  Payload ID: 5155
  Gene Symbol: DNAH17
  Gene Name: dynein, axonemal, heavy chain 17
  ENST ID: ENST00000591369
  CDS Start-End: 1-4691
gagaagggagaacggagggggaggggaaaccagggccagcgagggctgtgcctgccgagacagcgtgcgtgacctcggggactcggctggggtccaggatccgaaaccttcagattgacctcgctgctcagtacataaaggctgccgtgaagaacgttccctcggtgttcctgatgacagactcccaggtggccgaggagcagtttctggtgctgatcaatgacctgctggcctcaggagagatccctgggctgtttatggaggacgaggtggagaacatcatctcctccatgcgaccccaagtcaagtcccttggcatgaatgacactcgggaaacatgttggaagttcttcatcgaaaaagtgcgcagacagctcaaggtgatcctgtgtttctcccctgtgggctccgtgctgcgggtacgagccagaaagttcccagctgtggtcaactgcacggccatcgactggttccacgagtggccggaagatgcgctggtgtccgtcagcgcccgcttcctggaggagactgaggggattccgtgggaagtcaaggcctccatcagcttcttcatgtcctacgtgcacaccaccgtcaacgagatgtccagggtatacctggctactgagaggcgctacaactacaccacacccaaaacctttctggagcagatcaaactgtaccagaacctgctggccaagaagagaacggaacttgttgccaaaatcgagaggctggagaacggcctgatgaagctgcagagcacggcttcccaggtggatgatttgaaagccaagttggcgattcaggaggctgagctcaagcagaagaatgagagcgcagaccaactgatccaggtggtcggcatcgaggccgagaaggtcagcaaagagaaggccattgctgaccaggaagaagtcaaggtcgaggtcatcaataagaacgtcactgagaagcaaaaggcctgtgaaacagacctggccaaagcagaaccggccctgctggcagcccaggaggctctggacactctgaataagaacaacctgacagagctgaagtcctttgggtccccgccggatgctgtggtcaacgtcaccgccgccgtcatgattctgaccgcacctgggggcaagatccccaaggacaagagctggaaggcggccaagatcatgatgggcaaggtggacaccttcctagactccctgaagaagttcgacaaggagcacatccctgaggcctgcctgaaggccttcaagccctaccaaggcaacccgacgttcgaccccgagttcatccgctccaagtccacggccgccgccggcctgtgctcctggtgcatcaacatcgtccgcttctacgaggtctactgcgacgtggcgcccaagaggcaggcactggaggaggctaatgcagagctggcagaggcacaagagaagctgtcccggatcaaaaacaagattgccgaacttaacgccaacctgagcaacctaacctcagcgtttgaaaaagcaacagctgagaaaatcaagtgtcagcaagaggccgatgccacgaacagggtgatcttactggcgaacaggctggtcgggggattagcatcggaaaacatccgctgggctgagtctgtggagaacttcaggagccagggggtcacgctgtgtggggacgtcctgctcatctctgccttcgtgtcctacgtgggctacttcaccaagaaataccggaatgagctgatggagaaattctggatcccttacatacataacttaaaggtccccatcccgatcacgaatggcctggatcccttgagcctgctgacagatgacgcggacgtggccacctggaacaaccagggcctccccagcgaccgcatgtccaccgagaatgccaccatcctgggcaacaccgagcggtggccgctgatcgtggacgcccagctccaaggaatcaagtggatcaaaaacaaatacaggagtgaactgaaagccatccgcctgggacagaagagctacctggatgtcatcgagcaggccatctcggaaggggacaccttgctcattgagaacatcggcgaaaccgtggaccccgtgctggaccctctactgggcaggaacacgattaaaaagggaaagtacattaagatcggtgacaaggaggtggagtaccaccccaagttccgcctgatcctacacaccaagtacttcaacccacactacaagccagagatgcaggctcagtgcaccctcatcaacttcctggtcaccagggatggactcgaggaccaactcttggccgctgtggtggccaaagagcgcccagatctggaacagctgaaggcaaacctcaccaagtctcaaaacgaatttaagattgttctgaaagagctggaagattcgctcctggcccgtctgtcggctgcgtcggggaactttctgggagacacggccttggtggagaatctggagaccaccaagcacacagccagcgagatcgaggagaaggtggtggaggcaaaaatcacagaagttaaaatcaacgaagcgagagagaactaccgcccggctgcggagagggcatctctgctctacttcatactgaacgatctcaacaaaatcaaccccgtctaccagttctccctcaaggccttcaacgtggtgtttgagaaagccatccagaggaccacccctgccaacgaggtgaagcagcgggtgatcaacctgacggacgagatcacctactccgtctacatgtacacggcccggggactcttcgagagggacaaactcattttcctggcacaagttacgtttcaggtcctgtccatgaagaaggagctgaacccagtggagctggatttcctcctgcggttcccttttaaggccggagtggtctcaccagtggacttcctccagcatcaaggctggggcgggatcaaggccctctcggagatggatgagttcaaaaatctggacagtgacatcgaaggatctgccaagcgctggaaaaagctggtggagtcggaagcccccgagaaggagatcttccccaaggagtggaagaacaagacggccctgcagaagctgtgcatggtgcgctgcctgcggccagatcgcatgacctacgctatcaagaacttcgtggaggaaaagatgggcagcaagttcgtggaaggccggagtgttgagttttctaagtcctacgaggagagcagcccctccacgtcaatcttcttcatcctctccccgggggttgaccccttgaaagacgtggaagccctgggaaaaaaactagggtttaccatagacaatggaaaactccataatgtgtccctggggcagggacaagaggtggtggctgagaacgccctggacgtggctgcagagaaaggacactgggtcattctgcagaatatccacctggtggcccggtggctgggaacactggacaagaagctggagcactacagcacgggcagccatgaggactaccgggtgttcatcagcgcggagcctgcccccagccccgagacccacatcatcccccagggcattctggagaacgccatcaagatcaccaacgagccccccacgggcatgcacgccaacttgcacaaggccctggacctgttcacccaggacaccctggagatgtgcaccaaggagatggagttcaagtgcatgctcttcgccctgtgctacttccacgctgtggtggcagagaggcgcaagttcggcgcccagggctggaaccggtcgtaccccttcaacaacggggacctcaccatctccatcaacgtgctctacaactacctggaggccaaccccaaggtgccctgggacgatctccgctacctttttggtgaaatcatgtatggcggccacatcacagatgactgggaccgtcggctgtgcaggacctacctggctgaatacatccggacggagatgctggagggagacgtcctgctggcccccggctttcagatcccccccaacctggactacaagggttaccacgaatacatcgatgagaacctgccccctgagagtccctatctgtatggcctgcaccccaacgcagagattggctttctgacggtcacctcagagaagctgttccgcactgtcctggaaatgcagccaaaagagacggactcgggggcaggcacgggagtgtcccgcgaggagaaggtgaaggccgtgctggacgacatcctggagaagattccggagactttcaacatggctgagatcatggcaaaggcagcggaaaagaccccctacgtggtagtcgcctttcaagaatgtgaaagaatgaacatcctgaccaacgaaatgcgccgttcgctcaaggagctgaacctggggctgaagggagaactgaccatcacgaccgacgtggaagatctgtccacggctctcttctatgacaccgtgcctgatacgtgggtggcccgggcctacccctccatgatgggcctggcggcctggtacgcagacctgctgctccgcatcaggcggctcgtgtgtccttgcaggaactcgaggcctggacgacagactttgccctgcccaccaccgtgtggctggccggcttcttcaacccccagtcgttcctcacggccatcatgcagtccatggccaggaagaacgagtggcccctggacaagatgtgtctgtctgtcgaggtgaccaagaaaaaccgagaggacatgaccgctcctccgcgagagggctcctacgtgtacggactcttcatggaaggggctcgctgggacacccagactggagtcatcgctgaagcgcggctgaaagagctgaccccggccatgcctgtcatcttcatcaaggccattcctgtggaccgcatggagaccaagaacatctatgagtgtcccgtgtacaaaacacgcatccgcggccccacctatgtctggacctttaacttgaagaccaaagagaaggcagcgaagtggatcctggcagccgtggcgctgctcctacaggtttagctcgctcctgcctcacagcccacactccctggggctggaccacaactcagcccttcacctgtgcacctgtgacttattctttacaggaactggtggtggtttttcgttctcttaaataatcaggtgctttgtaaccaagcacatcggaaccagagggtggaggttggtgtggaagaggtggggcagattaaagccagtggagccactca

SEQ ID NO: 128528 - DNA, 13505 bp, Homo sapiens
  Payload ID: 5156
  Gene Symbol: DNAH2
  Gene Name: dynein, axonemal, heavy chain 2
  Uniprot ID: Q9P225
  ENST ID: ENST00000389173
  CDS Start-End: 15-13298
gttttgcctgcacgatgtccagcaaagctgagaagaagcagcgattgagtggccgaggaagctcccaggcaagctggtcagggcgggccactcgggctgctgtggccacacaggagcaggggaatgccccggctgtcagtgagccagagctgcaggctgagctccccaaggaggagcctgagccacggttggagggacctcaagcacagagtgaagaatcagtggagcccgaggcagatgtgaagcccctcttcctttcccgagctgcgctgacaggactggcggatgcagtgtggacacaggagcatgatgccattctggaacactttgcccaggaccctacagaatccatcctcaccatcttcattgacccttgttttgggctgaagctagagctgggcatgcctgtacagacccagaaccagcttgtctacttcattcgccaagcaccagttcccatcacctgggagaacttcgaggcaactgtgcagtttgggacggtgcggggcccctatatcccggccctgcttcggctgctcggtggagtctttgcccctcagatctttgcaaacacaggctggcctgagagcattagaaatcattttgcttctcatctgcacaagttcttggcctgcctgacagacactcggtacaaactggaggggcacacggtcctctacatccctgcagaggccatgaacatgaagcctgagatggtgataaaggacaaagagctggtgcaacggctagagacctccatgatccactggacccggcagataaaggagatgctcagtgcccaggagactgtggagacaggagaaaatttaggtcctctggaggagattgagttctggcgcaaccgatgcatggacctgtctggcatcagtaagcagctggtgaagaagggagtgaagcacgttgaatccatcctgcaccttgccaagtcgtcctacttggcgccctttatgaaactggcacagcagatccaggatggctctcgtcaagcacagtcaaacctgacctttttgtcaatcctgaaggaaccttaccaggagttggctttcatgaagcccaaggacatctctagcaagctccctaagctgatcagtctcatccgcatcatctgggtcaactctccccactacaacactcgggagagactgacctcgctcttccgaaaggtatgtgactgtcagtatcacttcgcccgctgggaagatggcaagcagggtccccttccttgcttctttggtgcccaggggccacagataacacggaacttgctggagattgaggacatctttcataaaaatctgcacacgctgcgagccgttcgcgggggtatcctggatgtcaagaacacctgttggcatgaagactacaataagttccgtgccggaatcaaggacctggaggtgatgacccagaacctgatcacctcagccttcgagttggtgcgggacgtgccgcacggcgtgcttctgctggacaccttccacaggcttgcctcccgcgaggctatcaagcggacttatgacaagaaggcggtggatctctacatgctgttcaatagcgagctggccctggtgaaccgtgaacggaacaagaaatggccagacctggagccctacgtggcccagtattccggaaaggcgcgctgggtgcacatcctccggcgtcgcatcgacagagtcatgacctgccttgctggtgctcatttcctgccccgtattgggactggaaaggagagtgtgcacacctatcagcagatggtccaggccattgatgagctggttcgaaaaaccttccaagagtggacatcaagtctggacaaggattgcattcggcggttggataccccattgctgcgaatcagccaggagaaggcgggcatgctggatgtcaactttgacaagtcccttctgattctctttgcggaaattgactactgggagcggctgctgtttgagacgccccattacgtggtgaacgtagctgagcgagccgaggacctgcgcattctgcgtgaaaatctgctactcgttgctagagactacaataggattattgccatgctgtccccagatgagcaggccctattcaaagagcgtattcggctcctggataagaagatccacccgggactcaagaaactgcactgggccttgaagggggccagtgccttcttcatcacggagtgccgtatacatgccagcaaggtgcagatgattgtgaatgagttcaaggcatccactctgaccattggctggcgagcccaagagatgtcagagaagctgctggtacgcattagtggcaaacgggtatacagggacctggaatttgaagaggaccaaagagagcatcgggcagctgtacagcagaaattgatgaacctgcaccaggatgtggtgaccatcatgaccaactcctatgaggtcttcaagaatgatggtcctgagattcagcagcagtggatgctgtacatgattcggctggaccgcatgatggaggatgccctgcgcctgaatgtgaagtggtcactgctagaactatccaaggctatcaacggggatggaaagaccagcccaaacccactcttccaagtccttgtcattttgaagaatgatctgcaaggaagtgtggcacaggtggaattctcacccactctgcagactttggcaggtgtggtcaatgacattggcaaccacctcttttccaccatctctgtcttctgccacctccctgacattctcaccaagcgcaagttacatcgtgaacccatccaaacagttgtggagcaagatgaggacatcaagaagatccagacccaaatcagcagcggcatgactaacaacgcaagcctgctgcagaactacctcaagacctgggacatgtaccgggagatctgggagatcaacaaggactccttcattcatcgctaccagcgcctcaaccctcctgtctcttcttttgttgccgacattgcccgctacacggaagttgctaataacgtgcagaaggaggagacagtcaccaacatccagtttgtgctgctggactgttcgcacctcaagttctccctggtgcagcactgcaatgaatggcagaacaagttcgcgactctgctcagggagatggctgctgggcgcctcctggagctgcacacctacctgaaggagaacgcagagaaaatcagccgccctccgcagacactggaggaactgggggtcagcttgcagctcgtggatgccctgaagcacgacttggccaacgtggagactcagatccctcccatacacgagcaatttgccattcttgaaaagtacgaggtgccagtcgaggacagtgtcctggagatgctggacagtctcaacggggagtgggttgtcttccaacaaactctgctggacagtaagcaaatgctgaagaaacacaaggagaaattcaagacaggcctgatccactcggcagatgacttcaagaagaaagcacatacacttctggaagatttcgaattcaaaggccatttcaccagcaacgtgggatacatgtctgccttagaccagattacacaagtgcgggccatgctgatggccatgcgggaagaggaaaatagtctccgagccaacctgggcatcttcaagatcgagcagccaccctccaaggaccttcagaacctggagaaggagctcgatgccctccagcaaatctgggagatcgcacgagactgggaggagaactggaatgagtggaagactggccggttcctgatcctgcagacggaaaccatggagaccacggcccacgggctgtttcgtcgcctcacaaaattagccaaagagtataaggaccgaaactgggaaattattgaaaccactcgctcaaaaatagagcagttcaagaggaccatgcctctcatctcagacctgcggaaccctgcccttagagagaggcactgggaccaggtccgggatgagatccagcgggagtttgatcaggaatctgaaagcttcaccttggagcagattgtggagcttgggatggatcagcatgtggagaaaattggggagatctctgcttcagcaactaaagagctggctatagaagtggctttacaaaacattgccaagacctgggatgtgactcagctcgacatagtaccctacaaggataagggccatcatcggctcagaggtacagaagaagtattccaggcactggaagataaccaggtagctctgtctaccatgaaggcatcacgctttgtcaaggcctttgagaaggatgtggaccactgggaacgctgcctctccctcattttggaggttattgagatgattctcacagtgcagcgtcagtggatgtacttagagaatatcttcctaggagaagacatccgcaagcagctgcccaatgaatcgaccttatttgaccaggtcaacagcaactggaaagccatcatggacaggatgaacaaggacaacaatgctctccggagcacccatcacccaggcctcctggacacattgatagaaatgaatacaatcctggaagatattcagaaatctctggatatgtatttagagaccaagcgacatattttcccccgcttctacttcttgtccaatgatgacctgctggagattctgggccagtcccgaaacccagaggctgtgcagccacacctcaaaaaatgctttgacaacatcaagttgctgagaatccagaaggttggagggcccagcagcaaatgggaagctgtggggatgttctcgggcgacggcgagtacattgacttcctccactcagtatttttagaaggccctgtggagtcctggcttggcgatgtggaacagaccatgagggtgaccctgcgggaccttctccggaactgccacctggccctcaggaagttcctcaacaagagggacaaatgggtgaaggagtgggctggccaggtggtgatcactgccagtcagatccagtggacggctgatgtcaccaagtgcctgctgacagcgaaggagcgggcagacaagaaaatcctcaaggtcatgaagaagaaccaggtgtcaatcctgaataagtattcagaagccatcagggggaacttgaccaagatcatgcggcttaaaattgtggctctggtgacgatagaaattcatgcccgggatgtgttggagaagctttacaagagtggcctcatggatgtcaattcctttgactggctcagccaacttcggttctactgggagaaggatcttgatgactgtgtcatccgccagaccaacacgcaatttcagtataattatgagtacttgggtaactcgggccggctcgtcatcacccccctgacggacaggtgttacatgacactgaccacggcattgcacctgcaccgagggggctcccccaaaggccctgcaggcacaggcaagaccgagaccgtcaaggacctgggcaaggccctgggcatatatgtcattgtggtcaactgctctgagggcctggactacaagtccatgggccgaatgtactcaggtctggcccagactggagcttggggctgctttgatgagtttaaccgcatcaacatcgaggtgctgtcagtggtggcccaccagatcctgtgcatcctgtctgccctggctgccggcctcacccatttccattttgatggctttgaaataaatctggtgtggtcctgtgggatcttcattaccatgaatcctggctatgctggccgcacagagcttcccgaaaatcttaaatccatgttccgcccaattgccatggtggtgcctgactccaccctcattgcagaaatcattctctttggagagggctttggcaactgcaagattctggccaagaaggtgtacacactctactcactggctgtgcagcagctgtccagacaggaccactatgactttggcctgcgtgccctcacctcccttctgcgctatgctggcaagaagcgccgcctacagccggatctgactgatgaagaggttctgctgctctcaatgagagatatgaacatcgccaagctcacttcagttgatgcacccctgttcaatgccatcgtgcaagatctgtttcccaacattgagctgcctgtcattgactatggcaagctgcgggagaccgttgagcaggagattcgagacatgggcctgcaaagcacgccgttcaccctcaccaaggttttccagttgtatgaaaccaagaactcccgccactccaccatgatcgtgggctgcacgggcagcggcaagactgcctcatggcgcattctacaggcctccctgtcctctctgtgccgcgccggagaccctaacttcaacattgttagagagttccctttgaaccccaaggcattgtccctaggggaactgtatggggaatatgacctcagcaccaatgaatggacagatggcatcttgtccagtgtcatgcggacggcatgtgcagatgagaaacccgacgagaagtggatcctgttcgatggccccgtggacacactgtggatcgagaacatgaactccgtcatggacgataacaaggtgttgaccctcatcaacggcgagcgcatcgcgatgcccgagcaggtgtctctcctgtttgaagtggaggacctggcaatggcctctccggccactgtatcccgctgcgggatggtctacactgactacgctgacctgggctggaagccctatgttcagtcatggctggagaagaggccaaaggctgaggtggagccccttcaacgcatgttcgaaaagctcatcaacaagatgctggcctttaagaaggacaactgcaaggagctggtgcccctgcccgagtacagcggtatcacctccctctgcaagctgtactctgccctggccacgccagagaatggggtgaacccagctgacggcgagaactatgtcaccatggtagagatgacatttgtgttcagcatgatctggtctgtgtgtgcctctgtggatgaggagggccggaagaggatcgacagctacctccgagagatcgagggctcctttcccaataaggacacggtatatgagtattttgtggaccccaaaatacggagttggacatcatttgaggacaagctccctaagagttggcgctaccctccaaacgcccccttctataagatcatggtgcccaccgtcgacactgttcgctacaactacctggtgagcagcttggtggccaaccagaatcccattctgctggtgggtcccgtggggactgggaagacctccatcgcccagagcgttctgcagtccctgccctccagccagtggtcggtgctcgttgtcaacatgtccgcacagaccacatccaataacgtgcagagcatcattgagagcagggttgagaagcgaaccaagggtgtctacgtgccattcgggggcaaaagcatgatcacctttatggatgacctaaatatgcccgctaaggacatgtttgggtcccagccacccctggagctgatccgcctctggattgactatggcttctggtatgaccgtacgaagcagaccatcaagtacattcgagaaatgttcctgatggctgccatgggcccccctgggggtggacggactgtcatctccccaaggctacggagtcgcttcaacattatcaacatgaccttccccacaaagtcccagatcatccgcatattcggcaccatgatcaatcagaagcttcaggactttgaggaagaggtgaagcccattgggaacgtggtgacagaggccaccctggacatgtacaacaccgtggtacagcgcttcctgcccacgcccaccaagatgcattacctcttcaaccttcgagacatctccaaggtgttccagggcatgcttagagccaacaaggacttccatgataccaagtccagcatcacacggctctggatccatgaatgtttcagagtcttctctgaccggctggttgatgcggcagacacagaagccttcatgggcatcataagcgacaagctcggctccttctttgacctcacatttcatcatctctgtcccagcaagcgtcctcctatctttggggatttcctgaaggagcccaaggtgtatgaagacctcacggatctgacagtgctgaagacagtcatggagacagctctaaatgagtataacctgtcaccctctgtcgtgcccatgcagctagtgctcttccgagaggctattgaacacatcacacggatcgtgcgggtcattggacagcctcggggcaacatgctcctggtgggtatcgggggcagcggacgccagagtctggcccgcctggcttcatccatctgcgactacaccaccttccagatcgaggtcaccaaacattatcggaagcaggagttccgagatgatatcaagcgtctgtatcgccaggctggggtggagctcaagaccacgtccttcatttttgtggacacccaaatagctgatgagtccttcctagaggacatcaacaacatcctcagctcaggcgaggtgcccaatctctacaagcctgatgaatttgaagagatccagtcgcatatcatagaccaggcccgggtggagcaggtgcctgagtcatcggacagcctcttcgcctacctcattgaacgcgtgcagaacaacctgcacatcgtgctctgcctcagccccatgggggatcccttcaggaactggatccgccagtacccagccttggtgaactgcacaaccatcaactggttctcagagtggccccaagaggccctgctcgaggtggctgagaagtgcctcataggagtagacctgggaactcaggagaatatccacaggaaggtggcccagatctttgtcactatgcactggtcagtagctcagtattcccagaagatgctgttggaactgcggagacacaactatgtcacacccaccaaatacctggaactcctgtctggatataagaagttgctgggagaaaaacggcaggagctgctggcccaagccaataaactgcggacaggcttgttcaagatcgacgaaactagggaaaaggtgcaagtgatgtcgttggagctggaggatgccaagaagaaggtggctgagttccagaagcagtgtgaggagtacctggtcatcattgtgcagcagaagcgggaggcagatgagcagcagaaggccgtaacagccaacagtgaaaagattgcagttgaggaaatcaagtgtcaggcactggctgacaatgcccagaaagatctagaagaggcactgcccgccctggaagaggccatgcgggccctggagtctctgaacaagaaggatataggagagatcaagtcttatggacggcccccagcccaagtggagatagtgatgcaggcagttatgattcttcgaggcaacgagcccacatgggcagaggccaagaggcagctaggggaacagaacttcatcaagtcactgatcaactttgataaagacaatatctcagataaggttctgaagaagattggggcctactgcgcccagcctgacttccagcctgatatcatcggccgcgtctccctggctgccaagtccctctgcatgtgggtgcgggccatggagctgtatgggcggctatatcgggtggtggagcccaagcgaatccgaatgaacgctgccttggctcagcttcgggagaagcaagccgcgctcgctgaggcccaggagaagctgcgggaggtagctgagaaactggagatgctaaagaaacagtatgatgagaagctggcacagaaggaggagcttcgcaagaagtctgaagagatggagctgaagctggagcgagctgggatgctcgtgtcggggttggctggcgagaaggccagatgggaggagacagtccagggcctggaggaggacctgggctacctggtgggggactgtctcctggcagctgccttcctgtcctacatgggacccttcctgaccaactaccgggatgagattgtcaaccaaatctggatcgggaagatctgggagcttcaggttccttgctccccttctttcgccatcgataacttcctgtgcaatcctaccaaagtccgggactggaacatccaagggttgccctcagacgccttctccactgagaatggcatcatcgtcacccgaggcaacaggtgggcactgatgatcgaccctcaggcccaggccctgaaatggattaagaacatggaaggaggccagggcctgaagatcatcgacctgcagatgagcgattacctgcgaatcctagaacacgccattcactttggatacccggtgctacttcagaacgtgcaggaatatctggaccccacactgaaccccatgctcaacaaatctgtagcccgaatcggtggtcggctgttgatgcgcattggcgataaggaggtggaatataataccaatttccgtttctacatcaccaccaagctctccaacccccactacagcccagagacctcagccaagaccaccatcgtcaactttgctgttaaagaacagggcctggaggcccagctgctgggcattgtggtgcggaaggagcggcctgagctggaggagcagaaggactcactggtcatcaacatcgcggctggtaaaaggaagctcaaggagctggaggatgagatcctgcggctgctgaatgaggccaccggctccctgctggatgatgtgcagctggtgaacacgctgcatacctccaagatcacagccacagaggtgactgagcagctggagaccagtgagaccacagagatcaacactgacttggcgcgggaggcttaccgcccatgcgcccagcgggcatcaatcctgttcttcgtgctcaatgatatgggctgcatcgaccccatgtaccagttctcactggatgcctacatcagcctctttattctcagcattgacaaaagccaccgcagcaataagctggaggaccgcattgactacctgaatgactaccacacctacgctgtctacaggtacacctgccgtacccttttcgaacgccacaaactactattcagttttcatatgtgtgccaaaatcttggagacttctggcaagctcaacatggatgaatacaacttctttctacgtgggggtgtggtcttggatcgggagggccaaatggacaatccatgtagtagctggcttgcagatgcctactgggataacatcacagagctagacaaactgaccaacttccacggactcatgaactcctttgagcagtaccctcgtgactggcacctgtggtataccaatgctgccccggagaaggcgatgctgccaggtgagtgggaaaatgcctgcaatgaaatgcaacggatgctgatcgttcgctccctgcgccaggaccgcgtggccttctgcgtgacctccttcatcatcaccaaccttggctcccgcttcatcgagccgcctgtgctgaatatgaagtcggtgctggaggattcaaccccacgatccccactcgtgttcatcctgtcccctggtgtggaccccaccagtgccctgctgcagctggcagagcacatgggcatggcccagcgcttccacgccctgtccctgggccagggccaggcccccatcgctgctcggctcctccgagagggtgtgactcagggacactgggtgttcctggcaaactgccacctgtcactgtcttggatgcctaatctggacaagctggtggagcagctgcaggtggaggatcctcatccatccttccgcctctggctcagctccatcccccacccagacttccctatctcaatcttgcaggtcagcatcaagatgaccacagagccaccaaagggcctaaaggccaacatgacacgtctttaccaactgatgtcagaaccacagttttcccgctgctccaaacctgccaaatataagaagctgctgttttcactctgtttcttccactctgtgttacttgaacgcaaaaagttcctgcagcttggctggaacatcatctatggcttcaatgactccgactttgaggtgtcagaaaacttgctgagcctctatctcgatgagtacgaggagacaccttgggacgcacttaagtacctcattgccggcatcaactatggtggacatgtcacagatgactgggaccggcgcctgctgaccacctacatcaatgattatttctgtgaccagtctctatcaactcccttccaccggttgtcagcactggagacttatttcatccccaaggatggcagcctcgcttcttacaaggaatacatcagcttattgcctggcatggacccccctgaggcctttggccagcaccccaatgctgatgtggcctctcagatcactgaggcacaaaccctctttgatactttgctttccttgcaacctcagattacacccaccagggctggaggccagacccgggaagagaaggtccttgagttggccgctgatgtgaagcagaagatccctgaaatgatcgactatgaggggactcaaaaactgctagctctcgacccctcccccctcaatgtggtccttctgcaggagatccagagatacaacacactgatgcagaccatcctgttctcactgacagacctagagaaaggcatccagggtctcatcgtcatgtctacaagcctggaagagattttcaattgcatctttgatgcccatgttcctccgctctggggaaaggcatacccctcacaaaagccattggctgcctggacccgggacttggccatgcgtgtggagcagtttgagctgtgggccagccgggcccggcctcctgtgatcttctggttgtctggtttcacctttcccactggcttcctcactgctgtgctgcagtcttcagctcgccaaaacaacgtttcagtggacagcctctcctgggagtttatcgtttccactgtggatgacagcaacctagtgtatccccccaaggatggtgtctgggtccggggcctgtacctggaaggtgctggctgggaccggaagaactcctgcttggtggaggcagagcccatgcagcttgtctgcctcatgcccacgatccacttccggcctgcagagagccgcaagaagagcgccaagggcatgtactcctgcccctgctattactatcccaaccgggcaggcagctcagaccgagcctcctttgtcatcggcattgacctgcggtctggggccatgacacctgatcattggatcaagaggggcactgctctactcatgagcctggacagctgagacctcctcctcttctccgcttgagagagagggtcagggactccaggagctaagacagatgttgcacctaggactgaggccggacctcactcagactttgaccttggccgaatttgtgtgatgtggccctggagatacctagttgtgttagccataaaagtgaaagagttgtattggagctcagtgctgtaaaacacccgcgacaac

SEQ ID NO: 128529 - DNA, 14955 bp, Homo sapiens
  Payload ID: 5156
  Gene Symbol: DNAH2
  Gene Name: dynein, axonemal, heavy chain 2
  Uniprot ID: Q9P225
  ENST ID: ENST00000572933
  CDS Start-End: 1461-14744
cttctacatcgcgaatatccctcgccggcctggcgcccggcgccatctgctggacccgttccggctggggcgcacagacctgggcgcggggtcgggcgattgggttctccctgccttttcaatgtcctgcggggcggtggctcactgtctctcgccccagcccttccagctgggtcctgacaccaggccccccgcacccttcggctcgccagatgtggctactttcctttagtcccggagccttcaagccctgggtccctgaggggtagacctgggcggggtggggccgcgaagcagggatccagggcgcctgcgcggaggaggcgggctccgaggggccgcacaccggccactcgcccctccctgcccggggttgccatggggacgcgtgcagacgccggcccgagagggctgcgaggggcaacttcttagagtggcccatcggtcggtctagggaggggagggtcagcgtggcaaggtgtgtgtcgggggcagagggaaggagggaaggagtgctggggagaaggggcagtagtgtcggggtaggaagggacagttgttggggagaagaggcagttgtggagggagagggagcaaggaatatttgtgtgggggagggggaggagaaggggcagttgtgacagctgggggggaagagccattctgaggggaaatttgcctgctggtaaccagtttaaggataccagctgctggtataaatactgctggataaatactgctggatttatactgcaggataaatactgctggcccctgcggtatttcctagtactagagtgagccccgacttagcagagcagttcctcctggggcctgcggtgtgggatcgcgtggtgaaccccacggtgcatgcgcctcaggctctagtttgaggcaggaaagcgcagcttgatgcttctctggagactgatggaggaagcctccttgctgtagttggttttattgatttgctggcctaacagaacgtttttccttggagcaaagtacaaatccttcaagtttgaaattcataacctgagatcaatgcctgtggcagcctgtggggatgaggaaggagagccacaggtgccgttaggctgcagcctaatgaaaagagagtgcccagcgcctcagactttgcgcctgggattctgagcacctgtccgagatccccgcttcctgccatcctacctttctgagagaggcaccactgtgaccttcctcgtgccccaattgctttttcctcatgacacaatttgaaatttatgattggatgacttttgtccttctttcttccaatctgttctcagggcattttgagtcaaataaatgatcctgactgatcttaaccattagcacagagttcctcagccaactctgctaagagacctcagtacacacaaaacagtgttcctgcccctcaggacttcaaagcgatagacccaggttttgcctgcacgatgtccagcaaagctgagaagaagcagcgattgagtggccgaggaagctcccaggcaagctggtcagggcgggccactcgggctgctgtggccacacaggagcaggggaatgccccggctgtcagtgagccagagctgcaggctgagctccccaaggaggagcctgagccacggttggagggacctcaagcacagagtgaagaatcagtggagcccgaggcagatgtgaagcccctcttcctttcccgagctgcgctgacaggactggcggatgcagtgtggacacaggagcatgatgccattctggaacactttgcccaggaccctacagaatccatcctcaccatcttcattgacccttgttttgggctgaagctagagctgggcatgcctgtacagacccagaaccagcttgtctacttcattcgccaagcaccagttcccatcacctgggagaacttcgaggcaactgtgcagtttgggacggtgcggggcccctatatcccggccctgcttcggctgctcggtggagtctttgcccctcagatctttgcaaacacaggctggcctgagagcattagaaatcattttgcttctcatctgcacaagttcttggcctgcctgacagacactcggtacaaactggaggggcacacggtcctctacatccctgcagaggccatgaacatgaagcctgagatggtgataaaggacaaagagctggtgcaacggctagagacctccatgatccactggacccggcagataaaggagatgctcagtgcccaggagactgtggagacaggagaaaatttaggtcctctggaggagattgagttctggcgcaaccgatgcatggacctgtctggcatcagtaagcagctggtgaagaagggagtgaagcacgttgaatccatcctgcaccttgccaagtcgtcctacttggcgccctttatgaaactggcacagcagatccaggatggctctcgtcaagcacagtcaaacctgacctttttgtcaatcctgaaggaaccttaccaggagttggctttcatgaagcccaaggacatctctagcaagctccctaagctgatcagtctcatccgcatcatctgggtcaactctccccactacaacactcgggagagactgacctcgctcttccgaaaggtatgtgactgtcagtatcacttcgcccgctgggaagatggcaagcagggtccccttccttgcttctttggtgcccaggggccacagataacacggaacttgctggagattgaggacatctttcataaaaatctgcacacgctgcgagccgttcgcgggggtatcctggatgtcaagaacacctgttggcatgaagactacaataagttccgtgccggaatcaaggacctggaggtgatgacccagaacctgatcacctcagccttcgagttggtgcgggacgtgccgcacggcgtgcttctgctggacaccttccacaggcttgcctcccgcgaggctatcaagcggacttatgacaagaaggcggtggatctctacatgctgttcaatagcgagctggccctggtgaaccgtgaacggaacaagaaatggccagacctggagccctacgtggcccagtattccggaaaggcgcgctgggtgcacatcctccggcgtcgcatcgacagagtcatgacctgccttgctggtgctcatttcctgccccgtattgggactggaaaggagagtgtgcacacctatcagcagatggtccaggccattgatgagctggttcgaaaaaccttccaagagtggacatcaagtctggacaaggattgcattcggcggttggataccccattgctgcgaatcagccaggagaaggcgggcatgctggatgtcaactttgacaagtcccttctgattctctttgcggaaattgactactgggagcggctgctgtttgagacgccccattacgtggtgaacgtagctgagcgagccgaggacctgcgcattctgcgtgaaaatctgctactcgttgctagagactacaataggattattgccatgctgtccccagatgagcaggccctattcaaagagcgtattcggctcctggataagaagatccacccgggactcaagaaactgcactgggccttgaagggggccagtgccttcttcatcacggagtgccgtatacatgccagcaaggtgcagatgattgtgaatgagttcaaggcatccactctgaccattggctggcgagcccaagagatgtcagagaagctgctggtacgcattagtggcaaacgggtatacagggacctggaatttgaagaggaccaaagagagcatcgggcagctgtacagcagaaattgatgaacctgcaccaggatgtggtgaccatcatgaccaactcctatgaggtcttcaagaatgatggtcctgagattcagcagcagtggatgctgtacatgattcggctggaccgcatgatggaggatgccctgcgcctgaatgtgaagtggtcactgctagaactatccaaggctatcaacggggatggaaagaccagcccaaacccactcttccaagtccttgtcattttgaagaatgatctgcaaggaagtgtggcacaggtggaattctcacccactctgcagactttggcaggtgtggtcaatgacattggcaaccacctcttttccaccatctctgtcttctgccacctccctgacattctcaccaagcgcaagttacatcgtgaacccatccaaacagttgtggagcaagatgaggacatcaagaagatccagacccaaatcagcagcggcatgactaacaacgcaagcctgctgcagaactacctcaagacctgggacatgtaccgggagatctgggagatcaacaaggactccttcattcatcgctaccagcgcctcaaccctcctgtctcttcttttgttgccgacattgcccgctacacggaagttgctaataacgtgcagaaggaggagacagtcaccaacatccagtttgtgctgctggactgttcgcacctcaagttctccctggtgcagcactgcaatgaatggcagaacaagttcgcgactctgctcagggagatggctgctgggcgcctcctggagctgcacacctacctgaaggagaacgcagagaaaatcagccgccctccgcagacactggaggaactgggggtcagcttgcagctcgtggatgccctgaagcacgacttggccaacgtggagactcagatccctcccatacacgagcaatttgccattcttgaaaagtacgaggtgccagtcgaggacagtgtcctggagatgctggacagtctcaacggggagtgggttgtcttccaacaaactctgctggacagtaagcaaatgctgaagaaacacaaggagaaattcaagacaggcctgatccactcggcagatgacttcaagaagaaagcacatacacttctggaagatttcgaattcaaaggccatttcaccagcaacgtgggatacatgtctgccttagaccagattacacaagtgcgggccatgctgatggccatgcgggaagaggaaaatagtctccgagccaacctgggcatcttcaagatcgagcagccaccctccaaggaccttcagaacctggagaaggagctcgatgccctccagcaaatctgggagatcgcacgagactgggaggagaactggaatgagtggaagactggccggttcctgatcctgcagacggaaaccatggagaccacggcccacgggctgtttcgtcgcctcacaaaattagccaaagagtataaggaccgaaactgggaaattattgaaaccactcgctcaaaaatagagcagttcaagaggaccatgcctctcatctcagacctgcggaaccctgcccttagagagaggcactgggaccaggtccgggatgagatccagcgggagtttgatcaggaatctgaaagcttcaccttggagcagattgtggagcttgggatggatcagcatgtggagaaaattggggagatctctgcttcagcaactaaagagctggctatagaagtggctttacaaaacattgccaagacctgggatgtgactcagctcgacatagtaccctacaaggataagggccatcatcggctcagaggtacagaagaagtattccaggcactggaagataaccaggtagctctgtctaccatgaaggcatcacgctttgtcaaggcctttgagaaggatgtggaccactgggaacgctgcctctccctcattttggaggttattgagatgattctcacagtgcagcgtcagtggatgtacttagagaatatcttcctaggagaagacatccgcaagcagctgcccaatgaatcgaccttatttgaccaggtcaacagcaactggaaagccatcatggacaggatgaacaaggacaacaatgctctccggagcacccatcacccaggcctcctggacacattgatagaaatgaatacaatcctggaagatattcagaaatctctggatatgtatttagagaccaagcgacatattttcccccgcttctacttcttgtccaatgatgacctgctggagattctgggccagtcccgaaacccagaggctgtgcagccacacctcaaaaaatgctttgacaacatcaagttgctgagaatccagaaggttggagggcccagcagcaaatgggaagctgtggggatgttctcgggcgacggcgagtacattgacttcctccactcagtatttttagaaggccctgtggagtcctggcttggcgatgtggaacagaccatgagggtgaccctgcgggaccttctccggaactgccacctggccctcaggaagttcctcaacaagagggacaaatgggtgaaggagtgggctggccaggtggtgatcactgccagtcagatccagtggacggctgatgtcaccaagtgcctgctgacagcgaaggagcgggcagacaagaaaatcctcaaggtcatgaagaagaaccaggtgtcaatcctgaataagtattcagaagccatcagggggaacttgaccaagatcatgcggcttaaaattgtggctctggtgacgatagaaattcatgcccgggatgtgttggagaagctttacaagagtggcctcatggatgtcaattcctttgactggctcagccaacttcggttctactgggagaaggatcttgatgactgtgtcatccgccagaccaacacgcaatttcagtataattatgagtacttgggtaactcgggccggctcgtcatcacccccctgacggacaggtgttacatgacactgaccacggcattgcacctgcaccgagggggctcccccaaaggccctgcaggcacaggcaagaccgagaccgtcaaggacctgggcaaggccctgggcatatatgtcattgtggtcaactgctctgagggcctggactacaagtccatgggccgaatgtactcaggtctggcccagactggagcttggggctgctttgatgagtttaaccgcatcaacatcgaggtgctgtcagtggtggcccaccagatcctgtgcatcctgtctgccctggctgccggcctcacccatttccattttgatggctttgaaataaatctggtgtggtcctgtgggatcttcattaccatgaatcctggctatgctggccgcacagagcttcccgaaaatcttaaatccatgttccgcccaattgccatggtggtgcctgactccaccctcattgcagaaatcattctctttggagagggctttggcaactgcaagattctggccaagaaggtgtacacactctactcactggctgtgcagcagctgtccagacaggaccactatgactttggcctgcgtgccctcacctcccttctgcgctatgctggcaagaagcgccgcctacagccggatctgactgatgaagaggttctgctgctctcaatgagagatatgaacatcgccaagctcacttcagttgatgcacccctgttcaatgccatcgtgcaagatctgtttcccaacattgagctgcctgtcattgactatggcaagctgcgggagaccgttgagcaggagattcgagacatgggcctgcaaagcacgccgttcaccctcaccaaggttttccagttgtatgaaaccaagaactcccgccactccaccatgatcgtgggctgcacgggcagcggcaagactgcctcatggcgcattctacaggcctccctgtcctctctgtgccgcgccggagaccctaacttcaacattgttagagagttccctttgaaccccaaggcattgtccctaggggaactgtatggggaatatgacctcagcaccaatgaatggacagatggcatcttgtccagtgtcatgcggacggcatgtgcagatgagaaacccgacgagaagtggatcctgttcgatggccccgtggacacactgtggatcgagaacatgaactccgtcatggacgataacaaggtgttgaccctcatcaacggcgagcgcatcgcgatgcccgagcaggtgtctctcctgtttgaagtggaggacctggcaatggcctctccggccactgtatcccgctgcgggatggtctacactgactacgctgacctgggctggaagccctatgttcagtcatggctggagaagaggccaaaggctgaggtggagccccttcaacgcatgttcgaaaagctcatcaacaagatgctggcctttaagaaggacaactgcaaggagctggtgcccctgcccgagtacagcggtatcacctccctctgcaagctgtactctgccctggccacgccagagaatggggtgaacccagctgacggcgagaactatgtcaccatggtagagatgacatttgtgttcagcatgatctggtctgtgtgtgcctctgtggatgaggagggccggaagaggatcgacagctacctccgagagatcgagggctcctttcccaataaggacacggtatatgagtattttgtggaccccaaaatacggagttggacatcatttgaggacaagctccctaagagttggcgctaccctccaaacgcccccttctataagatcatggtgcccaccgtcgacactgttcgctacaactacctggtgagcagcttggtggccaaccagaatcccattctgctggtgggtcccgtggggactgggaagacctccatcgcccagagcgttctgcagtccctgccctccagccagtggtcggtgctcgttgtcaacatgtccgcacagaccacatccaataacgtgcagagcatcattgagagcagggttgagaagcgaaccaagggtgtctacgtgccattcgggggcaaaagcatgatcacctttatggatgacctaaatatgcccgctaaggacatgtttgggtcccagccacccctggagctgatccgcctctggattgactatggcttctggtatgaccgtacgaagcagaccatcaagtacattcgagaaatgttcctgatggctgccatgggcccccctgggggtggacggactgtcatctccccaaggctacggagtcgcttcaacattatcaacatgaccttccccacaaagtcccagatcatccgcatattcggcaccatgatcaatcagaagcttcaggactttgaggaagaggtgaagcccattgggaacgtggtgacagaggccaccctggacatgtacaacaccgtggtacagcgcttcctgcccacgcccaccaagatgcattacctcttcaaccttcgagacatctccaaggtgttccagggcatgcttagagccaacaaggacttccatgataccaagtccagcatcacacggctctggatccatgaatgtttcagagtcttctctgaccggctggttgatgcggcagacacagaagccttcatgggcatcataagcgacaagctcggctccttctttgacctcacatttcatcatctctgtcccagcaagcgtcctcctatctttggggatttcctgaaggagcccaaggtgtatgaagacctcacggatctgacagtgctgaagacagtcatggagacagctctaaatgagtataacctgtcaccctctgtcgtgcccatgcagctagtgctcttccgagaggctattgaacacatcacacggatcgtgcgggtcattggacagcctcggggcaacatgctcctggtgggtatcgggggcagcggacgccagagtctggcccgcctggcttcatccatctgcgactacaccaccttccagatcgaggtcaccaaacattatcggaagcaggagttccgagatgatatcaagcgtctgtatcgccaggctggggtggagctcaagaccacgtccttcatttttgtggacacccaaatagctgatgagtccttcctagaggacatcaacaacatcctcagctcaggcgaggtgcccaatctctacaagcctgatgaatttgaagagatccagtcgcatatcatagaccaggcccgggtggagcaggtgcctgagtcatcggacagcctcttcgcctacctcattgaacgcgtgcagaacaacctgcacatcgtgctctgcctcagccccatgggggatcccttcaggaactggatccgccagtacccagccttggtgaactgcacaaccatcaactggttctcagagtggccccaagaggccctgctcgaggtggctgagaagtgcctcataggagtagacctgggaactcaggagaatatccacaggaaggtggcccagatctttgtcactatgcactggtcagtagctcagtattcccagaagatgctgttggaactgcggagacacaactatgtcacacccaccaaatacctggaactcctgtctggatataagaagttgctgggagaaaaacggcaggagctgctggcccaagccaataaactgcggacaggcttgttcaagatcgacgaaactagggaaaaggtgcaagtgatgtcgttggagctggaggatgccaagaagaaggtggctgagttccagaagcagtgtgaggagtacctggtcatcattgtgcagcagaagcgggaggcagatgagcagcagaaggccgtaacagccaacagtgaaaagattgcagttgaggaaatcaagtgtcaggcactggctgacaatgcccagaaagatctagaagaggcactgcccgccctggaagaggccatgcgggccctggagtctctgaacaagaaggatataggagagatcaagtcttatggacggcccccagcccaagtggagatagtgatgcaggcagttatgattcttcgaggcaacgagcccacatgggcagaggccaagaggcagctaggggaacagaacttcatcaagtcactgatcaactttgataaagacaatatctcagataaggttctgaagaagattggggcctactgcgcccagcctgacttccagcctgatatcatcggccgcgtctccctggctgccaagtccctctgcatgtgggtgcgggccatggagctgtatgggcggctatatcgggtggtggagcccaagcgaatccgaatgaacgctgccttggctcagcttcgggagaagcaagccgcgctcgctgaggcccaggagaagctgcgggaggtagctgagaaactggagatgctaaagaaacagtatgatgagaagctggcacagaaggaggagcttcgcaagaagtctgaagagatggagctgaagctggagcgagctgggatgctcgtgtcggggttggctggcgagaaggccagatgggaggagacagtccagggcctggaggaggacctgggctacctggtgggggactgtctcctggcagctgccttcctgtcctacatgggacccttcctgaccaactaccgggatgagattgtcaaccaaatctggatcgggaagatctgggagcttcaggttccttgctccccttctttcgccatcgataacttcctgtgcaatcctaccaaagtccgggactggaacatccaagggttgccctcagacgccttctccactgagaatggcatcatcgtcacccgaggcaacaggtgggcactgatgatcgaccctcaggcccaggccctgaaatggattaagaacatggaaggaggccagggcctgaagatcatcgacctgcagatgagcgattacctgcgaatcctagaacacgccattcactttggatacccggtgctacttcagaacgtgcaggaatatctggaccccacactgaaccccatgctcaacaaatctgtagcccgaatcggtggtcggctgttgatgcgcattggcgataaggaggtggaatataataccaatttccgtttctacatcaccaccaagctctccaacccccactacagcccagagacctcagccaagaccaccatcgtcaactttgctgttaaagaacagggcctggaggcccagctgctgggcattgtggtgcggaaggagcggcctgagctggaggagcagaaggactcactggtcatcaacatcgcggctggtaaaaggaagctcaaggagctggaggatgagatcctgcggctgctgaatgaggccaccggctccctgctggatgatgtgcagctggtgaacacgctgcatacctccaagatcacagccacagaggtgactgagcagctggagaccagtgagaccacagagatcaacactgacttggcgcgggaggcttaccgcccatgcgcccagcgggcatcaatcctgttcttcgtgctcaatgatatgggctgcatcgaccccatgtaccagttctcactggatgcctacatcagcctctttattctcagcattgacaaaagccaccgcagcaataagctggaggaccgcattgactacctgaatgactaccacacctacgctgtctacaggtacacctgccgtacccttttcgaacgccacaaactactattcagttttcatatgtgtgccaaaatcttggagacttctggcaagctcaacatggatgaatacaacttctttctacgtgggggtgtggtcttggatcgggagggccaaatggacaatccatgtagtagctggcttgcagatgcctactgggataacatcacagagctagacaaactgaccaacttccacggactcatgaactcctttgagcagtaccctcgtgactggcacctgtggtataccaatgctgccccggagaaggcgatgctgccaggtgagtgggaaaatgcctgcaatgaaatgcaacggatgctgatcgttcgctccctgcgccaggaccgcgtggccttctgcgtgacctccttcatcatcaccaaccttggctcccgcttcatcgagccgcctgtgctgaatatgaagtcggtgctggaggattcaaccccacgatccccactcgtgttcatcctgtcccctggtgtggaccccaccagtgccctgctgcagctggcagagcacatgggcatggcccagcgcttccacgccctgtccctgggccagggccaggcccccatcgctgctcggctcctccgagagggtgtgactcagggacactgggtgttcctggcaaactgccacctgtcactgtcttggatgcctaatctggacaagctggtggagcagctgcaggtggaggatcctcatccatccttccgcctctggctcagctccatcccccacccagacttccctatctcaatcttgcaggtcagcatcaagatgaccacagagccaccaaagggcctaaaggccaacatgacacgtctttaccaactgatgtcagaaccacagttttcccgctgctccaaacctgccaaatataagaagctgctgttttcactctgtttcttccactctgtgttacttgaacgcaaaaagttcctgcagcttggctggaacatcatctatggcttcaatgactccgactttgaggtgtcagaaaacttgctgagcctctatctcgatgagtacgaggagacaccttgggacgcacttaagtacctcattgccggcatcaactatggtggacatgtcacagatgactgggaccggcgcctgctgaccacctacatcaatgattatttctgtgaccagtctctatcaactcccttccaccggttgtcagcactggagacttatttcatccccaaggatggcagcctcgcttcttacaaggaatacatcagcttattgcctggcatggacccccctgaggcctttggccagcaccccaatgctgatgtggcctctcagatcactgaggcacaaaccctctttgatactttgctttccttgcaacctcagattacacccaccagggctggaggccagacccgggaagagaaggtccttgagttggccgctgatgtgaagcagaagatccctgaaatgatcgactatgaggggactcaaaaactgctagctctcgacccctcccccctcaatgtggtccttctgcaggagatccagagatacaacacactgatgcagaccatcctgttctcactgacagacctagagaaaggcatccagggtctcatcgtcatgtctacaagcctggaagagattttcaattgcatctttgatgcccatgttcctccgctctggggaaaggcatacccctcacaaaagccattggctgcctggacccgggacttggccatgcgtgtggagcagtttgagctgtgggccagccgggcccggcctcctgtgatcttctggttgtctggtttcacctttcccactggcttcctcactgctgtgctgcagtcttcagctcgccaaaacaacgtttcagtggacagcctctcctgggagtttatcgtttccactgtggatgacagcaacctagtgtatccccccaaggatggtgtctgggtccggggcctgtacctggaaggtgctggctgggaccggaagaactcctgcttggtggaggcagagcccatgcagcttgtctgcctcatgcccacgatccacttccggcctgcagagagccgcaagaagagcgccaagggcatgtactcctgcccctgctattactatcccaaccgggcaggcagctcagaccgagcctcctttgtcatcggcattgacctgcggtctggggccatgacacctgatcattggatcaagaggggcactgctctactcatgagcctggacagctgagacctcctcctcttctccgcttgagagagagggtcagggactccaggagctaagacagatgttgcacctaggactgaggccggacctcactcagactttgaccttggccgaatttgtgtgatgtggccctggagatacctagttgtgttagccataaaagtgaaagagttgtattggagctcagtgctgtaaaacacccgcgacaacaagc

SEQ ID NO: 128530 - DNA, 2994 bp, Homo sapiens
  Payload ID: 5156
  Gene Symbol: DNAH2
  Gene Name: dynein, axonemal, heavy chain 2
  Uniprot ID: Q9P225
  ENST ID: ENST00000570791
  CDS Start-End: 86-2704
agggctgcgaggggcaacttcttagagtggcccatcggtcggtctagggaggggagggtcagcgtggcaaggttttgcctgcacgatgtccagcaaagctgagaagaagcagcgattgagtggccgaggaagctcccaggcaagctggtcagggcgggccactcgggctgctgtggccacacaggagcaggggaatgccccggctgtcagtgagccagagctgcaggctgagctccccaaggaggagcctgagccacggttggagggacctcaagcacagagtgaagaatcagtggagcccgaggcagatgtgaagcccctcttcctttcccgagctgcgctgacaggactggcggatgcagtgtggacacaggagcatgatgccattctggaacactttgcccaggaccctacagaatccatcctcaccatcttcattgacccttgttttgggctgaagctagagctgggcatgcctgtacagacccagaaccagcttgtctacttcattcgccaagcaccagttcccatcacctgggagaacttcgaggcaactgtgcagtttgggacggtgcggggcccctatatcccggccctgcttcggctgctcggtggagtctttgcccctcagatctttgcaaacacaggctggcctgagagcattagaaatcattttgcttctcatctgcacaagttcttggcctgcctgacagacactcggtacaaactggaggggcacacggtcctctacatccctgcagaggccatgaacatgaagcctgagatggtgataaaggacaaagagctggtgcaacggctagagacctccatgatccactggacccggcagataaaggagatgctcagtgcccaggagactgtggagacaggagaaaatttaggtcctctggaggagattgagttctggcgcaaccgatgcatggacctgtctggcatcagtaagcagctggtgaagaagggagtgaagcacgttgaatccatcctgcaccttgccaagtcgtcctacttggcgccctttatgaaactggcacagcagatccaggatggctctcgtcaagcacagtcaaacctgacctttttgtcaatcctgaaggaaccttaccaggagttggctttcatgaagcccaaggacatctctagcaagctccctaagctgatcagtctcatccgcatcatctgggtcaactctccccactacaacactcgggagagactgacctcgctcttccgaaagatgagcaatgagatcatccgcttatgctgccacgccatctccctggaccggatctttgagggatatgtctcttccagcaaggaggacctgcaaggctgcattctctgttgtcacgcttggaaagatcactacgtacaggctgtgcagatgcacatccagttctccagtcggggctgggtcctagatcagaccagcatctttgctcaggttgatgcctttgtgcagcgctgcaaggaccttattgaggtatgtgactgtcagtatcacttcgcccgctgggaagatggcaagcagggtccccttccttgcttctttggtgcccaggggccacagataacacggaacttgctggagattgaggacatctttcataaaaatctgcacacgctgcgagccgttcgcgggggtatcctggatgtcaagaacacctgttggcatgaagactacaataagttccgtgccggaatcaaggacctggaggtgatgacccagaacctgatcacctcagccttcgagttggtgcgggacgtgccgcacggcgtgcttctgctggacaccttccacaggcttgcctcccgcgaggctatcaagcggacttatgacaagaaggcggtggatctctacatgctgttcaatagcgagctggccctggtgaaccgtgaacggaacaagaaatggccagacctggagccctacgtggcccagtattccggaaaggcgcgctgggtgcacatcctccggcgtcgcatcgacagagtcatgacctgccttgctggtgctcatttcctgccccgtattgggactggaaaggagagtgtgcacacctatcagcagatggtccaggccattgatgagctggttcgaaaaaccttccaagagtggacatcaagtctggacaaggattgcattcggcggttggataccccattgctgcgaatcagccaggagaaggcgggcatgctggatgtcaactttgacaagtacaggagccacctggccccttttccctatactccccttctgcagctctcccaagaatttcactcccatcttttgactcctctcttcattattctctctctttctcatacaatatgtttgctatcgtcattttacttttttttttcttcttttatttttgtctctccccacctcccaccctgctatcaacattttaattttacaacttatcttaaaacacaacaaaacaaaacaatgatcggccaggcacggtggctcacacctgtaatcccagcactttgggaggctgaggtgggcgcatcgcttgagcccaggagtttgagaacagcctgggcaacatggcaaaacccagtctctgcaaaaaatacaaagattagctgggcgtggtggcacaagcctgtagtctcagctacttgggagggtgaggtgggaggatcgcctgagcccgggaggcagaggctgcagtgagctgagatcacaccactacactccagcctgggcgacagagtgaccctgcctcaaaaacaaaaatcaaaaaccactccactatctgactaaaccagtgatgtcgctgttctgccactagatggccataatggctcagctaagtcacccaaaccctgtccctttcctgactgttggtggggctgtcagaccatgccttcttctacagcttcattgttatgaaactgtcatactataattatttaaaatgtaattaatcaattaactaatttattaaaaatatatagtgagca

SEQ ID NO: 128531 - DNA, 4707 bp, Homo sapiens
  Payload ID: 5156
  Gene Symbol: DNAH2
  Gene Name: dynein, axonemal, heavy chain 2
  ENST ID: ENST00000574518
  CDS Start-End: 1-784
agatgaggacatcaagaagatccagacccaaatcagcagcggcatgactaacaacgcaagcctgctgcagaactacctcaagacctgggacatgtaccgggagatctgggagatcaacaaggactccttcattcatcgctaccagcgcctcaaccctcctgtctcttcttttgttgccgacattgcccgctacacggaagttgctaataacgtgcagaaggaggagacagtcaccaacatccagtttgtgctgctggactgttcgcacctcaagttctccctggtgcagcactgcaatgaatggcagaacaagttcgcgactctgctcagggagatggctgctgggcgcctcctggagctgcacacctacctgaaggagaacgcagagaaaatcagccgccctccgcagacactggaggaactgggggtcagcttgcagctcgtggatgccctgaagcacgacttggccaacgtggagactcagatccctcccatacacgagcaatttgccattcttgaaaagtacgaggtgccagtcgaggacagtgtcctggagatgctggacagtctcaacggggagtgggttgtcttccaacaaactctgctggacagtaagcaaatgctgaagaaacacaaggagaaattcaagacaggcctgatccactcggcagatgacttcaagaagaaagcacatacacttctggaagatttcgaattcaaaggagctcgatgccctccagcaaatctgggagatcgcacgagactgggaggagaactggaatgagtggaagactggccggttcctgatcctgcagacggaaaccatggagaccacggcccacgggctgtttcgtcgcctcacaaaattagccaaagagtataaggaccgaaactgggaaattattgaaaccactcgctcaaaaatagagcagttcaagaggaccatgcctctcatctcagacctgcggaaccctgcccttagagagaggcactgggaccaggtccgggatgagatccagcgggagtttgatcaggaatctgaaagcttcaccttggagcagattgtggagcttgggatggatcagcatgtggagaaaattggggagatctctgcttcagcaactaaagagctggctatagaagtggctttacaaaacattgccaagacctgggatgtgactcagctcgacatagtaccctacaaggataagggccatcatcggctcaggtcaggggagctggggctctaggagaatggagggctgtgtgacccaggctgcagagtgggaccaaggttgggcaggtggggatgaactatgattttgaccccttgtgtctcagaggtacagaagaagtattccaggcactggaagataaccaggtagctctgtctaccatgaaggcatcacgctttgtcaaggcctttgagaaggatgtggaccactgggaacgctgcctctccctcattttggaggttattgagatgattctcacagtgcagcgtcagtggatgtacttagagaatatcttcctaggagaagacatccgcaagcagctgcccaatgaatcgaccttatttgaccaggtcaacagcaactggaaagccatcatggacaggatgaacaaggacaacaatgctctccggagcacccatcacccaggcctcctggacacattgatagaaatgaatacaatcctggaagatattcagaaatctctggatatgtatttagagaccaagcgacatattttcccccgcttctacttcttgtccaatgatgacctgctggagattctgggccagtcccgaaacccagaggctgtgcagccacacctcaaaaaatgctttgacaacatcaagttgctgagaatccagaaggttggagggcccagcagcaaatgggaagctgtggggatgttctcgggcgacggcgagtacattgacttcctccactcagtatttttagaaggccctgtggagtcctggcttggcgatgtggaacagaccatgagggtgaccctgcgggaccttctccggaactgccacctggccctcaggaagttcctcaacaagagggacaaatgggtgaaggagtgggctggccaggtggtgatcactgccagtcagatccagtggacggctgatgtcaccaagtgcctgctgacagcgaaggagcgggcagacaagaaaatcctcaaggtcatgaagaagaaccaggtgtcaatcctgaataagtattcagaagccatcagggggaacttgaccaagatcatgcggcttaaaattgtggctctggtgacgatagaaattcatgcccgggatgtgttggagaagctttacaagagtggcctcatggatgtcaattcctttgactggctcagccaacttcggttctactgggagaaggatcttgatgactgtgtcatccgccagaccaacacgcaatttcagtataattatgagtacttgggtaactcgggccggctcgtcatcacccccctgacggacaggtgttacatgacactgaccacggcattgcacctgcaccgagggggctcccccaaaggccctgcaggcacaggcaagaccgagaccgtcaaggacctgggcaaggccctgggcatatatgtcattgtggtcaactgctctgagggcctggactacaagtccatgggccgaatgtactcaggtctggcccagactggagcttggggctgctttgatgagtttaaccgcatcaacatcgaggtgctgtcagtggtggcccaccagatcctgtgcatcctgtctgccctggctgccggcctcacccatttccattttgatggctttgaaataaatctggtgtggtcctgtgggatcttcattaccatgaatcctggctatgctggccgcacagagcttcccgaaaatcttaaatccatgttccgcccaattgccatggtggtgcctgactccaccctcattgcagaaatcattctctttggagagggctttggcaactgcaagattctggccaagaaggtgtacacactctactcactggctgtgcagcagctgtccagacaggaccactatgactttggcctgcgtgccctcacctcccttctgcgctatgctggcaagaagcgccgcctacagccggatctgactgatgaagaggttctgctgctctcaatgagagatatgaacatcgccaagctcacttcagttgatgcacccctgttcaatgccatcgtgcaagatctgtttcccaacattgagctgcctgtcattgactatggcaagctgcgggagaccgttgagcaggagattcgagacatgggcctgcaaagcacgccgttcaccctcaccaaggttttccagttgtatgaaaccaagaactcccgccactccaccatgatcgtgggctgcacgggcagcggcaagactgcctcatggcgcattctacaggcctccctgtcctctctgtgccgcgccggagaccctaacttcaacattgttagagtacggggctgggacagtggagtcagtgggcagagacttgagtagtaagaagacaatggagggtgggggccagggaggaccttgcaaggccgggagagctgtacctgggaccatggtggcctggagcgatgagagaagggacaaatgcacgtacctaagaggggtctggaaataaagaggggtttttgtccatcagcagctaaaaccccttccggtgtcattttcaggagttccctttgaaccccaaggcattgtccctaggggaactgtatggggaatatgacctcagcaccaatgaatggacagatggcatcttgtccagtgtcatgcggacggcatgtgcagatgagaaacccgacgagaagtggatcctgttcgatggccccgtggacacactgtggatcgagaacatgaactccgtcatggacgataacaaggtgttgaccctcatcaacggcgagcgcatcgcgatgcccgagcaggtcagggacgcggctgactcctggaggcctgcagaggcaggcaccggagggcgtgggccggggctggggaggagagccagaaatctcagagcagggcaggttctgtgggagagagctgaaaggtggatgcctggattcagggaaacctgcagctgaagaaaaatgctttgcttgccgcggctgttgagaacaatgataagaaaaacaccctctgttgtaagcactgtgtaggcttgggcggccctcctcggctcgttctcacggatgcatgaggcaggaccctcgtttgtgcacccagaggtatgaattcacggactggcaagcacacccttttccacccactccaacaatgcgagcaagagagtgatttttcaaaaggacaaccttgaataagctctagtttcttttaaagcaaactgggccgggccgggtggctcacgcctgtaatcctagcactttgggaggccaaggtgggcagatcacttgaggtcaggagttcaagaccagcctggccaacagggtaaaaccccatctctactaaaaaatacaaaagttagctgggtgtggtgttgtgcacctgtagtcccaggtactctggaggctgaggtgggaggattgcttgaacctgagaggcggaggttgcagtcagccaagatcacgccactgcactccagcctgggtgacggagtgagactttgtcttaaaaaaaaaaaaaaa

SEQ ID NO: 128532 - DNA, 3476 bp, Homo sapiens
  Payload ID: 5156
  Gene Symbol: DNAH2
  Gene Name: dynein, axonemal, heavy chain 2
  ENST ID: ENST00000575105
  CDS Start-End: 1-3476
aagatcgacgaaactagggaaaaggtgcaagtgatgtcgttggagctggaggatgccaagaagaaggtggctgagttccagaagcagtgtgaggagtacctggtcatcattgtgcagcagaagcgggaggcagatgagcagcagaaggccctggagtctctgaacaagaaggatataggagagatcaagtcttatggacggcccccagcccaagtggagatagtgatgcaggcagttatgattcttcgaggcaacgagcccacatgggcagaggccaagaggcagctaggggaacagaacttcatcaagtcactgatcaactttgataaagacaatatctcagataaggttctgaagaagattggggcctactgcgcccagcctgacttccagcctgatatcatcggccgcgtctccctggctgccaagtccctctgcatgtgggtgcgggccatggagctgtatgggcggctatatcgggtggtggagcccaagcgaatccgaatgaacgctgccttggctcagcttcgggagaagcaagccgcgctcgctgaggcccaggagaagctgcgggaggtagctgagaaactggagatgctaaagaaacagtatgatgagaagctggcacagaaggaggagcttcgcaagaagtctgaagagatggagctgaagctggagcgagctgggatgctcgtgtcggggttggctggcgagaaggccagatgggaggagacagtccagggcctggaggaggacctgggctacctggtgggggactgtctcctggcagctgccttcctgtcctacatgggacccttcctgaccaactaccgggatgagattgtcaaccaaatctggatcgggaagatctgggagcttcaggttccttgctccccttctttcgccatcgataacttcctgtgcaatcctaccaaagtccgggactggaacatccaagggttgccctcagacgccttctccactgagaatggcatcatcgtcacccgaggcaacaggtgggcactgatgatcgaccctcaggcccaggccctgaaatggattaagaacatggaaggaggccagggcctgaagatcatcgacctgcagatgagcgattacctgcgaatcctagaacacgccattcactttggatacccggtgctacttcagaacgtgcaggaatatctggaccccacactgaaccccatgctcaacaaatctgtagcccgaatcggtggtcggctgttgatgcgcattggcgataaggaggtggaatataataccaatttccgtttctacatcaccaccaagctctccaacccccactacagcccagagacctcagccaagaccaccatcgtcaactttgctgttaaagaacagggcctggaggcccagctgctgggcattgtggtgcggaaggagcggcctgagctggaggagcagaaggactcactggtcatcaacatcgcggctggtaaaaggaagctcaaggagctggaggatgagatcctgcggctgctgaatgaggccaccggctccctgctggatgatgtgcagctggtgaacacgctgcatacctccaagatcacagccacagaggtgactgagcagctggagaccagtgagaccacagagatcaacactgacttggcgcgggaggcttaccgcccatgcgcccagcgggcatcaatcctgttcttcgtgctcaatgatatgggctgcatcgaccccatgtaccagttctcactggatgcctacatcagcctctttattctcagcattgacaaaagccaccgcagcaataagctggaggaccgcattgactacctgaatgactaccacacctacgctgtctacaggtacacctgccgtacccttttcgaacgccacaaactactattcagttttcatatgtgtgccaaaatcttggagacttctggcaagctcaacatggatgaatacaacttctttctacgtgggggtgtggtcttggatcgggagggccaaatggacaatccatgtagtagctggcttgcagatgcctactgggataacatcacagagctagacaaactgaccaacttccacggactcatgaactcctttgagcagtaccctcgtgactggcacctgtggtataccaatgctgccccggagaaggcgatgctgccaggtgagtgggaaaatgcctgcaatgaaatgcaacggatgctgatcgttcgctccctgcgccaggaccgcgtggccttctgcgtgacctccttcatcatcaccaaccttggctcccgcttcatcgagccgcctgtgctgaatatgaagtcggtgctggaggattcaaccccacgatccccactcgtgttcatcctgtcccctggtgtggaccccaccagtgccctgctgcagctggcagagcacatgggcatggcccagcgcttccacgccctgtccctgggccagggccaggcccccatcgctgctcggctcctccgagagggtgtgactcagggacactgggtgttcctggcaaactgccacctgtcactgtcttggatgcctaatctggacaagctggtggagcagctgcaggtggaggatcctcatccatccttccgcctctggctcagctccatcccccacccagacttccctatctcaatcttgcaggtcagcatcaagatgaccacagagccaccaaagggcctaaaggccaacatgacacgtctttaccaactgatgtcagaaccacagttttcccgctgctccaaacctgccaaatataagaagctgctgttttcactctgtttcttccactctgtgttacttgaacgcaaaaagttcctgcagcttggctggaacatcatctatggcttcaatgactccgactttgaggtgtcagaaaacttgctgagcctctatctcgatgagtacgaggagacaccttgggacgcacttaagtacctcattgccggcatcaactatggtggacatgtcacagatgactgggaccggcgcctgctgaccacctacatcaatgattatttctgtgaccagtctctatcaactcccttccaccggttgtcagcactggagacttatttcatccccaaggatggcagcctcgcttcttacaaggaatacatcagcttattgcctggcatggacccccctgaggcctttggccagcaccccaatgctgatgtggcctctcagatcactgaggcacaaaccctctttgatactttgctttccttgcaacctcagattacacccaccagggctggaggccagacccgggaagagaaggtccttgagttggccgctgatgtgaagcagaagatccctgaaatgatcgactatgaggggactcaaaaactgctagctctcgacccctcccccctcaatgtggtccttctgcaggagatccagagatacaacacactgatgcagaccatcctgttctcactgacagacct

SEQ ID NO: 128533 - DNA, 12394 bp, Homo sapiens
  Payload ID: 5157
  Gene Symbol: DNAH3
  Gene Name: dynein, axonemal, heavy chain 3
  Uniprot ID: Q8TD57
  ENST ID: ENST00000261383
  CDS Start-End: 1-12351
atgggagctacagggcgcctcgagctcacactggccgcccctccccatccgggcccagcctttcagcgttcaaaagccagggagacccaaggagaggaggaagggagtgaaatgcagatcgccaaaagtgactccatacatcacatgagccactcccaggggcagccagagctgcctcctctgcctgcttctgctaatgaggaaccgtctggactctatcagactgtcatgtcacacagcttttacccgcccttgatgcaacgcacgtcatggaccttggctgcacccttcaaagaacagcatcaccaccgtggacccagtgattccatcgccaacaactactccttgatggcccaggacctgaagctgaaagatctgctgaaggtctaccaaccggccaccatcagtgtccctagggacaggaccggtcaggggctgccatcatcaggaaatagaagctcatcagagcccatgaggaaaaaaacgaagttttcctccagaaacaaagaggattccactaggatcaagttggccttcaagacgtcaatcttctcacccatgaagaaggaggtaaagacatctttgacgttcccaggaagcagaccaatgagtccagaacagcagctcgatgtcatgttacagcaggagatggaaatggaaagtaaagaaaagaagccatctgaatcggacctggagagatactattactatctgaccaatggaattcgcaaagacatgattgcccctgaggagggtgaagtgatggttcggatttcaaagctgatttctaacacgctgctgacgagtcccttcctggagcccctgatggtggtcctcgtgcaggagaaggagaatgactattactgtagcctcatgaaaagcatcgttgattacatcctcatggacccaatggagagaaaacggctctttattgagagcatcccccgcttgtttcctcaaagagtgatccgggcccctgtgccctggcacagtgtctacaggagcgccaagaagtggaacgaggagcatctgcacacggtgaaccccatgatgctcaggctgaaagaactgtggtttgcagaattcagagacctcaggtttgttcgaacagcagaaatactagcgggaaaattgcctctgcagcctcaggaattttgggatgtgatccagaaacactgcctggaggcacaccagactcttctcaacaagtggatccccacctgcgcccagctttttacctcacggaaggagcactggattcattttgctcccaagagcaactatgactcaagtcgaaacattgaggaatattttgcttctgtggcatcattcatgtcgctgcagcttagggagctggtcattaagtcacttgaggacctcgtttcccttttcatgatacacaaagatgggaatgattttaaggagccctaccaagagatgaagtttttcatacctcagctaatcatgatcaaacttgaagtcagtgaacccattattgtcttcaatccatcttttgatggctgctgggaattaatacgtgactctttcctggaaattattaagaactctaatgggatccccaagctgaaatacataccacttaagttctccttcactgctgctgctgctgatcggcaatgtgtgaaagcagctgagccaggagagcccagcatgcacgcggctgccactgcaatggcagagctgaaaggatataatctgctccttggaactgttaacgcagaagaaaaacttgtttctgattttttgattcaaactttcaaggtatttcagaaaaatcaagttggcccctgcaaatatttaaatgtctacaaaaagtatgttgacttattggataacacggcagagcaaaacatcgctgcgttcctgaaagaaaatcatgacattgatgattttgtgacgaagatcaatgccataaagaaacggagaaatgaaattgcatccatgaacatcaccgtgcctttagccatgttctgccttgatgctacggccctaaatcatgatctctgtgagcgagctcaaaatcttaaagaccatctgattcaattccaagtggatgtaaaccgagacaccaataccagcatttgtaatcagtacagccacatcgcagacaaagtcagtgaggttcctgccaacactaaggagctggtatccctcattgaattcctaaagaaatccagtgctgtcactgtgttcaaactcaggaggcaacttagagatgcaagtgaacggctggagttcctgatggactatgcagacttgccgtaccagattgaagatatctttgacaacagccggaacttgctccttcacaagagggatcaggcagaaatggatctgattaaaagatgctcagaatttgagttgagacttgagggctaccacagagaactggaaagttttaggaagcgcgaagtgatgactacagaagaaatgaagcacaatgttgaaaagcttaatgagctttcaaagaacctaaatcgggcgtttgcagagtttgagttgatcaataaggaggaagagctattggaaaaggagaagagtacttaccctcttctgcaggccatgctgaagaacaaagtaccttatgagcagctgtggtcgacagcctatgagttcagcatcaagtcagaggaatggatgaatggacccctcttcttactgaatgctgagcaaattgcggaggagatagggaatatgtggaggacaacgtataaactgatcaagaccttgtctgatgtgcctgcacccaggcgcttagcagagaatgtgaagatcaagatcgataagttcaagcagtacattcccatcctcagtatttcctgcaacccaggaatgaaagaccgacactggcagcagatcagtgagattgttggctatgagataaagcccaccgaaacgacctgcctctcaaatatgctcgaatttggattcggcaaattcgttgaaaaattggagcccattggtgcagctgccagcaaggaatactctctggagaaaaacttggatagaatgaagttggattgggttaacgtgacgttcagcttcgtgaaatacagggacactgatacaaacatcttgtgtgcaattgatgacattcaaatgctacttgatgatcacgtgataaagacccagaccatgtgtggctccccattcatcaaaccaatagaagcagaatgccggaaatgggaagaaaagctaattcgcatacaagacaatttggatgcctggttgaaatgccaagccacctggctgtacctggaaccaatcttcagttcagaggacatcatagcccagatgccagaagaggggaggaaatttggcattgttgatagttactggaaatcacttatgtcccaagcggtgaaagataacaggattctggtggcagccgaccagccacggatggcagagaagcttcaagaagccaactttctcttggaggacatccagaaagggctgaatgattacttggagaagaagagactattcttccccagattcttcttcctatcaaacgatgagctgctggaaatcttgtccgagacaaaggaccctctccgagtgcagccgcacttgaagaagtgctttgaaggaattgccaagcttgagtttacagacaatctggaaattgtgggcatgatcagctcggaaaaagaaactgttccattcatacagaaaatctacccagctaatgccaagggcatggtggaaaagtggctccagcaggtggagcagatgatgctggccagtatgcgagaagtcattggacttgggattgaagcatatgtcaaggtccctcgaaatcactgggtcttacagtggcctggacaggtggttatctgtgtctcctccatcttttggacccaggaggtgtcccaagccctggcggaaaataccttactggattttctgaaaaagagcaatgatcagattgcgcagattgtccagctggtgcgagggaagctgagcagtggagctcgactcactctcggggccctcacggtcatcgatgtccacgcccgcgacgtggtggccaagttatctgaggacagggtctccgatctgaatgatttccaatggatctcacagctgcgctactactgggtggccaaggatgtgcaggtgcagattatcaccacagaagccttgtatggctatgagtacctgggaaactccccccggctggtgatcacacccctcaccgaccgctgctacaggacactgatgggagctttgaagctgaaccttgggggtgctccagagggtccagctgggactggcaagacagaaaccaccaaagatttggccaaagccttggctaagcagtgtgtggtcttcaactgctccgatggtttggattacaaagctatggggaagttcttcaaggggctggcacaggctggagcatgggcgtgctttgatgagttcaacaggatcgaggtagaagtgctgtctgtggtcgctcagcagatcctcagcatccaacaagccatcattcggaagctaaagacattcatctttgaagggactgagctctctctgaacccaacctgcgctgtgttcatcaccatgaaccccgggtatgctggcagggctgaactgcccgacaatctcaaggccttgttccggacagtggccatgatggtcccagattacgccctcattggagaaatctccctctactccatggggtttctggactccagaagtctcgcccagaagatcgttgcgacctaccgcctgtgctcggaacaactgtcctctcagcatcactatgactacggtatgcgcgctgtcaagtctgtgcttactgccgcaggaaacctgaagctcaagtatccagaggagaatgaaagtgtcctgctgctccgggcattgcttgatgtcaatctggccaagttcttagcgcaagatgtccctctgtttcagggaattatatctgatttatttcctggagttgttcttccaaagccagactatgaagtttttctgaaagtgctgaatgataacatcaaaaagatgaaactccagccagtaccttggtttatagggaaaattatccagatctacgaaatgatgctggtgagacatggctatatgattgtaggagaccccatgggcggcaagacctctgcttataaagtgttggctgcagctctcggcgatttacacgcagccaatcagatggaggagtttgctgtggagtacaagatcatcaaccccaaggctatcacgatggggcagctgtatgggtgctttgaccaagtgagccacgagtggatggatggtgtccttgccaatgctttccgggagcaagcgtcttcactctctgatgatcgcaagtggattatatttgatgggccagtggatgctatttggattgaaaatatgaacactgttctggatgacaataaaaagctgtgtctcatgagtggggaaattatccagatgaactccaagatgagcctgatcttcgagcccgccgacctcgagcaagcctctccagccactgtgagcaggtgtgggatgatctacatggagccccatcaactaggctggaagcccctgaaggattcctacatggacaccctgccctccagtctcaccaaggagcacaaagaattggtcaatgacatgttcatgtggcttgtccagccctgcctggaatttggtcgccttcattgtaaatttgttgtccagacatctcccatccaccttgccttctcaatgatgagactgtactcttctctgcttgatgaaatcagggcagtagaagaggaggaaatggaattaggtgaaggcctgtcaagtcaacagatctttctctggctccaaggactgtttctcttttccttggtgtggaccgtggctggcaccatcaacgcagacagcagaaagaaatttgatgtgtttttccgcaacctgatcatgggcatggatgataaccacccaaggcccaaaagcgtcaaactcaccaaaaacaacatctttccagaaagaggaagcatctatgatttttattttatcaaacaagctagtggacattgggaaacgtggacacagtatatcaccaaagaggaggaaaaagttccagctggtgcaaaggtctcagaactcatcatccccacaatggagacagcccggcagtccttcttcttgaaaacctacttagaccatgagattccaatgctgttcgtgggtcccacaggcactggcaaatcagccatcaccaacaacttccttctccaccttcccaaaaatacgtacctacccaactgcatcaatttctctgccagaacctcagccaatcagacccaggatatcatcatgtccaagctggatcgacgacggaagggccttttcgggcctcccatagggaagaaagcagtggtgtttgtggatgacctcaacatgccagccaaagaggtgtatggggcccagccacccatcgagctcctgaggcagtggattgaccatggttactggtttgacaaaaaagacacaaccaggctggacatcgtggacatgctgctcgtgacagccatggggccccccgggggaggaaggaatgacattactggacgattcactcgccatctgaatatcatttccatcaatgcctttgaggatgacattttaaccaagattttcagttcgattgttgactggcacttcgggaaagggtttgatgtgatgtttttaaggtacggaaagatgctggtccaagctactaagacaatttatagagatgcagtggagaacttcttgccaactccctcgaagtcacattacgtctttaacctgcgggacttctcacgagtgattcaaggggtcctgctgtgccctcacacacacctgcaggatgtagaaaaatgtatccggctttggatccatgaggtttatcgggtcttctatgatcgtctgattgacaaggaggacagacaggtctttttcaacatggtgaaggaaaccacctccaattgcttcaagcagaccatagagaaggtgcttatccacttgtcacccactggaaagatagtcgatgataacattcgaagcctcttctttggagattatttcaagccagaaagtgaccaaaaaatctacgatgagatcactgacctgaaacagctgactgtggtcatggagcactatctggaagaattcaacaacatcagcaaggcccccatgtccctggtcatgttcaggtttgccattgagcacatctctaggatctgccgtgtcctgaagcaggacaaaggccacctgctcctggtgggcatagggggcagcgggcggcaaagtgccgccaaactgtccacattcatgaacgcatacgagctataccagattgagatcaccaagaactacgcaggcaatgactggcgagaagatcttaagaagatcatactgcaggtcggtgtggccaccaagagcaccgtgttcctcttcgccgacaaccagatcaaggatgaatcattcgtggaggacatcaacatgcttctgaacacaggtgacgtgcctaacatcttccctgctgacgagaaggctgacatcgtggagaagatgcagactgcagccaggacccaaggagagaaggttgaagtcactcctctttctatgtataacttctttattgagagggtaattaacaaaatctccttttcattagccatgagtccaataggggatgccttcaggaaccgcctgcggatgttcccttcgctgatcaattgctgtacgattgattggttccagtcctggcccacagatgccctagagttggtggctaacaaatttctagaggatgtggagcttgatgacaacattcgggtagaggtcgtgtccatgtgcaaatatttccaagagagcgtcaagaagctgtcactcgattattacaacaaacttcgaagacacaactatgttacccccacctcctaccttgaattgattctaaccttcaagacgctcctgaatagcaagaggcaagaggtggctatgatgaggaaccgctacctgacaggcttgcagaaactcgactttgcagcttctcaggtagcggttatgcaaagagaactgacagctcttcaacctcaactcatcctcacctccgaggaaactgccaagatgatggtgaaaattgaagcggagacgagagaagctgatggaaagaaacttctggtgcaggcagatgaaaaagaagccaatgttgctgctgccattgcccaaggaatcaagaacgaatgtgagggggacctagctgaggcaatgcctgcactcgaggctgcactagctgctctggacaccctgaacccggccgacatctcgctggtgaagtcgatgcagaacccaccaggccctgtcaaactggtcatggagagcatctgcatcatgaaagggatgaagccagagaggaagccagaccccagtggctccggtaagatgatagaagattactggggggtatccaaaaagattcttggggatctgaaattcttggagagtcttaagacatatgacaaagacaacatccccccactgaccatgaagcggatccgggaaaggtttatcaatcacccggaattccagccagctgtcattaaaaatgtatcgtcggcctgcgagggtctgtgcaagtgggtgagggccatggaggtgtacgatcgcgtggccaaggtggtggctcccaaacgggagcgactgagggaggcagaggggaagctggctgcacagatgcagaagctgaaccagaaaagagcagagctgaagctggtggtagatcggctccaggccctgaatgacgactttgaagagatgaacaccaagaaaaaggacttggaggaaaacattgaaatctgctcccaaaagctggtcagggcagagaaactgatcagtggtcttgggggagagaaggacagatggaccgaagctgcccgacagctggggatccgctatactaatctgactggtgacgtgttgctgtcctcaggaactgtggcttacctgggcgcttttacagtggattatcgggtccagtgccaaaatcagtggttggctgaatgtaaggacaaggtcatccctggcttcagtgacttcagtctcagccacacgttaggggatcccataaaaatccgtgcctggcagattgctgggcttcccgttgactccttctccatcgacaatggcatcattgtatccaattccagacgctgggccttaatgattgaccctcacgggcaggccaataaatggattaagaacatggagaaggcgaataaactggctgtcatcaagttctctgatagcaactacatgaggatgctggaaaacgcgctgcagttaggcacccctgtcttgattgaaaacattggagaagagctggatgcttctatcgaacctatcttgctcaaggcaacattcaaacagcaaggagttgagtacatgaggctgggtgaaaacatcattgaatattccagggattttaagttatacatcacaacccgtttgaggaatccacattacctcccagaagttgccgtgaaggtctgtctcctcaacttcatgatcacccccttgggtctccaagatcaactccttggcatcgtggctgcgaaggagaagccagagctggaagagaaaaagaaccagttgattgtggaaagtgccaagaacaagaagcatctcaaggaaattgaagataagatcttggaggttctctccatgtccaagggtaacatcctggaggatgaaaccgccatcaaagttctgtcctcctccaaagtgctatctgaagagatctcagagaaacagaaagttgcttccatgacagaaacgcagattgacgagactcggatgggctacaagccagtggctgtgcattctgccaccatcttcttttgtatctcggacctggccaacatcgagccgatgtaccagtactccctgacttggttcataaatctctacatgcattccttgacccacagcacgaagagcgaggaactgaatctgcgcatcaagtacatcattgaccatttcaccctgagcatctacaacaacgtgtgccgttctctgtttgagaaggacaagctactcttctctctcctcctgaccatcggcatcatgaaacagaagaaggaaattacggaggaggtgtggtacttccttctcactggaggcatcgcactggataacccctaccccaatccagctccccaatggctgtctgagaaggcatgggcagagattgtccgtgcatctgccttacccaaactgcatggcctgatggagcatttggaacagaacctgggtgaatggaagctgatctatgactcggcctggccccatgaggagcaactccctgggtcttggaagttctctcaaggattggagaagatggtgatccttcgatgtttgcggcctgacaaaatggtgccagcggtccgggagttcattgctgaacatatgggaaagctgtatatcgaagcccctacgttcgatctccagggatcctacaatgattccagctgctgtgcgcctttgatttttgtgttgtctccaagtgcagacccaatggcaggcctgctgaagtttgctgatgatcttggtatgggaggtaccagaacacagaccatctcccttggccaaggccaaggccctattgctgccaaaatgatcaacaatgccatcaaagacgggacctgggtggtcttacagaactgccacctggccgcaagctggatgcctaccctggagaagatttgtgaggaggtgattgttcctgagagcaccaatgccagattcagactctggctaaccagctatccatcagagaagtttccagtcagcattctccagaatggaatcaaaatgaccaatgagccccccaaagggctccgggccaacctgttgcgctcctacctcaatgaccccatctcagatcctgtgttcttccaaagctgtgcaaaggcggtgatgtggcaaaagatgttatttggcctttgtttcttccacgccgttgttcaagagagaagaaacttcggccccctagggtggaatattccctatgaattcaacgaatctgacctgaggattagtatgtggcagatccagatgtttctcaatgactacaaggaggtgccctttgatgctctgacctacctgacaggggaatgtaattacggaggcagagtgactgatgacaaagaccggcgtctcctgctgtcacttctgtccatgttctactgtaaggaaattgaggaggactattactccctcgctcctggagacacttactacatccctcctcatggctcctaccagtcctatatcgactatctcaggaatctccccatcacagcccacccagaagtgttcggcctccatgagaacgcagacatcaccaaagacaaccaggaaaccaaccagctgtttgagggggtcctgctgaccctccctagacagtcaggaggaagtggcaagtcccctcaggaagtggttgaggagttggcacaagacattctctccaagcttcccagagactttgacctggaagaggtcatgaagttgtaccccgtggtctatgaagaatccatgaataccgtcctaaggcaggagctcatcagattcaacaggctgaccaaagtggttcggaggagcctcatcaatcttggccgagccatcaaaggacaggtcctgatgtcctcggagctagaggaagtctttaacagcatgcttgtgggtaaagtgccagccatgtgggcagccaagtcttacccatcactgaagcctctggggggctacgtggctgacctgctggcccgcctgaccttcttccaggaatggattgacaaggggccccctgtggtattttggatctctggattctacttcacacagtcttttttgactggcgtctctcaaaattatgcccggaaatataccatccccattgaccacattggatttgagtttgaggtaaccccacaagaaacagtgatggagaataaccccgaagatggggcctacatcaaagggctcttcttagaaggtgcccgttgggacaggaaaacgatgcagattggggaatctctccccaaaatcctctatgacccactgcccatcatttggctgaaacctggggagagcgcaatgtttctgcatcaggacatctatgtgtgtccagtctacaaaacaagtgcccgcagaggaaccctctccaccacaggccactctaccaactatgtcctctccattgagcttccaacagacatgccccagaagcactggataaaccgaggggtggcctcactgtgccagctggataactgatggcatttgtctcaagacagaaaataaaaagcatttcattctt

SEQ ID NO: 128534 - DNA, 15633 bp, Homo sapiens
  Payload ID: 5158
  Gene Symbol: DNAH5
  Gene Name: dynein, axonemal, heavy chain 5
  Uniprot ID: Q8TE73
  ENST ID: ENST00000265104
  CDS Start-End: 106-13980
agtaaaactttccatttggaagcctgttggatgttgagcaggtctgccaggagttagaagaccattccggaagagctgactccagcctgtccatgcacggctacaatgtttaggattgggaggagacagctctggaagcatagcgtcactcgagttttaacgcaaagactgaagggagagaaggaagccaagcgggctcttttggatgcgaggcataactacttatttgcaattgtggcttcctgtttggacctgaacaaaaccgaagtggaggatgccattcttgaagggaatcagattgaaagaattgatcaactttttgctgttggaggtctccgacacctcatgttttactatcaagatgtggaggaagcagaaacaggacaacttggctctctaggaggggtaaatcttgtttctggaaagattaaaaaacctaaggtgttcgtgaccgagggaaacgatgtggctcttactggggtatgtgtgttcttcatcaggactgacccttccaaagccatcacccctgacaacatccaccaggaggtgagttttaacatgttagatgcggcagatggaggcctgctcaacagtgtgagacgtttgctgtcggacatcttcattcctgctctcagagccacgagccatggctggggcgagctcgagggccttcaggacgcagctaacattcgccaggagttcttgagctccctggaaggctttgtgaacgtcctgtcgggtgcacaggagagtctgaaggagaaggtgaaccttcgaaagtgtgacatacttgaactgaaaaccctaaaggaacctacggactacttgactctagcaaataaccctgagactttgggaaaaatagaggattgcatgaaagtatggatcaaacagacagaacaggttcttgctgaaaacaatcagctgctgaaggaagcggatgacgttgggccacgagcggagctggagcactggaaaaaaagactctccaagtttaactaccttttggaacaattgaaaagcccggatgtgaaggctgtgctggcagtgcttgcggcggccaagtcgaaactgctgaagacttggcgggagatggatattcgaatcactgatgcaactaatgaagcaaaggacaatgtgaaatacttgtatacacttgaaaaatgttgtgaccctttgtacagcagtgatcccctatccatgatggatgctattcctacacttataaatgcaattaaaatgatctatagtatctctcattactataatacctctgagaagatcacatctctgtttgtaaaggtgacaaatcagattatatctgcatgtaaagcctatattaccaataatggaaccgcttccatctggaaccagccacaggatgttgttgaagaaaaaatactatctgcgattaaactgaaacaggaataccagctctgctttcacaagacaaaacaaaagcttaaacaaaatccaaatgcaaaacaatttgattttagcgagatgtatatttttggaaaattcgaaacttttcaccgacgccttgccaagataatagacatctttacaaccctcaagacgtattcagtcctgcaagattccacaattgaagggctggaagacatggccactaaataccagggcattgtggcaaccataaagaaaaaggaatacaatttcctagaccagcggaaaatggattttgaccaagattacgaagagttttgcaagcagactaatgaccttcataacgagttgcggaagttcatggatgttacatttgcaaagattcaaaacacaaatcaagctctaagaatgttgaagaaatttgaaagattgaatatacctaatcttggtattgatgacaaatatcaacttatccttgagaactatggggctgacattgatatgatttcaaagctgtatacaaagcagaaatacgatcctcctctggctcgaaaccagcctcccatcgctggaaagattttgtgggcccgccagctcttccataggattcagcagcccatgcagcttttccagcagcacccagctgtgctaagcacggcagaagccaaacctataattcgcagttacaacaggatggccaaggtcctcctggagtttgaggtcctcttccacagggcgtggcttcggcaaattgaagaaattcatgtaggtcttgaggcttcattattggtgaaggctccaggcacaggggaattgtttgtaaactttgaccctcagatattaatcttatttagagaaacagagtgcatggcccagatgggtctggaagtctctccactggcaacttccctcttccagaaacgagatagatacaaaaggaacttcagtaacatgaagatgatgctagctgaatatcagagagtgaagtcaaaaatacctgctgccattgagcaattgattgtccctcacttggccaaagtggatgaagctctccaacctggcttggctgcactgacctggacatcactgaatattgaggcttatttagaaaacacttttgcaaagatcaaggacctggagttgctgcttgacagggtcaatgatttgattgagttccgcattgatgccattctagaagaaatgagcagcacgcctctttgtcagcttccccaggaggagccactaacctgtgaagagtttctccaaatgacaaaggatctttgtgtaaatggtgcacaaatactacattttaaaagctcattagtggaggaggcagtcaatgagcttgtaaatatgttgctggatgtggaagttttatctgaagaagaaagtgaaaaaatatccaatgagaatagtgttaattacaaaaatgaaagttcagcaaaaagagaagaaggaaattttgacaccttgacatcatctattaatgccagggccaatgccctgcttttgacgacagtcacgaggaaaaagaaagaaactgagatgttaggggaagaagcccgcgagttactctctcatttcaaccatcagaacatggatgctcttctgaaagttacaaggaatacactagaggccattcgcaaacgtattcattcctctcacacaattaacttccgggacagtaacagtgcctctaacatgaagcagaacagtttgcccattttccgggcaagcgtcactctggccattcccaacatcgtcatggcccctgccctggaagatgtacagcagaccctgaacaaagccgtggagtgcatcatcagtgtccctaagggggtcagacagtggagcagtgaactgttgtccaagaaaaagatacaagaaagaaaaatggctgctttgcagagtaatgaagacagtgattctgatgttgaaatgggagaaaatgaacttcaagataccttggagatagcatctgtaaatttacccattcccgtgcaaaccaagaactattataagaatgtttctgaaaacaaagagattgtaaaattagtttctgtgcttagcacaattatcaactccaccaaaaaggaagttattacatccatggattgcttcaaacgctacaatcacatttggcaaaagggaaaagaagaagccattaagacatttattacacagagccccttgctttctgaatttgagtcccagattctctatttccaaaacctagagcaggaaattaatgctgagcctgaatatgtctgtgtgggttccattgctctgtacacagctgacttgaagttcgccctgactgctgagacaaaggcctggatggttgtcattggacgccactgtaacaaaaaataccggagtgagatggaaaacatttttatgcttattgaagaattcaataagaaactaaatcgtccaattaaggacctagatgatattcggattgcaatggcagcgctgaaagaaataagggaggagcaaatctccattgactttcaagtaggacctattgaggaatcttatgccctgcttaacagatatggacttctgatagcaagggaagagatagacaaagttgatacactgcactatgcttgggagaagctgctggcacgtgctggcgaagtccagaataaattagtctcactgcagcccagtttcaagaaagagcttattagtgctgtggaggtattcctccaagattgtcaccagttttatctggactatgatttgaatggtccaatggctagcggcttgaagccccaggaagccagtgacaggcttatcatgtttcagaatcaatttgataatatctatcggaaatacatcacatatactggaggagaggagctttttggcctgccagctacacagtatcctcagcttcttgaaataaagaagcaactaaatcttctacagaaaatatatactctgtacaacagtgtcatagaaactgtaaatagctattatgatattctttggtcagaggtgaatattgaaaaaattaacaatgaactcttagaattccagaacagatgtcgaaagcttccccgggccttgaaggactggcaggcttttttggacctgaagaagatcattgatgatttcagcgagtgttgcccgctgctggaatacatggccagtaaagccatgatggagcggcactgggaaaggataaccaccctcaccgggcacagtctggatgtggggaatgaaagctttaagttaagaaatatcatggaggcacctcttctgaaatataaagaggaaatagaggacatctgtatcagtgcggtgaaagagagagacattgagcaaaagctgaagcaagtgattaatgaatgggacaataaaacattcaccttcggcagctttaaaacccgtggagagctcctcttgagaggagacagtacctcggaaatcatcgccaacatggaggacagcttgatgttgctgggatccctactgagcaacaggtacaatatgccattcaaagcccagattcaaaaatgggtgcagtacctttccaactcaacagacatcatcgagagctggatgacggtgcaaaacctgtggatttatttagaagctgtctttgtgggaggagacattgccaagcagctgcccaaggaagccaagcggttttctaacatagataaatcttgggtgaagatcatgactcgggcacatgaagtgcccagtgtagtccagtgctgtgttggagatgagaccctggggcagctgttaccacacttgctggaccagttggaaatatgccagaaatcccttactgggtacttggagaaaaaacgactgtgctttcctcggtttttcttcgtctcagatcctgcccttctagagattctggggcaggcgtcggactcccacactatacaggcccatttgctgaatgtgtttgacaacattaaatctgtcaagttccacgaaaagatctatgatcgaattctgtcaatttcctctcaagagggtgagacgattgaattggataaacctgtcatggcagagggcaatgtggaagtttggcttaattctcttttggaagaatctcagtcctcattgcatcttgtgattcgccaggcagccgcaaatattcaagaaacaggtttccaactaactgaatttctttcatccttccctgctcaggttggattattaggaattcagatgatatggacacgggattcagaagaagcccttagaaatgccaagtttgataaaaaaatcatgcagaaaactaatcaggctttcctggagctactcaatacattgatagacgtcaccacgagggatctgagttccacggaacgagtgaaatacgagactctgattactattcatgtgcaccaaagggatatctttgatgacctgtgtcatatgcatatcaagagtcccatggactttgagtggctgaaacagtgcagattttactttaacgaagattctgacaagatgatgattcacatcacagatgtggcgttcatataccagaatgaatttttaggctgcactgacaggcttgtaataactccacttacagacagatgttacatcacgctggctcaagctctgggaatgagcatggggggagcccctgctggacctgcaggcacaggcaaaacagaaaccactaaagacatgggacgatgcctcgggaaatacgtcgtggttttcaattgttcagaccagatggatttccgaggacttggacggatttttaagggactggcacagtctggatcctggggttgttttgatgaatttaaccgtattgatctaccagttctctcggttgcagcccagcaaatttccattattctgacatgtaaaaaggagcacaaaaagtcttttatctttactgatggagataatgtgactatgaaccctgaatttgggcttttcttaaccatgaatcctggctatgccggacggcaggaactccctgaaaacttgaagattaatttccgctcagtggccatgatggtgcctgaccgtcagattatcataagggtgaagttggctagttgtggcttcattgacaacgttgttttggccaggaagtttttcacgctctacaaactgtgtgaggagcagctttctaagcaggttcattatgactttggcctgcgtaacattctgtcagttcttcggaccttgggagcagcaaaaagagccaatccaatggatacggagtccacgattgtcatgcgtgtactacgggacatgaatctttctaaactgattgatgaggatgaacccttgtttttgagtttgattgaagatctctttccaaatattcttctggacaaggcaggttaccctgaactggaagcagcaattagtagacaggttgaagaagctggtttaatcaaccatcctccttggaaactgaaggtcatccagctattcgaaacgcagagagtgcgacatgggatgatgactctggggcccagtggggctgggaagaccacctgcatccacaccttgatgagagccatgacagattgtggaaaaccacatcgggaaatgaggatgaatcccaaagcgattactgccccacagatgtttggtcggctggacgttgccacaaatgactggactgatgggatattttctacgctttggaggaaaacattaagagcaaagaaaggggaacatatctggataattcttgatggtccagtagatgccatctggattgaaaatctgaattctgttttggatgataacaaaactctaacccttgccaatggtgatcggattcccatggctccaaactgcaagatcattttcgagcctcataacattgacaatgcttctcctgccaccgtctcaagaaatggaatggttttcatgagctcttctatccttgattggagtcctattcttgagggttttcttaagaaacgctcacctcaagaagcagaaattcttcgtcagctgtacaccgagtctttcccagacttgtatcgcttctgtatccagaacttagaatacaagatggaggtgctggaggcctttgtcatcacacagagcattaacatgcttcaaggcctgattcctctgaaggagcaaggcggggaggtgagccaggctcacctggggcggctgttcgtgttcgcgctgctgtggagcgcgggggcggcgctggagctggacggacggcgccgcctggagctctggctgcgctctcggcccacagggacgctggagctgccgccgccagcggggcccggggacaccgccttcgactactatgtggcgcccgatggtacatggacgcactggaacacgcgtacccaggaatacctgtatccgtctgataccaccccagagtatggttctattctggtgccaaatgttgacaatgtgaggactgactttctaattcaaaccattgctaaacagggcaaggctgtgctattaattggtgaacaaggaacagccaaaacagtaataattaaaggatttatgtcaaaatatgatcctgaatgtcacatgatcaagagtctgaatttttcttctgcaaccaccccactgatgttccagaggacgatagagagctatgtggataaacgaatgggtacaacatatggccctcctgcgggaaagaagatgactgtttttattgatgatgtgaatatgccaataatcaatgagtggggagatcaggttacgaatgagatagtgcgacagctgatggaacaaaatggattctataatctagagaagcctggggagttcaccagcatcgtggacatccagtttttggcagccatgatccatcctggtggtggacgcaatgacataccccaaagactcaagaggcagttctctatatttaattgcacgttgccctctgaagcttctgtggacaagatctttggtgtgattggggtaggccactactgtactcagaggggtttctcagaagaagtgagagattctgtgacaaaattggtgcctctgacacgccgactatggcagatgaccaagattaaaatgcttcctacccctgcaaaattccattatgtgtttaacctacgagatctttctcgggtctggcagggaatgctgaacactacttcagaggtcatcaaggaaccaaatgatctgttaaagctgtggaagcatgagtgtaaacgtgttatagctgaccgtttcacagtgtccagtgatgtgacctggtttgataaggctttagtaagtttggtagaggaggagtttggtgaagagaaaaaactcttggtggattgtggaattgacacatattttgtggatttcttgagagatgcacctgaagctgcaggtgaaacatctgaagaggctgatgctgaaacacctaaaatttatgagccaattgaatcttttagtcacctaaaagagcgtctgaatatgttcctgcagctctataatgagagcatccgtggcgccggcatggacatggtgttctttgcagatgccatggttcacttagtcaagatctctcgtgtcattcgtactcctcagggaaatgccctcctggtcggggtgggcggatcaggaaagcagagcctgacgaggttggcttcattcattgctggctacgtttccttccagatcactctgacgagatcctacaacacatcaaatctgatggaagatctgaaggttttgtatcgaacagctggtcagcaaggcaaaggaatcacttttattttcacagacaatgagattaaagatgagtcatttttggaatatatgaacaatgttttatcatcaggtgaggtctctaacctatttgctcgagatgaaattgatgaaattaatagcgacctggcatcagtcatgaaaaaagaattccccaggtgccttcctaccaatgagaacctgcacgactacttcatgagtcgggtccgacagaaccttcatattgtgctctgcttctcgccagtgggggagaaatttcgaaacagagctttgaagttccctgccctaatttcaggatgcacaattgactggttcagccgatggcccaaagatgctttagttgctgtgtctgaacacttcctcacttcctatgatattgactgcagtttggaaatcaagaaggaggtggtccaatgcatgggctccttccaggatggggtggctgagaagtgtgttgattattttcagagattccgacgttctacccacgtgacgcccaaatcatacctctcctttattcagggctataagttcatatatggagaaaagcatgtggaggtgcggaccctggccaacagaatgaatactggattggaaaagctcaaagaagcttcagagtctgttgcagccttgagtaaagaactggaagcgaaagaaaaggagctacaagtggccaacgataaagccgacatggtcttaaaagaagtgacaatgaaagcacaggctgctgaaaaggtcaaggctgaggtacagaaggtgaaggacagggcccaggccattgtggacagcatctctaaagacaaagccattgctgaagaaaaactggaagcagcaaaaccagctttagaagaggcagaagctgcattgcagaccatcaggccttcggacatcgccactgttcgcacgttgggccgcccccctcacctcatcatgcggatcatggattgcgtactgctgctgtttcaaaggaaagtcagtgctgtgaaaattgacctggaaaaaagctgtaccatgccctcctggcaggaatccttaaaattgatgactgcagggaactttttacagaacttacagcaattcccaaaagacacaatcaatgaagaggtgatagaatttttgagtccttactttgaaatgcctgactataacatcgaaactgctaaacgcgtatgtggaaatgtagctggtctttgttcctggacgaaagctatggcttccttcttttctataaacaaagaagtactgcctctgaaggccaacttggtggtgcaagagaatcgccatctcctggccatgcaggatctgcagaaagcccaggccgagttggatgacaagcaggcggaacttgacgtggtgcaggctgagtatgaacaggccatgactgaaaagcagaccttgcttgaagatgcagagcgatgcagacacaagatgcagacagcttccacgctcatcagtggcttggcaggtgaaaaagaaagatggacagagcaaagccaagagtttgctgcacaaactaaaagacttgtaggggatgtactgttggctacagcttttctatcttattctggtccatttaaccaagagtttcgtgatcttctgttaaatgactggcggaaggaaatgaaagcccggaaaattccatttggaaagaacctaaatctcagtgagatgttgattgatgctcctactattagtgaatggaacctccaaggtctgccaaatgatgacttgtccattcaaaatggaattattgtcacgaaggcatctcgttaccctttgttaattgatccacagactcaaggcaagatctggattaaaaataaagaaagccgaaatgaactccagatcacgtctttaaatcacaagtacttcagaaaccacctggaagacagcctttctcttggaaggcctttgcttattgaagatgttggagaggaactagatccagcactagataatgttttggaaagaaacttcattaaaactgggtctacctttaaggtgaaagttggtgacaaggaagtagatgtgttggatggctttagactctacattaccaccaaattgcctaacccagcctacacccctgagataagtgcccgtacctccatcattgacttcactgtcaccatgaaaggtctagaagatcagttactggggagggtcattctcacagagaagcaggaattggagaaagaaagaactcatctgatggaagatgtaactgcaaacaaaagaaggatgaaggaactagaagataacttgctttaccgcctgacaagtacccaggggtccctggtagaagatgaaagtctcattgtcgtgctgagtaacacaaaaaggacagccgaggaggtgacacagaagctagaaatttctgctgagacagaagttcaaattaactcagcccgggaggaatacagacctgtggctacgcggggcagcatcctctacttcctcattactgagatgcgcttggttaatgagatgtatcagacttcgcttcgccagtttctgggcttatttgacctttccttagccaggtctgtcaagagcccgattacaagcaagaggattgctaatatcatcgagcacatgacctacgaggtttataagtatgctgcccgagggctgtacgaggagcacaaattcctgttcaccttgttgcttaccctaaagattgacatccagaggaaccgagtcaagcatgaagagtttctcactcttattaaaggaggtgcctcattagaccttaaagcttgtcctccaaaaccatcaaaatggatcctggacataacatggctgaatttggtggaacttagcaaactcagacagttttcagatgtccttgaccagatatcgagaaatgagaaaatgtggaaaatttggtttgataaggaaaacccggaggaggaacctcttccaaatgcctatgataaatctcttgactgcttcagacgtcttctccttattagatcctggtgtcctgacagaaccatcgcccaggcccgcaagtacatcgtggactccatgggagaaaaatatgccgaaggtgttattttagacttggagaagacgtgggaggaatctgatccacggacgccactcatctgtctcctgtctatgggctcagaccccacagattccatcattgccttggggaagagattaaaaatagaaacccgttatgtgtccatgggccagggccaggaagtccatgctcggaagctcttgcagcagaccatggcgaacggaggatgggcacttctgcagaactgccatctgggacttgatttcatggatgagctgatggacataatcatagaaactgagcttgtacatgatgcgttccgcctctggatgaccaccgaggctcataagcagtttcccattacactccttcagatgtccattaaatttgccaacgatcctccacaaggactccgggcaggactgaaaagaacatatagtggtgtcagccaagacctgctggacgtgagctctgggtcccagtggaagcccatgctgtacgcagtggctttcctgcactccactgtccaggagaggcgcaagttcggtgccctggggtggaatatcccctacgaatttaaccaagcggactttaatgccactgtgcagttcatccaaaaccacttggatgacatggatgtcaaaaagggtgtctcctggaccaccatccgctacatgataggagagattcaatatggaggcagagtcactgacgactatgataagagattgttgaacacatttgctaaggtttggttcagtgaaaatatgtttggaccagatttcagtttttaccaaggatacaatattccaaaatgcagcacagtggataactatcttcagtatatccagagtttgcctgcctatgacagccctgaggtgtttgggctgcaccccaatgctgacatcacctaccagagcaagctggccaaggacgtgctggacaccatcctaggcatccaacccaaggacacctctggtggaggggatgagacccgggaggcggtggtggcccggctggctgatgatatgctggagaagctgcccccagactatgtcccctttgaagtaaaagagaggctgcagaagatggggccattccagcctatgaacattttcctcaggcaggaaatagacagaatgcaaagggtactcagccttgtccgcagcaccctcactgagctgaaacttgctattgatggcaccatcatcatgagcgaaaatctgcgagatgcattggattgcatgtttgatgctagaatccctgcttggtggaaaaaagcttcttggatttctagtacactgggtttctggtttactgaacttatagaaagaaacagccagtttacctcgtgggttttcaatggccgacctcactgcttttggatgacgggtttttttaacccccagggatttttaactgcaatgcgacaggaaataactcgggccaacaaaggctgggctctggacaatatggtgctttgcaatgaagtcaccaaatggatgaaggacgacatttctgcccctcccacagagggtgtctatgtctatggcttatatcttgaaggtgctggctgggacaagaggaacatgaaactcattgaatcaaagccaaaagtgctctttgagttgatgcctgtcataaggatttatgcagaaaacaatactttacgagatcctcggttttactcctgtcccatctataagaagccagttcgaacggacttgaactacattgccgctgtggatctcaggacagcccagacccctgaacactgggtgctccgtggggttgcccttctgtgtgatgtcaagtaacatgtggggagtgtccccacccaatgctttggaaaatgcaagatctaaattattgtaacctttatttctgtatgactgctggacagtgtatgttaggtcgtttatgcaattaatgagctgcataggttttccccactccttaattggatgcttatattttacttgtttcatcattagtgaccaatgtctgagtttgttgaaaatgttatttagtgatataaaagtaaatttacagcatcctaatgaagtgtggccctcaaatccacagtagtatattttcttcttacttcgctccgaagactgactagggtaagcagacagtatttctctgggaggaattattcttctgttaacgtggcctggtaacagccaagttcttgaaggtaacagggcaagtctgtgctgattttgcttctattgcctttcgtatttaggtcaagttaagagacttattttcagggtttcaagcagccaattaaaaataccttttaaaaaatagaaggaaatagaagaatggattaagaatgtaaatagaaaatttatgtaaacatagagaataaacgtagaacaatgcttaagcctacttataattaataatgaaatactaattgataattcttataataaaaattaaagctaaaagtaaatgatagcatgctctcagtaaaactgatccactcacaaattgctggagcaatgtaaatcaacccaacctttttgtaaaatgattaaatacagaaagagccataaaaatattcacacccttggatctttgttttctctacatcaaggaaacaatttaaaagactgaaaacagtctatataaaattgcatttaataacagaaaaaaatggaaaaatcataaatattcaatagtcaggctatggttaaggaaattaagagatatttggcaaccataaaaaacaattttgaagattccataatatgaaatggtagacccagactgttaagtgaaagatttagtttacaaaatattgagcacactgtgattataacagcaaatatatttgcatgtggacaaagattagatggcaagatagaaaaataagaacagatgtgatagcaagaattatagttggcttgaaaaaatgtgatgatcaggagaaaaaataaaaaaagggtagaaatattagacggtgcgtagggactttctatggacttttattaattaggaaacattatcaaaggaacttttcacgtatttttctttaaattctggttagatgttattaataattcttcatctaacctactgactagaaaatatagtcagtactaaattagaattgtggtttataaacttttggttagctctggatctgtataactgcatttttttggataaacagtttttggtaggtggataccgggagacaagtgtgggtccctctcactgggcttcattctgtggaccaggatcattatttcatgctcatgatcatgagagttaggactgagtggctcctgtgactcccaccatcttagatgatactgttttcttgtgagttctttcttttggtgtggattagtatatcagttgatttgtgtgaattgtggtgaaacaatcatttcattttgaaaagcaagtaatgaaaatgtcaacatcataggaattaataaaatgtttttact

SEQ ID NO: 128535 - DNA, 12666 bp, Homo sapiens
  Payload ID: 5159
  Gene Symbol: DNAH6
  Gene Name: dynein, axonemal, heavy chain 6
  Uniprot ID: Q9C0G6
  ENST ID: ENST00000237449
  CDS Start-End: 9-12485
gagtaaggatgacttttcgggccacagatagtgaatttgacctgacaaatattgaagagtatgccgaaaattctgcactttcaagactgaataatataaaagccaaacaaagagtgagttatgtgacatccacagaaaatgaatctgatacacaaatcctaacgtttaggcacattacaaaagctcaggagaagacaagaaaacgacagcagcctataaaactagagcctttgccagtgctaaaagtctaccaagatcataagcagccagaatacatacatgaacagaaccgatttcagttaatgactgcaggaatcattaaacgtccagtaagcatagcaaaaaaaagttttgccacatcatctactcagtttcttgagcatcaagatgctgtgaaaaaaatgcagattcatcggccctatgttgaggtgttctctccctctcctcctaaactgccacatactggtattggaaaaagaggtctctttgggactagatcttcagcttaccctaagtacacttttcacgaccgagaagaagttgttaaagccaacattcgtgatcccttgcaaatcattaaaataatacgtgaaaatgaacatcttggatttctttatatgatccctgcagtgccaagatcatccattgaatatgatacatataatctaaaagttgtaagttatgagaacatcaataaaaatgactactatactattagccaaagggcagtaacacacatttataatgaagacattgaatttatcgaaattgatcgatgggaacaggaatatctgtatcacagagaactcactaagattcccatattttcactgttccggaaatggaaggcttttagtgtatggaggaagaatgtccgctccaagaaaatcactggatgtcaaaaatctctacaaaaaaatttgttcattgttaatcctcatttgcgaccagctcttcttaaaataaatgaattgtgttatcatttgagttttatgggactttgttatattgaaaagtgtcacacctacaccctgcaggaatttaaggccgcacaagtcatacggctagcagaggtgacagaacgcctaggagaatttcgaaatgaggcaaaatatgtagtcaggagggcttgtcgatttgctttgcgtgctgcaggatttgttcctgatgactgtgcatttggaccttttgaggattatcataaagtgcagagcagtggaagtttcattaatacaccacatgagttgcccacttatggagactctgagaaaatgacatatacagaacaggccagcaaaaggcattattgcatgaggctgacgtgctttattcgtctaaacgactatctaattgagaacacaatgcacatcttaacggtaaatgctgttaattcgcttttgaaccatctcactgacaagctaaaacgaacaccttcagcagatgtcattcagaaatggattactgaagagaagcctgaagtccctgataaaaaggggacccttatggtggaaaagcaagaagaagatgaatctctcatccccatgtttctcacagaactaatgttgacagtccagtcactgctctttgagccttctctggaagactttctggatggtattttgggtgcagttaatcactgtcaaaacactgtgttatcagttcctaatctcgtgcctgattcgtattttgatgctttcaccagcccttatattaacaacaaacttgaaggaaaaacctgtggaactgggccaagtttagcagcagtatttgaggatgataagaattttcacacaattatttctcaaataaaggaaaccattcaggccgcatttgaatcagcccgcatctatgcagctacctttgaaaagttccagatattcttcaaggaaaatgaaagtcttgatttacaagctcttaaacttcaggaacctgatattaacttttttagtgaacaactggaaaaatatcacaaacagcacaaggacgcagtagcgctcagacccaccagaaatgtaggattgctgctcattgatactaggcttctaagagaaaaattaattccatcacctttgcgatgcttagaggtgctaaattttatgcttcctcgtcaaagcaagaaaaaagtggatgccattatctttgaggcacaagatgcagagtataaacttgagtttgttccaactactaccacagaatatgttcatagcttattatttcttgatgaaattcaggaacggattgaaagccttgaagatgaggggaatatagtgactcaaatgtacaagcttatggaacaatatcaggtgcccacacctcctgaagactttgctgtttttgcaactatgaagccatccattgttgctgttcggaatgccattgataaatcagtgggtgatagagaatcaagcattaagcaattttgtgtgcatttgggtagtgatcttgaagaattaaacaacgaagtgaatgaagtaaaactgcaagcacaggatccacagattttagatatctctgctgaccaagacaaaataaggctcatattgaataatctgcaatctgttctggctgatcttcagaaacgtgcatttcagtataagtcctatcagaagaattttaaggtagaagtgtccaagtttgaagctttggaagaagtcagtgctgaactgaagctcaaacaattgctctgggattctttctctgaatgggataaactccaacaagaatggttaaagtccaaatttgattgcctggatccagaagtcctaaacggtcaagtttctaaatatgctaaatttgtgactcaactggaaaaaggcttgccacccaacagtgtagtgccccagctcaaatacaaggtggaaaaaatgaaagaaaagcttccagttatcattgacttgaggaacccgactttgaaggcaagacattgggcagctattgaacaaacagttgatgccactctagtggatgctgaaattccattaaccttggagaggctctcccagttgcatgtttttgactttggtcaagaaatccaggacatatctggacaggcttctggagaagctgccttagaagcaattcttaaaaaggtggaggactcttggaaaacaactgaatttgtcattctgcctcaccgtgactccaaagatgtgtttatactgggcggcacagatgacatacaggtccttcttgatgatagcaccatcaatgttgcaactcttgcctcatcacgttaccttggtccactgaaaactcgagtggatgaatggcaaaaacaacttgctttatttaatcaaacactggaagagtggctgacctgccagagaaactggctctacctagaaagtattttcaatgctccagacattcagaggcaattgcctgcagaggccaagatgttccttcaggtggataagtcatggaaagaaatcatgagaaaggtgaatcggctgcctaatgctcttcgagccgctactcagccaggacttctggaaacttttcaaaacaataatgcattacttgaccaaattcagaagtgcctagaggcatacttagaatcaaaaagagttatctttccaaggttttacttcttgtcaaatgatgaacttctggagattttggcccagacacgaaatccacaggccgtgcagccacacttaaggaaatgcttcgactccatttcaaagctcgaatttgctctcatgcctcctgccgaaggaaagattcctggtattgatggagaaccagaaaaggtttatactaatgatattttagcaatgctgtcaccagagggagaaagggttagcttggggaaaggcctcaaggcccgaggcaatgtagaggaatggcttggtaaagtggaagaagccatgttcacatctctgcgtcgcctgtgcaaagctgccatcgctgactatcaggggaaactgaggacagactgggtggttgctggccacccttctcaagttatcctgactgtttctcaaattatgtggtgccgtgatttgactgaatgtctggaaacagaacacagtaatcatatacaggccctgaagaattttgaaaaagtaaattttgagagattaaatgccctagctgcaatagttcaaggcagtcttcctaaattacacagaaacatcctaactgcattgattactattgatgtgcatgcaagagatatagtcactgaacttgttcaatccaaggtggagacagttgaatcttttgactggcagagacaactgcgctattactgggatatagacctggataattgtgtggctagaatggcgctctctcagtacacttatggctatgaatatttgggtgcatgcccaagattggttattactccactcacagatcgctgctatctttgcctcatgggagctttgcagcttgaccttgggggtgcaccagctggtcctgctggcactgggaaaacagagactaccaaagatctggcaaaagctcttgccatccagtgtgtggtctttaactgttcagatggtttggactacaagatgatggggcgcttcttcagtggcttggcacagtcaggggcctggtgctgctttgatgaatttaatcgaattgacatagaagttctgtccgtcatcgcgcagcaactcattaccattaggaacgccaaagcggcaaagctctctagattcatgtttgaggggcgggaaataaagttggtgatgacttgtgcagccttcatcacaatgaatcctggctatgcagggagaactgaattgccagataatttgaaagccctgtttagaccatttgcgatgatggttccaaattatgccttgattgcagaggtaattctatattctgaaggatttgaatccagtaaaatattagcaagaaaaatgactcagatgtataagctttgcagtgagcagctgtctcagcaggatcactacgactttggcatgagagctgtgaagtctgtcctggtcatggctggatctttaaaaagagaaaacccagacctaaatgaagatgtggtgttgataagagctttacaagactccaatttgccaaaatttctaacagatgatgctcttctgttcagtggaatcatatctgacctttttcctggagtccaaattccagaacatgattatggtattttacaatcaacaattgtggatgtcatgaatagacaaaatcttcagcctgagatgtgtatggttagaaaggtgatacagttttatgaaactatgctagtaaggcatggtgttatgttagtcgggccaacaggaggcggcaagaccacagtttaccgaatactagcagaaactttagggaatttacaaaaacttgggatagaaaattccttttaccaagcagttaaaacatatgttctcaaccctaaatcaattaccatgggtgaattatatggagaggttaataacttaaccttggaatggaaagatggtttgatggcactaagtgtccgagcagctgtgaatgatacttcagaagaccataaatggatcatcagtgatgggccagtagatgctctttggattgaaaacatgaatacagtgctggatgataacaagatgctttgcctggctaacagtgagaggattaaactcacacctcaaattcacatgctttttgaggtgcaagatctgcgggttgcctcccctgcaacagtcagtcgatgtggaatggtgtttgtggatcctgaagaactgaaatggatgccttatgttaaaacttggatgaagggtatttctaaaaaactgactgaggaaacccaagaatatatattgaatcttttccaacgttatgttgatgaaggtttacattttatcaataaaaagtgcagccaagcaattccacaagtggacatcagcaaagttactacactctgttgcttattggagtccttgatacttgggaaagatggagttaacttggcaatggaacaaacaaaattgaacactatactatgtcagacttttgtattctgttatttgtggtctttgggtggaaacctaactgaaaactactatgattcttttgatacatttattagaacacaatttgatgataatcctgatgccaggcttcccaattctggtgatctgtggagcattcatatggactttgacaccaaacggctggatccctgggaacgaatcatacctactttcaaatacaaccgagatgttccattttttgaaatgcttgtccccacaactgacacagtgcgctatgggtatctaatggaaaaactactggcagtcaagcattccgtgttgtttactggaataactggagtgggcaagtctgtgattgcaaaaggattgctaaataaaattcaagaatcagctggctatgtccctgtttatctaaatttttctgctcaaacttcatctgcaaggacacaagagatcattgagtcaaaactggagagaaaaagaaaaaatattctaggagcaccgggaaacaaacgaattgtgatttttgttgatgatttaaacatgcccagactggatcgctatggctctcagcctccgattgaattacttcggcagtatcaagattttgggggattttatgacagaaacaaactgttttggaaagaaatacaggatgtaacaatcatatcggcatgtgcacctccaggcggtggccgcaaccctgtgactccccgcttcatcagacacttcagcatgctgtgcctcccaatgccctcagagcacagtctgaaacagatttttcaggccatcttaaatggtttcctgagtgactttccaccagctgtaaagcaaactgcatcaagcattgtagaagcctcagttgagatttataacaaaatgagtgttgacctcctgccaacacccgccaagtcccattatgtctttaacttgagggacttatccaaatgtgtgcaaggtatcctccaatgtgatccaggaacaataagagaagaaattcagatatttagactcttttgccatgagtgccaaagggtcttccatgatcgcttgattaataatgaagataagcactatttccatgttattctgacagaaatggccaacaaacattttggaattgcaattgacctggaatattttttgaataagcccatcatatttggagatttcattaagtttggagcagataaagctgatcggatttatgatgacatgcctgatatagagaaaactgcaaatgttctacaggactatcttgatgattataatctcacaaatcccaaagaagtaaagttggtgttcttccaggatgctatagaacatgtttcaaggattgctcggatgatacgtcaagaaagaggcaatgccctgcttgttggagtaggaggcacaggaaagcagtcactcacgagacttgcagctcatatatgcggttacaaatgtttgcagattgaactcagccggggatataattatgatagttttcatgaagacctgaggaagttgtacaaaatggctggtgtagaagacaagaatatggttttccttttcactgacacccagattgtagtggaggagttcctagaagatataaataacatcctgaactcaggtgaagtgcctaatttatttgaaaaggatgaactggagcaggttttagcggccaccagaccaagagcaaaagaagtaggaatttctgaggggaacagagacgaggtgtttcaatactttatcagcaaagtgcgtcagaagctgcacattgttctctgcatgagcccagttggggaggcctttcggtcccgatgcaggatgtttccatcccttgtgaattgctgcaccattgactggtttgtgcagtggcccagagaagcacttctttctgtgtcaaagacatttttctcacaagtcgatgctggaaatgaagaactgaaagaaaagcttcccttgatgtgcgtgaacgttcacttgagtgtctccagcatggcagagcgctattacaatgagctgcgcaggcggtactacacgacacccacctcctacctggagcttatcaatctttacctgtctatgctgtctgaaaaaaggaagcagattatttcagcacgagatcgggtgaagaatggtctcaccaagctactagaaacaaacatactagtagataaaatgaaactagatctttcagctttagagcctgtacttttagcaaaatcagaagatgttgaagccctgatggaaaaattggcagtggatcaagaaagtgccgatcaggtccgtaacactgtgcaggaggatgaagcaacagcaaaagtcaaagctgaagaaacccaagcaatagctgatgatgctcaaagagatcttgacgaggcactacctgcactagatgctgccaataaagcactggattccttagataaggcagatatatctgaaatcagagtttttacaaagcccccagatttggtcatgacagtaatggaagcaatctccattcttttgaatgccaagcctgattggccatcagcaaagcaacttcttggtgactctaactttctaaaaaggcttttagaatatgataaggagaacataaagcctcagatattggcaaagcttcaaaagtatattaataatcctgattttgtgcctgaaaaagtggagaaagtgtccaaagcatgtaaatctatgtgcatgtgggtaagagctatggatttgtactctcgagtggtcaaggtcgtcgaaccaaaaagacaaaagctccgcgccgcacaggctgaacttgacattaccatggctaccctgagagaaaagcaagcattactaagacaagtagaagatcaaatacaggccttacaagatgaatatgacaaaggtgtaaatgaaaaagaaagcctggcaaagaccatggccctgacaaaagcacgtctagtacgtgctggaaagctgacagcagcattagaagatgagcaggttcgatgggaagaaagcatacagaagtttgaggaagaaatatcaaatatcactgggaacgtgttcatagcagcagcttgtgtggcctactatggggctttcacagcccagtacaggcagtcacttatagagtgttggatccaggactgtcagtctctggagatcccaatcgatccttccttcagtctcattaacattcttggagatccctacgagatacggcagtggaacactgatgggctgccccgtgacttgatatcaacagaaaatggcattttggttactcaaggcagaagatggcctttgatgattgatccccaagatcaggcaaaccgttggataaggaacaaggaaagcaaaagtggtttaaagatcattaagcttacagatagtaatttcttacgaatactcgagaattcaatccgacttggtttacctgtcttactggaagagcttaaggaaaccttggatccagctctagaacccattcttttgaaacaaatttttatcagtggtggccgactactcatccgtcttggagactcagacattgattatgacaaaaactttaggttctatatgacaaccaaaatgccaaatccccactatctgcctgaggtatgcattaaagttaccattatcaatttcactgtaacaaaatcaggcctggaggatcagttgttaagtgatgtggtgcgacttgaaaaacccaggttggaagaacaaagaattaagctcatcgtgaggatcaacactgataaaaaccagttgaaaactatcgaagagaaaatcctgagaatgctctttacctctgaaggaaatattctggacaatgaagaacttattgacacactccaggattcaaagatcacttctggtgccattaaaaccaggctggaagaagcagagtccactgagcagatgatcaatgtggctcgtgagaagtatcgtccagtggccactcaaggctctgtaatgtactttgtcattgcaagcctctcagaaatagatcctatgtaccagtactcattaaaatactttaaacagttgttcaataccaccattgaaacttctgtaaagacagaaaatctacaacagcgcctggacgtactactagaacaaactctcctaactgcttatgtcaatgtttcaagaggactttttgagcaacataaactcatctacagctttatgctttgtgttgagatgatgcgtcagcaaggaaccctatctgatgctgaatggaatttctttctccgaggttctgcaggattggaaaaggaacgcccacctaagcctgaagctccctggctacctactgctacatggttcgcatgctgtgacttggaagaatcatttccagtttttcacggacttacccaaaatatattgtcacatcctatttccatacgcttaggatcttttgagacttatattaacccacagaaatgggaaggctattctaaaatgaaacacgaagataaacacatgagacaggaaaaggaggcagcacaccaagatccatggagtgcaggattgagttctttccataagctaattcttattaaatgttgtaaagaagaaaaggtggtttttgctcttacagactttgtgatagaaaatcttggaaaacagtttatagagacaccacctgtggacctgcctaccctgtatcaagacatgtcatgcaacactcccctggtattcatcctaagcacaggctcagatcccatgggtgcatttcagaggtttgccagggaaagtggatattcagaacgggtgcagtcaatttcactggggcaaggacaaggacctattgctgaaaaaatggtcaaggatgcaatgaaatcaggaaactgggtatttttgcaaaattgccatcttgctgtttcttggatgttggcaatggaagagctcattaaaaccttcacagatccagatagtgctatcaaggacacttttcgactttttttaagctccatgcctagtaatacatttcctgttacagttcttcaaaattctgtcaaggtgaccaatgagcctccaaaaggcttacgtgcaaatatcagacgagcatttactgaaatgacaccttcgttttttgaagaaaatatacttggaaaaaaatggagacaaataatatttggcatttgtttcttccatgcaattattcaggagagaaagaagtttggcccccttggttggaatatctgctatgaatttaatgacagtgacagggaatgtgctttactgaatctcaaactctattgtaaagaaggaaagattccctgggatgcactaatttacattactggtgaaattacttatggtggtagagtcacagacagctgggaccaaagatgccttcgtactatcttgaaaagatttttttctcctgaaacattagaagaagattataaatactctgaatcaggcatctattttgcacccatggctgacagcctacaagagtttaaggactacattgaaaatctgcctttgatcgatgacccagaaatttttggaatgcatgaaaatgctaatctagtcttccagtacaaagagaccagcactttaatcaacaccatacttgaggttcagccaaggtcatctactggtggagagggaaaaagcaatgacgaaattgttcaagaacttgttgcttctgtccagaccagagttccagaaaaactggaaatggagggtgcttctgagagcctttttgtcaaggatcttcaaggacgtctgaactccttgaccaccgttcttggacaggaagtggaccggtttaacaacctgctgaagttaattcatacttctctggaaacactcaacaaagccatcgctggatttgtggtgatgtctgaagaaatggaaaaagtgtataacagtttcctcaacaaccaggttcccgctctgtggtccaacacagcctacccatccctgaagccactaggatcatgggtcaaagaccttatcctgaggacctcatttgtggatctgtggctcaaaagaggacagcctaagtcctactggatctctggtttcttctttcctcaaggatttctaacaggaactcttcaaaatcatgctcgaaaatacaatttgcctatagatgagctgagtttcaaatacagcgtaattcccacctatcgggatcaagctgcagtgatagaagctgccaagacagtgcaatttggacaagaactgcccatggacatggagttgccctctcctgaggatggtgttcttgttcatgggatgttcatggatgcttctcgatgggatgataaggagatggtgatagaagatgcattgcccggacagatgaatccagtgctgcctgtggtgcattttgaaccacaacaaaactataagccaagcccaacactttaccactgcccactttataaaacaggagcccgggcaggaacactctcaaccacaggacattcaaccaattttgtggtaaccgtcctgttaccctccaagcggtccaaagactactggattgccaagggatcagctttgctctgccagctgagcgaatgaaaaggtgccacctcagccctgaaaaagaaccaggccagagatctttcctaatgggagcaaaaggtttgaataatttatatgtgagcaaaacggtgttaattctgatttgacttaaacgtattgtgacttttatttctcttatgaccttaaaataaagtgtttgagttctttctgttggcaa

SEQ ID NO: 128536 - DNA, 12795 bp, Homo sapiens
  Payload ID: 5159
  Gene Symbol: DNAH6
  Gene Name: dynein, axonemal, heavy chain 6
  Uniprot ID: Q9C0G6
  ENST ID: ENST00000389394
  CDS Start-End: 138-12614
gcttccgtagaggccagctggttgctacgcagcaacaggaaacattccgcgctaccgagtactttctactcccgaccaggcattgctctctctggagaccctcggcggtggttgctgtattttgacttggagtaaggatgacttttcgggccacagatagtgaatttgacctgacaaatattgaagagtatgccgaaaattctgcactttcaagactgaataatataaaagccaaacaaagagtgagttatgtgacatccacagaaaatgaatctgatacacaaatcctaacgtttaggcacattacaaaagctcaggagaagacaagaaaacgacagcagcctataaaactagagcctttgccagtgctaaaagtctaccaagatcataagcagccagaatacatacatgaacagaaccgatttcagttaatgactgcaggaatcattaaacgtccagtaagcatagcaaaaaaaagttttgccacatcatctactcagtttcttgagcatcaagatgctgtgaaaaaaatgcagattcatcggccctatgttgaggtgttctctccctctcctcctaaactgccacatactggtattggaaaaagaggtctctttgggactagatcttcagcttaccctaagtacacttttcacgaccgagaagaagttgttaaagccaacattcgtgatcccttgcaaatcattaaaataatacgtgaaaatgaacatcttggatttctttatatgatccctgcagtgccaagatcatccattgaatatgatacatataatctaaaagttgtaagttatgagaacatcaataaaaatgactactatactattagccaaagggcagtaacacacatttataatgaagacattgaatttatcgaaattgatcgatgggaacaggaatatctgtatcacagagaactcactaagattcccatattttcactgttccggaaatggaaggcttttagtgtatggaggaagaatgtccgctccaagaaaatcactggatgtcaaaaatctctacaaaaaaatttgttcattgttaatcctcatttgcgaccagctcttcttaaaataaatgaattgtgttatcatttgagttttatgggactttgttatattgaaaagtgtcacacctacaccctgcaggaatttaaggccgcacaagtcatacggctagcagaggtgacagaacgcctaggagaatttcgaaatgaggcaaaatatgtagtcaggagggcttgtcgatttgctttgcgtgctgcaggatttgttcctgatgactgtgcatttggaccttttgaggattatcataaagtgcagagcagtggaagtttcattaatacaccacatgagttgcccacttatggagactctgagaaaatgacatatacagaacaggccagcaaaaggcattattgcatgaggctgacgtgctttattcgtctaaacgactatctaattgagaacacaatgcacatcttaacggtaaatgctgttaattcgcttttgaaccatctcactgacaagctaaaacgaacaccttcagcagatgtcattcagaaatggattactgaagagaagcctgaagtccctgataaaaaggggacccttatggtggaaaagcaagaagaagatgaatctctcatccccatgtttctcacagaactaatgttgacagtccagtcactgctctttgagccttctctggaagactttctggatggtattttgggtgcagttaatcactgtcaaaacactgtgttatcagttcctaatctcgtgcctgattcgtattttgatgctttcaccagcccttatattaacaacaaacttgaaggaaaaacctgtggaactgggccaagtttagcagcagtatttgaggatgataagaattttcacacaattatttctcaaataaaggaaaccattcaggccgcatttgaatcagcccgcatctatgcagctacctttgaaaagttccagatattcttcaaggaaaatgaaagtcttgatttacaagctcttaaacttcaggaacctgatattaacttttttagtgaacaactggaaaaatatcacaaacagcacaaggacgcagtagcgctcagacccaccagaaatgtaggattgctgctcattgatactaggcttctaagagaaaaattaattccatcacctttgcgatgcttagaggtgctaaattttatgcttcctcgtcaaagcaagaaaaaagtggatgccattatctttgaggcacaagatgcagagtataaacttgagtttgttccaactactaccacagaatatgttcatagcttattatttcttgatgaaattcaggaacggattgaaagccttgaagatgaggggaatatagtgactcaaatgtacaagcttatggaacaatatcaggtgcccacacctcctgaagactttgctgtttttgcaactatgaagccatccattgttgctgttcggaatgccattgataaatcagtgggtgatagagaatcaagcattaagcaattttgtgtgcatttgggtagtgatcttgaagaattaaacaacgaagtgaatgaagtaaaactgcaagcacaggatccacagattttagatatctctgctgaccaagacaaaataaggctcatattgaataatctgcaatctgttctggctgatcttcagaaacgtgcatttcagtataagtcctatcagaagaattttaaggtagaagtgtccaagtttgaagctttggaagaagtcagtgctgaactgaagctcaaacaattgctctgggattctttctctgaatgggataaactccaacaagaatggttaaagtccaaatttgattgcctggatccagaagtcctaaacggtcaagtttctaaatatgctaaatttgtgactcaactggaaaaaggcttgccacccaacagtgtagtgccccagctcaaatacaaggtggaaaaaatgaaagaaaagcttccagttatcattgacttgaggaacccgactttgaaggcaagacattgggcagctattgaacaaacagttgatgccactctagtggatgctgaaattccattaaccttggagaggctctcccagttgcatgtttttgactttggtcaagaaatccaggacatatctggacaggcttctggagaagctgccttagaagcaattcttaaaaaggtggaggactcttggaaaacaactgaatttgtcattctgcctcaccgtgactccaaagatgtgtttatactgggcggcacagatgacatacaggtccttcttgatgatagcaccatcaatgttgcaactcttgcctcatcacgttaccttggtccactgaaaactcgagtggatgaatggcaaaaacaacttgctttatttaatcaaacactggaagagtggctgacctgccagagaaactggctctacctagaaagtattttcaatgctccagacattcagaggcaattgcctgcagaggccaagatgttccttcaggtggataagtcatggaaagaaatcatgagaaaggtgaatcggctgcctaatgctcttcgagccgctactcagccaggacttctggaaacttttcaaaacaataatgcattacttgaccaaattcagaagtgcctagaggcatacttagaatcaaaaagagttatctttccaaggttttacttcttgtcaaatgatgaacttctggagattttggcccagacacgaaatccacaggccgtgcagccacacttaaggaaatgcttcgactccatttcaaagctcgaatttgctctcatgcctcctgccgaaggaaagattcctggtattgatggagaaccagaaaaggtttatactaatgatattttagcaatgctgtcaccagagggagaaagggttagcttggggaaaggcctcaaggcccgaggcaatgtagaggaatggcttggtaaagtggaagaagccatgttcacatctctgcgtcgcctgtgcaaagctgccatcgctgactatcaggggaaactgaggacagactgggtggttgctggccacccttctcaagttatcctgactgtttctcaaattatgtggtgccgtgatttgactgaatgtctggaaacagaacacagtaatcatatacaggccctgaagaattttgaaaaagtaaattttgagagattaaatgccctagctgcaatagttcaaggcagtcttcctaaattacacagaaacatcctaactgcattgattactattgatgtgcatgcaagagatatagtcactgaacttgttcaatccaaggtggagacagttgaatcttttgactggcagagacaactgcgctattactgggatatagacctggataattgtgtggctagaatggcgctctctcagtacacttatggctatgaatatttgggtgcatgcccaagattggttattactccactcacagatcgctgctatctttgcctcatgggagctttgcagcttgaccttgggggtgcaccagctggtcctgctggcactgggaaaacagagactaccaaagatctggcaaaagctcttgccatccagtgtgtggtctttaactgttcagatggtttggactacaagatgatggggcgcttcttcagtggcttggcacagtcaggggcctggtgctgctttgatgaatttaatcgaattgacatagaagttctgtccgtcatcgcgcagcaactcattaccattaggaacgccaaagcggcaaagctctctagattcatgtttgaggggcgggaaataaagttggtgatgacttgtgcagccttcatcacaatgaatcctggctatgcagggagaactgaattgccagataatttgaaagccctgtttagaccatttgcgatgatggttccaaattatgccttgattgcagaggtaattctatattctgaaggatttgaatccagtaaaatattagcaagaaaaatgactcagatgtataagctttgcagtgagcagctgtctcagcaggatcactacgactttggcatgagagctgtgaagtctgtcctggtcatggctggatctttaaaaagagaaaacccagacctaaatgaagatgtggtgttgataagagctttacaagactccaatttgccaaaatttctaacagatgatgctcttctgttcagtggaatcatatctgacctttttcctggagtccaaattccagaacatgattatggtattttacaatcaacaattgtggatgtcatgaatagacaaaatcttcagcctgagatgtgtatggttagaaaggtgatacagttttatgaaactatgctagtaaggcatggtgttatgttagtcgggccaacaggaggcggcaagaccacagtttaccgaatactagcagaaactttagggaatttacaaaaacttgggatagaaaattccttttaccaagcagttaaaacatatgttctcaaccctaaatcaattaccatgggtgaattatatggagaggttaataacttaaccttggaatggaaagatggtttgatggcactaagtgtccgagcagctgtgaatgatacttcagaagaccataaatggatcatcagtgatgggccagtagatgctctttggattgaaaacatgaatacagtgctggatgataacaagatgctttgcctggctaacagtgagaggattaaactcacacctcaaattcacatgctttttgaggtgcaagatctgcgggttgcctcccctgcaacagtcagtcgatgtggaatggtgtttgtggatcctgaagaactgaaatggatgccttatgttaaaacttggatgaagggtatttctaaaaaactgactgaggaaacccaagaatatatattgaatcttttccaacgttatgttgatgaaggtttacattttatcaataaaaagtgcagccaagcaattccacaagtggacatcagcaaagttactacactctgttgcttattggagtccttgatacttgggaaagatggagttaacttggcaatggaacaaacaaaattgaacactatactatgtcagacttttgtattctgttatttgtggtctttgggtggaaacctaactgaaaactactatgattcttttgatacatttattagaacacaatttgatgataatcctgatgccaggcttcccaattctggtgatctgtggagcattcatatggactttgacaccaaacggctggatccctgggaacgaatcatacctactttcaaatacaaccgagatgttccattttttgaaatgcttgtccccacaactgacacagtgcgctatgggtatctaatggaaaaactactggcagtcaagcattccgtgttgtttactggaataactggagtgggcaagtctgtgattgcaaaaggattgctaaataaaattcaagaatcagctggctatgtccctgtttatctaaatttttctgctcaaacttcatctgcaaggacacaagagatcattgagtcaaaactggagagaaaaagaaaaaatattctaggagcaccgggaaacaaacgaattgtgatttttgttgatgatttaaacatgcccagactggatcgctatggctctcagcctccgattgaattacttcggcagtatcaagattttgggggattttatgacagaaacaaactgttttggaaagaaatacaggatgtaacaatcatatcggcatgtgcacctccaggcggtggccgcaaccctgtgactccccgcttcatcagacacttcagcatgctgtgcctcccaatgccctcagagcacagtctgaaacagatttttcaggccatcttaaatggtttcctgagtgactttccaccagctgtaaagcaaactgcatcaagcattgtagaagcctcagttgagatttataacaaaatgagtgttgacctcctgccaacacccgccaagtcccattatgtctttaacttgagggacttatccaaatgtgtgcaaggtatcctccaatgtgatccaggaacaataagagaagaaattcagatatttagactcttttgccatgagtgccaaagggtcttccatgatcgcttgattaataatgaagataagcactatttccatgttattctgacagaaatggccaacaaacattttggaattgcaattgacctggaatattttttgaataagcccatcatatttggagatttcattaagtttggagcagataaagctgatcggatttatgatgacatgcctgatatagagaaaactgcaaatgttctacaggactatcttgatgattataatctcacaaatcccaaagaagtaaagttggtgttcttccaggatgctatagaacatgtttcaaggattgctcggatgatacgtcaagaaagaggcaatgccctgcttgttggagtaggaggcacaggaaagcagtcactcacgagacttgcagctcatatatgcggttacaaatgtttgcagattgaactcagccggggatataattatgatagttttcatgaagacctgaggaagttgtacaaaatggctggtgtagaagacaagaatatggttttccttttcactgacacccagattgtagtggaggagttcctagaagatataaataacatcctgaactcaggtgaagtgcctaatttatttgaaaaggatgaactggagcaggttttagcggccaccagaccaagagcaaaagaagtaggaatttctgaggggaacagagacgaggtgtttcaatactttatcagcaaagtgcgtcagaagctgcacattgttctctgcatgagcccagttggggaggcctttcggtcccgatgcaggatgtttccatcccttgtgaattgctgcaccattgactggtttgtgcagtggcccagagaagcacttctttctgtgtcaaagacatttttctcacaagtcgatgctggaaatgaagaactgaaagaaaagcttcccttgatgtgcgtgaacgttcacttgagtgtctccagcatggcagagcgctattacaatgagctgcgcaggcggtactacacgacacccacctcctacctggagcttatcaatctttacctgtctatgctgtctgaaaaaaggaagcagattatttcagcacgagatcgggtgaagaatggtctcaccaagctactagaaacaaacatactagtagataaaatgaaactagatctttcagctttagagcctgtacttttagcaaaatcagaagatgttgaagccctgatggaaaaattggcagtggatcaagaaagtgccgatcaggtccgtaacactgtgcaggaggatgaagcaacagcaaaagtcaaagctgaagaaacccaagcaatagctgatgatgctcaaagagatcttgacgaggcactacctgcactagatgctgccaataaagcactggattccttagataaggcagatatatctgaaatcagagtttttacaaagcccccagatttggtcatgacagtaatggaagcaatctccattcttttgaatgccaagcctgattggccatcagcaaagcaacttcttggtgactctaactttctaaaaaggcttttagaatatgataaggagaacataaagcctcagatattggcaaagcttcaaaagtatattaataatcctgattttgtgcctgaaaaagtggagaaagtgtccaaagcatgtaaatctatgtgcatgtgggtaagagctatggatttgtactctcgagtggtcaaggtcgtcgaaccaaaaagacaaaagctccgcgccgcacaggctgaacttgacattaccatggctaccctgagagaaaagcaagcattactaagacaagtagaagatcaaatacaggccttacaagatgaatatgacaaaggtgtaaatgaaaaagaaagcctggcaaagaccatggccctgacaaaagcacgtctagtacgtgctggaaagctgacagcagcattagaagatgagcaggttcgatgggaagaaagcatacagaagtttgaggaagaaatatcaaatatcactgggaacgtgttcatagcagcagcttgtgtggcctactatggggctttcacagcccagtacaggcagtcacttatagagtgttggatccaggactgtcagtctctggagatcccaatcgatccttccttcagtctcattaacattcttggagatccctacgagatacggcagtggaacactgatgggctgccccgtgacttgatatcaacagaaaatggcattttggttactcaaggcagaagatggcctttgatgattgatccccaagatcaggcaaaccgttggataaggaacaaggaaagcaaaagtggtttaaagatcattaagcttacagatagtaatttcttacgaatactcgagaattcaatccgacttggtttacctgtcttactggaagagcttaaggaaaccttggatccagctctagaacccattcttttgaaacaaatttttatcagtggtggccgactactcatccgtcttggagactcagacattgattatgacaaaaactttaggttctatatgacaaccaaaatgccaaatccccactatctgcctgaggtatgcattaaagttaccattatcaatttcactgtaacaaaatcaggcctggaggatcagttgttaagtgatgtggtgcgacttgaaaaacccaggttggaagaacaaagaattaagctcatcgtgaggatcaacactgataaaaaccagttgaaaactatcgaagagaaaatcctgagaatgctctttacctctgaaggaaatattctggacaatgaagaacttattgacacactccaggattcaaagatcacttctggtgccattaaaaccaggctggaagaagcagagtccactgagcagatgatcaatgtggctcgtgagaagtatcgtccagtggccactcaaggctctgtaatgtactttgtcattgcaagcctctcagaaatagatcctatgtaccagtactcattaaaatactttaaacagttgttcaataccaccattgaaacttctgtaaagacagaaaatctacaacagcgcctggacgtactactagaacaaactctcctaactgcttatgtcaatgtttcaagaggactttttgagcaacataaactcatctacagctttatgctttgtgttgagatgatgcgtcagcaaggaaccctatctgatgctgaatggaatttctttctccgaggttctgcaggattggaaaaggaacgcccacctaagcctgaagctccctggctacctactgctacatggttcgcatgctgtgacttggaagaatcatttccagtttttcacggacttacccaaaatatattgtcacatcctatttccatacgcttaggatcttttgagacttatattaacccacagaaatgggaaggctattctaaaatgaaacacgaagataaacacatgagacaggaaaaggaggcagcacaccaagatccatggagtgcaggattgagttctttccataagctaattcttattaaatgttgtaaagaagaaaaggtggtttttgctcttacagactttgtgatagaaaatcttggaaaacagtttatagagacaccacctgtggacctgcctaccctgtatcaagacatgtcatgcaacactcccctggtattcatcctaagcacaggctcagatcccatgggtgcatttcagaggtttgccagggaaagtggatattcagaacgggtgcagtcaatttcactggggcaaggacaaggacctattgctgaaaaaatggtcaaggatgcaatgaaatcaggaaactgggtatttttgcaaaattgccatcttgctgtttcttggatgttggcaatggaagagctcattaaaaccttcacagatccagatagtgctatcaaggacacttttcgactttttttaagctccatgcctagtaatacatttcctgttacagttcttcaaaattctgtcaaggtgaccaatgagcctccaaaaggcttacgtgcaaatatcagacgagcatttactgaaatgacaccttcgttttttgaagaaaatatacttggaaaaaaatggagacaaataatatttggcatttgtttcttccatgcaattattcaggagagaaagaagtttggcccccttggttggaatatctgctatgaatttaatgacagtgacagggaatgtgctttactgaatctcaaactctattgtaaagaaggaaagattccctgggatgcactaatttacattactggtgaaattacttatggtggtagagtcacagacagctgggaccaaagatgccttcgtactatcttgaaaagatttttttctcctgaaacattagaagaagattataaatactctgaatcaggcatctattttgcacccatggctgacagcctacaagagtttaaggactacattgaaaatctgcctttgatcgatgacccagaaatttttggaatgcatgaaaatgctaatctagtcttccagtacaaagagaccagcactttaatcaacaccatacttgaggttcagccaaggtcatctactggtggagagggaaaaagcaatgacgaaattgttcaagaacttgttgcttctgtccagaccagagttccagaaaaactggaaatggagggtgcttctgagagcctttttgtcaaggatcttcaaggacgtctgaactccttgaccaccgttcttggacaggaagtggaccggtttaacaacctgctgaagttaattcatacttctctggaaacactcaacaaagccatcgctggatttgtggtgatgtctgaagaaatggaaaaagtgtataacagtttcctcaacaaccaggttcccgctctgtggtccaacacagcctacccatccctgaagccactaggatcatgggtcaaagaccttatcctgaggacctcatttgtggatctgtggctcaaaagaggacagcctaagtcctactggatctctggtttcttctttcctcaaggatttctaacaggaactcttcaaaatcatgctcgaaaatacaatttgcctatagatgagctgagtttcaaatacagcgtaattcccacctatcgggatcaagctgcagtgatagaagctgccaagacagtgcaatttggacaagaactgcccatggacatggagttgccctctcctgaggatggtgttcttgttcatgggatgttcatggatgcttctcgatgggatgataaggagatggtgatagaagatgcattgcccggacagatgaatccagtgctgcctgtggtgcattttgaaccacaacaaaactataagccaagcccaacactttaccactgcccactttataaaacaggagcccgggcaggaacactctcaaccacaggacattcaaccaattttgtggtaaccgtcctgttaccctccaagcggtccaaagactactggattgccaagggatcagctttgctctgccagctgagcgaatgaaaaggtgccacctcagccctgaaaaagaaccaggccagagatctttcctaatgggagcaaaaggtttgaataatttatatgtgagcaaaacggtgttaattctgatttgacttaaacgtattgtgacttttatttctcttatgaccttaaaataaagtgtttgagttctttctgttggcaa

SEQ ID NO: 128537 - DNA, 1873 bp, Homo sapiens
  Payload ID: 5159
  Gene Symbol: DNAH6
  Gene Name: dynein, axonemal, heavy chain 6
  ENST ID: ENST00000602588
  CDS Start-End: 166-1821
caagaatatatattgaatcttttccaacgttatgttgatgaaggtttacattttatcaataaaaagtgcagccaagcaattccacaagtggacatcagcaaagttactacactctgttgcttattggagtccttgatacttgggaaagatggagttaacttggcaatggaacaaacaaaattgaacactatactatgtcagacttttgtattctgttatttgtggtctttgggtggaaacctaactgaaaactactatgattcttttgatacatttattagaacacaatttgatgataatcctgatgccaggcttcccaattctggtgatctgtggagcattcatatggactttgacaccaaacggctggatccctgggaacgaatcatacctactttcaaatacaaccgagatgttccattttttgaaatgcttgtccccacaactgacacagtgcgctatgggtatctaatggaaaaactactggcagtcaagcattccgtgttgtttactggaataactggagtgggcaagtctgtgattgcaaaaggattgctaaataaaattcaagaatcagctggctatgtccctgtttatctaaatttttctgctcaaacttcatctgcaaggacacaagagatcattgagtcaaaactggagagaaaaagaaaaaatattctaggagcaccgggaaacaaacgaattgtgatttttgttgatgatttaaacatgcccagactggatcgctatggctctcagcctccgattgaattacttcggcagtatcaagattttgggggattttatgacagaaacaaactgttttggaaagaaatacaggatgtaacaatcatatcggcatgtgcacctccaggcggtggccgcaaccctgtgactccccgcttcatcagacacttcagcatgctgtgcctcccaatgccctcagagcacagtctgaaacagatttttcaggccatcttaaatggtttcctgagtgactttccaccagctgtaaagcaaactgcatcaagcattgtagaagcctcagttgagatttataacaaaatgagtgttgacctcctgccaacacccgccaagtcccattatgtctttaacttgagggacttatccaaatgtgtgcaagacaaacattttggaattgcaattgacctggaatattttttgaataagcccatcatatttggagatttcattaagtttggagcagataaagctgatcggatttatgatgacatgcctgatatagagaaaactgcaaatgttctacaggactatcttgatgattataatctcacaaatcccaaagaagtaaagttggtgttcttccaggatgctatagaacatgtttcaaggattgctcggatgatacgtcaagaaagaggcaatgccctgcttgttggagtaggaggcacaggaaagcagtcactcacgagacttgcagctcatatatgcggttacaaatgtttgcagattgaactcagccggggatataattatgatagttttcatgaagacctgaggaagttgtacaaaatggctggtgtagaagacaagaatatggttttccttttcactgacacccagattgtagtggaggagttcctagaagatataaataacatcctgaactcaggtgaagtgcctaatttatttgaaaaggatgaactggagcaggttttagcggccaccagaccaagagcaaaagaagtaggaatttctgaggggaacagagacgaggtaggatgtgccagagtagttatgtggctttatcacaaaaacgtttcttcaccttttatttaaccattcattgattgcctgaaggggtccatgaataaaatttttttcaatataa

SEQ ID NO: 128538 - DNA, 12394 bp, Homo sapiens
  Payload ID: 5160
  Gene Symbol: DNAH7
  Gene Name: dynein, axonemal, heavy chain 7
  Uniprot ID: Q8WXX0
  ENST ID: ENST00000312428
  CDS Start-End: 102-12176
gagaccgctgcaagtcccggggccctgcctctatcgtcctaggggttccgcgggcaggagcaacccagaagcaccggtgaggccagcgcgtcctcgcagccatgagcagtgagcaggataaatcggccagcaaagaaaaatccaagaaaccagtaagatttctaccacagctgtctatggagaaattagccagcaaagaaaagttcaaggcaccagcaagagctttaccacagctgtctatggtgagtacaaagccccactggcagcaggcagctccatcattccatttgagtgtaaagcaggatgatgagagtccagaaccatttagtgttaaaaatgaacagtcccatgctgaatacatggaacgttttggaaaaaagggcaaattaccccaccaagttgatgatagttatgttggaccatctacttccaaatcaaagggcaaatctccacataaagaacgagaaaactttagaagtactcttgttaatgtcattatgcaacaagatgctgacttagactcagctgtccctgatggaagcacaattccaaaaccgaccgcttctgctatagagaaagacatcttgagatattactattatattcaccatggaattgatacagaccatgtagccccaatggaagattcttggctagaacacgtactggatttagttccacaacatctgaaagtcttcactgacagcatagttacattatctgatgaaatgagagaggattatcttcttagtgtaaggaaatccatagttgattttgttttaaaagatcctcgagagaaaggagatgataagaagacagatgaacttccagcccatcgtgctgaaatggaaattctgccaaaaccttggaggaaatcttttttagctgcaagcagttatattagggatcacttgaatgcaatgaaccccacaatgctggctgtactagatttgtggcacactaattttaaaaaattacgtttagttgatatcaaagaatttcataattgccaggatgcattagagctgtcaagttttcagaacattatcatgagacacatggactctgccaaagagactctacttaaaatgtggtttccagaagtgcagaatatttattaccaaggtaataaaaaaaagcaattgccaactggtgacagcagtgccaaattggaatcttttttcaactgtgctgctgcacttatgactttacagctgcaggacctcactttagtctccatgcaagatttcacggacttaattgcacaacccccagattctgttagagcttttgaacatccaggtttcatcatgaggctgattcttgataatgacaccattaagtttgaacctgagttgagtgactatatagatatctttctaaatgtttatgacgtcatgattaaagctgtcagttttgtgccaagagttgagacaaaattgtattccaagtgggaaagtaagtctaaaccaacaaccttgaagcccataattctgaatgaaattgtagatgctcacaaagaaaagatcaaggaagttattatgaaagagagtgtggcacctactgagcacctcagactctatgacaagtatgactttttaattaccagaaaagctgagcgagatgttgataacttcctcgcagaaaatcatagttatgaaaaaataatagatgaaatttgcaaataccagaaactaatagaggaaatacagtacacatccataaagactattcgtttaggaatgtttgaaatgcactgtgaggaattaatcagagctttggtgaagcgagcagatattatttgtgggaaacttctagctaaaatgttcagagatcatcaggaagtaaatacaagattatgcgatgaatttgagaggatagctgaaaaagctcttagcactcctccaaatacagcagaactaatggaaatgaaggcttacattcagaaagtggaggtaactgatatgattgaactagaacagagattagtggattccaaaaactgcctcgccttcctcatcgagtatgtcaacttttctccagcagacatgaggctaaataatagtgttttccagtggtatggaaggatgggagaaatttttgaagaacacaggaaaatcattaaagagaaaatagaacaatatcaagaaggtctgaagttacggtgtgaacggtttgtggaggaattggagagttatgctaagcaatcagaagaattttattcatttggagatcttcaggatgttcagcggtacctaaaaaaggctcaaatactgaatggaaagttggatttagctgcagataagattgagcagtttaatgctgaagaggaagcatttggttggctaccatctgtatatcctcaacgtaaaaaaatccaagatggcttgaacccttatcttcgtctttatgaaactgctgtcgaatttagcagcaactatagagcatggacagaagggccatatcataaagtgaatccagaccaagtagaagcagatattggaaattactggagaggattatataaactggagaaaacctttcatgattctccatatgcattggcaatgacaaaaaaagtaagatcaaaggtggaagatttcaagcagcacattcctctcattcaagtgatctgtaatcctggtttgcgccccaggcactgggaggccatgtctgccattgttggttaccctttgcagccatcagatgactccacagtctcctcttttttagacatgaatctggaaccatatatagaccgatttgaaggtattagtgaagcagctagcaaagaatattctcttgaaaaggcgatggagaagatgattactgagtgggatgcagtggaatttgtcatccattcttatagagaaactgggacatttattttggcatcagttgatgaaattcagatgttgttggatgaccatattattaaaacacaaactatgcgaggatctcctttcattaagccttatgaaaaacaaatgagagaatgggagggcaagctcctactgcttcaggagattctggatgaatggctcaaagtccaagccacgtggctgtatctggagcccattttcagctctccagacattatgtctcaaatgcctgaggaaggcagacgatttacagctgtggataagacatggagagatataatgagaagtgtcatgcaggataaacatgttctgacagttgtaaccattgacagaatgctggaaaggctgaaaaaatctaatgaacttttggagctcattcttaaaggacttaatgaatatttggaaaagaaacgcctctttttccccagattcttttttttgtccaatgatgaacttcttgagatactatctgagactaaagatcccactagggtgcaacctcacttgaagaaatgttttgaaggaatcgcaaaggtagaatttacggaaactttagacattactcacatgaagagcagcgaaggagaggttgtagaactcatagagattatttcaacagccaaagccagaggtcaagtggagaagtggttggttgaattagagagagttatgattaactccatccacaaggtaactggagatgcaacttttgcctatacaaaatatgaacgaattaactgggtaagggattggcctggacagactgttctctgtgtatcccaaatcttttggacaaaagaagtacaaacagctattccaatggggataaaggctcttgagcaatacttgaaaacatgtaacagacaaattgatgatattgtcactttggtgcgtggcaaattgtccatgcagaatcgcgtaactctgggagcacttgtggtactggatgtccatgctagagatgtcctctcatcacttgtaaaaaaaaatattagcgatgactctgactttgaatggttaagtcagcttaggtactactggcaagaaaatcatttagaaacaaaaatgatcaatgctggtttgcgatatggatatgaatatctgggtaattcccctaggctggttattacaccactcacggatagatgttacagaaccttatttggagcccttcatttgcaccttggaggagcacctgagggtccagctggcactgggaagactgaaactaccaaggatttggcaaaagctgtagccaaacaatgtgttgttttcaactgctctgatgggttggattatttggctttgggaaaattctttaagggactgttatcttgtggagcctgggcttgctttgatgagtttaacagaattgatttggaagtactctctgtggttgctcaacaaatccttactatccaaagaggtattaatgcaggtgctgatatactgatgtttgaaggaactgaactaaaacttgaccccacatgtgctgtctttataacaatgaaccctgggtatgctgggcgatcagaactgccagataacctgaaggctctctttcggacagtagcaatgatggtacctgactatgccatgattgctgaaatagtcctatactcctgtgggtttgtcactgctcgaccactgtctgtaaaaattgtggctacgtatcgcttgtgttcagagcagctgtcatctcaacatcactacgactatggaatgagagccgtgaagtcagttcttactgctgctgggaatctgaagctgaaatatccaaatgaaaatgaagaaattttgctgcttagatctatcattgatgtaaatctgccaaaatttttatcccatgatttaccactctttgagggaattacttcggatttgtttcctggggtaaaattaccaaaaccagattacaatgatttgctggcagctatcaaagacaattgtgcctccatgaatttgcaaatgactgcattcttttccgagaagattcttcaagtatatgaaatgatgattgtgcgtcatggttttatgattgttggagaaccatttggaggaaaaactagtgcatatcgtgtcttagctggagcactaaatgatatatgtgaaaaggggctaatggaagaaaacaaagttcaaataactgttttaaatcctaagtctgtcaccatgggccaactgtacggacagtttgattcagtgtcccatgaatggtctgatggggtccttgctgtcagttttagagcatttgcctcttcagtgactccagataggaaatggttaatttttgatggcccagtagatgcagtgtggattgagaatatgaacactgtgctggatgacaacaagaagctatgtctgatgagtggggagattattcagatgtcaccacaaatgaatctaatttttgagccaatggatttagaagttgcttcccctgccactgtttccagatgtggcatgatttacatggagcctcacatgttaggctggagaccactgatgttgtcctgggtgaatctgttacctgcgtcagtcagtgttattcaaaaggaattcataatgggcttatttgacagaatggtccctgtttcggttgaatttattagaaagcatacaaaggaattatctcctacttccgatacaaacttggtccggtccttaatgaatctaatagactgttttatggatgattttgctgatgaagtcaaactaaaggagagaaatgatcgagaaacttactctttgcttgagggcatttttctgttttcattgatctggtccgttggtgcttcttgtacagatgatgatcgattgaaatttaataagattcttcgagaactaatggaaagtccaatttcagatcgaactcgaaatacgtttaaattacagagtggtactgagcaaacatcctcaaaggcactaactgtcccatttcctgaaaaaggaacaatttatgattatcaatttgtcactgagggaataggaaaatgggaaccatggataaagaaattgaaagaagctcctccaattcctaaagatgtaatgtttaatgaaatcattgtgccaactctggacacaattcgatactctgcattaatggaattgctgaccacccatcaaaagccttcaatatttgtaggaccaacaggaactgggaaaagtgtttacattacgaattttcttttaaatcaactaaataaggaaatctacaaacctctgctaattaacttctcagcacaaactacagcagctcaaactcagaatattgtcatgtcaaaattggacaagagaagaaagggagtttttggtcctcctttgggcaagagaatggttgtctttgtagatgatgtcaatatgcctgctcgggaggtatatggggctcaacctcccattgagttacttagacagtggttagaccactggaactggtatgatctaaaagattgttccatgattaaactagtggacattcagatcatgtgtgctatgggacctccaggtggtggtcgaaatccagtaactcctcgatacatgcgacatttcaatattataacaatcaatgagtttagtgataaatccatgtatacaatcttctctagaatcttaacttggcatttagaaatctgttataaatttccagatgaatttctagatttgaccacacaaatcgtaaatggcacaatgactctgtataaagaagcaatgaagaatctcttgcctactccagctaaatctcactacttgttcaacctccgtgatttctcccgtgtcattcaaggtgtttgtttgtcaagaccagaaacaacagaaaccacagaagtgattaaacgtctttgggttcatgaggtccttcgagtgtattatgaccgccttctggacaatacagacagaagctggctcatcaactacattcaagaaattttgagaaactacatgtatgaagattttcatgagctttttcagcgtttggattttgataatgatggcatggtggaagcagatgacttacgcagcttaatgttttgtgatttccatgatcccaagagggaggataccaactacagagaaatcgcagatgtggataatcttcgaatgatagtagaaattcacctagaagaatacaacaatataagcaaaaaacccatgaaccttgtcttgtttcgatttgccatagagcacatcagcagaatttccaggatcctgaagcagcctcgcagccatgctctcctagtaggggttggagggagtggaaggcagtctgtcaccagattagctgcccacatggctgattattcagttttccaagttgaaatctctaaggggtatgatactactgaatggcatgaagatttaaaagtgatcttaaggaaatgtgcggaaggtgagatgcagggtgtcttcctgtttacagatactcaaattaaagaagagtcttttctggaagatgtcagtaatctgctaaatgctggggagattccaaatctctttgcattagatgagaagcaagagatatgtgataagatgcgtcagttagatcgccagcgggataaaaccaagcaaacagatggcagccccatagcccttttcaacatgtttattgatcattgccgcagccaactgcatgtggtccttgccatgagtcccattggagatgcatttcggaatcgtcttagaaagttccctgctcttgttaactgctgtaccattgactggtttcagtcatggcctgaagatgcactccaggcagttgcctcacgattcttggaagaaattgaaatgtcagaggaaatacgagatggctgtatcgacatgtgtaaaagcttccacacttctactatagatttatccaaatctttctttgttgaacttcaaagatacaattatgtgactcctacctcttacctcgaattaatctccaccttcaaactgttgttagaaaagaaaagaagtgaagtaatgaaaatgaaaaagagatatgaagtgggtttggagaaactggattctgcttcatctcaagtagccacaatgcagatggagttggaggcactacatcctcaattaaaagttgctagcaaagaggttgatgaaatgatgataatgattgagaaagagtctgtagaagttgccaaaactgaaaaaatagtgaaagctgatgaaacaatagcgaatgaacaagctatggcttccaaagccatcaaagatgagtgcgatgctgacctggcaggtgccttgccaatattagagtcagcactggccgcccttgatactcttactgcacaggatattacagtggtaaaatccatgaagagtcctcctgctggtgtcaagcttgttatggaagctatatgcatcttgaaaggaatcaaagctgacaaaatccctgacccaacaggttcagggaaaaaaattgaggatttctggggcccagctaagagacttcttggtgacatgaggtttctgcagtcacttcatgaatatgacaaggacaatattcctccagcttatatgaatatcataagaaaaaattatattccaaatccagattttgtaccagaaaaaatcagaaatgcttctacagcggccgaaggtctgtgcaaatgggtcatagcaatggattcatatgataaagtggcaaaaatagtagctcccaaaaagataaaactggctgcagctgaaggggagcttaaaattgccatggatggtcttagaaagaagcaggcagcccttaaggaagttcaggacaagctggccaggcttcaagacacacttgaattaaataaacaaaagaaggctgacctggaaaaccaggttgacctttgcagcaaaaaactagaacgagctgaacagttgattggaggccttggaggtgagaaaactcgatggagccacacagctctggagctaggtcagctgtacatcaacttgactggggatatcctcatttcctccggagtggttgcttacctcggagccttcacatccacctatagacagaatcaaactaaagagtggacaactttgtgcaaaggaagagatatcccctgctcagatgattgctctcttatgggtaccctgggagaagctgtgacaattcgaacttggaatattgctggattaccttctgactcattttccattgataatgggataatcataatgaatgcaagaaggtggcctctgatgatagatcctcaaagtcaggctaataaatggatcaagaacatggaaaaagccaatagtctttatgtgattaaacttagtgaacctgactatgtcaggactctggaaaattgcatccagtttggtactcctgtgttgctagaaaatgttggcgaagaactagatcctattttggaacctcttctactaaaacaaacctttaagcagggtgggagtacatgtatccggcttggggactccacaattgaatatgcacctgacttccgcttctatattactaccaagttaagaaatcctcattatcttcctgaaacatcagtaaaggtaacattattaaacttcatgataacccctgagggaatgcaagatcagcttctgggaattgtggtggcacaagaaaggccagaccttgaagaagaaaagcaagccttgatattacaaggagctgaaaataaaaggcagttaaaagaaatagaagacaagattttagaagttctttcatcttcggaaggcaatatattagaagatgaaactgctattaagatattatcttcctccaaggccttggctaatgagatttctcagaagcaggaagtagccgaagagacagagaaaaagattgacaccacccgcatgggctatcgtcctattgccatccattcttccatcctatttttttctcttgctgatttagccaacattgagcccatgtaccagtattcactgacctggtttattaaccttttcatcctgtctattgaaaattcagagaaatcagaaattttggcaaaaaggcttcagattctcaaggatcactttacttattcactgtatgttaatgtctgccggtcactctttgaaaaggataagctgctcttttccttttgtctaaccataaatctactgctgcatgagcgggcgattaataaagctgagtggagatttctgctaactggtggcattggactggataatccttatgccaacctttgtacatggcttcctcagaaatcctgggatgaaatatgtcgattagatgatttgcctgccttcaaaaccattcgtagagagtttatgcgcttaaaggatggatggaagaaagtatatgatagtttggaaccacaccatgaggttttccctgaagaatgggaagataaagcaaatgagtttcaaaggatgcttattattcgttgcttgaggccagacaaggttattccaatgttgcaggaatttataatcaacagattgggacgtgcattcattgaaccacccccctttgatttagccaaggcatttggagacagtaactgctgtgcaccactgattttcgtgctctctcctggagcagatcccatggctgcccttctaaaatttgctgatgaccagggatatgggggatcaaaacttagctctttatctcttggtcaaggccaagggcccattgctatgaagatgttagaaaaagctgtcaaggaaggaacatgggttgttcttcagaattgtcaccttgccacctcttggatgccaacccttgagaaagtctgtgaggagttaagcccagagtcaacacatccagatttccgaatgtggctaacgagttacccatctccaaatttccctgtgtcagtactgcagaatggagtgaaaatgaccaatgaagcaccaaaaggtttacgggctaatatcattcgatcatacctcatggacccgatctctgatccggagttctttggcagctgcaaaaagcctgaggaattcaagaaattgctttatggcctgtgtttctttcatgctttggtacaagaaagacggaaatttggacccctagggtggaatattccttatgagttcaatgagacagatctgagaatcagcgtacagcagctccacatgttcctgaaccagtatgaggaactgccgtatgaggctctgcggtacatgactggcgaatgcaattacggaggcagagtgaccgatgactgggaccggcgcacgctgcgcagcattctaaacaaattcttcaatcccgaattagttgaaaattcagactataagttcgactcaagtggcatctattttgttcctccttctggtgatcacaaaagctacatcgaatacacaaagactctgccactgaccccagcaccagaaatctttgggatgaatgccaatgcagatatcactaaggatcagtcagaaactcagctgctatttgataacattcttcttacacagtctcgttcagcaggtgctggtgcaaaatcatcagatgaagtagtgaatgaggtcgctagtgacatcttgggcaaacttccaaacaacttcgacatcgaggctgccatgaggaggtacccaacaacttatactcagagcatgaacactgtacttgtccaagagatgggacggttcaataagttactgaagaccataagagattcgtgcgtaaatattcaaaaagcaatcaaggggcttgcagtcatgtctacagatcttgaagaagtggttagcagcattttgaatgtcaaaattccagaaatgtggatgggtaaatcctacccaagccttaaaccacttggcagctatgtgaatgacttccttgcaagactaaaattcttgcagcaatggtatgaggttggtcctcctccagtcttctggctttctggcttcttcttcacacaagccttcctgaccggtgcccagcagaactacgccaggaaatacacaattcctattgatcttcttgggtttgactatgaagtgatggaagacaaagaatacaagcatcctcctgaggatggtgttttcattcacggattatttctggatggagcttcctggaatagaaagatcaagaaacttgcagaatcgcatcccaaaattctttatgatacagtgcctgtgatgtggctaaagccctgtaagagggcagatataccaaaacggccaagttatgttgctccattgtataagacaagtgagcggagaggagtattatccaccactggccattccacgaattttgtgattgccatgactcttccctctgaccaacccaaggaacactggattggacgaggtgtagcactgttatgtcaacttaattcataaccagaagacatcatttccttgttcctatttcttgttggctggctgagtagagaaagcatattttactacttaaacctttttttttgtttgtttaaatacatttgactaaagttataattatgaatttacttatgagcaaatgcagctaaacttaatatgactcatacttaaatgtaaggaaatgttctgaaataaagactaaagaaaacacactggca

SEQ ID NO: 128539 - DNA, 1937 bp, Homo sapiens
  Payload ID: 5160
  Gene Symbol: DNAH7
  Gene Name: dynein, axonemal, heavy chain 7
  Uniprot ID: Q8WXX0
  ENST ID: ENST00000410072
  CDS Start-End: 102-1607
gagaccgctgcaagtcccggggccctgcctctatcgtcctaggggttccgcgggcaggagcaacccagaagcaccggtgaggccagcgcgtcctcgcagccatgagcagtgagcaggataaatcggccagcaaagaaaaatccaagaaaccagtaagatttctaccacagctgtctatggagaaattagccagcaaagaaaagttcaaggcaccagcaagagctttaccacagctgtctatggtgagtacaaagccccactggcagcaggcagctccatcattccatttgagtgtaaagcaggatgatgagagtccagaaccatttagtgttaaaaatgaacagtcccatgctgaatacatggaacgttttggaaaaaagggcaaattaccccaccaagttgatgatagttatgttggaccatctacttccaaatcaaagggcaaatctccacataaagaacgagaaaactttagaagtactcttgttaatgtcattatgcaacaagatgctgacttagactcagctgtccctgatggaagcacaattccaaaaccgaccgcttctgctatagagaaagacatcttgagatattactattatattcaccatggaattgatacagaccatgtagccccaatggaagattcttggctagaacacgtactggatttagttccacaacatctgaaagtcttcactgacagcatagttacattatctgatgaaatgagagaggattatcttcttagtgtaaggaaatccatagttgattttgttttaaaagatcctcgagagaaaggagatgataagaagacagatgaacttccagcccatcgtgctgaaatggaaattctgccaaaaccttggaggaaatcttttttagctgcaagcagttatattagggatcacttgaatgcaatgaaccccacaatgctggctgtactagatttgtggcacactaattttaaaaaattacgtttagttgatatcaaagaatttcataattgccaggatgcattagagctgtcaagttttcagaacattatcatgagacacatggactctgccaaagagactctacttaaaatgtggtttccagaagtgcagaatatttattaccaaggtaataaaaaaaagcaattgccaactggtgacagcagtgccaaattggaatcttttttcaactgtgctgctgcacttatgactttacagctgcaggacctcactttagtctccatgcaagatttcacggacttaattgcacaacccccagattctgttagagcttttgaacatccaggtttcatcatgaggctgattcttgataatgacaccattaagtttgaacctgagttgagtgactatatagatatctttctaaatgtttatgacgtcatgattaaagctgtcagttttgtgccaagagttgagacaaaattgtattccaagtggagaaacaaagcaaaaccaggacatttttacttttctcatattcaaaggtctgtcacctttcagcattctgaagtttcgtctcctcagaactctcattttaagattgtgtcacccttcagtgttcttggctttacatggagatgccaattatgacttccaactttgctcgaccttgaggctttgtttcctggcagcccctcccatgcatccaccttgccggaaactcattaaagcaaagcttagaccaccaaggatcagcagggtccccagggcagctgctcacttctgcacataatgacctttcaactcatgctttctctcattttggtcccttagacttttttttttgttgttatttccttagctatacgttataaaagataaagtcagctttattatcctggcatatttatgtgttttgaattgagtagttgttttctggatatctattcctcatactaccatgaatagaagtctctcaag

SEQ ID NO: 128540 - DNA, 1845 bp, Homo sapiens
  Payload ID: 5160
  Gene Symbol: DNAH7
  Gene Name: dynein, axonemal, heavy chain 7
  Uniprot ID: Q8WXX0
  ENST ID: ENST00000409063
  CDS Start-End: 104-1627
atctggctttgttttttctttacgtcacttagcgccagtttgttctggccgtgtctcccactagaatgagttaagcccagagtcaacacatccagatttccgaatgtggctaacgagttacccatctccaaatttccctgtgtcagtactgcagaatggagtgaaaatgaccaatgaagcaccaaaaggtttacgggctaatatcattcgatcatacctcatggacccgatctctgatccggagttctttggcagctgcaaaaagcctgaggaattcaagaaattgctttatggcctgtgtttctttcatgctttggtacaagaaagacggaaatttggacccctagggtggaatattccttatgagttcaatgagacagatctgagaatcagcgtacagcagctccacatgttcctgaaccagtatgaggaactgccgtatgaggctctgcggtacatgactggcgaatgcaattacggaggcagagtgaccgatgactgggaccggcgcacgctgcgcagcattctaaacaaattcttcaatcccgaattagttgaaaattcagactataagttcgactcaagtggcatctattttgttcctccttctggtgatcacaaaagctacatcgaatacacaaagactctgccactgaccccagcaccagaaatctttgggatgaatgccaatgcagatatcactaaggatcagtcagaaactcagctgctatttgataacattcttcttacacagtctcgttcagcaggtgctggtgcaaaatcatcagatgaagtagtgaatgaggtcgctagtgacatcttgggcaaacttccaaacaacttcgacatcgaggctgccatgaggaggtacccaacaacttatactcagagcatgaacactgtacttgtccaagagatgggacggttcaataagttactgaagaccataagagattcgtgcgtaaatattcaaaaagcaatcaaggggcttgcagtcatgtctacagatcttgaagaagtggttagcagcattttgaatgtcaaaattccagaaatgtggatgggtaaatcctacccaagccttaaaccacttggcagctatgtgaatgacttccttgcaagactaaaattcttgcagcaatggtatgaggttggtcctcctccagtcttctggctttctggcttcttcttcacacaagccttcctgaccggtgcccagcagaactacgccaggaaatacacaattcctattgatcttcttgggtttgactatgaagtgatggaagacaaagaatacaagcatcctcctgaggatggtgttttcattcacggattatttctggatggagcttcctggaatagaaagatcaagaaacttgcagaatcgcatcccaaaattctttatgatacagtgcctgtgatgtggctaaagccctgtaagagggcagatataccaaaacggccaagttatgttgctccattgtataagacaagtgagcggagaggagtattatccaccactggccattccacgaattttgtgattgccatgactcttccctctgaccaacccaaggaacactggattggacgaggtgtagcactgttatgtcaacttaattcataaccagaagacatcatttccttgttcctatttcttgttggctggctgagtagagaaagcatattttactacttaaacctttttttttgtttgtttaaatacatttgactaaagttataattatgaatttacttatgagcaaatgcagctaaacttaatatgactcatacttaaatgtaaggaaatgttctgaaataaagactaaagaaaacacactggca

SEQ ID NO: 128541 - DNA, 559 bp, Homo sapiens
  Payload ID: 5160
  Gene Symbol: DNAH7
  Gene Name: dynein, axonemal, heavy chain 7
  ENST ID: ENST00000427816
  CDS Start-End: 197-559
ataacaaccaaacctagccgcctagcggcgcgccagcagggggagccacagcccagagcacccccagagtgctaatggcggtgtgcttgggtgagaggcggctctgcgaggagttgcagcgggtttgggttctaaggataaatcggccagcaaagaaaaatccaagaaaccagtaagatttctaccacagctgtctatggagaaattagccagcaaagaaaagttcaaggcaccagcaagagctttaccacagctgtctatggtgagtacaaagccccactggcagcaggcagctccatcattccatttgagtgtaaagcaggatgatgagagtccagaaccatttagtgttaaaaatgaacagtcccatgctgaatacatggaacgttttggaaaaaagggcaaattaccccaccaagttgatgatagttatgttggaccatctacttccaaatcaaagggcaaatctccacataaagaacgagaaaactttagaagtactcttgttaatgtcattatgcaacaagatgctgacttagactcagctgtccctgatgga

SEQ ID NO: 128542 - DNA, 301 bp, Homo sapiens
  Payload ID: 5160
  Gene Symbol: DNAH7
  Gene Name: dynein, axonemal, heavy chain 7
  ENST ID: ENST00000438565
  CDS Start-End: 1-171
tacccaagccttaaaccacttggcagctatgtgaatgacttccttgcaagactaaaattcttgcaggtgttttcattcacggattatttctggatggagcttcctggaatagaaagatcaagaaacttgcagaatcgcatcccaaaattctttatgatacagtgcctgtgatgtggctaaagccctgtaagagggcagatataccaaaacggccaagttatgttgctccattgtataagacaagtgagcggagaggagtattatccaccactggccattccacgaattttgtgattgccat

SEQ ID NO: 128543 - DNA, 14360 bp, Homo sapiens
  Payload ID: 5161
  Gene Symbol: DNAH8
  Gene Name: dynein, axonemal, heavy chain 8
  ENST ID: ENST00000327475
  CDS Start-End: 110-14233
cccggggcagcgcaaccgctggggccggcctcagtgggctgagtggtcggggcatcggggcccagagagcggctggtttcgaagtataaagcattccgcacgacgggggatggagaaggatgctgaagatggcgccccttctgagggagcagaggctcctccctctacggaagaggctgcccctccccgttcagaagaggaagaggccccgcgccctccgacagtggaggccccggcagaagatggtttctctccttccgcagaagatgctgtttcttctgtggtggattatcgggatctcattccttctgaagaagggatagttcttccagatgatcatgaagcggatctgaatagagttcgacagaggcttgcaccgcgaccggttcagtcagtgatttcggaagtgctgtccttgccgtcttcccggaggtcctccagataccgccggagtatgagtggccttcccaatctacaggaaacattaaaagagagacaggcaagatttagagaggcaagggaaagccgaagactgaaaattgacccttcatacaaatatatatttgaaattctagcagaaaatcttggcctggacatagtaactgttgaagaattaattttggattgcccatctctggaagcatttactaatttttttgcgaaagatggttgtaagacactgaaatttttgtaccaagaaggagatgtacctggtattgaatgtggtcgaactattgctggagcaactaaaggggcaaaaatgatgaaattgtatatagacaatgcagccccggataaactaaaaggactgtgcatattttttgttcgttgccgtaatgatgttgctataaatgttaaaactattcaagaggaagcgctctttactgttctggatgcgtcgaaaggactcttaaatggaattagggatatgttggcaaatatatttctaccagctgttcttgcaacaaacaactggggtgctttaaaccagtccaagcagggagaatctgaaaaacatattttcactgaaaccatcaacagatatctttcatttttagatggtgctagaataagtattgagggaacagtgaagttaaagacaatagacaatgttaatttttccaaactgcacacctttgaagaagtaactgctgcagccagcaactcagaaactgttcatcagctggaggaagtgctgatggtatggtacaaacagatcgaacaggtacttattgagagtgagcagatgagaaaagaagctggtgattcaggtccactcactgaattggaacactggaaacgcatgtcagccaagttcaactatatcattgagcagattaaagggccaagttgtaaggctgtcataaatgtgctaaatgttgcacactccaaactgctaaagaattggcgtgatttggatgcaagaatcactgatacagcaaatgaatccaaagataatgtcagatatttgtatactttggaaaaagtgtgtcaacctctctataaccatgacctagtttccatggcacatggaatacaaaatttgattaatgccatcagaatgattcacggtgtgtcaaggtattataatacctcagagagaatgacctcattgtttatcaaggtaacaaatcaaatggtaacagcatgtaaagcatatattactgatggaggattaaaccatgtatgggatcaggaaacgccagttgtactaaagaaaattcaggactgcatttttctattcaaggaatatcaggcatcttttcataaaacaaggaaactgatttcagaatcctcaggggaaaaatcttttgaggtttcagaaatgtatatatttggaaaatttgaagctttttgcaaaagactggagaagattacagaaatgataactgttgtgcaaacatattcaaccttgagtaattctaccatagaaggaatagatattatggcaataaaattcagaaatatataccaaggggttaagaaaaagcaatatgacattctggatccaagaaggacagaatttgacacagatttcttagatttcatgacaaaaatcaatggtttagaggtacaaatacaggcatttatgaacagtagttttgggaaaatcttatcttctcagcaggctcttcagctacttcaaaggtttcagaagctgaacattccctgtctgggattagaaataaaccacacaatagagcgtattcttcagtactatgtggctgaacttgatgctactaagaagctttatcattctcagaaagatgacccccctcttgctcgcaacatgccccctatagcaggaaaaatactctgggtgaggcagctctatcgccggataagtgagcccatcaattatttctttaaaaactcagacattttatcaagtccggacggtaaagctgtcatccgtcagtataacaagatctcctatgtgctggtggaattcgaggtggtctatcacacagcctggatcagagagatttcacagttgcattacgctttacaagccacgctttttgtgcgacatccagaaacagggaagttgctggttaatttcgatcccaaaattttggaagttgttcgggaaactaagtgtatgataaaaatgaagttggatgtaccagaacaggcaaagagattgctaaaattggaaagtaaattgaaagcagacaaactgtatttgcagggtcttctgcaatattatgatgagttatgtcaggaagtgccttctgtgtttgtcaatctgatgaccccaaaaatgaaaaaggtggaatctgtgttgaggcaaggactcacagtgttaacatggtcgtctttaacactggaaagcttctttcaagaagtcgaattagttttggatatgttcaatcaacttttaaagaagatcagtgacttgtgtgaaatgcatattgatacagttctgaaggagatagccaaaactgtgttgatttctctgcctgaaagtggtgctaccaaagtagaagatatgttgaccctcaatgagacatacacaaaagaatgggctgacattctaaaccacaaaagtaagcatgtggaagaagctgtcagagaacttatatcaatatttgagcagatttatgaagtgaaatacactgggaaagtaggaaaacagtcagaacagcggaaacacgttgtttttggaagtgaaacaggagagggtgaaaacaatgactatgaagctaatattgtgaatgagtttgatactcatgataaagaagatgaatttaaaaaggagtgtaaagaggtctttgcttttttctctcatcaattactagacagtcttcaaaaagctacacggttatctctggacacaatgaaaagaagaatatttgttgcaagcctttatgggcgaaagcagtcagaagatattatttcctttataaaaagtgaagtacatcttgcaattcctaatgtggtgatgattcctagtttggatgacattcaacaagccattaaccgtatgatccagttaaccctggaggtcagcagaggagtggctcactgggggcaacagcaaatccgtcccatcaagtctgtcattcccagccccaccactactgacgtgacccatcaaaacacaggaaaactgctgaagaaggaagaaagatcttttgaagaagctattcctgcgaggaagctgaagaatttttacccgggggtagcggagcacaaggatatttctaagttggtcctgctcctttcttcctctgtaaattccctaagaaaggcagctcatgaggccctgcaggactttcagaagtacaagactctctggacagaggaccgcgatgtgaaagtgaaggaatttttggctaacaacccctctctgactgaaatcagatcagaaattctacactatgctacttttgaacaggagattgatgagttgaagcctattattgttgtaggagcacttgaattacatacagagccgatgaaattggccttatccatcgaggccaaggcatggaagatgttactctgtcgatatctgaatgaagaatacaaaaagaaaatgtcatacatgatagcatttattaatgaatacttgaaaaagttatctagacctattcgtgatttagatgatgtcagatttgcaatggaagccttgtcttgcatacgtgataatgaaattcaaatggacatgactttgggaccaattgaagaagcctatgctattttaaacagatttgaagttgaagtaaccaaagaagaatcagaagcagttgataccttaagatattctttcaacaaattgcagagcaaagctgtttcagtacaagaggacctagttcaagtgcagccaaagtttaaaagcaatctacttgagtctgtggaagtttttcgtgaggacgtgataaactttgcagaagcatatgaattggaaggacctatggttccaaatataccaccccaagaagctagcaacaggctacagatatttcaggccagtttcgatgatctgtggaggaaatttgttacgtattcatctggtgaacaactttttggattgcctgtgactgattatgaggttttacacaaaaccagaaaagaactcaacttgctgcagaagctgtatggattgtatgacaccgtaatgagcagtattagtggttattatgaaatactttggggagatgtagatattgaaaaaattaatgcagaactgctggaatttcaaaacagatgtcgtaaacttccaaaaggacttaaagattggcaagcttttttggatctcaaaaagagaattgatgatttcagtgagtcatgtcctctactggaaatgatgaccaataaggccatgaaacagagacactgggatagaatctccgagttaactggaaccccatttgatgtggaatctgattctttttgccttagaaatatcatggaagcaccactccttaaacataaggatgatattgaggatatttgcatatctgccattaaggagaaggatatcgaagccaagctgactcaggtgattgagaattggaccaaccaaaatctgagttttgcagcatttaagggaaaaggagagctcctgctcaaaggaaccgaatcgggagaaattatcactttgatggaggatagtttaatggtcttagggtctttactcagcaacagatacaatgctccatttaaaaaaaatatccagaattgggtgtataaattgtccacttcctcagatataattgaagagtggctcgtagtacagaacctttgggtttatcttgaagccgtctttgtaggtggagatattgccaaacagctgcctcaggaagcaaaacgttttcagaatattgacaagtcttggataaaaataatgcagcgagctcatgagaatcccaatgtgattaattgctgtgttggagatgaaaccatgggacaacttttacctcatttacatgagcagttggaagtatgtcagaagtcactcacagggtatttggagaagaaacgattactgtttccaagattcttctttgtatctgatccagttctcctggaaattcttggacaagccagtgattcccacaccatacagccgcatctccctgcagtatctgacaacatcaatgaggtgacatttcatgcaaaagactatgatcgcatcatggccgtcatatcaagagaaggagaaaaaattgttttggataattctgttatggccaaaggtcctgtggagatttggctactggatttgttaaaaatgcagatgtcatcattacataatataattagatccgctttctatcaaatcagtgattcaggatttcaactcttaccattcctcagccactttccagcacaggttggacttctgggaattcagatgttgtggacacacgattcagaagaggctttacgtaatgcaaaagatgacaggaaaatcatgcaagtgaccaatcagaaatttttggatattctaaatactctcattagtcagacaacacatgatctaagcaagtttgatagagtgaagttcgagactctaattaccatccatgtgcatcagagagatatttttgatgacttggtaaaaatgcatatcaaatcacctactgactttgaatggctaaaacagagtagattttattttaaggaagatttggatcaaactgtggtgtctattacagatgttgattttatttaccaaaatgaatttctgggatgtactgatcgtcttgttatcactccattaacagatagatgctatatcacgttagctcaggccttgggcatgaacatgggaggtgctcccgcaggacctgctggcactggcaaaacagaaaccacaaaagacatgggaaggtgtttgggaaaatatgtggtcgtgttcaattgctcagatcaaatggatttcagaggcctaggaaggattttcaaaggtcttgcacagtcgggttcctggggctgttttgatgagtttaacagaattgaattgcctgtattatcagtggcagcacaacaaatttatattgttttgacagcaagaaaagaaagaaagaaacagttcattttttctgatggtgattgtgttgatttaaatccagaatttggaatcttcttaacgatgaaccctggatatgctgggcgccaggaactaccagaaaacctaaaaatccagtttagaactgttgctatgatggttcctgatagacagatcattatgagagttaaacttgcaagctgtggttttcttgaaaatgttatcttggctcaaaaattttacgttctttacaaactctgtgaagagcaacttactaaacaggttcattatgactttggattgagaaatattctgtctgtattgaggactcttggatctcaaaaaagagccagaccagaagatagtgaattaagcattgtcatgagaggactaagagatatgaacctttccaaactggttgatgaagatgaacccctgttcctcagcttaatcaatgacctgttcccaggactgcaactggatagtaatacttatgcagaactgcaaaacgcagtagcccatcaggttcagatagagggtttgattaaccatccaccctggaacctgaaactcgtgcagttatatgagacgtctttggtacggcatggcttgatgactcttgggcccagtggttctggaaagacaaccgttatcacgattctaatgaaggcgcaaacagaatgcggaaggcctcatagagaaatgcgaatgaatccaaaagccattactgcacctcagatgtttggcagactggacactgctaccaatgactggacagatgggattttttctactctgtggagaaaaacattaaaagctaaaaaaggtgaaaacattttcctcattttagatggtcctgtggatgccatctggattgagaacttaaattccgttttggatgacaataaaactctgacgttagctaatggagatcgcattcccatggcccctagttgtaagcttctgtttgaagtccacaatatcgagaacgcctctcctgccacggtttctaggatgggcatggtctatatcagcagctctgctctcagctggaggccaatcttacaggcatggttgaagaaacgcactgcacaggaagctgctgtattcctgacactgtatgagaaagtctttgaagatacatacacatatatgaagctaaatctcaatcccaaaatgcagctcttggagtgcaactatattgtgcaatctctcaatcttctggaagggttaattccctccaaagaagaaggcggtgtttcctgtgtcgaacatcttcataaattatttgtgtttggcctaatgtggagtttaggagcccttctggaattagaaagcagagaaaagcttgaagccttcttacggcagcatgaaagcaagttggacttaccagaaatacctaaaggctcaaatcaaaccatgtatgagttttatgttactgattatggtgattgggagcactggaataagaaacttcagccttattattatccaactgacagtattccggaatattcatcaattttggttccaaatgttgacaatattagaacaaattttttgatagacaccattgcaaaacaacataaagctgttttgctcacaggagagcagggaactgcaaaaactgtcatggttaaggcctatttgaaaaaatatgatcctgaagtacagctatccaaaagtctaaacttttcatctgccacagaaccaatgatgtttcagagaacaattgaaagctacgtggataagcgaattggaagcacatatgggccaccaggagggagaaaaatgactgtatttattgatgatattaatatgcctgtgattaatgagtggggagatcagataactaatgagattgtgcgacagatgatggaaatggaaggaatgtacagcttggacaagcctggagacttcactactattgttgatgtgcagctcatagcagcaatgatccaccctggaggtggtcgaaatgatattccacaacgtttaaaaagacaatttactgtgtttaattgtacattgccttcaaatgcttcaatagacaaaatttttggaattattggatgtggatactttgatccttgtagaagtttcaagcctcaaatatgtgagatgattgtgaatttagtctcagtgggtagagtgctgtggcaatggactaaggtgaagatgctgccaactccttctaaatttcattacatcttcaatcttcgagatctttccagaatttggcaaggaatgttgaccataaaagctgaggagtgcgcttcaatccctactctcctgtcccttttcaaacacgagtgcagcagagtaattgcagacagatttataactcctgaagatgagcagtggtttaatgcacatcttactcgtgcagttgaagaaaatattggctctgatgcagcgtcgtgtattcttcctgaaccatactttgtggattttcttcgtgagatgccagaaccaactggtgatgaacctgaagactctgtgtttgaagtacccaaaatatatgaattgatgccatcctttgactttctggctgaaaaactccagttttaccagagacagttcaatgaaatcattagaggaacatctcttgatctggtgttttttaaagatgcaatgactcatcttattaagatttcacgaataattcgaacgtcgtgtggaaatgcattgctggtgggtgttggtggttccggaaaacaaagtctttcaagattggcctcttttattgctggctatcaaatattccagataacattaaccaggtcttacaatgtgactaatctaacagatgatttaaaagctttgtacaaagttgctggtgctgatggaaaaggcatcactttcatctttactgacagtgaaataaaagatgaggcatttctagaataccttaacaacttgctatcttcaggggagatctccaacttgtttgcacgagatgagatggatgaaatcacccaaggtctgatttcagtgatgaagagggagctacctcgccatcctcctacctttgataatttgtatgaatacttcatttcaagatcaaggaagaacttacatgttgttctctgcttttctccagttggtgagaagttccgtgcccgttctttgaaatttcctggcttgatatcaggttgcactatggactggttcagccgctggccaagggaggctctgattgctgtggcctcctacttcctttcagactataatattgtctgctctagtgaaattaaaagacaagttgtagaaacaatgggcctgtttcatgacatggtttcagagagctgtgaaagttatttccaaagataccgccgaagagcacatgtgactcccaaatcttacctctcatttataaatggttataaaaacatttatgctgaaaaggtgaagttcattaatgaacaggctgaacgtatgaatattggtcttgataaactaatggaggcaagtgaatctgttgctaaactctctcaggatcttgcagtcaaggagaaggagttggcagtggcttccataaaagcagacgaagtattagcagaagtcacagtaagcgctcaggcttcagccaaaattaaaaatgaagtacaggaggtaaaggacaaagcccaaaaaattgtggatgaaattgatagtgaaaaagtgaaagctgaaagcaagcttgaggcagctaaacctgcactggaagaagcagaagcagccctgaatactatcaagccaaatgatattgccacagtcaggaaacttgcaaaaccaccacatcttattatgagaatcatggactgtgttctgttactatttcaaaagaaaattgaccctgttactatggatccagaaaaatcttgctgtaagccatcatggggagagtcattaaagttgatgagtgcaacaggattcctgtggagccttcagcagttccctaaggacactataaatgaagagactgttgagttactacagccatattttaatatggatgattatacttttgaaagtgccaaaaaagtctgtgggaatgtggctggtctcctgtcttggacacttgctatggcaatattttatggcatcaatagagaagtgttgcctctgaaggccaacctggccaagcaggaaggccggttagcagttgctaatgctgagttagggaaggcacaagccctgctggatgagaagcaagctgagctggataaagtacaggcaaaatttgatgcagcaatgaatgagaaaatggatttgcttaatgacgctgatacgtgccggaaaaagatgcaggccgcctccactctcatcgatgggctgagtggagaaaaaatccggtggacccagcaaagtaaagaattcaaagctcagattaatagacttgtaggtgatattctgctgtgcacgggattcctttcctaccttggtcctttcaatcagatatttaggaactatttgcttaaagatcaatgggaaatggagttgagagcacggaaaattcctttcacagaaaacctgaatcttatttcaatgttggtggatcctccaactattggtgagtgggggctacagggattaccaggagatgatctctcaattcagaatggcattattgtgacaaaggccaccagatacccactcctcatagacccacaaactcaaggcaaaacttggattaaatcaaaggaaaaagaaaatgatttacaggtgacatctctgaaccataaatattttcgcacacacttggaggacagcctttccttgggccgaccccttctcattgaggacattcatgaagagctggatccagccttggataatgtattagaaaagaattttattaaatctggcaccactttcaaggtgaaagtcggtgataaggaatgtgatatcatggatacatttaaactttacattactacgaagttaccaaatcctgcctttaccccagagattaatgctaaaacgtcagtcattgatttcactgttacaatgaaaggacttgagaatcagttactaaggagagtcattctaacagagaaacaggagttagaggctgagagggttaaacttttggaggatgttacttttaataagcggaagatgaaagaacttgaagataacctcctctataaattaagtgctacaaaaggctcattggtagatgacgaatctctcattggtgtacttcgaactaccaagcagacagcagctgaggtaagtgaaaagttgcatgtggctgcagaaactgagatcaagatcaacgcggctcaggaggagttccggcccgcagccacccgcggaagcatcctctacttcctcatcacagagatgagcatggtcaacatcatgtatcagacgtcattggcccagttcttgaagttatttgaccagtccatggccagatctgaaaagtcaccactacctcaaaagagaattacaaatattatcgagtacctgacatatgaagtttttacatactctgtcagaggcctatacgaaaaccacaaattcctgtttgtactcctcatgaccttaaagattgaccttcagagagggacagttaagcacagagagtttcaagctctcattaaagggggagcagctctggacctgaaagcctgtcctcccaaaccctatcgctggatccttgacatgacttggctgaatcttgtggagctgagtaaacttccacaatttgcagaaattatgaaccagatatctcgtaatgagaaggggtggaaaagctggtttgataaagatgctccagaggaggaaattatccctgatggatataatgattcactagatacctgccataaacttttacttatcaggtcttggtgcccagaccgtactgtttttcaagcaagaaagtatattgcagattctttggaggagaagtacacagaaccagttatcttaaatctggagaaaacttgggaagaaagtgatacccggacacctctgatatgcttcctgtccatgggatctgaccccaccaatcaaattgatgcattggccaagaaactgaaactggaatgtagaactatctcaatggggcaaggacaagaagtacatgctcgaaagctgattcagatgtcaatgcagcagggtggttgggtattactacaaaattgccaccttggcctggaattcatggaagaattactagagacgctaattaccactgaagccagtgatgattctttccgagtatggataactacggagccccatgatcgatttccaattacattgcttcagacctctctcaaattcactaatgagccaccccaaggtgtacgcgcaggtttgaaaagaacatttgctggaattaatcaagaccttctggacatcagtaatttacccatgtggaagccgatgctttacacagtagcatttttacactccactgtgcaggagcgacgaaaatttggccccttaggatggaatattccctacgaattcaattctgctgacttttcagccagtgttcagtttattcagaatcaccttgatgaatgcgatattaagaaaggtgtatcatggaatacggttcggtacatgatcggagaagtacaatatggaggcagagtgacagatgactttgacaaacgtctacttaattgctttgccagagtctggttcagtgagaagatgtttgaaccgtcattctgcttttatactggatataaaatccccttatgcaaaaccttagaccagtattttgaatacatccagtcactgccatccctagataaccctgaagtctttgggcttcaccctaatgctgatatcacgtatcagagtaacactgcttctgctgttcttgaaacaattaccaacattcaacccaaagagagtggaggtggtgtgggagagacccgggaggctattgtttatagattatctgaagatatgctgagtaaactccctcctgattacattcctcatgaggtgaaatctcgtttgataaagatgggccatcttaattcaatgaacatatttcttagacaagaaattgacagaatgcaaagagtcatttcaatactccgcagtagcctgagtgatctaaaattggccattgaaggaacaatcattatgagtgagaatctgagagatgctctggacaacatgtatgatgctcgtatacctcagctctggaaaagagtgtcttgggattcgtccacactgggcttctggttcactgaacttttggaaagaaatgctcagttttctacgtggatatttgaagggaggcctaatgtgttttggatgactggtttctttaatccccaaggcttcctcacagcaatgaggcaagaagtgacccgtgcccacaaaggctgggcactggacactgtgaccatccacaatgaagttctgagacagaccaaggaggagatcacgtcaccccctggggaaggtgtgtatatttatgggctctacatggatggagcagcctgggacagacggaatgggaagctcatggaatccacccccaaggtactcttcacgcagttacccgtgctccacatctttgccattaactccacggcacccaaggaccccaagctgtatgtgtgtcctatttacaagaaacccaggcgaactgatttgaccttcatcactgtggtatatttacgaacagtgttgtccccggatcactggatcctgagaggagtggcccttttgtgtgacatcaagtaagttcatttccatctgctcagggcaccagaacccacatagacagcctgtgctattgagggactcagtgatgtgtgtgtcttttctccccagtaattccttaattactctttctacattaaaaagttga

SEQ ID NO: 128544 - DNA, 13864 bp, Homo sapiens
  Payload ID: 5161
  Gene Symbol: DNAH8
  Gene Name: dynein, axonemal, heavy chain 8
  Uniprot ID: Q96JB1
  ENST ID: ENST00000359357
  CDS Start-End: 255-13727
tcttcccggaggtcctccagataccgccggagtatgagtggccttcccaatctacaggaaacattaaaagagagacaggcaagatttagagaggcaagggaaagccgaagactgaaaattgacccttcatacaaatatatatttgaaattctagcagaaaatcttggcctggacatagtaactgttgaagaattaattttggattgcccatctaatgtggtcgaactattgctggagcaactaaaggggcaaaaatgatgaaattgtatatagacaatgcagccccggataaactaaaaggactgtgcatattttttgttcgttgccgtaatgatgttgctataaatgttaaaactattcaagaggaagcgctctttactgttctggatgcgtcgaaaggactcttaaatggaattagggatatgttggcaaatatatttctaccagctgttcttgcaacaaacaactggggtgctttaaaccagtccaagcagggagaatctgaaaaacatattttcactgaaaccatcaacagatatctttcatttttagatggtgctagaataagtattgagggaacagtgaagttaaagacaatagacaatgttaatttttccaaactgcacacctttgaagaagtaactgctgcagccagcaactcagaaactgttcatcagctggaggaagtgctgatggtatggtacaaacagatcgaacaggtacttattgagagtgagcagatgagaaaagaagctggtgattcaggtccactcactgaattggaacactggaaacgcatgtcagccaagttcaactatatcattgagcagattaaagggccaagttgtaaggctgtcataaatgtgctaaatgttgcacactccaaactgctaaagaattggcgtgatttggatgcaagaatcactgatacagcaaatgaatccaaagataatgtcagatatttgtatactttggaaaaagtgtgtcaacctctctataaccatgacctagtttccatggcacatggaatacaaaatttgattaatgccatcagaatgattcacggtgtgtcaaggtattataatacctcagagagaatgacctcattgtttatcaaggtaacaaatcaaatggtaacagcatgtaaagcatatattactgatggaggattaaaccatgtatgggatcaggaaacgccagttgtactaaagaaaattcaggactgcatttttctattcaaggaatatcaggcatcttttcataaaacaaggaaactgatttcagaatcctcaggggaaaaatcttttgaggtttcagaaatgtatatatttggaaaatttgaagctttttgcaaaagactggagaagattacagaaatgataactgttgtgcaaacatattcaaccttgagtaattctaccatagaaggaatagatattatggcaataaaattcagaaatatataccaaggggttaagaaaaagcaatatgacattctggatccaagaaggacagaatttgacacagatttcttagatttcatgacaaaaatcaatggtttagaggtacaaatacaggcatttatgaacagtagttttgggaaaatcttatcttctcagcaggctcttcagctacttcaaaggtttcagaagctgaacattccctgtctgggattagaaataaaccacacaatagagcgtattcttcagtactatgtggctgaacttgatgctactaagaagctttatcattctcagaaagatgacccccctcttgctcgcaacatgccccctatagcaggaaaaatactctgggtgaggcagctctatcgccggataagtgagcccatcaattatttctttaaaaactcagacattttatcaagtccggacggtaaagctgtcatccgtcagtataacaagatctcctatgtgctggtggaattcgaggtggtctatcacacagcctggatcagagagatttcacagttgcattacgctttacaagccacgctttttgtgcgacatccagaaacagggaagttgctggttaatttcgatcccaaaattttggaagttgttcgggaaactaagtgtatgataaaaatgaagttggatgtaccagaacaggcaaagagattgctaaaattggaaagtaaattgaaagcagacaaactgtatttgcagggtcttctgcaatattatgatgagttatgtcaggaagtgccttctgtgtttgtcaatctgatgaccccaaaaatgaaaaaggtggaatctgtgttgaggcaaggactcacagtgttaacatggtcgtctttaacactggaaagcttctttcaagaagtcgaattagttttggatatgttcaatcaacttttaaagaagatcagtgacttgtgtgaaatgcatattgatacagttctgaaggagatagccaaaactgtgttgatttctctgcctgaaagtggtgctaccaaagtagaagatatgttgaccctcaatgagacatacacaaaagaatgggctgacattctaaaccacaaaagtaagcatgtggaagaagctgtcagagaacttatatcaatatttgagcagatttatgaagtgaaatacactgggaaagtaggaaaacagtcagaacagcggaaacacgttgtttttggaagtgaaacaggagagggtgaaaacaatgactatgaagctaatattgtgaatgagtttgatactcatgataaagaagatgaatttaaaaaggagtgtaaagaggtctttgcttttttctctcatcaattactagacagtcttcaaaaagctacacggttatctctggacacaatgaaaagaagaatatttgttgcaagcctttatgggcgaaagcagtcagaagatattatttcctttataaaaagtgaagtacatcttgcaattcctaatgtggtgatgattcctagtttggatgacattcaacaagccattaaccgtatgatccagttaaccctggaggtcagcagaggagtggctcactgggggcaacagcaaatccgtcccatcaagtctgtcattcccagccccaccactactgacgtgacccatcaaaacacaggaaaactgctgaagaaggaagaaagatcttttgaagaagctattcctgcgaggaagctgaagaatttttacccgggggtagcggagcacaaggatatttctaagttggtcctgctcctttcttcctctgtaaattccctaagaaaggcagctcatgaggccctgcaggactttcagaagtacaagactctctggacagaggaccgcgatgtgaaagtgaaggaatttttggctaacaacccctctctgactgaaatcagatcagaaattctacactatgctacttttgaacaggagattgatgagttgaagcctattattgttgtaggagcacttgaattacatacagagccgatgaaattggccttatccatcgaggccaaggcatggaagatgttactctgtcgatatctgaatgaagaatacaaaaagaaaatgtcatacatgatagcatttattaatgaatacttgaaaaagttatctagacctattcgtgatttagatgatgtcagatttgcaatggaagccttgtcttgcatacgtgataatgaaattcaaatggacatgactttgggaccaattgaagaagcctatgctattttaaacagatttgaagttgaagtaaccaaagaagaatcagaagcagttgataccttaagatattctttcaacaaattgcagagcaaagctgtttcagtacaagaggacctagttcaagtgcagccaaagtttaaaagcaatctacttgagtctgtggaagtttttcgtgaggacgtgataaactttgcagaagcatatgaattggaaggacctatggttccaaatataccaccccaagaagctagcaacaggctacagatatttcaggccagtttcgatgatctgtggaggaaatttgttacgtattcatctggtgaacaactttttggattgcctgtgactgattatgaggttttacacaaaaccagaaaagaactcaacttgctgcagaagctgtatggattgtatgacaccgtaatgagcagtattagtggttattatgaaatactttggggagatgtagatattgaaaaaattaatgcagaactgctggaatttcaaaacagatgtcgtaaacttccaaaaggacttaaagattggcaagcttttttggatctcaaaaagagaattgatgatttcagtgagtcatgtcctctactggaaatgatgaccaataaggccatgaaacagagacactgggatagaatctccgagttaactggaaccccatttgatgtggaatctgattctttttgccttagaaatatcatggaagcaccactccttaaacataaggatgatattgaggatatttgcatatctgccattaaggagaaggatatcgaagccaagctgactcaggtgattgagaattggaccaaccaaaatctgagttttgcagcatttaagggaaaaggagagctcctgctcaaaggaaccgaatcgggagaaattatcactttgatggaggatagtttaatggtcttagggtctttactcagcaacagatacaatgctccatttaaaaaaaatatccagaattgggtgtataaattgtccacttcctcagatataattgaagagtggctcgtagtacagaacctttgggtttatcttgaagccgtctttgtaggtggagatattgccaaacagctgcctcaggaagcaaaacgttttcagaatattgacaagtcttggataaaaataatgcagcgagctcatgagaatcccaatgtgattaattgctgtgttggagatgaaaccatgggacaacttttacctcatttacatgagcagttggaagtatgtcagaagtcactcacagggtatttggagaagaaacgattactgtttccaagattcttctttgtatctgatccagttctcctggaaattcttggacaagccagtgattcccacaccatacagccgcatctccctgcagtatctgacaacatcaatgaggtgacatttcatgcaaaagactatgatcgcatcatggccgtcatatcaagagaaggagaaaaaattgttttggataattctgttatggccaaaggtcctgtggagatttggctactggatttgttaaaaatgcagatgtcatcattacataatataattagatccgctttctatcaaatcagtgattcaggatttcaactcttaccattcctcagccactttccagcacaggttggacttctgggaattcagatgttgtggacacacgattcagaagaggctttacgtaatgcaaaagatgacaggaaaatcatgcaagtgaccaatcagaaatttttggatattctaaatactctcattagtcagacaacacatgatctaagcaagtttgatagagtgaagttcgagactctaattaccatccatgtgcatcagagagatatttttgatgacttggtaaaaatgcatatcaaatcacctactgactttgaatggctaaaacagagtagattttattttaaggaagatttggatcaaactgtggtgtctattacagatgttgattttatttaccaaaatgaatttctgggatgtactgatcgtcttgttatcactccattaacagatagatgctatatcacgttagctcaggccttgggcatgaacatgggaggtgctcccgcaggacctgctggcactggcaaaacagaaaccacaaaagacatgggaaggtgtttgggaaaatatgtggtcgtgttcaattgctcagatcaaatggatttcagaggcctaggaaggattttcaaaggtcttgcacagtcgggttcctggggctgttttgatgagtttaacagaattgaattgcctgtattatcagtggcagcacaacaaatttatattgttttgacagcaagaaaagaaagaaagaaacagttcattttttctgatggtgattgtgttgatttaaatccagaatttggaatcttcttaacgatgaaccctggatatgctgggcgccaggaactaccagaaaacctaaaaatccagtttagaactgttgctatgatggttcctgatagacagatcattatgagagttaaacttgcaagctgtggttttcttgaaaatgttatcttggctcaaaaattttacgttctttacaaactctgtgaagagcaacttactaaacaggttcattatgactttggattgagaaatattctgtctgtattgaggactcttggatctcaaaaaagagccagaccagaagatagtgaattaagcattgtcatgagaggactaagagatatgaacctttccaaactggttgatgaagatgaacccctgttcctcagcttaatcaatgacctgttcccaggactgcaactggatagtaatacttatgcagaactgcaaaacgcagtagcccatcaggttcagatagagggtttgattaaccatccaccctggaacctgaaactcgtgcagttatatgagacgtctttggtacggcatggcttgatgactcttgggcccagtggttctggaaagacaaccgttatcacgattctaatgaaggcgcaaacagaatgcggaaggcctcatagagaaatgcgaatgaatccaaaagccattactgcacctcagatgtttggcagactggacactgctaccaatgactggacagatgggattttttctactctgtggagaaaaacattaaaagctaaaaaaggtgaaaacattttcctcattttagatggtcctgtggatgccatctggattgagaacttaaattccgttttggatgacaataaaactctgacgttagctaatggagatcgcattcccatggcccctagttgtaagcttctgtttgaagtccacaatatcgagaacgcctctcctgccacggtttctaggatgggcatggtctatatcagcagctctgctctcagctggaggccaatcttacaggcatggttgaagaaacgcactgcacaggaagctgctgtattcctgacactgtatgagaaagtctttgaagatacatacacatatatgaagctaaatctcaatcccaaaatgcagctcttggagtgcaactatattgtgcaatctctcaatcttctggaagggttaattccctccaaagaagaaggcggtgtttcctgtgtcgaacatcttcataaattatttgtgtttggcctaatgtggagtttaggagcccttctggaattagaaagcagagaaaagcttgaagccttcttacggcagcatgaaagcaagttggacttaccagaaatacctaaaggctcaaatcaaaccatgtatgagttttatgttactgattatggtgattgggagcactggaataagaaacttcagccttattattatccaactgacagtattccggaatattcatcaattttggttccaaatgttgacaatattagaacaaattttttgatagacaccattgcaaaacaacataaagctgttttgctcacaggagagcagggaactgcaaaaactgtcatggttaaggcctatttgaaaaaatatgatcctgaagtacagctatccaaaagtctaaacttttcatctgccacagaaccaatgatgtttcagagaacaattgaaagctacgtggataagcgaattggaagcacatatgggccaccaggagggagaaaaatgactgtatttattgatgatattaatatgcctgtgattaatgagtggggagatcagataactaatgagattgtgcgacagatgatggaaatggaaggaatgtacagcttggacaagcctggagacttcactactattgttgatgtgcagctcatagcagcaatgatccaccctggaggtggtcgaaatgatattccacaacgtttaaaaagacaatttactgtgtttaattgtacattgccttcaaatgcttcaatagacaaaatttttggaattattggatgtggatactttgatccttgtagaagtttcaagcctcaaatatgtgagatgattgtgaatttagtctcagtgggtagagtgctgtggcaatggactaaggtgaagatgctgccaactccttctaaatttcattacatcttcaatcttcgagatctttccagaatttggcaaggaatgttgaccataaaagctgaggagtgcgcttcaatccctactctcctgtcccttttcaaacacgagtgcagcagagtaattgcagacagatttataactcctgaagatgagcagtggtttaatgcacatcttactcgtgcagttgaagaaaatattggctctgatgcagcgtcgtgtattcttcctgaaccatactttgtggattttcttcgtgagatgccagaaccaactggtgatgaacctgaagactctgtgtttgaagtacccaaaatatatgaattgatgccatcctttgactttctggctgaaaaactccagttttaccagagacagttcaatgaaatcattagaggaacatctcttgatctggtgttttttaaagatgcaatgactcatcttattaagatttcacgaataattcgaacgtcgtgtggaaatgcattgctggtgggtgttggtggttccggaaaacaaagtctttcaagattggcctcttttattgctggctatcaaatattccagataacattaaccaggtcttacaatgtgactaatctaacagatgatttaaaagctttgtacaaagttgctggtgctgatggaaaaggcatcactttcatctttactgacagtgaaataaaagatgaggcatttctagaataccttaacaacttgctatcttcaggggagatctccaacttgtttgcacgagatgagatggatgaaatcacccaaggtctgatttcagtgatgaagagggagctacctcgccatcctcctacctttgataatttgtatgaatacttcatttcaagatcaaggaagaacttacatgttgttctctgcttttctccagttggtgagaagttccgtgcccgttctttgaaatttcctggcttgatatcaggttgcactatggactggttcagccgctggccaagggaggctctgattgctgtggcctcctacttcctttcagactataatattgtctgctctagtgaaattaaaagacaagttgtagaaacaatgggcctgtttcatgacatggtttcagagagctgtgaaagttatttccaaagataccgccgaagagcacatgtgactcccaaatcttacctctcatttataaatggttataaaaacatttatgctgaaaaggtgaagttcattaatgaacaggctgaacgtatgaatattggtcttgataaactaatggaggcaagtgaatctgttgctaaactctctcaggatcttgcagtcaaggagaaggagttggcagtggcttccataaaagcagacgaagtattagcagaagtcacagtaagcgctcaggcttcagccaaaattaaaaatgaagtacaggaggtaaaggacaaagcccaaaaaattgtggatgaaattgatagtgaaaaagtgaaagctgaaagcaagcttgaggcagctaaacctgcactggaagaagcagaagcagccctgaatactatcaagccaaatgatattgccacagtcaggaaacttgcaaaaccaccacatcttattatgagaatcatggactgtgttctgttactatttcaaaagaaaattgaccctgttactatggatccagaaaaatcttgctgtaagccatcatggggagagtcattaaagttgatgagtgcaacaggattcctgtggagccttcagcagttccctaaggacactataaatgaagagactgttgagttactacagccatattttaatatggatgattatacttttgaaagtgccaaaaaagtctgtgggaatgtggctggtctcctgtcttggacacttgctatggcaatattttatggcatcaatagagaagtgttgcctctgaaggccaacctggccaagcaggaaggccggttagcagttgctaatgctgagttagggaaggcacaagccctgctggatgagaagcaagctgagctggataaagtacaggcaaaatttgatgcagcaatgaatgagaaaatggatttgcttaatgacgctgatacgtgccggaaaaagatgcaggccgcctccactctcatcgatgggctgagtggagaaaaaatccggtggacccagcaaagtaaagaattcaaagctcagattaatagacttgtaggtgatattctgctgtgcacgggattcctttcctaccttggtcctttcaatcagatatttaggaactatttgcttaaagatcaatgggaaatggagttgagagcacggaaaattcctttcacagaaaacctgaatcttatttcaatgttggtggatcctccaactattggtgagtgggggctacagggattaccaggagatgatctctcaattcagaatggcattattgtgacaaaggccaccagatacccactcctcatagacccacaaactcaaggcaaaacttggattaaatcaaaggaaaaagaaaatgatttacaggtgacatctctgaaccataaatattttcgcacacacttggaggacagcctttccttgggccgaccccttctcattgaggacattcatgaagagctggatccagccttggataatgtattagaaaagaattttattaaatctggcaccactttcaaggtgaaagtcggtgataaggaatgtgatatcatggatacatttaaactttacattactacgaagttaccaaatcctgcctttaccccagagattaatgctaaaacgtcagtcattgatttcactgttacaatgaaaggacttgagaatcagttactaaggagagtcattctaacagagaaacaggagttagaggctgagagggttaaacttttggaggatgttacttttaataagcggaagatgaaagaacttgaagataacctcctctataaattaagtgctacaaaaggctcattggtagatgacgaatctctcattggtgtacttcgaactaccaagcagacagcagctgaggtaagtgaaaagttgcatgtggctgcagaaactgagatcaagatcaacgcggctcaggaggagttccggcccgcagccacccgcggaagcatcctctacttcctcatcacagagatgagcatggtcaacatcatgtatcagacgtcattggcccagttcttgaagttatttgaccagtccatggccagatctgaaaagtcaccactacctcaaaagagaattacaaatattatcgagtacctgacatatgaagtttttacatactctgtcagaggcctatacgaaaaccacaaattcctgtttgtactcctcatgaccttaaagattgaccttcagagagggacagttaagcacagagagtttcaagctctcattaaagggggagcagctctggacctgaaagcctgtcctcccaaaccctatcgctggatccttgacatgacttggctgaatcttgtggagctgagtaaacttccacaatttgcagaaattatgaaccagatatctcgtaatgagaaggggtggaaaagctggtttgataaagatgctccagaggaggaaattatccctgatggatataatgattcactagatacctgccataaacttttacttatcaggtcttggtgcccagaccgtactgtttttcaagcaagaaagtatattgcagattctttggaggagaagtacacagaaccagttatcttaaatctggagaaaacttgggaagaaagtgatacccggacacctctgatatgcttcctgtccatgggatctgaccccaccaatcaaattgatgcattggccaagaaactgaaactggaatgtagaactatctcaatggggcaaggacaagaagtacatgctcgaaagctgattcagatgtcaatgcagcagggtggttgggtattactacaaaattgccaccttggcctggaattcatggaagaattactagagacgctaattaccactgaagccagtgatgattctttccgagtatggataactacggagccccatgatcgatttccaattacattgcttcagacctctctcaaattcactaatgagccaccccaaggtgtacgcgcaggtttgaaaagaacatttgctggaattaatcaagaccttctggacatcagtaatttacccatgtggaagccgatgctttacacagtagcatttttacactccactgtgcaggagcgacgaaaatttggccccttaggatggaatattccctacgaattcaattctgctgacttttcagccagtgttcagtttattcagaatcaccttgatgaatgcgatattaagaaaggtgtatcatggaatacggttcggtacatgatcggagaagtacaatatggaggcagagtgacagatgactttgacaaacgtctacttaattgctttgccagagtctggttcagtgagaagatgtttgaaccgtcattctgcttttatactggatataaaatccccttatgcaaaaccttagaccagtattttgaatacatccagtcactgccatccctagataaccctgaagtctttgggcttcaccctaatgctgatatcacgtatcagagtaacactgcttctgctgttcttgaaacaattaccaacattcaacccaaagagagtggaggtggtgtgggagagacccgggaggctattgtttatagattatctgaagatatgctgagtaaactccctcctgattacattcctcatgaggtgaaatctcgtttgataaagatgggccatcttaattcaatgaacatatttcttagacaagaaattgacagaatgcaaagagtcatttcaatactccgcagtagcctgagtgatctaaaattggccattgaaggaacaatcattatgagtgagaatctgagagatgctctggacaacatgtatgatgctcgtatacctcagctctggaaaagagtgtcttgggattcgtccacactgggcttctggttcactgaacttttggaaagaaatgctcagttttctacgtggatatttgaagggaggcctaatgtgttttggatgactggtttctttaatccccaaggcttcctcacagcaatgaggcaagaagtgacccgtgcccacaaaggctgggcactggacactgtgaccatccacaatgaagttctgagacagaccaaggaggagatcacgtcaccccctggggaaggtgtgtatatttatgggctctacatggatggagcagcctgggacagacggaatgggaagctcatggaatccacccccaaggtactcttcacgcagttacccgtgctccacatctttgccattaactccacggcacccaaggaccccaagctgtatgtgtgtcctatttacaagaaacccaggcgaactgatttgaccttcatcactgtggtatatttacgaacagtgttgtccccggatcactggatcctgagaggagtggcccttttgtgtgacatcaagtaagttcatttccatctgctcagggcaccagaacccacatagacagcctgtgctattgagggactcagtgatgtgtgtgtcttttctccccagtaattccttaattactctttctacattaaaaagttgatgttctaaaa

SEQ ID NO: 128545 - DNA, 955 bp, Homo sapiens
  Payload ID: 5161
  Gene Symbol: DNAH8
  Gene Name: dynein, axonemal, heavy chain 8
  ENST ID: ENST00000373278
  CDS Start-End: 305-955
gaagttttgctgcctgctaagctctcttagcccttcgttaattcacctgtcattgacattgaccatcttgtgttgtattcaatagtctgtcacaccaatttgattgtgcattttgctttggagaagtccttagtcttttatgtagccacagtggccagacatgcagaagacgttcaatattgctgaatgaactaatgcatttgggatagggttacagaaatgggtgcaagagaaaagggtgtggttgaattggctgtacccagcacacaggtttcgaagtataaagcattccgcacgacgggggatggagaaggatgctgaagatggcgccccttctgagggagcagaggctcctccctctacggaagaggctgcccctccccgttcagaagaggaagaggccccgcgccctccgacagtggaggccccggcagaagatggtttctctccttccgcagaagatgctgtttcttctgtggtggattatcgggatctcattccttctgaagaagggatagttcttccagatgatcatgaagcggatctgaatagagttcgacagaggcttgcaccgcgaccggttcagtcagtgatttcggaagtgctgtccttgccgtcttcccggaggtcctccagataccgccggagtatgagtggccttcccaatctacaggaaacattaaaagagagacaggcaagatttagagaggcaagggaaagccgaagactgaaaattgacccttcatacaaatatatatttgaaattctagcagaaaatcttggcctggacatagtaactgttgaagaattaattttggattgcccatctctggaagcatttactaatttttttgcgaaagatggttgtaagacactgaaatttttgtaccaagaaggagatgtacctggtattgaatgtggtcgaactattgctggagcaactaaaggggcaaaa

SEQ ID NO: 128546 - DNA, 404 bp, Homo sapiens
  Payload ID: 5161
  Gene Symbol: DNAH8
  Gene Name: dynein, axonemal, heavy chain 8
  ENST ID: ENST00000394393
  CDS Start-End: 1-404
tgacagcaagaaaagaaagaaagaaacagttcattttttctgatggtgattgtgttgatttaaatccagaatttggaatcttcttaacgatgaaccctggatatgctgggcgccaggaactaccagaaaacctaaaaatccagtttagaactgttgctatgatggttcctgatagacaggttcattatgactttggattgagaaatattctgtctgtattgaggactcttggatctcaaaaaagagccagaccagaagatagtgaattaagcattgtcatgagaggactaagagatatgaacctttccaaactggttgatgaagatgaacccctgttcctcagcttaatcaatgacctgttcccaggactgcaactggatagtaatacttatgcagaactgcaa

SEQ ID NO: 128547 - DNA, 12940 bp, Homo sapiens
  Payload ID: 5161
  Gene Symbol: DNAH8
  Gene Name: dynein, axonemal, heavy chain 8
  ENST ID: ENST00000449981
  CDS Start-End: 1-12567
atggagaaggatgctgaagatggcgccccttctgagggagcagaggctcctccctctacggaagaggctgcccctccccgttcagaagaggaagaggccccgcgccctccgacagtggaggccccggcagaagatggtttctctccttccgcagaagatgctgtttcttctgtggtggattatcgggatctcattccttctgaagaagggatagttcttccagatgatcatgaagcggatctgaatagagttcgacagaggcttgcaccgcgaccggttcagtcagtgatttcggaagtgctgtccttgccgtcttcccggaggtcctccagataccgccggagtatgagtggccttcccaatctacaggaaacattaaaagagagacaggcaagatttagagaggcaagggaaagccgaagactgaaaattgacccttcatacaaatatatatttgaaattctagcagaaaatcttggcctggacatagtaactgttgaagaattaattttggattgcccatctctggaagcatttactaatttttttgcgaaagatggttgtaagacactgaaatttttgtaccaagaaggagatgtacctggtattgaatgtggtcgaactattgctggagcaactaaaggggcaaaaatgatgaaattgtatatagacaatgcagccccggataaactaaaaggactgtgcatattttttgttcgttgccgtaatgatgttgctataaatgttaaaactattcaagaggaagcgctctttactgttctggatgcgtcgaaaggactcttaaatggaattagggatatgttggcaaatatatttctaccagctgttcttgcaacaaacaactggggtgctttaaaccagtccaagcagggagaatctgaaaaacatattttcactgaaaccatcaacagatatctttcatttttagatggtgctagaataagtattgagggaacagtgaagttaaagacaatagacaatgttaatttttccaaactgcacacctttgaagaagtaactgctgcagccagcaactcagaaactgttcatcagctggaggaagtgctgatggtatggtacaaacagatcgaacaggtacttattgagagtgagcagatgagaaaagaagctggtgattcaggtccactcactgaattggaacactggaaacgcatgtcagccaagttcaactatatcattgagcagattaaagggccaagttgtaaggctgtcataaatgtgctaaatgttgcacactccaaactgctaaagaattggcgtgatttggatgcaagaatcactgatacagcaaatgaatccaaagataatgtcagatatttgtatactttggaaaaagtgtgtcaacctctctataaccatgacctagtttccatggcacatggaatacaaaatttgattaatgccatcagaatgattcacggtgtgtcaaggtattataatacctcagagagaatgacctcattgtttatcaaggtaacaaatcaaatggtaacagcatgtaaagcatatattactgatggaggattaaaccatgtatgggatcaggaaacgccagttgtactaaagaaaattcaggactgcatttttctattcaaggaatatcaggcatcttttcataaaacaaggaaactgatttcagaatcctcaggggaaaaatcttttgaggtttcagaaatgtatatatttggaaaatttgaagctttttgcaaaagactggagaagattacagaaatgataactgttgtgcaaacatattcaaccttgagtaattctaccatagaaggaatagatattatggcaataaaattcagaaatatataccaaggggttaagaaaaagcaatatgacattctggatccaagaaggacagaatttgacacagatttcttagatttcatgacaaaaatcaatggtttagaggtacaaatacaggcatttatgaacagtagttttgggaaaatcttatcttctcagcaggctcttcagctacttcaaaggtttcagaagctgaacattccctgtctgggattagaaataaaccacacaatagagcgtattcttcagtactatgtggctgaacttgatgctactaagaagctttatcattctcagaaagatgacccccctcttgctcgcaacatgccccctatagcaggaaaaatactctgggtgaggcagctctatcgccggataagtgagcccatcaattatttctttaaaaactcagacattttatcaagtccggacggtaaagctgtcatccgtcagtataacaagatctcctatgtgctggtggaattcgaggtggtctatcacacagcctggatcagagagatttcacagttgcattacgctttacaagccacgctttttgtgcgacatccagaaacagggaagttgctggttaatttcgatcccaaaattttggaagttgttcgggaaactaagtgtatgataaaaatgaagttggatgtaccagaacaggcaaagagattgctaaaattggaaagtaaattgaaagcagacaaactgtatttgcagggtcttctgcaatattatgatgagttatgtcaggaagtgccttctgtgtttgtcaatctgatgaccccaaaaatgaaaaaggtggaatctgtgttgaggcaaggactcacagtgttaacatggtcgtctttaacactggaaagcttctttcaagaagtcgaattagttttggatatgttcaatcaacttttaaagaagatcagtgacttgtgtgaaatgcatattgatacagttctgaaggagatagccaaaactgtgttgatttctctgcctgaaagtggtgctaccaaagtagaagatatgttgaccctcaatgagacatacacaaaagaatgggctgacattctaaaccacaaaagtaagcatgtggaagaagctgtcagagaacttatatcaatatttgagcagatttatgaagtgaaatacactgggaaagtaggaaaacagtcagaacagcggaaacacgttgtttttggaagtgaaacaggagagggtgaaaacaatgactatgaagctaatattgtgaatgagtttgatactcatgataaagaagatgaatttaaaaaggagtgtaaagaggtctttgcttttttctctcatcaattactagacagtcttcaaaaagctacacggttatctctggacacaatgaaaagaagaatatttgttgcaagcctttatgggcgaaagcagtcagaagatattatttcctttataaaaagtgaagtacatcttgcaattcctaatgtggtgatgattcctagtttggatgacattcaacaagccattaaccgtatgatccagttaaccctggaggtcagcagaggagtggctcactgggggcaacagcaaatccgtcccatcaagtctgtcattcccagccccaccactactgacgtgacccatcaaaacacaggaaaactgctgaagaaggaagaaagatcttttgaagaagctattcctgcgaggaagctgaagaatttttacccgggggtagcggagcacaaggatatttctaagttggtcctgctcctttcttcctctgtaaattccctaagaaaggcagctcatgaggccctgcaggactttcagaagtacaagactctctggacagaggaccgcgatgtgaaagtgaaggaatttttggctaacaacccctctctgactgaaatcagatcagaaattctacactatgctacttttgaacaggagattgatgagttgaagcctattattgttgtaggagcacttgaattacatacagagccgatgaaattggccttatccatcgaggccaaggcatggaagatgttactctgtcgatatctgaatgaagaatacaaaaagaaaatgtcatacatgatagcatttattaatgaatacttgaaaaagttatctagacctattcgtgatttagatgatgtcagatttgcaatggaagccttgtcttgcatacgtgataatgaaattcaaatggacatgactttgggaccaattgaagaagcctatgctattttaaacagatttgaagttgaagtaaccaaagaagaatcagaagcagttgataccttaagatattctttcaacaaattgcagagcaaagctgtttcagtacaagaggacctagttcaagtgcagccaaagtttaaaagcaatctacttgagtctgtggaagtttttcgtgaggacgtgataaactttgcagaagcatatgaattggaaggacctatggttccaaatataccaccccaagaagctagcaacaggctacagatatttcaggccagtttcgatgatctgtggaggaaatttgttacgtattcatctggtgaacaactttttggattgcctgtgactgattatgaggttttacacaaaaccagaaaagaactcaacttgctgcagaagctgtatggattgtatgacaccgtaatgagcagtattagtggttattatgaaatactttggggagatgtagatattgaaaaaattaatgcagaactgctggaatttcaaaacagatgtcgtaaacttccaaaaggacttaaagattggcaagcttttttggatctcaaaaagagaattgatgatttcagtgagtcatgtcctctactggaaatgatgaccaataaggccatgaaacagagacactgggatagaatctccgagttaactggaaccccatttgatgtggaatctgattctttttgccttagaaatatcatggaagcaccactccttaaacataaggatgatattgaggatatttgcatatctgccattaaggagaaggatatcgaagccaagctgactcaggtgattgagaattggaccaaccaaaatctgagttttgcagcatttaagggaaaaggagagctcctgctcaaaggaaccgaatcgggagaaattatcactttgatggaggatagtttaatggtcttagggtctttactcagcaacagatacaatgctccatttaaaaaaaatatccagaattgggtgtataaattgtccacttcctcagatataattgaagagtggctcgtagtacagaacctttgggtttatcttgaagccgtctttgtaggtggagatattgccaaacagctgcctcaggaagcaaaacgttttcagaatattgacaagtcttggataaaaataatgcagcgagctcatgagaatcccaatgtgattaattgctgtgttggagatgaaaccatgggacaacttttacctcatttacatgagcagttggaagtatgtcagaagtcactcacagggtatttggagaagaaacgattactgtttccaagattcttctttgtatctgatccagttctcctggaaattcttggacaagccagtgattcccacaccatacagccgcatctccctgcagtatctgacaacatcaatgaggtgacatttcatgcaaaagactatgatcgcatcatggccgtcatatcaagagaaggagaaaaaattgttttggataattctgttatggccaaaggtcctgtggagatttggctactggatttgttaaaaatgcagatgtcatcattacataatataattagatccgctttctatcaaatcagtgattcaggatttcaactcttaccattcctcagccactttccagcacaggttggacttctgggaattcagatgttgtggacacacgattcagaagaggctttacgtaatgcaaaagatgacaggaaaatcatgcaagtgaccaatcagaaatttttggatattctaaatactctcattagtcagacaacacatgatctaagcaagtttgatagagtgaagttcgagactctaattaccatccatgtgcatcagagagatatttttgatgacttggtaaaaatgcatatcaaatcacctactgactttgaatggctaaaacagagtagattttattttaaggaagatttggatcaaactgtggtgtctattacagatgttgattttatttaccaaaatgaatttctgggatgtactgatcgtcttgttatcactccattaacagatagatgctatatcacgttagctcaggccttgggcatgaacatgggaggtgctcccgcaggacctgctggcactggcaaaacagaaaccacaaaagacatgggaaggtgtttgggaaaatatgtggtcgtgttcaattgctcagatcaaatggatttcagaggcctaggaaggattttcaaaggtcttgcacagtcgggttcctggggctgttttgatgagtttaacagaattgaattgcctgtattatcagtggcagcacaacaaatttatattgttttgacagcaagaaaagaaagaaagaaacagttcattttttctgatggtgattgtgttgatttaaatccagaatttggaatcttcttaacgatgaaccctggatatgctgggcgccaggaactaccagaaaacctaaaaatccagtttagaactgttgctatgatggttcctgatagacagatcattatgagagttaaacttgcaagctgtggttttcttgaaaatgttatcttggctcaaaaattttacgttctttacaaactctgtgaagagcaacttactaaacaggttcattatgactttggattgagaaatattctgtctgtattgaggactcttggatctcaaaaaagagccagaccagaagatagtgaattaagcattgtcatgagaggactaagagatatgaacctttccaaactggttgatgaagatgaacccctgttcctcagcttaatcaatgacctgttcccaggactgcaactggatagtaatacttatgcagaactgcaaaacgcagtagcccatcaggttcagatagagggtttgattaaccatccaccctggaacctgaaactcgtgcagttatatgagacgtctttggtacggcatggcttgatgactcttgggcccagtggttctggaaagacaaccgttatcacgattctaatgaaggcgcaaacagaatgcggaaggcctcatagagaaatgcgaatgaatccaaaagccattactgcacctcagatgtttggcagactggacactgctaccaatgactggacagatgggattttttctactctgtggagaaaaacattaaaagctaaaaaaggtgaaaacattttcctcattttagatggtcctgtggatgccatctggattgagaacttaaattccgttttggatgacaataaaactctgacgttagctaatggagatcgcattcccatggcccctagttgtaagcttctgtttgaagtccacaatatcgagaacgcctctcctgccacggtttctaggatgggcatggtctatatcagcagctctgctctcagctggaggccaatcttacaggcatggttgaagaaacgcactgcacaggaagctgctgtattcctgacactgtatgagaaagtctttgaagatacatacacatatatgaagctaaatctcaatcccaaaatgcagctcttggagtgcaactatattgtgcaatctctcaatcttctggaagggttaattccctccaaagaagaaggcggtgtttcctgtgtcgaacatcttcataaattatttgtgtttggcctaatgtggagtttaggagcccttctggaattagaaagcagagaaaagcttgaagccttcttacggcagcatgaaagcaagttggacttaccagaaatacctaaaggctcaaatcaaaccatgtatgagttttatgttactgattatggtgattgggagcactggaataagaaacttcagccttattattatccaactgacagtattccggaatattcatcaattttggttccaaatgttgacaatattagaacaaattttttgatagacaccattgcaaaacaacataaagctgttttgctcacaggagagcagggaactgcaaaaactgtcatggttaaggcctatttgaaaaaatatgatcctgaagtacagctatccaaaagtctaaacttttcatctgccacagaaccaatgatgtttcagagaacaattgaaagctacgtggataagcgaattggaagcacatatgggccaccaggagggagaaaaatgactgtatttattgatgatattaatatgcctgtgattaatgagtggggagatcagataactaatgagattgtgcgacagatgatggaaatggaaggaatgtacagcttggacaagcctggagacttcactactattgttgatgtgcagctcatagcagcaatgatccaccctggaggtggtcgaaatgatattccacaacgtttaaaaagacaatttactgtgtttaattgtacattgccttcaaatgcttcaatagacaaaatttttggaattattggatgtggatactttgatccttgtagaagtttcaagcctcaaatatgtgagatgattgtgaatttagtctcagtgggtagagtgctgtggcaatggactaaggtgaagatgctgccaactccttctaaatttcattacatcttcaatcttcgagatctttccagaatttggcaaggaatgttgaccataaaagctgaggagtgcgcttcaatccctactctcctgtcccttttcaaacacgagtgcagcagagtaattgcagacagatttataactcctgaagatgagcagtggtttaatgcacatcttactcgtgcagttgaagaaaatattggctctgatgcagcgtcgtgtattcttcctgaaccatactttgtggattttcttcgtgagatgccagaaccaactggtgatgaacctgaagactctgtgtttgaagtacccaaaatatatgaattgatgccatcctttgactttctggctgaaaaactccagttttaccagagacagttcaatgaaatcattagaggaacatctcttgatctggtgttttttaaagatgcaatgactcatcttattaagatttcacgaataattcgaacgtcgtgtggaaatgcattgctggtgggtgttggtggttccggaaaacaaagtctttcaagattggcctcttttattgctggctatcaaatattccagataacattaaccaggtcttacaatgtgactaatctaacagatgatttaaaagctttgtacaaagttgctggtgctgatggaaaaggcatcactttcatctttactgacagtgaaataaaagatgaggcatttctagaataccttaacaacttgctatcttcaggggagatctccaacttgtttgcacgagatgagatggatgaaatcacccaaggtctgatttcagtgatgaagagggagctacctcgccatcctcctacctttgataatttgtatgaatacttcatttcaagatcaaggaagaacttacatgttgttctctgcttttctccagttggtgagaagttccgtgcccgttctttgaaatttcctggcttgatatcaggttgcactatggactggttcagccgctggccaagggaggctctgattgctgtggcctcctacttcctttcagactataatattgtctgctctagtgaaattaaaagacaagttgtagaaacaatgggcctgtttcatgacatggtttcagagagctgtgaaagttatttccaaagataccgccgaagagcacatgtgactcccaaatcttacctctcatttataaatggttataaaaacatttatgctgaaaaggtgaagttcattaatgaacaggctgaacgtatgaatattggtcttgataaactaatggaggcaagtgaatctgttgctaaactctctcaggatcttgcagtcaaggagaaggagttggcagtggcttccataaaagcagacgaagtattagcagaagtcacagtaagcgctcaggcttcagccaaaattaaaaatgaagtacaggaggtaaaggacaaagcccaaaaaattgtggatgaaattgatagtgaaaaagtgaaagctgaaagcaagcttgaggcagctaaacctgcactggaagaagcagaagcagccctgaatactatcaagccaaatgatattgccacagtcaggaaacttgcaaaaccaccacatcttattatgagaatcatggactgtgttctgttactatttcaaaagaaaattgaccctgttactatggatccagaaaaatcttgctgtaagccatcatggggagagtcattaaagttgatgagtgcaacaggattcctgtggagccttcagcagttccctaaggacactataaatgaagagactgttgagttactacagccatattttaatatggatgattatacttttgaaagtgccaaaaaagtctgtgggaatgtggctggtctcctgtcttggacacttgctatggcaatattttatggcatcaatagagaagtgttgcctctgaaggccaacctggccaagcaggaaggccggttagcagttgctaatgctgagttagggaaggcacaagccctgctggatgagaagcaagctgagctggataaagtacaggcaaaatttgatgcagcaatgaatgagaaaatggatttgcttaatgacgctgatacgtgccggaaaaagatgcaggccgcctccactctcatcgatgggctgagtggagaaaaaatccggtggacccagcaaagtaaagaattcaaagctcagattaatagacttgtaggtgatattctgctgtgcacgggattcctttcctaccttggtcctttcaatcagatatttaggaactatttgcttaaagatcaatgggaaatggagttgagagcacggaaaattcctttcacagaaaacctgaatcttatttcaatgttggtggatcctccaactattggtgagtgggggctacagggattaccaggagatgatctctcaattcagaatggcattattgtgacaaaggccaccagatacccactcctcatagacccacaaactcaaggcaaaacttggattaaatcaaaggaaaaagaaaatgatttacaggtgacatctctgaaccataaatattttcgcacacacttggaggacagcctttccttgggccgaccccttctcattgaggacattcatgaagagctggatccagccttggataatgtattagaaaagaattttattaaatctggcaccactttcaaggtgaaagtcggtgataaggaatgtgatatcatggatacatttaaactttacattactacgaagttaccaaatcctgcctttaccccagagattaatgctaaaacgtcagtcattgatttcactgttacaatgaaaggacttgagaatcagttactaaggagagtcattctaacagagaaacaggagttagaggctgagagggttaaacttttggaggatgttacttttaataagcggaagatgaaagaacttgaagataacctcctctataaattaagtgctacaaaaggctcattggtagatgacgaatctctcattggtgtacttcgaactaccaagcagacagcagctgaggtaagtgaaaagttgcatgtggctgcagaaactgagatcaagatcaacgcggctcaggaggagttccggcccgcagccacccgcggaagcatcctctacttcctcatcacagagatgagcatggtcaacatcatgtatcagacgtcattggcccagttcttgaagttatttgaccagtccatggccagatctgaaaagtcaccactacctcaaaagagaattacaaatattatcgagtacctgacatatgaagtttttacatactctgtcagaggcctatacgaaaaccacaaattcctgtttgtactcctcatgaccttaaagattgaccttcagagagggacagttaagcacagagagtttcaagctctcattaaagggggagcagctctggacctgaaagcctgtcctcccaaaccctatcgctggatccttgacatgacttggctgaatcttgtggagctgagtaaacttccacaatttgcagaaattatgaaccagatatctcgtaatgagaaggggtggaaaagctggtttgataaagatgctccagaggaggaaattatccctgatggatataatgattcactagatacctgccataaacttttacttatcaggtcttggtgcccagaccgtactgtttttcaagcaagaaagtatattgcagattctttggaggagaagtacacagaaccagttatcttaaatctggagaaaacttgggaagaaagtgatacccggacacctctgatatgcttcctgtccatgggatctgaccccaccaatcaaattgatgcattggccaagaaactgaaactggaatgtagaactatctcaatggggcaaggacaagaagtacatgctcgaaagctgattcagatgtcaatgcagcaggtatgtgacaagagactgctcctgctgcaacattattgctagaaaccccacaatcatggatgttaccacattcttctcgtgatgctcaatcctggtttttccatttttgtttatcattacctgtgaattttaaacctcagtctagtttcctcctgatattcgcatggaaagcttattccattttctatagtatatgctccattttaccttcaccaattttttgttcgttttatgatttgggagacacaccttctgatttctaagaatgcatctctagcagtcttggaatttcatgatcaatatgaataggtagtacttaaggagtgacagattgagacagttaaatttccattttcagttaaaggcagactttcatttttcattaacggatcatttcaggcaaagaaggaatatt

SEQ ID NO: 128548 - DNA, 13750 bp, Homo sapiens
  Payload ID: 5162
  Gene Symbol: DNAH9
  Gene Name: dynein, axonemal, heavy chain 9
  Uniprot ID: Q9NYC9
  ENST ID: ENST00000262442
  CDS Start-End: 69-13529
agcagaggagtgagtcctggccgcgtccccgtcgctagggaaaccgatgcagctggaggccgcgcgcgatgcggctcgcggaggagcgggccgcgctcgcggcggagaacgcggatggggaacccggcgccgaccgacgactgcgactcctggggacctacgtggccatgagcctgcggccggctgcgggcgcctgggagcgttgcgcggggagtgctgaggcggagcagctgctccaggccttcctgggccgcgatgctgccgaggggccgcggccgctgctggtggtgcggcccgggcccaggggcctggcaatacgccccgggctggaggtgggacctgagtcgggcctggctggcgctaaggcgctttttttccttcgcaccgggcccgagcctccagggcccgacagcttccgcggcgcagtggtctgcggggacctgcccgcggcacctctggagcacctagccgcgctgttctcggaggttgttctacccgtcctggccaatgagaagaatcgcctaaactggccccacatgatatgtgaggatgtcaggcggcacgcccacagcctccaatgtgacctctcagttatacttgagcaagtgaagggaaaaactttgctgcctcttccagcaggctcagaaaaaatggagtttgcggattccaaaagtgagacagtcttggattctatagataagtcagtcatctatgccattgagtctgcagtgatcaaatggagctaccaagtccaggtggtactcaagagagagtcttcccagccactcttacaaggggagaatcccacccctaaggtggagttggagttctggaagagcaggtatgaagatctgaaatacatctataatcaactgagaacaataacggtgaggggcatggccaagctcctggacaagcttcagagtagctactttccagctttcaaagccatgtacagagatgttgttgcagctctagcagaggcacaggacatccatgtgcacctgataccgctccagcgccacctggaagctctggagaatgcagaatttccggaggtgaagccccagctgcggcccctgctccacgtggtctgtctgatttgggccacatgcaagtcctaccgctccccgggaaggctgactgtgctgctccaggagatttgcaaccttctcatccagcaggcctctaattatctcagcccagaagacctgctgagaagtgaggtagaagaaagtcagagaaaactgcaagtggtctcagacactttgagcttcttcaagcaagagtttcaggacagaagggagaatctccacacttacttcaaagagaaccaggaagtcaaggaatgggatttccagtcttctttggtctttgtgcgattggatggcttcctgggacaactgcacgtggtggagggtcttctgaagacggccctggatttccacaaactgggaaaggtggagttcagcggcgtcagagggaatgctctgagtcagcaggtccagcaaatgcatgaagaatttcaagagatgtacaggcttctctcaggatcctcctccgactgcctgtacctccaaagcacggactttgaaaatgacgtctctgaatttaaccagaaagtagaagatcttgaccgaagattggggactatctttattcaagcttttgatgatgcacctggcttggagcatgcctttaagctgctagacatagcaggaaacctccttgaaagaccgctggtagcgagggatacatctgataaatacctggtcctcatccaaatgttcaacaaagatctggatgcagtgaggatgatctacagtcagcacgtccaggaggaagcagaacttgggttctccccggtgcacaagaacatgcccaccgtggctggcggcctccgctgggcacaggagctgaggcagcgcatccagggtcctttcagcaactttggacgcatcacacacccttgcatggaatctgcagaaggaaagcgaatgcaacaaaaatatgaagatatgctgtcattgctagaaaagtatgagacaagactttatgaggattggtgccggacagtatcagagaagtcacagtacaatctttcccaaccacttctaaaacgtgacccagagacgaaggagatcactatcaactttaacccacagctgatttcagtgctgaaagaaatgagctatcttgaacccagagagatgaaacacatgcctgagacagcagcagccatgttctcctccagggatttctatcggcagcttgtggctaatttagagttgatggcaaattggtacaacaaggttatgaaaactctgctggaggtggaatttccattagtggaggaagagctgcaaaatattgatctccgcctcagagcagcagaggagactttgaactggaaaacagaaggcatttgcgattatgtcactgaaatcaccagtagtattcatgatcttgaacaaagaattcagaaaactaaagacaatgtggaagagatccaaaacatcatgaaaacatgggtgactccaatatttaagacaaaagatggaaaaagggaatcccttctttctctggatgatcggcatgatcgaatggaaaaatattacaatctcatcaaggaatctggccttaagatccacgcccttgttcaggaaaacctgggtctattttcagcagacccaacctccaatatctggaagacttatgttaactctattgacaatttgttgctgaatggattctttcttgccattgagtgctccctcaagtatcttctggaaaatactgagtgtaaggcaggacttaccccaatatttgaagcacaactgagtctagccatcccagagctagttttctatccgtctctggagtctggagtgaaggggggtttctgtgacattgttgagggtctcatcaccagcatttttaggataccatctctggtgccacggctttccccacaaaatggctctcctcactatcaggtcgacctggacggtataccagatttggcaaacatgcggcgcacactcatggagagagtccagagaatgatgggcctctgctgtggctatcagagcaccttcagccagtattcgtacctctatgtggaggaccggaaggaggttctgggtcagtttctgctgtacgggcacatcctcactccggaagaaattgaagaccatgtggaagatggcatcccagagaaccctcccctcctttctcagtttaaagtgcaaatcgactcctatgaaacgctctatgaagaggtgtgcaggctggaacccatcaaggtgtttgacggctggatgaaaattgatattcgaccctttaaggcatctctgctgaatattattaagaggtggagcctcctgttcaaacagcatcttgtggaccacgtcactcacagcttggccaacctggatgcgtttataaagaagagtgagagcggcttactcaagaaagttgaaaaaggagatttccaaggcttggttgagatcatgggacaccttatggctgttaaagaacggcagagtaacactgatgagatgtttgagcccttaaagcagactattgaattgctgaagacctatgaacaagaattgccagaaacagtgtttaagcagctggaggagctgcctgagaaatggaacaacataaaaaaggtggccattactgtgaagcagcaggtggccccactgcaggcaaatgaagtgacactcctccgccagaggtgcacagccttcgatgcagaacagcagcaattctgggagcaattccacaaagaagccccgttcaggtttgatagcatccaccctcatcaaatgctggatgccaggcacatcgagatccagcagatggaatccactatggcctccatttctgagtctgccagcttatttgaagtcaatgtccctgactataagcagctgaggcagtgcaggaaggaggtctgccagctgaaggagctctgggacaccattggaatggtgacctccagcatccatgcctgggagaccacaccctggaggaatatcaacgtggaagccatggagttggagtgcaaacagtttgcccggcatatccgaaacctggacaaggaggtcagggcctgggatgcattcacaggcctggaaagcactgtgtggaacacgctgagctccctgagggcagtagctgagctgcagaatccagccatccgggagcggcactggaggcagctgatgcaggccaccggtgtgagcttcactatggaccaggacaccaccctagcgcacctgctgcagctccagctgcaccactatgaggatgaggtccggggcattgtggacaaagctgcaaaagagatgggtatggagaaaaccttaaaggagctgcagactacctgggctggcatggaattccagtatgagccccacccacggaccaatgtccccctcctgtgctctgatgaggacctcatagaggttctggaggataatcaagttcaacttcagaacctggtgatgtccaagtatgttgctttcttcttggaggaggtgtcgggctggcagaagaagctgtccacagtggacgctgtcatctctatctggtttgaagtgcagcgaacatggactcacctggaaagcatattcactggatctgaagatattcgggcacagctaccccaggattctaaaaggtttgaaggcatcgacattgactttaaagagctagcttatgatgcccagaaaattccaaatgtagtgcaaaccaccaacaagccaggcctgtatgaaaagctggaggatattcagggcagattgtgcctgtgtgagaaggccctggcagagtacctcgacaccaagaggcttgccttcccgcggttttactttctctcctcctccgatctgttagacatcctttccaacggcacagctccacaacaggttcaacgtcacctttccaaactctttgacaacatggccaagatgcgattccagctagatgccagtggggaaccaaccaagacaagcctcggcatgtacagcaaagaagaggagtatgtggctttcagtgagccctgtgactgcagcgggcaggtagaaatatggctgaaccatgtccttggtcacatgaaggccactgtgaggcatgagatgacagaaggtgtaactgcctatgaagaaaagccgagggagcagtggctttttgaccacccagctcaggtggccctgacctgtactcagatctggtggacaacagaagtgggcatggcatttgccaggctggaggaaggctatgagagtgccatgaaggactattataagaagcaagtggcccagctcaaaacccttatcaccatgctgattggccagctctccaagggagaccggcagaagattatgactatatgcaccatcgatgtgcatgcccgggatgtggtagccaagatgattgctcagaaggtagacaatgcccaggctttcctctggctgtctcagctgcgccatcgttgggatgacgaggtcaaacactgctttgccaacatctgtgatgcccagtttttgtattcctatgagtacctgggaaacacacctcgcttggtgatcacacctttgactgacaggtgctacatcaccctcacccagtccctgcacctgaccatgagtggggctcccgcaggacctgcaggcacaggcaagaccgagaccaccaaggacctgggccgcgcactgggcatcctggtctatgtgttcaactgctcggagcagatggattacaagtcttgtggcaacatctacaaaggccttgctcagactggtgcctggggctgctttgatgagtttaatcgaatctccgtggaggtcttgtcagtggtggcagtgcaggtaaaaagcattcaagatgcgattagagataagaagcagtggttcagcttccttggggaggagatcagcctgaatccttctgtcggtatcttcatcaccatgaacccaggctatgctggccgcacagagctgccagagaatctcaagtctctcttcaggccttgtgcaatggtggttccagactttgaattgatctgtgaaatcatgctggtggcagaaggattcattgaagcccagtcattagccagaaagttcatcactctttaccagttgtgcaaagagcttctctccaaacaggatcactacgactggggcctacgggccatcaagtccgtgctggtggtggcaggatccctgaagagaggagaccctgaccggcctgaggaccaggtcctgatgcgctccttgcgggatttcaacatccccaagattgtgactgatgacatgcccatcttcatgggcctgatcggggacctctttcccgccctggatgtcccccggaggagagaccccaacttcgaagctttggttaggaaggcgatagtggatctgaagctccaggctgaggacaactttgtgctcaaggtggtccagctggaggagctcctggctgtgcggcactctgtatttgtggtgggtggcgctggtaccggcaagtcacaggtgctgaggtccttgcacaagacctatcagatcatgaaacggcgccccgtctggactgacctcaatcccaaagcagtcacaaatgatgagctctttggcatcatcaatccagccacaggagaatggaaggatggattgttctcttccatcatgcgggagcttgccaacatcacccatgatgggcccaagtggattttactggatggcgacatagatccaatgtggattgaatccctgaatactgtcatggatgataacaaggtgctgacattggccagcaatgagaggattcctctgaaccccaccatgaagctcctctttgagatcagccacctgcgcacagccactccagcaactgtctctagagcagggatcttgtacatcaacccggcagacttgggatggaaccctccagtgagcagctggattgagaagagggaaatccagacagagagagccaacttaaccattttgttcgacaagtatcttccaacctgcctagacacactcagaaccaggtttaagaagatcattcccatcccagagcagagcatggttcagatggtgtgtcaccttctggaatgtctcctgaccacggaggacatccctgcagactgccctaaggaaatttatgagcattattttgtgtttgctgccatctgggctttcggcggagcaatggtccaagatcagcttgtggactaccgggcagagttcagcaaatggtggctgactgagttcaaaacagtcaagtttccttcccaaggaaccatctttgactattacatcgacccagagaccaagaaattcgagccttggtccaagctcgtcccccagttcgaatttgaccccgagatgcccttgcaggcgtgtttggtgcacacgagtgagaccatccgtgtgtgctacttcatggagcggttgatggcgcggcagcggcctgtcatgctggtgggcacggctggcactggcaagtcggtgctggtgggagctaagctggccagccttgaccccgaggcatacctggtgaaaaacgtgccattcaactactacaccacgtcagcaatgctgcaggctgtcctggagaagcctctggaaaagaaggctggcagaaactatggccctccagggaacaagaaactcatctatttcattgatgacatgaacatgcctgaggtggatgcctacgggacggtgcagccccacaccatcatccggcagcatctggactatggccactggtatgatcggagcaagctgtccctaaaggagatcacaaatgtacagtatgtttcctgtatgaaccccacggcaggcagcttcaccatcaacccccggcttcagcgtcacttcagcgtgtttgtcctctccttcccgggggcagatgccctgtcctctatctacagcatcatcctcactcagcatctgaagctcggaaacttcccggcgtccctgcagaaatccatccccccactgatcgatctggccctcgccttccaccagaaaattgctaccaccttcctacccacaggaatcaaattccactacatcttcaacctcagagattttgccaacattttccagggcattctcttctcctcagtggaatgtgtgaaatccacatgggatcttataaggctctatctgcatgaatcaaatcgagtttatcgggataagatggtagaagaaaaggactttgatctttttgataaaatccagacagaagtgctcaagaaaacttttgatgatattgaagaccctgtggagcagacccaaagcccgaacctgtattgtcactttgcaaatggtattggggagcccaaatacatgcctgtacagtcttgggaacttttgacccagactctggtggaggccttggagaaccacaatgaagtcaacacagtgatggacctagttctctttgaggatgccatgcgccatgtctgccatatcaatcgcatcttggagtccccgcggggaaatgctctgctggttggtgtaggtgggagcggcaagcagagcctgacaaggctggcagctttcatcagctccatggatgtcttccagatcacactgcgcaaaggctaccagatccaggacttcaagatggacctggccagcctgtgtctgaaagctggagtgaagaatctcaacacagtgtttctcatgactgatgcccaagtggctgatgagaggttccttgtgctcatcaatgatcttttggcatctggggagatcccagatctctactctgatgatgaagttgaaaacatcataagcaatgtgaggaatgaagtcaagagccagggtctggttgacaacagagagaactgttggaagttctttatagatcggatccggcgacagctgaaggtgactctctgtttctcccctgtgggaaacaagctaagagtccgcagcaggaagttcccagccattgtgaactgcacagccatccactggttccacgagtggcctcagcaagcattggagtctgtcagcctccgcttcttgcagaacacagagggcattgagcccacagtaaagcagtcgattagcaaattcatggcctttgtccacacaagtgtcaaccaaacatcccagtcttatctgagcaatgaacagcgctacaactatacaactcccaagtcctttctggagttcatcagactctaccagagcttgttgcacaggcacagaaaagagctcaagtgcaagacagagcggttggagaacgggctgctgaagctgcatagcacctctgcccaggtggatgatctgaaagcaaagctggctgcccaggaagtagagctgaagcagaaaaatgaagatgcagacaaactgattcaggtcgtgggtgtggagactgacaaagtgagcagagagaaagccatggcagatgaagaggagcagaaggtggccgtcatcatgctagaggtgaaacagaagcagaaggactgtgaggaggacctggcaaaggctgagccagcactcacagcagcgcaggcagctctcaacaccctgaacaagaccaacctgacagagctgaagtcatttggctctccgcctctggccgtcagcaatgtcagcgctgcggtgatggtactgatggctcccaggggtagggtgcccaaggaccggagctggaaggctgctaaggtcaccatggccaaagtggatggcttcctggactcgctaataaacttcaacaaagagaacattcacgagaactgcctcaaagccatcaggccgtatctgcaagaccccgagttcaatcctgagtttgtggccaccaaatcctatgcggctgcaggcctctgctcctgggtcatcaatattgtgagattttatgaggtgttctgtgatgtggaacccaagcgccaggcactgaacaaagccaccgcggacctcacagctgcccaggagaagctggctgccatcaaagccaagatcgctcaccttaatgaaaacctggcaaagctcacagccaggtttgagaaagcaacagcagacaaactcaaatgtcagcaagaagccgaagtgaccgcagtcaccatctcccttgccaaccgcctggttggaggactcgcttctgaaaacgtgaggtgggcagatgccgtgcagaacttcaaacagcaggaaaggacgttatgtggagacattttacttataacggctttcatttcctaccttggcttcttcacaaagaaataccggcagagcctcctggacagaacttggaggccctacctgagccagctgaaaactcccattccagtcaccccagccctggatcccctgaggatgctgatggatgatgctgacgtggctgcctggcagaacgagggcctcccagccgaccgcatgtccgtggagaatgccaccattctcatcaactgtgagcgctggccactcatggttgaccctcagctacaaggcatcaaatggatcaagaataaatatggtgaagatctccgggtcacgcagattggtcagaaaggctaccttcaaatcatagagcaggccctggaagctggagctgtggtgctgattgaaaatctagaggagtccattgatcctgttctgggacccctgcttgggagagaagtcattaaaaaaggacgattcattaaaattggagacaaagaatgtgaatacaatcccaagttccggctcatcctccacaccaagctggctaatcctcactaccagcctgagctgcaggctcaggccaccctgatcaacttcaccgtgaccagggatggcctggaggaccagttgctggccgctgtggtcagcatggagaggccagacttggagcagctgaagtccgatctcacaaagcagcagaatggattcaaaattaccctgaaaacgttggaagacagtcttctctctcgcctctcctccgcctctgggaacttcctgggagaaacagtgctggtggaaaacctagagatcaccaagcagactgctgccgaagttgagaaaaaggtccaggaggccaaggtgactgaagtgaaaatcaacgaggcccgagagcactaccggccagcagctgccagggcctcactgctctacttcatcatgaacgacctcagcaagatccatccaatgtaccagttttctctcaaggccttcagtatcgtcttccagaaggctgtggagagggctgctcctgacgaaagcctcagggagcgggtggccaacctaatagacagcataaccttctctgtgtaccagtacaccatccgcgggctctttgagtgtgataagctgacctaccttgcccagctcacctttcagattctcctcatgaaccgagaagtcaatgcagtggagttggatttcctgcttcgatctccagtgcagacgggcaccgccagccccgtggagttcctctcccatcaggcgtggggagctgtcaaggtactttcatcaatggaagaattctctaatctggatcgggacatagagggatctgctaagagctggaaaaagtttgtggagtccgaatgtcctgagaaagagaagctcccacaggagtggaagaacaagacagccctgcagcgcctctgcatgctgagagccatgcggcccgaccggatgacctatgctttgcgagattttgttgaagagaagttaggaagcaaatacgtggtgggaagagccctagattttgcaacctcatttgaagaatcgggaccagccactcctatgtttttcatcctgtctccaggggtggacccactgaaggatgtagaaagtcaaggaagaaaacttggatacaccttcaacaatcagaactttcacaacgtgtctttggggcaaggacaggaagtggtggctgaggctgcgctggacctcgctgccaagaaaggtcactgggttattttgcagaacattcacctggtggccaagtggctcagcaccctggagaagaagctggaggagcacagtgagaacagccacccagagttcagggtcttcatgagtgcagagccagcaccctcccctgagggccacatcatcccccagggcatcctggagaactccattaagatcaccaatgagccccccacgggcatgcatgccaacctgcacaaggccctggacaacttcactcaggacactctggagatgtgttctcgggagacggagtttaagagcatcctctttgctctttgttacttccatgcggtggtggcagaaagacgaaaatttgggccccagggatggaatcgctcatacccctttaacactggagacctcactatctctgtgaatgtcctctacaacttcctggaggccaacgcaaaggtcccctatgatgatttgcgctacctgtttggagagatcatgtatggaggccatatcacagatgactgggacagaagactctgcagaacctacctgggggaattcattcgaccagaaatgttagaaggagaactgtctttggccccagggttcccactcccaggcaacatggactacaatggttatcatcagtacatcgatgctgagctgcccccagaatccccctacctctatggcctccacccgaacgcagagattggcttcctgacccaaacctcagaaaagctcttccgcactgtgctggagctgcagcctcgggacagccaggccagagacggagcgggcgccacaagagaagaaaaggtcaaggcacttctggaagaaatattggagcgggtgacagacgagtttaacatcccagaactgatggccaaagtggaggagcgcaccccttacattgtagttgccttccaggagtgtggccggatgaatatcctcaccagagagattcagcgctcactgagggagctggagctcggcttaaagggggagctgactatgaccagccacatggagaacttacagaatgccctgtacttcgatatggtgccagagtcctgggctagacgagcctacccttccacagcaggcctggcagcctggtttccagacctcctcaacagaatcaaggagctagaggcttggacgggtgactttacaatgccctccactgtgtggctgacaggcttcttcaacccccagtcgttcctgactgccatcatgcagtccacggctcgcaagaatgagtggccactggaccagatggccctgcaatgtgacatgacgaagaagaacagagaagagtttaggagtcctcctcgggaaggggcctacatccatggcctcttcatggaaggtgcctgctgggacacacaggctgggatcattacagaggcaaagctgaaggatctgacaccccctatgcctgtgatgttcatcaaggccattcctgcagataagcaggactgccgcagtgtctattcctgtcctgtgtacaagactagtcagcggggacccacctacgtgtggactttcaacctgaagactaaggaaaacccatccaagtgggttctggctggagtagccttgcttctccagatttagcatcctgcagagccaccgagaaaataaaaaagctgggcttggaggctgcctagagggacaggtgggtgaagggtcaccacagacacttagaacggtaagaaaccatgagcactcacaattctgtagaattcctctagggaacttggagaggtgtgcctaaggtgaggctgagctgaaggaatgtgggcccaggtttcttaataaaatgatttactcttcaa

SEQ ID NO: 128549 - DNA, 13452 bp, Homo sapiens
  Payload ID: 5162
  Gene Symbol: DNAH9
  Gene Name: dynein, axonemal, heavy chain 9
  ENST ID: ENST00000454412
  CDS Start-End: 1-13233
atgcggctcgcggaggagcgggccgcgctcgcggcggagaacgcggatggggaacccggcgccgaccgacgactgcgactcctggggacctacgtggccatgagcctgcggccggctgcgggcgcctgggagcgttgcgcggggagtgctgaggcggagcagctgctccaggccttcctgggccgcgatgctgccgaggggccgcggccgctgctggtggtgcggcccgggcccaggggcctggcaatacgccccgggctggaggtgggacctgagtcgggcctggctggcgctaaggcgctttttttccttcgcaccgggcccgagcctccagggcccgacagcttccgcggcgcagtggtctgcggggacctgcccgcggcacctctggagcacctagccgcgctgttctcggaggttgttctacccgtcctggccaatgagaagaatcgcctaaactggccccacatgatatgtgaggatgtcaggcggcacgcccacagcctccaatgtgacctctcagttatacttgagcaagtgaagggaaaaactttgctgcctcttccagcaggctcagaaaaaatggagtttgcggattccaaaagtgagacagtcttggattctatagataagtcagtcatctatgccattgagtctgcagtgatcaaatggagctaccaagtccaggtggtactcaagagagagtcttcccagccactcttacaaggggagaatcccacccctaaggtggagttggagttctggaagagcaggtatgaagatctgaaatacatctataatcaactgagaacaataacggtgaggggcatggccaagctcctggacaagcttcagagtagctactttccagctttcaaagccatgtacagagatgttgttgcagctctagcagaggcacaggacatccatgtgcacctgataccgctccagcgccacctggaagctctggagaatgcagaatttccggaggtgaagccccagctgcggcccctgctccacgtggtctgtctgatttgggccacatgcaagtcctaccgctccccgggaaggctgactgtgctgctccaggagatttgcaaccttctcatccagcaggcctctaattatctcagcccagaagacctgctgagaagtgaggtagaagaaagtcagagaaaactgcaagtggtctcagacactttgagcttcttcaagcaagagtttcaggacagaagggagaatctccacacttacttcaaagagaaccaggaagtcaaggaatgggatttccagtcttctttggtctttgtgcgattggatggcttcctgggacaactgcacgtggtggagggtcttctgaagacggccctggatttccacaaactgggaaaggtggagttcagcggcgtcagagggaatgctctgagtcagcaggtccagcaaatgcatgaagaatttcaagagatgtacaggcttctctcaggatcctcctccgactgcctgtacctccaaagcacggactttgaaaatgacgtctctgaatttaaccagaaagtagaagatcttgaccgaagattggggactatctttattcaagcttttgatgatgcacctggcttggagcatgcctttaagctgctagacatagcaggaaacctccttgaaagaccgctggtagcgagggatacatctgataaatacctggtcctcatccaaatgttcaacaaagatctggatgcagtgaggatgatctacagtcagcacgtccaggaggaagcagaacttgggttctccccggtgcacaagaacatgcccaccgtggctggcggcctccgctgggcacaggagctgaggcagcgcatccagggtcctttcagcaactttggacgcatcacacacccttgcatggaatctgcagaaggaaagcgaatgcaacaaaaatatgaagatatgctgtcattgctagaaaagtatgagacaagactttatgaggattggtgccggacagtatcagagaagtcacagtacaatctttcccaaccacttctaaaacgtgacccagagacgaaggagatcactatcaactttaacccacagctgatttcagtgctgaaagaaatgagctatcttgaacccagagagatgaaacacatgcctgagacagcagcagccatgttctcctccagggatttctatcggcagcttgtggctaatttagagttgatggcaaattggtacaacaaggttatgaaaactctgctggaggtggaatttccattagtggaggaagagctgcaaaatattgatctccgcctcagagcagcagaggagactttgaactggaaaacagaaggcatttgcgattatgtcactgaaatcaccagtagtattcatgatcttgaacaaagaattcagaaaactaaagacaatgtggaagagatccaaaacatcatgaaaacatgggtgactccaatatttaagacaaaagatggaaaaagggaatcccttctttctctggatgatcggcatgatcgaatggaaaaatattacaatctcatcaaggaatctggccttaagatccacgcccttgttcaggaaaacctgggtctattttcagcagacccaacctccaatatctggaagacttatgttaactctattgacaatttgttgctgaatggattctttcttgccattgagtgctccctcaagtatcttctggaaaatactgagtgtaaggcaggacttaccccaatatttgaagcacaactgagtctagccatcccagagctagttttctatccgtctctggagtctggagtgaaggggggtttctgtgacattgttgagggtctcatcaccagcatttttaggataccatctctggtgccacggctttccccacaaaatggctctcctcactatcaggtcgacctggacggtataccagatttggcaaacatgcggcgcacactcatggagagagtccagagaatgatgggcctctgctgtggctatcagagcaccttcagccagtattcgtacctctatgtggaggaccggaaggaggttctgggtcagtttctgctgtacgggcacatcctcactccggaagaaattgaagaccatgtggaagatggcatcccagagaaccctcccctcctttctcagtttaaagtgcaaatcgactcctatgaaacgctctatgaagaggtgtgcaggctggaacccatcaaggtgtttgacggctggatgaaaattgatattcgaccctttaaggcatctctgctgaatattattaagaggtggagcctcctgttcaaacagcatcttgtggaccacgtcactcacagcttggccaacctggatgcgtttataaagaagagtgagagcggcttactcaagaaagttgaaaaaggagatttccaaggcttggttgagatcatgggacaccttatggctgttaaagaacggcagagtaacactgatgagatgtttgagcccttaaagcagactattgaattgctgaagacctatgaacaagaattgccagaaacagtgtttaagcagctggaggagctgcctgagaaatggaacaacataaaaaaggtggccattactgtgaagcagcaggtggccccactgcaggcaaatgaagtgacactcctccgccagaggtgcacagccttcgatgcagaacagcagcaattctgggagcaattccacaaagaagccccgttcaggtttgatagcatccaccctcatcaaatgctggatgccaggcacatcgagatccagcagatggaatccactatggcctccatttctgagtctgccagcttatttgaagtcaatgtccctgactataagcagctgaggcagtgcaggaaggaggtctgccagctgaaggagctctgggacaccattggaatggtgacctccagcatccatgcctgggagaccacaccctggaggaatatcaacgtggaagccatggagttggagtgcaaacagtttgcccggcatatccgaaacctggacaaggaggtcagggcctgggatgcattcacaggcctggaaagcactgtgtggaacacgctgagctccctgagggcagtagctgagctgcagaatccagccatccgggagcggcactggaggcagctgatgcaggccaccggtgtgagcttcactatggaccaggacaccaccctagcgcacctgctgcagctccagctgcaccactatgaggatgaggtccggggcattgtggacaaagctgcaaaagagatgggtatggagaaaaccttaaaggagctgcagactacctgggctggcatggaattccagtatgagccccacccacggaccaatgtccccctcctgtgctctgatgaggacctcatagaggttctggaggataatcaagttcaacttcagaacctggtgatgtccaagtatgttgctttcttcttggaggaggtgtcgggctggcagaagaagctgtccacagtggacgctgtcatctctatctggtttgaagtgcagcgaacatggactcacctggaaagcatattcactggatctgaagatattcgggcacagctaccccaggattctaaaaggtttgaaggcatcgacattgactttaaagagctagcttatgatgcccagaaaattccaaatgtagtgcaaaccaccaacaagccaggcctgtatgaaaagctggaggatattcagggcagattgtgcctgtgtgagaaggccctggcagagtacctcgacaccaagaggcttgccttcccgcggttttactttctctcctcctccgatctgttagacatcctttccaacggcacagctccacaacaggttcaacgtcacctttccaaactctttgacaacatggccaagatgcgattccagctagatgccagtggggaaccaaccaagacaagcctcggcatgtacagcaaagaagaggagtatgtggctttcagtgagccctgtgactgcagcgggcaggtagaaatatggctgaaccatgtccttggtcacatgaaggccactgtgaggcatgagatgacagaaggtgtaactgcctatgaagaaaagccgagggagcagtggctttttgaccacccagctcaggtggccctgacctgtactcagatctggtggacaacagaagtgggcatggcatttgccaggctggaggaaggctatgagagtgccatgaaggactattataagaagcaagtggcccagctcaaaacccttatcaccatgctgattggccagctctccaagggagaccggcagaagattatgactatatgcaccatcgatgtgcatgcccgggatgtggtagccaagatgattgctcagaaggtagacaatgcccaggctttcctctggctgtctcagctgcgccatcgttgggatgacgaggtcaaacactgctttgccaacatctgtgatgcccagtttttgtattcctatgagtacctgggaaacacacctcgcttggtgatcacacctttgactgacaggtgctacatcaccctcacccagtccctgcacctgaccatgagtggggctcccgcaggacctgcaggcacaggcaagaccgagaccaccaaggacctgggccgcgcactgggcatcctggtctatgtgttcaactgctcggagcagatggattacaagtcttgtggcaacatctacaaaggccttgctcagactggtgcctggggctgctttgatgagtttaatcgaatctccgtggaggtcttgtcagtggtggcagtgcaggtaaaaagcattcaagatgcgattagagataagaagcagtggttcagcttccttggggaggagatcagcctgaatccttctgtcggtatcttcatcaccatgaacccaggctatgctggccgcacagagctgccagagaatctcaagtctctcttcaggccttgtgcaatggtggttccagactttgaattgatctgtgaaatcatgctggtggcagaaggattcattgaagcccagtcattagccagaaagttcatcactctttaccagttgtgcaaagagcttctctccaaacaggatcactacgactggggcctacgggccatcaagtccgtgctggtggtggcaggatccctgaagagaggagaccctgaccggcctgaggaccaggtcctgatgcgctccttgcgggatttcaacatccccaagattgtgactgatgacatgcccatcttcatgggcctgatcggggacctctttcccgccctggatgtcccccggaggagagaccccaacttcgaagctttggttaggaaggcgatagtggatctgaagctccaggctgaggacaactttgtgctcaaggtggtccagctggaggagctcctggctgtgcggcactctgtatttgtggtgggtggcgctggtaccggcaagtcacaggtgctgaggtccttgcacaagacctatcagatcatgaaacggcgccccgtctggactgacctcaatcccaaagcagtcacaaatgatgagctctttggcatcatcaatccagccacaggagaatggaaggatggattgttctcttccatcatgcgggagcttgccaacatcacccatgatgggcccaagtggattttactggatggcgacatagatccaatgtggattgaatccctgaatactgtcatggatgataacaaggtgctgacattggccagcaatgagaggattcctctgaaccccaccatgaagctcctctttgagatcagccacctgcgcacagccactccagcaactgtctctagagcagggatcttgtacatcaacccggcagacttgggatggaaccctccagtgagcagctggattgagaagagggaaatccagacagagagagccaacttaaccattttgttcgacaagtatcttccaacctgcctagacacactcagaaccaggtttaagaagatcattcccatcccagagcagagcatggttcagatggtgtgtcaccttctggaatgtctcctgaccacggaggacatccctgcagactgccctaaggaaatttatgagcattattttgtgtttgctgccatctgggctttcggcggagcaatggtccaagatcagcttgtggactaccgggcagagttcagcaaatggtggctgactgagttcaaaacagtcaagtttccttcccaaggaaccatctttgactattacatcgacccagagaccaagaaattcgagccttggtccaagctcgtcccccagttcgaatttgaccccgagatgcccttgcaggcgtgtttggtgcacacgagtgagaccatccgtgtgtgctacttcatggagcggttgatggcgcggcagcggcctgtcatgctggtgggcacggctggcactggcaagtcggtgctggtgggagctaagctggccagccttgaccccgaggcatacctggtgaaaaacgtgccattcaactactacaccacgtcagcaatgctgcaggctgtcctggagaagcctctggaaaagaaggctggcagaaactatggccctccagggaacaagaaactcatctatttcattgatgacatgaacatgcctgaggtggatgcctacgggacggtgcagccccacaccatcatccggcagcatctggactatggccactggtatgatcggagcaagctgtccctaaaggagatcacaaatgtacagtatgtttcctgtatgaaccccacggcaggcagcttcaccatcaacccccggcttcagcgtcacttcagcgtgtttgtcctctccttcccgggggcagatgccctgtcctctatctacagcatcatcctcactcagcatctgaagctcggaaacttcccggcgtccctgcagaaatccatccccccactgatcgatctggccctcgccttccaccagaaaattgctaccaccttcctacccacaggaatcaaattccactacatcttcaacctcagagattttgccaacattttccagggcattctcttctcctcagtggaatgtgtgaaatccacatgggatcttataaggctctatctgcatgaatcaaatcgagtttatcgggataagatggtagaagaaaaggactttgatctttttgataaaatccagacagaagtgctcaagaaaacttttgatgatattgaagaccctgtggagcagacccaaagcccgaacctgtattgtcactttgcaaatggtattggggagcccaaatacatgcctgtacagtcttgggaacttttgacccagactctggtggaggccttggagaaccacaatgaagtcaacacagtgatggacctagttctctttgaggatgccatgcgccatgtctgccatatcaatcgcatcttggagtccccgcggggaaatgctctgctggttggtgtaggtgggagcggcaagcagagcctgacaaggctggcagctttcatcagctccatggatgtcttccagatcacactgcgcaaaggctaccagatccaggacttcaagatggacctggccagcctgtgtctgaaagctggagtgaagaatctcaacacagtgtttctcatgactgatgcccaagtggctgatgagaggttccttgtgctcatcaatgatcttttggcatctggggagatcccagatctctactctgatgatgaagttgaaaacatcataagcaatgtgaggaatgaagtcaagagccagggtctggttgacaacagagagaactgttggaagttctttatagatcggatccggcgacagctgaaggtgactctctgtttctcccctgtgggaaacaagctaagagtccgcagcaggaagttcccagccattgtgaactgcacagccatccactggttccacgagtggcctcagcaagcattggagtctgtcagcctccgcttcttgcagaacacagagggcattgagcccacagtaaagcagtcgattagcaaattcatggcctttgtccacacaagtgtcaaccaaacatcccagtcttatctgagcaatgaacagcgctacaactatacaactcccaagtcctttctggagttcatcagactctaccagagcttgttgcacaggcacagaaaagagctcaagtgcaagacagagcggttggagaacgggctgctgaagctgcatagcacctctgcccaggtggatgatctgaaagcaaagctggctgcccaggaagtagagctgaagcagaaaaatgaagatgcagacaaactgattcaggtcgtgggtgtggagactgacaaagtgagcagagagaaagccatggcagatgaagaggagcagaaggtggccgtcatcatgctagaggtgaaacagaagcagaaggactgtgaggaggacctggcaaaggctgagccagcactcacagcagcgcaggcagctctcaacaccctgaacaagaccaacctgacagagctgaagtcatttggctctccgcctctggccgtcagcaatgtcagcgctgcggtgatggtactgatggctcccaggggtagggtgcccaaggaccggagctggaaggctgctaaggtcaccatggccaaagtggatggcttcctggactcgctaataaacttcaacaaagagaacattcacgagaactgcctcaaagccatcaggccgtatctgcaagaccccgagttcaatcctgagtttgtggccaccaaatcctatgcggctgcaggcctctgctcctgggtcatcaatattgtgagattttatgaggtgttctgtgatgtggaacccaagcgccaggcactgaacaaagccaccgcggacctcacagctgcccaggagaagctggctgccatcaaagccaagatcgctcaccttaatgaaaacctggcaaagctcacagccaggtttgagaaagcaacagcagacaaactcaaatgtcagcaagaagccgaagtgaccgcagtcaccatctcccttgccaaccgcctggttggaggactcgcttctgaaaacgtgaggtgggcagatgccgtgcagaacttcaaacagcaggaaaggacgttatgtggagacattttacttataacggctttcatttcctaccttggcttcttcacaaagaaataccggcagagcctcctggacagaacttggaggccctacctgagccagctgaaaactcccattccagtcaccccagccctggatcccctgaggatgctgatggatgatgctgacgtggctgcctggcagaacgagggcctcccagccgaccgcatgtccgtggagaatgccaccattctcatcaactgtgagcgctggccactcatggttgaccctcagctacaaggcatcaaatggatcaagaataaatatggtgaagatctccgggtcacgcagattggtcagaaaggctaccttcaaatcatagagcaggccctggaagctggagctgtggtgctgattgaaaatctagaggagtccattgatcctgttctgggacccctgcttgggagagaagtcattaaaaaaggacgattcattaaaattggagacaaagaatgtgaatacaatcccaagttccggctcatcctccacaccaagctggctaatcctcactaccagcctgagctgcaggctcaggccaccctgatcaacttcaccgtgaccagggatggcctggaggaccagttgctggccgctgtggtcagcatggagaggccagacttggagcagctgaagtccgatctcacaaagcagcagaatggattcaaaattaccctgaaaacgttggaagacagtcttctctctcgcctctcctccgcctctgggaacttcctgggagaaacagtgctggtggaaaacctagagatcaccaagcagactgctgccgaagttgagaaaaaggtccaggaggccaaggtgactgaagtgaaaatcaacgaggcccgagagcactaccggccagcagctgccagggcctcactgctctacttcatcatgaacgacctcagcaagatccatccaatgtaccagttttctctcaaggccttcagtatcgtcttccagaaggctgtggagagggctgctcctgacgaaagcctcagggagcgggtggccaacctaatagacagcataaccttctctgtgtaccagtacaccatccgcgggctctttgagtgtgataagctgacctaccttgcccagctcacctttcagattctcctcatgaaccgagaagtcaatgcagtggagttggatttcctgcttcgatctccagtgcagacgggcaccgccagccccgtggagttcctctcccatcaggcgtggggagctgtcaaggtactttcatcaatggaagaattctctaatctggatcgggacatagagggatctgctaagagctggaaaaagtttgtggagtccgaatgtcctgagaaagagaagctcccacaggagtggaagaacaagacagccctgcagcgcctctgcatgctgagagccatgcggcccgaccggatgacctatgctttgcgagattttgttgaagagaagttaggaagcaaatacgtggtgggaagagccctagattttgcaacctcatttgaagaatcgggaccagccactcctatgtttttcatcctgtctccaggggtggacccactgaaggatgtagaaagtcaaggaagaaaacttggatacaccttcaacaatcagaactttcacaacgtgtctttggggcaaggacaggaagtggtggctgaggctgcgctggacctcgctgccaagaaaggtcactgggttattttgcaggacactctggagatgtgttctcgggagacggagtttaagagcatcctctttgctctttgttacttccatgcggtggtggcagaaagacgaaaatttgggccccagggatggaatcgctcatacccctttaacactggagacctcactatctctgtgaatgtcctctacaacttcctggaggccaacgcaaaggtcccctatgatgatttgcgctacctgtttggagagatcatgtatggaggccatatcacagatgactgggacagaagactctgcagaacctacctgggggaattcattcgaccagaaatgttagaaggagaactgtctttggccccagggttcccactcccaggcaacatggactacaatggttatcatcagtacatcgatgctgagctgcccccagaatccccctacctctatggcctccacccgaacgcagagattggcttcctgacccaaacctcagaaaagctcttccgcactgtgctggagctgcagcctcgggacagccaggccagagacggagcgggcgccacaagagaagaaaaggtcaaggcacttctggaagaaatattggagcgggtgacagacgagtttaacatcccagaactgatggccaaagtggaggagcgcaccccttacattgtagttgccttccaggagtgtggccggatgaatatcctcaccagagagattcagcgctcactgagggagctggagctcggcttaaagggggagctgactatgaccagccacatggagaacttacagaatgccctgtacttcgatatggtgccagagtcctgggctagacgagcctacccttccacagcaggcctggcagcctggtttccagacctcctcaacagaatcaaggagctagaggcttggacgggtgactttacaatgccctccactgtgtggctgacaggcttcttcaacccccagtcgttcctgactgccatcatgcagtccacggctcgcaagaatgagtggccactggaccagatggccctgcaatgtgacatgacgaagaagaacagagaagagtttaggagtcctcctcgggaaggggcctacatccatggcctcttcatggaaggtgcctgctgggacacacaggctgggatcattacagaggcaaagctgaaggatctgacaccccctatgcctgtgatgttcatcaaggccattcctgcagataagcaggactgccgcagtgtctattcctgtcctgtgtacaagactagtcagcggggacccacctacgtgtggactttcaacctgaagactaaggaaaacccatccaagtgggttctggctggagtagccttgcttctccagatttagcatcctgcagagccaccgagaaaataaaaaagctgggcttggaggctgcctagagggacaggtgggtgaagggtcaccacagacacttagaacggtaagaaaccatgagcactcacaattctgtagaattcctctagggaacttggagaggtgtgcctaaggtgaggctgagctgaaggaatgtgggcccaggtttcttaataaaatgatttactcttc

SEQ ID NO: 128550 - DNA, 854 bp, Homo sapiens
  Payload ID: 5162
  Gene Symbol: DNAH9
  Gene Name: dynein, axonemal, heavy chain 9
  ENST ID: ENST00000579703
  CDS Start-End: 1-854
aatgtcagcgctgcggtgatggtactgatggctcccaggggtagggtgcccaaggaccggagctggaaggctgctaaggtcaccatggccaaagtggatggcttcctggactcgctaataaacttcaacaaagagaacattcacgagaactgcctcaaagccatcaggccgtatctgcaagaccccgagttcaatcctgagtttgtggccaccaaatcctatgcggctgcaggcctctgctcctgggtcatcaatattgtgagattttatgaggtgttctgtgatgtggaacccaagcgccaggcactgaacaaagccaccgcggacctcacagctgcccaggagaagctggctgccatcaaagccaagatcgctcaccttaatgaaaacctggcaaagctcacagccaggtttgagaaagcaacagcagacaaactcaaatgtcagcaagaagccgaagtgaccgcagtcaccatctcccttgccaaccgcctgactcccattccagtcaccccagccctggatcccctgaggatgctgatggatgatgctgacgtggctgcctggcagaacgagggcctcccagccgaccgcatgtccgtggagaatgccaccattctcatcaactgtgagcgctggccactcatggttgaccctcagctacaaggcatcaaatggatcaagaataaatatggtgaagatctccgggtcacgcagattggtcagaaaggctaccttcaaatcatagagcaggccctggaagctggagctgtggtgctgattgaaaatctagaggagtccattgatcctgttctgggacccctgcttgggagagaagtcattaaaaaaggacg

SEQ ID NO: 128551 - DNA, 1986 bp, Homo sapiens
  Payload ID: 5162
  Gene Symbol: DNAH9
  Gene Name: dynein, axonemal, heavy chain 9
  ENST ID: ENST00000579828
  CDS Start-End: 30-989
gaaaccgatgcagctggaggccgcgcgcgatgcggctcgcggaggagcgggccgcgctcgcggcggagaacgcggatggggaacccggcgccgaccgacgactgcgactcctggggacctacgtggccatgagcctgcggccggctgcgggcgcctgggagcgttgcgcggggagtgctgaggcggagcagctgctccaggccttcctgggccgcgatgctgccgaggggccgcggccgctgctggtggtgcggcccgggcccaggggcctggcaatacgccccgggctggaggtgggacctgagtcgggcctggctggcgctaaggcgctttttttccttcgcaccgggcccgagcctccagggcccgacagcttccgcggcgcagtggtctgcggggacctgcccgcggcacctctggagcacctagccgcgctgttctcggaggttgttctacccgtcctggccaatgagaagaatcgcctaaactggccccacatgatatgtgaggatgtcaggcggcacgcccacagcctccaatgtgacctctcagttatacttgagcaagtgaagggaaaaactttgctgcctcttccagcaggctcagaaaaaatggagtttgcggattccaaaagtgagacagtcttggattctatagataagtcagtcatctatgccattgagtctgcagtgatcaaatggagctaccaagtccaggtggtactcaagagagagtcttcccagccactcttacaaggggagaatcccacccctaaggtggagttggagttctggaagagcaggtatgaagatctgaaatacatctataatcaactgagaacaataacggtgaggggcatggccaagctcctggacaagcttcagagtagctactttccagctttcaaagccatgtacagagatgttgttgcaggtgaggaccagcaagtgttttcacaaatgtgtttgactcaagttaccgtcgaatgatgcattcacctctctctgtctgaattccgcaacttcaagtccttgtaaatttccgacccgacacaaactagcatggtggcaagaataccacatctagatacatgagagcagctaaacagagctatgctgtttgcagttccactgctgtatggcctgggaaaattcacctagcccctctgagctttagtacgtgtgttggttatggggcatacacttctgcctacttttctaggtccgtgtgagattatacaggtggaagaacttattgacttaacacaacaatgttcctggagctgtccctttgtgtctttcaaacactggggccaggacatacagttctggggtggccattatggagcctgtgtgaccaactccagggtggtcatgtgagtccatctgtcctaatcaaggactacccttctggcaagacagcctaaccatgccttccaggacctgggattattggctgggacccctcattaactaagtgcttgtacctccctggcacgctgggaactcctgggtctggtcaaaggtctttctgggcctgtcttcagggtctggaaactactagaagaaagttcttccatccgatctgcctacagctgctgctttgcactgtacaaatccatgttgttacctctcacctctggaattcaggtccctccacctttggctccttgagaaatctctattccatttctagctccattctgcattttctattcctactgtcagatgggactgcaatttcctggccatttgagcaccagacaagatctacgcttatcaaaattgccaagccagcaaagtctatgattagaagtaggtaaatttttttaggactccctctccatttcttggagcactgtgcgtcttctccctttttcttgtaaaatctcctctttgctcttcagtaccataggtcaaaatgtgcttttaaaggtctttgtcatttcacatggtctaagcttaattaaagcagtgattttcaaac

SEQ ID NO: 128552 - DNA, 429 bp, Homo sapiens
  Payload ID: 5162
  Gene Symbol: DNAH9
  Gene Name: dynein, axonemal, heavy chain 9
  ENST ID: ENST00000579602
  CDS Start-End: 1-264
cccacccctaaggtggagttggagttctggaagagcaggtatgaagatctgaaatacatctataatcaactgagaacaataacggtgaggggcatggccaagctcctggacaagcttcagagtagctactttccagctttcaaagccatgtacagagatgttgttgcagatgggactgcaatttcctggccatttgagcaccagacaagatctacgcttatcaaaattgccaagccagcaaagtctatgattagaagtaggtaaatttttttaggactccctctccatttcttggagcactgtgcgtcttctccctttttcttgtaaaatctcctctttgctcttcagtaccataggtcaaaatgtgcttttaaaggtctttgtcatttcacatggtctaagcttaattaaagcagtgattttcaaaca

SEQ ID NO: 128553 - DNA, 313 bp, Homo sapiens
  Payload ID: 5162
  Gene Symbol: DNAH9
  Gene Name: dynein, axonemal, heavy chain 9
  ENST ID: ENST00000579813
  CDS Start-End: 1-132
tacagagatgttgttgcagctccattctgcattttctattcctactgtcagatgggactgcaatttcctggccatttgagcaccagacaagatctacgcttatcaaaattgccaagccagcaaagtctatgattagaagtaggtaaatttttttaggactccctctccatttcttggagcactgtgcgtcttctccctttttcttgtaaaatctcctctttgctcttcagtaccataggtcaaaatgtgcttttaaaggtctttgtcatttcacatggtctaagcttaattaaagcagtgattttcaaacatt

SEQ ID NO: 128554 - DNA, 3147 bp, Homo sapiens
  Payload ID: 5162
  Gene Symbol: DNAH9
  Gene Name: dynein, axonemal, heavy chain 9
  Uniprot ID: Q9NYC9
  ENST ID: ENST00000608377
  CDS Start-End: 530-2926
tggttttaagaaacaagaaaggtcagggtggctgtggttggaacctccaacaggaaggttgttcttcccacgaatccaaaggctgtacaagggcaaagacactacagctgcctgaagttagtgctttaggatatggagcataaagagaggaagagatgagatccacttggataccagcaccccactccagcctcgaggaagcttttacacagtctgccatggttttacacagtttaaaactggaagacagattctgctgatttttttttaatccgatctcacaaagcagcagaatggattcaaaattaccctgaaaacgttggaagacagtcttctctctcgcctctcctccgcctctgggaacttcctgggagaaacagtgctggtggaaaacctagagatcaccaagcagactgctgccgaagttgagaaaaaggtccaggaggccaaggtgactgaagtgaaaatcaacgaggcccgagagcactaccggccagcagctgccagggcctcactgctctacttcatcatgaacgacctcagcaagatccatccaatgtaccagttttctctcaaggccttcagtatcgtcttccagaaggctgtggagagggctgctcctgacgaaagcctcagggagcgggtggccaacctaatagacagcataaccttctctgtgtaccagtacaccatccgcgggctctttgagtgtgataagctgacctaccttgcccagctcacctttcagattctcctcatgaaccgagaagtcaatgcagtggagttggatttcctgcttcgatctccagtgcagacgggcaccgccagccccgtggagttcctctcccatcaggcgtggggagctgtcaaggtactttcatcaatggaagaattctctaatctggatcgggacatagagggatctgctaagagctggaaaaagtttgtggagtccgaatgtcctgagaaagagaagctcccacaggagtggaagaacaagacagccctgcagcgcctctgcatgctgagagccatgcggcccgaccggatgacctatgctttgcgagattttgttgaagagaagttaggaagcaaatacgtggtgggaagagccctagattttgcaacctcatttgaagaatcgggaccagccactcctatgtttttcatcctgtctccaggggtggacccactgaaggatgtagaaagtcaaggaagaaaacttggatacaccttcaacaatcagaactttcacaacgtgtctttggggcaaggacaggaagtggtggctgaggctgcgctggacctcgctgccaagaaaggtcactgggttattttgcagaacattcacctggtggccaagtggctcagcaccctggagaagaagctggaggagcacagtgagaacagccacccagagttcagggtcttcatgagtgcagagccagcaccctcccctgagggccacatcatcccccagggcatcctggagaactccattaagatcaccaatgagccccccacgggcatgcatgccaacctgcacaaggccctggacaacttcactcaggacactctggagatgtgttctcgggagacggagtttaagagcatcctctttgctctttgttacttccatgcggtggtggcagaaagacgaaaatttgggccccagggatggaatcgctcatacccctttaacactggagacctcactatctctgtgaatgtcctctacaacttcctggaggccaacgcaaaggtcccctatgatgatttgcgctacctgtttggagagatcatgtatggaggccatatcacagatgactgggacagaagactctgcagaacctacctgggggaattcattcgaccagaaatgttagaaggagaactgtctttggccccagggttcccactcccaggcaacatggactacaatggttatcatcagtacatcgatgctgagctgcccccagaatccccctacctctatggcctccacccgaacgcagagattggcttcctgacccaaacctcagaaaagctcttccgcactgtgctggagctgcagcctcgggacagccaggccagagacggagcgggcgccacaagagaagaaaaggtcaaggcacttctggaagaaatattggagcgggtgacagacgagtttaacatcccagaactgatggccaaagtggaggagcgcaccccttacattgtagttgccttccaggagtgtggccggatgaatatcctcaccagagagattcagcgctcactgagggagctggagctcggcttaaagggggagctgactatgaccagccacatggagaacttacagaatgccctgtacttcgatatggtgccagagtcctgggctagacgagcctacccttccacagcaggcctggcagcctggtttccagacctcctcaacagaatcaaggagctagaggcttggacgggtgactttacaatgccctccactgtgtggctgacaggcttcttcaacccccagtcgttcctgactgccatcatgcagtccacggctcgcaagaatgagtggccactggaccagatggccctgcaatgtgacatgacgaagaagaacagagaagagtttaggagtcctcctcgggaaggggcctacatccatggcctcttcatggaaggtgcctgctgggacacacaggctgggatcattacagaggcaaagctgaaggatctgacaccccctatgcctgtgatgttcatcaaggccattcctgcagataagcaggactgccgcagtgtctattcctgtcctgtgtacaagactagtcagcggggacccacctacgtgtggactttcaacctgaagactaaggaaaacccatccaagtgggttctggctggagtagccttgcttctccagatttagcatcctgcagagccaccgagaaaataaaaaagctgggcttggaggctgcctagagggacaggtgggtgaagggtcaccacagacacttagaacggtaagaaaccatgagcactcacaattctgtagaattcctctagggaacttggagaggtgtgcctaaggtgaggctgagctgaaggaatgtgggcccaggtttcttaataaaatgatttactcttcaa

SEQ ID NO: 128555 - DNA, 2504 bp, Homo sapiens
  Payload ID: 5163
  Gene Symbol: DNAI1
  Gene Name: dynein, axonemal, intermediate chain 1
  Uniprot ID: Q9UI46
  ENST ID: ENST00000242317
  CDS Start-End: 172-2271
attctatcctgcaagggcacggggacccacaacgacggctgtccctaaagaaccgttgcgactggtaactgaagtggaagagagtccagatttcttgtgtgtggtcaaggagacggacaaactttttgtcttcagacgagggagcgttttgtaggctctccaggggttgagatgattcctgcttctgcgaaggctccccataaacagcctcataagcagagcatcagcataggcagaggaaccaggaagagagatgaagattcagggactgaagtgggagaaggcacagatgaatgggcccaatccaaagccacagttagaccccctgaccagctggagttgaccgatgcggagttaaaggaggagttcactcggattttgacagccaacaacccacacgcaccccagaacattgtcaggtacagcttcaaagaaggcacatataagcctattggctttgtgaaccaactggcagttcactacacccaggttgggaacctgatccccaaagactcagatgaaggacggcggcagcattaccgcgatgaattagtggcaggttctcaggagtctgtcaaggtgatttcagaaacaggaaacctcgaagaagacgaagagcccaaggagttagaaactgagcctgggagtcaaacagatgtgcctgcagctggggcagctgaaaaagtgactgaagaagaattgatgactcctaagcagcccaaggagagaaagctcactaaccagttcaacttcagtgagagggcctcacagacctacaacaaccctgtccgggatcgagaatgccagacggagcctcctcccaggacaaacttttcagccacagccaatcagtgggagatctatgatgcctatgtagaggaacttgagaagcaggaaaagaccaaagagaaggagaaggcaaagaccccagtggctaaaaaatcagggaagatggccatgaggaagctgacatctatggagtctcagactgatgatctcatcaaattgtcccaagctgctaagatcatggagcggatggtcaaccagaatacatatgatgacattgctcaagattttaagtactatgacgatgctgctgatgaataccgggaccaggtgggtaccctgctgccgctctggaagttccaaaatgacaaagccaagcgcctgtccgtcactgccctctgctggaatccaaagtacagggatctgtttgcagtgggatatggctcttatgacttcatgaagcagagccggggcatgctgctgctctacagcctgaagaaccccagcttccctgagtacatgttcagcagcaacagcggcgtcatgtgtctcgacatccacgtggaccacccctacctggtggcagtaggccactatgacggcaacgtggccatttacaacctcaagaagccccactcccagccctccttctgcagctcagccaagtctggcaagcactcagaccctgtgtggcaggtcaagtggcagaaggatgacatggaccaaaaccttaacttcttctctgtgtcatctgacggcaggattgtgtcttggactctcgtgaagagaaagctggttcacatagatgtcatcaagctgaaggtggaaggcagcaccacggaagttcctgaggggttgcagctgcacccagtgggttgtggcactgcctttgacttccacaaagagattgactacatgttcctagtgggcacagaggagggaaaaatctacaagtgctctaaatcctactccagccaattcctcgacacctatgacgcccacaacatgtcagtggacactgtgtcctggaacccataccacaccaaggtcttcatgtcctgcagctccgactggacagtgaagatctgggaccacaccatcaagaccccgatgttcatctatgacctgaactcagccgtgggtgatgtggcctgggcgccatactcttctactgtgttcgcagcagtcaccacagatgggaaggcccacatatttgacttagccatcaacaagtatgaggccatctgcaaccagcctgtggcggccaaaaagaacaggctcacccacgtgcagttcaatctcatccaccccatcatcattgtgggcgatgaccgtgggcacatcatcagcctcaagctctcacccaatttgcgcaagatgccaaaggaaaagaaggggcaggaggtgcagaagggtccagctgtggagattgcgaaactggacaaactgctgaacctggtgagggaagtgaaaatcaagacctgaggggctggcctcagtctctgtcccatcgcttgaatacagtactcctagggcttgaccctggtacccagcccagccttagcacccagcatgtgaccccactcctgatcaggtcccagcatcttcccttcttgttctgttccttaaggtcccagcaccttaccccaggacttggtcttcaaccaccattacccctctaactttgcacaaataaacctgtgtagaaacccacccca

SEQ ID NO: 128556 - DNA, 1039 bp, Homo sapiens
  Payload ID: 5163
  Gene Symbol: DNAI1
  Gene Name: dynein, axonemal, intermediate chain 1
  ENST ID: ENST00000437363
  CDS Start-End: 172-1039
attctatcctgcaagggcacggggacccacaacgacggctgtccctaaagaaccgttgcgactggtaactgaagtggaagagagtccagatttcttgtgtgtggtcaaggagacggacaaactttttgtcttcagacgagggagcgttttgtaggctctccaggggttgagatgattcctgcttctgcgaaggctccccataaacagcctcataagcaggatgaagattcagggactgaagtgggagaaggcacagatgaatgggcccaatccaaagccacagttagaccccctgaccagctggagttgaccgatgcggagttaaaggaggagttcactcggattttgacagccaacaacccacacgcaccccagaacattgtcaggtacagcttcaaagaaggcacatataagcctattggctttgtgaaccaactggcagttcactacacccaggttgggaacctgatccccaaagactcagatgaaggacggcggcagcattaccgcgatgaattagtggcaggttctcaggagtctgtcaaggtgatttcagaaacaggaaacctcgaagaagacgaagagcccaaggagttagaaactgagcctgggagtcaaacagatgtgcctgcagctggggcagctgaaaaagtgactgaagaagaattgatgactcctaagcagcccaaggagagaaagctcactaaccagttcaacttcagtgagagggcctcacagacctacaacaaccctgtccgggatcgagaatgccagacggagcctcctcccaggacaaacttttcagccacagccaatcagtgggagatctatgatgcctatgtagaggaacttgagaagcaggaaaagaccaaagagaaggagaaggcaaagaccccagtggctaaaaaatcagggaagatggccatgaggaagctgacatctatggagtctcagactgatgatctcatcaaattgtcccaagctgctaagatcatggagcggatggtcaaccagaatacatatgatgacattgctcaag

SEQ ID NO: 128557 - DNA, 656 bp, Homo sapiens
  Payload ID: 5163
  Gene Symbol: DNAI1
  Gene Name: dynein, axonemal, intermediate chain 1
  ENST ID: ENST00000442556
  CDS Start-End: 1-428
gttgtggcactgcctttgacttccacaaagagattgactacatgttcctagtgggcacagaggagggaaaaatctacaagtgctctaaatcctactccagccaattcctcgacacctatgacgcccacaacatgtcagtggacactgtgtcctggaacccataccacaccaaggtcttcatgtcctgcagctccgactggacagtgaagatctgggaccacaccatcaagaccccgatgttcatctatgacctgaactcagccgtgggtgatgtggcctgggcgccatactcttctactgtgttcgcagcagtcaccacagatgggaaggaaaagaaggggcaggaggtgcagaagggtccagctgtggagattgcgaaactggacaaactgctgaacctggtgagggaagtgaaaatcaagacctgaggggctggcctcagtctctgtcccatcgcttgaatacagtactcctagggcttgaccctggtacccagcccagccttagcacccagcatgtgaccccactcctgatcaggtcccagcatcttcccttcttgttctgttccttaaggtcccagcaccttaccccaggacttggtcttcaaccaccattacccctctaactttgcacaaataaacctgtgtagaaaccca

SEQ ID NO: 128558 - DNA, 789 bp, Homo sapiens
  Payload ID: 5163
  Gene Symbol: DNAI1
  Gene Name: dynein, axonemal, intermediate chain 1
  ENST ID: ENST00000470169
  CDS Start-End: 1-527
atgacttcatgaagcagagccggggcatgctgctgctctacagcctgaagaaccccagcttccctgagtacatgttcagcagcaacagcggcgtcatgtgtctcgacatccacgtggaccacccctacctggtggcagtaggccactatgacggcaacgtggccatttacaacctcaagaagccccactcccagccctccttctgcagctcagccaagtctggcaagcactcagaccctgtgtggcaggtcaagtggcagaaggatgacatggaccaaaaccttaacttcttctctgtgtcatctgacggcaggattgtgtcttggactctcgtgaagagaaagctggttcacatagatgtcatcaagctgaaggtggaaggcagcaccacggaagttcctgaggggttgcagctgcacccagtgggttgtggcactgcctttgacttccacaaagagattgactacatgttcctagtgggcacagaggagggaaaaatctacaaggaccccgatgttcatctatgacctgaactcagccgtgggtgatgtggcctgggcgccatactcttctactgtgttcgcagcagtcaccacagatgggaaggcccacatatttgacttagccatcaacaagtatgaggccatctgcaaccagcctgtggcggccaaaaagaacaggctcacccacgtgcagttcaatctcatccaccccatcatcattgtgggcgatgaccgtgggcacatcatcagcctcaagctctcacccaatttgcgcaagatgccaaag

SEQ ID NO: 128559 - DNA, 2598 bp, Homo sapiens
  Payload ID: 5163
  Gene Symbol: DNAI1
  Gene Name: dynein, axonemal, intermediate chain 1
  ENST ID: ENST00000614641
  CDS Start-End: 255-2366
tcctttccgggccggctgggcgcgccgaagcgcctgcgccttggctgctggtcggttgctgggtaaccgcgtcagggagttggattctatcctgcaagggcacggggacccacaacgacggctgtccctaaagaaccgttgcgactggtaactgaagtggaagagagtccagatttcttgtgtgtggtcaaggagacggacaaactttttgtcttcagacgagggagcgttttgtaggctctccaggggttgagatgattcctgcttctgcgaaggctccccataaacagcctcataagcagagcatcagcataggcagaggaaccaggaagagagatgaagattcagggactgaagtgggagaaggcacagatgaatgggcccaatccaaagccacagttagaccccctgaccagctggagttgaccgatgcggagttaaaggaggagttcactcggattttgacagccaacaacccacacgcaccccagaacattgtcaggtacagcttcaaagaaggcacatataagcctattggctttgtgaaccaactggcagttcactacacccaggttgggaacctgatccccaaagactcagatgaaggacggcggcagcattaccgcgatgaattagtggcagtatcctaccaaggttctcaggagtctgtcaaggtgatttcagaaacaggaaacctcgaagaagacgaagagcccaaggagttagaaactgagcctgggagtcaaacagatgtgcctgcagctggggcagctgaaaaagtgactgaagaagaattgatgactcctaagcagcccaaggagagaaagctcactaaccagttcaacttcagtgagagggcctcacagacctacaacaaccctgtccgggatcgagaatgccagacggagcctcctcccaggacaaacttttcagccacagccaatcagtgggagatctatgatgcctatgtagaggaacttgagaagcaggaaaagaccaaagagaaggagaaggcaaagaccccagtggctaaaaaatcagggaagatggccatgaggaagctgacatctatggagtctcagactgatgatctcatcaaattgtcccaagctgctaagatcatggagcggatggtcaaccagaatacatatgatgacattgctcaagattttaagtactatgacgatgctgctgatgaataccgggaccaggtgggtaccctgctgccgctctggaagttccaaaatgacaaagccaagcgcctgtccgtcactgccctctgctggaatccaaagtacagggatctgtttgcagtgggatatggctcttatgacttcatgaagcagagccggggcatgctgctgctctacagcctgaagaaccccagcttccctgagtacatgttcagcagcaacagcggcgtcatgtgtctcgacatccacgtggaccacccctacctggtggcagtaggccactatgacggcaacgtggccatttacaacctcaagaagccccactcccagccctccttctgcagctcagccaagtctggcaagcactcagaccctgtgtggcaggtcaagtggcagaaggatgacatggaccaaaaccttaacttcttctctgtgtcatctgacggcaggattgtgtcttggactctcgtgaagagaaagctggttcacatagatgtcatcaagctgaaggtggaaggcagcaccacggaagttcctgaggggttgcagctgcacccagtgggttgtggcactgcctttgacttccacaaagagattgactacatgttcctagtgggcacagaggagggaaaaatctacaagtgctctaaatcctactccagccaattcctcgacacctatgacgcccacaacatgtcagtggacactgtgtcctggaacccataccacaccaaggtcttcatgtcctgcagctccgactggacagtgaagatctgggaccacaccatcaagaccccgatgttcatctatgacctgaactcagccgtgggtgatgtggcctgggcgccatactcttctactgtgttcgcagcagtcaccacagatgggaaggcccacatatttgacttagccatcaacaagtatgaggccatctgcaaccagcctgtggcggccaaaaagaacaggctcacccacgtgcagttcaatctcatccaccccatcatcattgtgggcgatgaccgtgggcacatcatcagcctcaagctctcacccaatttgcgcaagatgccaaaggaaaagaaggggcaggaggtgcagaagggtccagctgtggagattgcgaaactggacaaactgctgaacctggtgagggaagtgaaaatcaagacctgaggggctggcctcagtctctgtcccatcgcttgaatacagtactcctagggcttgaccctggtacccagcccagccttagcacccagcatgtgaccccactcctgatcaggtcccagcatcttcccttcttgttctgttccttaaggtcccagcaccttaccccaggacttggtcttcaaccaccattacccctctaactttgcacaaataaacctgtgtagaaacccacccc

SEQ ID NO: 128560 - DNA, 2236 bp, Homo sapiens
  Payload ID: 5164
  Gene Symbol: DNAI2
  Gene Name: dynein, axonemal, intermediate chain 2
  Uniprot ID: Q9GZS0
  ENST ID: ENST00000311014
  CDS Start-End: 68-1885
cgaccgtggattgaacgcttccccagagacccagaagcagaaggagcggacccaggcagccggcaccatggagattgtgtacgtgtacgtcaagaagcgcagcgagttcgggaagcagtgcaatttctcggaccgccaggccgagctgaacatcgacatcatgcccaaccctgagctggccgagcagttcgtggagcggaacccagtggacacgggcatccagtgctcgatcagcatgtcggaacacgaggccaactcagagcggtttgagatggagacccggggagttaaccatgtcgaggggggctggcccaaggacgtgaaccccctggagctggagcagaccatccgtttccggaagaaagtggagaaagatgagaactacgttaacgccatcatgcagctcggctctatcatggagcactgcatcaagcagaacaatgccattgacatctatgaagagtatttcaatgacgaggaggccatggaagtgatggaggaggacccttcagctaaaaccatcaatgtgttcagggacccccaggaaatcaagagggctgccacacacctctcctggcaccccgatggcaacaggaagttggcagtggcatactcctgcttggattttcagcgggcacctgtgggcatgagcagcgattcatacatctgggacctggaaaaccccaacaagcctgaacttgctctgaagccatcgtctccactcgtgacgttggagttcaaccccaaagattcccacgtactcctgggtggctgctacaatggacagatagcctgctgggacacccgaaagggcagcctggtggcggagctatccaccattgagtccagccaccgagaccctgtgtatggcaccatctggctgcagtcgaagacgggcaccgagtgcttctcagcttccacggatgggcaggtcatgtggtgggacatccgaaagatgagcgagcccactgaagttgtgatcttggacatcaccaagaaggaacagttggaaaatgccttgggggccatctccctggagttcgaatctactttgcccaccaagttcatggtggggaccgagcagggcatcgtcatctcctgcaaccgcaaggccaagacgtcagctgaaaagattgtgtgcaccttcccgggccatcatggccccatctacgccctccagagaaaccccttctacccgaagaacttcctgacggttggcgactggacagcccgcatttggtctgaagacagccgggaatcgtccatcatgtggaccaagtaccacatggcttacctcactgatgctgcctggagccccgtgaggccgaccgttttctttaccaccaggatggacggaaccctggatatctgggacttcatgttcgagcagtgcgatcccaccctcagcttgaaggtgtgtgacgaggccctcttctgcctccgggtgcaggacaatgggtgtctcatcgcctgcggctcccagctggggacaaccaccctgctggaggtctcgcctgggctctctaccctccagaggaatgagaagaacgtagcctcttccatgtttgagcgtgagacccggcgagagaagatcctggaggccaggcaccgggagatgcggctgaaggagaagggtaaggcggagggcagggatgaggagcagaccgatgaggagctggccgtagacctggaggcgctggtcagcaaggccgaggaggagttcttcgacatcatcttcgcagagctgaagaagaaggaggcagacgccataaagctgacgccagtgcctcagcaaccaagtccagaagaagaccaggtggtggaggagggagaggaagcagcgggggaagaaggggatgaagaagtggaagaagacttagcctagaagtcagccttcgactgcggcgctatccctgtgtgccttcctttcccacctcttgaccctcaaccagacttgcatggccatggcagggcctcgggaagaccttcaggagtggggaagggtttctcctccatgatcgaccctcctcgtccacctacaaatcaggaacagaaagtctgtccactttgaaaatacctttccaggcagctccctgaccatttggacacattgccacgacaggagcctccaagtatgtgggaggggacgggcgggacgagcttggctgttctgctgcacctgaatgctttctgttatcctaattcttgtaaaattaaatgaatcgtaacaatgcca

SEQ ID NO: 128561 - DNA, 2474 bp, Homo sapiens
  Payload ID: 5164
  Gene Symbol: DNAI2
  Gene Name: dynein, axonemal, intermediate chain 2
  Uniprot ID: Q9GZS0
  ENST ID: ENST00000446837
  CDS Start-End: 307-2124
cctcccaatgtgctgggattacagttgtcagctaccgcgcctggccaaaatttttattgccctcctcagagagcaactgcaataactaaacagggtaatgcttagcatatagtcggcactcaggatttttttttaatgcggatgcagcttctggacaaattcctaggatctccccaccaccccttgcttcctgccccaaccagattgagaacctggagctgtcctggcaggacctgtggagatagggaaggggccggtggggtccctcaccccacaccctccctctgccccccagcagccggcaccatggagattgtgtacgtgtacgtcaagaagcgcagcgagttcgggaagcagtgcaatttctcggaccgccaggccgagctgaacatcgacatcatgcccaaccctgagctggccgagcagttcgtggagcggaacccagtggacacgggcatccagtgctcgatcagcatgtcggaacacgaggccaactcagagcggtttgagatggagacccggggagttaaccatgtcgaggggggctggcccaaggacgtgaaccccctggagctggagcagaccatccgtttccggaagaaagtggagaaagatgagaactacgttaacgccatcatgcagctcggctctatcatggagcactgcatcaagcagaacaatgccattgacatctatgaagagtatttcaatgacgaggaggccatggaagtgatggaggaggacccttcagctaaaaccatcaatgtgttcagggacccccaggaaatcaagagggctgccacacacctctcctggcaccccgatggcaacaggaagttggcagtggcatactcctgcttggattttcagcgggcacctgtgggcatgagcagcgattcatacatctgggacctggaaaaccccaacaagcctgaacttgctctgaagccatcgtctccactcgtgacgttggagttcaaccccaaagattcccacgtactcctgggtggctgctacaatggacagatagcctgctgggacacccgaaagggcagcctggtggcggagctatccaccattgagtccagccaccgagaccctgtgtatggcaccatctggctgcagtcgaagacgggcaccgagtgcttctcagcttccacggatgggcaggtcatgtggtgggacatccgaaagatgagcgagcccactgaagttgtgatcttggacatcaccaagaaggaacagttggaaaatgccttgggggccatctccctggagttcgaatctactttgcccaccaagttcatggtggggaccgagcagggcatcgtcatctcctgcaaccgcaaggccaagacgtcagctgaaaagattgtgtgcaccttcccgggccatcatggccccatctacgccctccagagaaaccccttctacccgaagaacttcctgacggttggcgactggacagcccgcatttggtctgaagacagccgggaatcgtccatcatgtggaccaagtaccacatggcttacctcactgatgctgcctggagccccgtgaggccgaccgttttctttaccaccaggatggacggaaccctggatatctgggacttcatgttcgagcagtgcgatcccaccctcagcttgaaggtgtgtgacgaggccctcttctgcctccgggtgcaggacaatgggtgtctcatcgcctgcggctcccagctggggacaaccaccctgctggaggtctcgcctgggctctctaccctccagaggaatgagaagaacgtagcctcttccatgtttgagcgtgagacccggcgagagaagatcctggaggccaggcaccgggagatgcggctgaaggagaagggtaaggcggagggcagggatgaggagcagaccgatgaggagctggccgtagacctggaggcgctggtcagcaaggccgaggaggagttcttcgacatcatcttcgcagagctgaagaagaaggaggcagacgccataaagctgacgccagtgcctcagcaaccaagtccagaagaagaccaggtggtggaggagggagaggaagcagcgggggaagaaggggatgaagaagtggaagaagacttagcctagaagtcagccttcgactgcggcgctatccctgtgtgccttcctttcccacctcttgaccctcaaccagacttgcatggccatggcagggcctcgggaagaccttcaggagtggggaagggtttctcctccatgatcgaccctcctcgtccacctacaaatcaggaacagaaagtctgtccactttgaaaatacctttccaggcagctccctgaccatttggacacattgccacgacaggagcctccaagtatgtgggaggggacgggcgggacgagcttggctgttctgctgcacctgaatgctttctgttatcctaattcttgtaaaattaaatgaatcgtaacaatgcc

SEQ ID NO: 128562 - DNA, 2240 bp, Homo sapiens
  Payload ID: 5164
  Gene Symbol: DNAI2
  Gene Name: dynein, axonemal, intermediate chain 2
  Uniprot ID: Q9GZS0
  ENST ID: ENST00000582036
  CDS Start-End: 108-1889
caagcaaccggtaaacgccgccgtttgaggagcaccggagccgcgaccgtggattgaacgcttccccagagacccagaagcagaaggagcggacccaggccggcaccatggagattgtgtacgtgtacgtcaagaagcgcagcgagttcgggaagcagtgcaatttctcggaccgccaggccgagctgaacatcgacatcatgcccaaccctgagctggccgagcagttcgtggagcggaacccagtggacacgggcatccagtgctcgatcagcatgtcggaacacgaggccaactcagagcggtttgagatggagacccggggagttaaccatgtcgaggggggctggcccaaggacgtgaaccccctggagctggagcagaccatccgtttccggaagaaagtggagaaagatgagaactacgttaacgccatcatgcagctcggctctatcatggagcactgcatcaagcagaacaatgccattgacatctatgaagagtatttcaatgacgaggaggccatggaagtgatggaggaggacccttcagctaaaaccatcaatgtgttcagggacccccaggaaatcaagagggctgccacacacctctcctggcaccccgatggcaacaggaagttggcagtggcatactcctgcttggattttcagcgggcacctgtgggcatgagcagcgattcatacatctgggacctggaaaaccccaacaagcctgaacttgctctgaagccatcgtctccactcgtgacgttggagttcaaccccaaagattcccacgtactcctgggtggctgctacaatggacagatagcctgctgggacacccgaaagggcagcctggtggcggagctatccaccattgagtccagccaccgagaccctgtgtatggcaccatctggctgcagtcgaagacgggcaccgagtgcttctcagcttccacggatgggcaggtcatgtggtgggacatccgaaagatgagcgagcccactgaagttgtgatcttggacatcaccaagaaggaacagttggaaaatgccttgggggccatctccctggagttcgaatctactttgcccaccaagttcatggtggggaccgagcagggcatcgtcatctcctgcaaccgcaaggccaagacgtcagctgaaaagattgtgtgcaccttcccgggccatcatggccccatctacgccctccagagaaaccccttctacccgaagaacttcctgacggttggcgactggacagcccgcatttggtctgaagacagccgggaatcgtccatcatgtggaccaagtaccacatggcttacctcactgatgctgcctggagccccgtgaggccgaccgttttctttaccaccaggatggacggaaccctggatatctgggacttcatgttcgagcagtgcgatcccaccctcagcttgaaggacaatgggtgtctcatcgcctgcggctcccagctggggacaaccaccctgctggaggtctcgcctgggctctctaccctccagaggaatgagaagaacgtagcctcttccatgtttgagcgtgagacccggcgagagaagatcctggaggccaggcaccgggagatgcggctgaaggagaagggtaaggcggagggcagggatgaggagcagaccgatgaggagctggccgtagacctggaggcgctggtcagcaaggccgaggaggagttcttcgacatcatcttcgcagagctgaagaagaaggaggcagacgccataaagctgacgccagtgcctcagcaaccaagtccagaagaagaccaggtggtggaggagggagaggaagcagcgggggaagaaggggatgaagaagtggaagaagacttagcctagaagtcagccttcgactgcggcgctatccctgtgtgccttcctttcccacctcttgaccctcaaccagacttgcatggccatggcagggcctcgggaagaccttcaggagtggggaagggtttctcctccatgatcgaccctcctcgtccacctacaaatcaggaacagaaagtctgtccactttgaaaatacctttccaggcagctccctgaccatttggacacattgccacgacaggagcctccaagtatgtgggaggggacgggcgggacgagcttggctgttctgctgcacctgaatgctttctgttatcctaattcttgtaaaattaaatgaatcgtaacaatgcca

SEQ ID NO: 128563 - DNA, 1993 bp, Homo sapiens
  Payload ID: 5164
  Gene Symbol: DNAI2
  Gene Name: dynein, axonemal, intermediate chain 2
  ENST ID: ENST00000579055
  CDS Start-End: 102-608
ggtaaacgccgccgtttgaggagcaccggagccgcgaccgtggattgaacgcttccccagagacccagaagcagaaggagcggacccaggcagccggcaccatggagattgtgtacgtgtacgtcaagaagcgcagcgagttcgggaagcagtgcaatttctcggaccgccaggccgagctgaacatcgacatcatgcccaaccctgagctggccgagcagttcgtggagcggaacccagtggacacgggcatccagtgctcgatcagcatgtcggaacacgaggccaactcagagcggtttgagatggagacccggggagttaaccatgtcgaggggggctggcccaaggacgtgaaccccctggagctggagcagaccatccgtttccggaagaaagtggagaaagatgagaactacgttaacgccatcatgcagctcggctctggacccccaggaaatcaagagggctgccacacacctctcctggcaccccgatggcaacaggaagttggcagtggcatactcctgcttggattttcagcgggcacctgtgggcatgagcagcgattcatacatctgggacctggaaaaccccaacaagcctgaacttgctctgaagccatcgtctccactcgtgacgttggagttcaaccccaaagattcccacgtactcctgggtggctgctacaatggacagatagcctgctgggacacccgaaagggcagcctggtggcggagctatccaccattgagtccagccaccgagaccctgtgtatggcaccatctggctgcagtcgaagacgggcaccgagtgcttctcagcttccacggatgggcaggtcatgtggtgggacatccgaaagatgagcgagcccactgaagttgtgatcttggacatcaccaagaaggaacagttggaaaatgccttgggggccatctccctggagttcgaatctactttgcccaccaagttcatggtggggaccgagcagggcatcgtcatctcctgcaaccgcaaggccaagacgtcagctgaaaagattgtgtgcaccttcccgggccatcatggccccatctacgccctccagagaaaccccttctacccgaagaacttcctgacggttggcgactggacagcccgcatttggtctgaagacagccgggaatcgtccatcatgtggaccaagtaccacatggcttacctcactgatgctgcctggagccccgtgaggccgaccgttttctttaccaccaggatggacggaaccctggatatctgggacttcatgttcgagcagtgcgatcccaccctcagcttgaaggtgtgtgacgaggccctcttctgcctccgggtgcaggacaatgggtgtctcatcgcctgcggctcccagctggggacaaccaccctgctggaggtctcgcctgggctctctaccctccagaggaatgagaagaacgtagcctcttccatgtttgagcgtgagacccggcgagagaagatcctggaggccaggcaccgggagatgcggctgaaggagaaggcagcaaccaagtccagaagaagaccaggtggtggaggagggagaggaagcagcgggggaagaaggggatgaagaagtggaagaagacttagcctagaagtcagccttcgactgcggcgctatccctgtgtgccttcctttcccacctcttgaccctcaaccagacttgcatggccatggcagggcctcgggaagaccttcaggagtggggaagggtttctcctccatgatcgaccctcctcgtccacctacaaatcaggaacagaaagtctgtccactttgaaaatacctttccaggcagctccctgaccatttggacacattgccacgacaggagcctccaagtatgtgggaggggacgggcgggacgagcttggctgttctgctgcacctgaatgctttctgttatcctaattcttgtaaaattaaatgaatcgtaacaatgcca

SEQ ID NO: 128564 - DNA, 2475 bp, Homo sapiens
  Payload ID: 5164
  Gene Symbol: DNAI2
  Gene Name: dynein, axonemal, intermediate chain 2
  ENST ID: ENST00000579490
  CDS Start-End: 136-2124
cctcccaatgtgctgggattacagttgtcagctaccgcgcctggccaaaatttttattgccctcctcagagagcaactgcaataactaaacagggtaatgcttagcatatagtcggcactcaggatttttttttaatgcggatgcagcttctggacaaattcctaggatctccccaccaccccttgcttcctgccccaaccagattgagaacctggagctgtcctggcaggacctgtggagatagggaaggggccggtggggtccctcaccccacaccctccctctgccccccagcagccggcaccatggagattgtgtacgtgtacgtcaagaagcgcagcgagttcgggaagcagtgcaatttctcggaccgccaggccgagctgaacatcgacatcatgcccaaccctgagctggccgagcagttcgtggagcggaacccagtggacacgggcatccagtgctcgatcagcatgtcggaacacgaggccaactcagagcggtttgagatggagacccggggagttaaccatgtcgaggggggctggcccaaggacgtgaaccccctggagctggagcagaccatccgtttccggaagaaagtggagaaagatgagaactacgttaacgccatcatgcagctcggctctatcatggagcactgcatcaagcagaacaatgccattgacatctatgaagagtatttcaatgacgaggaggccatggaagtgatggaggaggacccttcagctaaaaccatcaatgtgttcagggacccccaggaaatcaagagggctgccacacacctctcctggcaccccgatggcaacaggaagttggcagtggcatactcctgcttggattttcagcgggcacctgtgggcatgagcagcgattcatacatctgggacctggaaaaccccaacaagcctgaacttgctctgaagccatcgtctccactcgtgacgttggagttcaaccccaaagattcccacgtactcctgggtggctgctacaatggacagatagcctgctgggacacccgaaagggcagcctggtggcggagctatccaccattgagtccagccaccgagaccctgtgtatggcaccatctggctgcagtcgaagacgggcaccgagtgcttctcagcttccacggatgggcaggtcatgtggtgggacatccgaaagatgagcgagcccactgaagttgtgatcttggacatcaccaagaaggaacagttggaaaatgccttgggggccatctccctggagttcgaatctactttgcccaccaagttcatggtggggaccgagcagggcatcgtcatctcctgcaaccgcaaggccaagacgtcagctgaaaagattgtgtgcaccttcccgggccatcatggccccatctacgccctccagagaaaccccttctacccgaagaacttcctgacggttggcgactggacagcccgcatttggtctgaagacagccgggaatcgtccatcatgtggaccaagtaccacatggcttacctcactgatgctgcctggagccccgtgaggccgaccgttttctttaccaccaggatggacggaaccctggatatctgggacttcatgttcgagcagtgcgatcccaccctcagcttgaaggtgtgtgacgaggccctcttctgcctccgggtgcaggacaatgggtgtctcatcgcctgcggctcccagctggggacaaccaccctgctggaggtctcgcctgggctctctaccctccagaggaatgagaagaacgtagcctcttccatgtttgagcgtgagacccggcgagagaagatcctggaggccaggcaccgggagatgcggctgaaggagaagggtaaggcggagggcagggatgaggagcagaccgatgaggagctggccgtagacctggaggcgctggtcagcaaggccgaggaggagttcttcgacatcatcttcgcagagctgaagaagaaggaggcagacgccataaagctgacgccagtgcctcagcaaccaagtccagaagaagaccaggtggtggaggagggagaggaagcagcgggggaagaaggggatgaagaagtggaagaagacttagcctagaagtcagccttcgactgcggcgctatccctgtgtgccttcctttcccacctcttgaccctcaaccagacttgcatggccatggcagggcctcgggaagaccttcaggagtggggaagggtttctcctccatgatcgaccctcctcgtccacctacaaatcaggaacagaaagtctgtccactttgaaaatacctttccaggcagctccctgaccatttggacacattgccacgacaggagcctccaagtatgtgggaggggacgggcgggacgagcttggctgttctgctgcacctgaatgctttctgttatcctaattcttgtaaaattaaatgaatcgtaacaatgcca

SEQ ID NO: 128565 - DNA, 2312 bp, Homo sapiens
  Payload ID: 5165
  Gene Symbol: DNAL1
  Gene Name: dynein, axonemal, light chain 1
  Uniprot ID: Q4LDG9
  ENST ID: ENST00000311089
  CDS Start-End: 261-494
aaccagagcagtgacagtagcaaccgccggaatggcgaaagcaacaacaatcaaagaagccttagcgagatgggaagctttcactgtctacaaactgcattgaaaaaattgccaacctgaatggcttaaaaaacttgaggatattatctttaggaagaaacaacataaagaacttaaatggactggaggcagtaggggacacattagaagaactgtggatctcctacaattttattgagaagttgaaagggatccacataatgaagaaattgaagattctctacatgtctaataacctggtaaaagactgggctgagtttgtgaagctggcagaactgccatgcctcgaagacctggtgtttgtaggcaatcccttggaagagaaacattctgctgagaataactggattgaagaagcaaccaagagagtgcccaaactgaaaaagctggatggtactccagtaattaaaggggatgaggaagaagacaactaatgccacgctttccactgtgtgttaacttatttaaatgtcataagaacaatagataaattttatataattgtctattttaaagattctgtatgggacaaaagtttcttaagataaaacagatcactcattctcatctttttttttcctttaacttattcagtgtttctccccaaaactggtaatgccaaccttatatatcctatttctctttttagaaaccacaaattttcgatttttgtcttcagtctcagttacgtactgtgtagccccatctactaaaacaaaacctttgtagaccagtcatttttaataacaaaggaacaaatgtttttttcagtttgttcattttttttaggttagacattttaaaagatgtacatttgaaaattcagaacatttttcctgaaggtctgtctctgtacaattcagaagcacatgcctttagctcagaaggcagcatggtgatgggaagagttcctcttagaaatacagcaggtccggaaccaagactccaaagttccattggaaaagatatggtgaaaaaaggaaaaagtagtatctcagagaccttctagtctatattatacttatttgtttttccaaaaatgtgcacattgtcaactggaatttaggttgtttttatatgcatggccacttgagtcattgtgtacagtcattctgtgatctcagttagtggttaaaatgactgtcatgatcatttctttgactgataatgtggcaatgttactcatgtggacctcgccttaagcacacattttggttttatagttccttatgtgtttaaagcattagttatatttgaattcctagactaaatgctggccattgatgtatgtcaaaatttaccctaattatttggtctggtgaccctcattgttgggaaaagtgactaccatggttataagtaagggtataatgaaacttagtatttcaaaatatattttttgagaagttctaagttaaacagctcttaaaatgtattatgtacgtggttgtggagggaagggagatgtttcattatgagatcccaggcaaatggcaatatgtttgaggattgtctcctacataaagcagtgtaggtgatttaacctcaaaattgcaaagcaatagttagatgcagaggttagaatttatcatgtaaacaaaaaatccttcaggaaaatgtaagacattgtagtcagtaagcagatgaggtcataggaggccatggctggatcactattagattgcagaaaagaagtcaggggccctctgccaaattgtgcctaaagtccctcagagactgttgattctggtttccccatctacttgtgtgattttacttgcataaaatcacagtgaaagagggaagaatcatctttaaaaagtgattgcataagtagtcctgggtttcagaagatttcagctatcatttacataggaattacttgatttttctaagttactctgatcaaaagggaccactgctttgacaatcaactctaaatacaaacaagaggccaggcgtggtggctcatgcctgtcatcccagcactttgggaggccgaggcgggcggatcatctgagatcaggagttcaagaccagcctgaccaacatggtgaaaccccgtctctactaaaaatacaaaaattagccagtcctggtggtgggcgcctgtagtcccaactactcgggaggctgaggcaggagaatcatttgaacccgggaggcggaggttgcagtgagccgagattgcgccattgcactccagcctgggcaatagagcgagactccatatttaaaaaaaaaaaaaaaaa

SEQ ID NO: 128566 - DNA, 548 bp, Homo sapiens
  Payload ID: 5165
  Gene Symbol: DNAL1
  Gene Name: dynein, axonemal, light chain 1
  ENST ID: ENST00000554339
  CDS Start-End: 23-334
agtgacagtagcaaccgccggaatggaggcagtaggggacacattagaagaactgtggatctcctacaattttattgagaagttgaaagggatccacataatgaagaaattgaagattctctacatgtctaataacctggtaaaagactgggctgagtttgtgaagctggcagaactgccatgcctcgaagacctggtgtttgtaggcaatcccttggaagagaaacattctgctgagaataactggattgaagaagcaaccaagagagtgcccaaactgaaaaagctggatggtactccagtaattaaaggggatgaggaagaagacaactaatgccacgctttccactgtgtgttaacttatttaaatgtcataagaacaatagataaattttatataattgtctattttaaagattctgtatgggacaaaagtttcttaagataaaacagatcactcattctcatctttttttttcctttaacttattcagtgtttctccccaaaactggtaatgccaaccttatatatcctatttctcttttta

SEQ ID NO: 128567 - DNA, 504 bp, Homo sapiens
  Payload ID: 5165
  Gene Symbol: DNAL1
  Gene Name: dynein, axonemal, light chain 1
  ENST ID: ENST00000555919
  CDS Start-End: 348-504
cagtgacagtagcaaccgccggaatgagatggggtcttgctgtgttgtccaggctggtctcaaactcctggcctcaagtgatcctccagccttggcttcccatagtgctgggattgcaggcatgagccaccatgtccagcttgaagatataatattgtatctaggattttcaaatccatgttgaaaactgggccttgattggttgagtcaagtgagctgattggttgattcaggcgaaagcaacaacaatcaaagaagccttagcgagatgggaagagaaaactggccagaggccatctgaagccaaagagataaaactttatgcccagattccccctatagagaagatggatgcatccttgtccatgcttgctaattgcgagaagctttcactgtctacaaactgcattgaaaaaattgccaacctgaatggcttaaaaaacttgaggatattatctttaggaagaaacaacataaagaacttaaatggactggaggcagtag

SEQ ID NO: 128568 - DNA, 452 bp, Homo sapiens
  Payload ID: 5165
  Gene Symbol: DNAL1
  Gene Name: dynein, axonemal, light chain 1
  ENST ID: ENST00000554159
  CDS Start-End: 1-204
cagaggccatctgaagccaaagagataaaactttatgcccagattccccctatagagaagatggatgcatccttgtccatgcttgctaattgcgagaagctttcactgtctacaaactgcattgaaaaaattgccaacctgaatggcttaagaggcagtaggggacacattagaagaactgtggatctcctacaattttattgagaagttgaaagggatccacataatgaagaaattgaagattctctacatgtctaataacctggtaaaagactggggtactccagtaattaaaggggatgaggaagaagacaactaatgccacgctttccactgtgtgttaacttatttaaatgtcataagaacaatagataaattttatataattgtctattttaaagattctgtatgggacaaaagtttcttaagataaaacagatcactcattctca

SEQ ID NO: 128569 - DNA, 627 bp, Homo sapiens
  Payload ID: 5165
  Gene Symbol: DNAL1
  Gene Name: dynein, axonemal, light chain 1
  ENST ID: ENST00000555631
  CDS Start-End: 213-627
gaccccgcgggccctagcaaccagagcagtgacagtagcaaccgccggaatgctgggccttgattggttgagtcaagtgagctgattggttgattcaggcgaaagcaacaacaatcaaagaagccttagcgagatgggaagagaaaactggccagaggccatctgaagccaaagagataaaactttatgcccagattccccctatagagaagatggatgcatccttgtccatgcttgctaattgcgagaagctttcactgtctacaaactgcattgaaaaaattgccaacctgaatggcttaaaaaacttgaggatattatctttaggaagaaacaacataaagaacttaaatggactggaggcagtaggggacacattagaagaactgtggatctcctacaattttattgagaagttgaaagggatccacataatgaagaaattgaagattctctacatgtctaataacctggtaaaagactgggctgagtttgtgaagctggcagaactgccatgcctcgaagacctggtgtttgtaggcaatcccttggaagagaaacattctgctgagaataactggattgaagaagcaaccaagagagtgcccaaactgaaaaagctggatg

SEQ ID NO: 128570 - DNA, 632 bp, Homo sapiens
  Payload ID: 5165
  Gene Symbol: DNAL1
  Gene Name: dynein, axonemal, light chain 1
  Uniprot ID: Q4LDG9
  ENST ID: ENST00000554871
  CDS Start-End: 177-632
agcaaccgccggaatgctgggccttgattggttgagtcaagtgagctgattggttgattcaggcgaaagcaacaacaatcaaagaagccttagcgagatgggaagagaaaactggccagaggccatctgaagccaaagagataaaactttatgcccagattccccctatagagaagatggatgcatccttgtccatgcttgctaattgcgagaagctttcactgtctacaaactgcattgaaaaaattgccaacctgaatggcttaaaaaacttgaggatattatctttaggaagaaacaacataaagaacttaaatggactggaggcagtaggggacacattagaagaactgtggatctcctacaattttattgagaagttgaaagggatccacataatgaagaaattgaagattctctacatgtctaataacctggtaaaagactgggctgagtttgtgaagctggcagaactgccatgcctcgaagacctggtgtttgtaggcaatcccttggaagagaaacattctgctgagaataactggattgaagaagcaaccaagagagtgcccaaactgaaaaagctggatggtactccagtaattaaaggggatgaggaagaagacaactaa

SEQ ID NO: 128571 - DNA, 8404 bp, Homo sapiens
  Payload ID: 5165
  Gene Symbol: DNAL1
  Gene Name: dynein, axonemal, light chain 1
  Uniprot ID: Q4LDG9
  ENST ID: ENST00000553645
  CDS Start-End: 42-614
gggccctagcaaccagagcagtgacagtagcaaccgccggaatggcgaaagcaacaacaatcaaagaagccttagcgagatgggaagagaaaactggccagaggccatctgaagccaaagagataaaactttatgcccagattccccctatagagaagatggatgcatccttgtccatgcttgctaattgcgagaagctttcactgtctacaaactgcattgaaaaaattgccaacctgaatggcttaaaaaacttgaggatattatctttaggaagaaacaacataaagaacttaaatggactggaggcagtaggggacacattagaagaactgtggatctcctacaattttattgagaagttgaaagggatccacataatgaagaaattgaagattctctacatgtctaataacctggtaaaagactgggctgagtttgtgaagctggcagaactgccatgcctcgaagacctggtgtttgtaggcaatcccttggaagagaaacattctgctgagaataactggattgaagaagcaaccaagagagtgcccaaactgaaaaagctggatggtactccagtaattaaaggggatgaggaagaagacaactaatgccacgctttccactgtgtgttaacttatttaaatgtcataagaacaatagataaattttatataattgtctattttaaagattctgtatgggacaaaagtttcttaagataaaacagatcactcattctcatctttttttttcctttaacttattcagtgtttctccccaaaactggtaatgccaaccttatatatcctatttctctttttagaaaccacaaattttcgatttttgtcttcagtctcagttacgtactgtgtagccccatctactaaaacaaaacctttgtagaccagtcatttttaataacaaaggaacaaatgtttttttcagtttgttcattttttttaggttagacattttaaaagatgtacatttgaaaattcagaacatttttcctgaaggtctgtctctgtacaattcagaagcacatgcctttagctcagaaggcagcatggtgatgggaagagttcctcttagaaatacagcaggtccggaaccaagactccaaagttccattggaaaagatatggtgaaaaaaggaaaaagtagtatctcagagaccttctagtctatattatacttatttgtttttccaaaaatgtgcacattgtcaactggaatttaggttgtttttatatgcatggccacttgagtcattgtgtacagtcattctgtgatctcagttagtggttaaaatgactgtcatgatcatttctttgactgataatgtggcaatgttactcatgtggacctcgccttaagcacacattttggttttatagttccttatgtgtttaaagcattagttatatttgaattcctagactaaatgctggccattgatgtatgtcaaaatttaccctaattatttggtctggtgaccctcattgttgggaaaagtgactaccatggttataagtaagggtataatgaaacttagtatttcaaaatatattttttgagaagttctaagttaaacagctcttaaaatgtattatgtacgtggttgtggagggaagggagatgtttcattatgagatcccaggcaaatggcaatatgtttgaggattgtctcctacataaagcagtgtaggtgatttaacctcaaaattgcaaagcaatagttagatgcagaggttagaatttatcatgtaaacaaaaaatccttcaggaaaatgtaagacattgtagtcagtaagcagatgaggtcataggaggccatggctggatcactattagattgcagaaaagaagtcaggggccctctgccaaattgtgcctaaagtccctcagagactgttgattctggtttccccatctacttgtgtgattttacttgcataaaatcacagtgaaagagggaagaatcatctttaaaaagtgattgcataagtagtcctgggtttcagaagatttcagctatcatttacataggaattacttgatttttctaagttactctgatcaaaagggaccactgctttgacaatcaactctaaatacaaacaagaggccaggcgtggtggctcatgcctgtcatcccagcactttgggaggccgaggcgggcggatcatctgagatcaggagttcaagaccagcctgaccaacatggtgaaaccccgtctctactaaaaatacaaaaattagccagtcctggtggtgggcgcctgtagtcccaactactcgggaggctgaggcaggagaatcatttgaacccgggaggcggaggttgcagtgagccgagattgcgccattgcactccagcctgggcaatagagcgagactccatatttaaaaaaaaaaaaaaaaaaaaaagaggaaaacttggtctaacacccttttagttttcttttctctcttcttttcaatctgataggaagaaaccttattctactctagctggtttatgcattcaaagcctttggacatttcttttatgaaccataggcaatgagccttcattctccttggtgatgttttaagttccataaactgagagggaagatgatcttcttaaagtttgcacttccttcagtaggcaagcttgaagccatgttgatatggatatgttttctaaaagtaaccctggaagtgaatataataggaagtaagtgatttcatattgaatttatttgtaaaatggcttagagttttggtgtttgttttttctgaattctgtaatatagaaactggttctctttctccttgtttctcaatgacttttaattacaggtagttctcagacaaatgtaagatacttttctctgtccatttcatgcaaaattcatattcagtatcattcaacaaatctttgaatgacttctatgcatccctgttcatggaacccatgccattagaaaatggcagttgggatgtatgaagaaatgtaggatattctctcaaatcattccctaaattatcctttactgctgcaaatttagctgataaaactgcctttggtttatgcctcttggatcagatatttgacctatgtggaatagattatctctgtgcttccggtttaagacattacgccattttagtggatcatttaaattttttctattctgtttttttttgtttgtttgtttgtttgttttaaacagagtctcactcccgagtagctgggaccacaggcacgtgccatcatgcctggcctatttttgtatttttagtagagatggggtttcaccatgttggccaggcttgtcttgaactcctaacttcagatgacctgcccacatcggcctcccaaagtgctgggattacaggcatgagccaccgtgcctggccaaatttcttctattcttgtaagtgatggtaaaactctggaatcagtccagtattttagtttttcacagcaaatttgattttagtctaccaaggagtttaacttttctatgttccctaactctaagattagggctgtattacctagacaggccttaaaaggtttttgtgttgttctctgttaataagaatttgttcctttaaaccagaggatcaaccttggaactattaacattttgggattgataattcattgttgttgggggctgtcctgtgtgcttaggatgttcagctgcagccctggcctctacccactagattccagtagaccccctcctcagccatgacaacaaagatatctccagacattgccatctgtcccttgggtaggagggtgggaacaaattctcccttagttgtactttttataccaacatcacttgtgtccagggtccatttattttcagtctgtagccatgtgccacttgaattgttatatgagagaaggtgatgtattcagtaatcatggatggaaagaaatggtcactggtattttttgtaatgctcatttttttttttttttgagacagagtctcgctctgttacctaggctggagtgcagtggcgcaatctcagctcactgcaacctccgtctcccgggttcaagcaattcttctgcctccgcctcccaagtagctgggactacaggcacgcgccaccatgcctggctaatttttgtatttttagtacagacggcgtttcaccatattggccaggctggtctcaaactcctgacctcgtgatccgcctgcctcagcctcccaaagtgctgggattacagacgtgagccactgcgactggcttaatgctcattttcataattttcatgtaatattagaaactcagggctggaaggttcaacttctcttttttgaagcagggtctcaacttttatttctaagcattcttgcttatcttaggacagtgattattaacctacctctctgtttctatcaacagaagccaactttatgatagattttgctttgtctctaaagtttaatattttgagtgtactttagaaaataggtcatcattctttaagcgtcattcattgtctaatcacataattttgcagaccatggcagtcattaaatacagaaaaatactgtgtaaaatttgataatcttgtaggaaagttagctgatgtagacatcaattttggatgtgatcagaagaatgtctgcttaagataactggtcaataacttggtatggctactggattcattccacatatggtagtataaggcacttaaatgtgtttcctgattgggcactgtggctcatgcctgtaatcccagcactttgggaggccgtggtgggcagatcacttgaggtcaggagttcgaggccagcctggccaacgtggtgaaaccccatgtctaccaaaaatataaaaagatagccgggcgtggtggcgcatgcctgtaatcccagctactcgggaggctgaggcaggagaattgcttgaacccgggaggcagaggcttcagtgagccgaaatagtgtgactgtactccagcctgggtgacagagtaagtctccgtctcaaaaagaaaaaaaaaaatgtggttcttttgtggaaagaggaatttgaacttgaataaacacttcttttgacaccttttaccagtggtctgaagcagaataaggaagaataagaaatgaatcttgactgttgacttattctgagaattggtgatgtgtaaagagagttggaatcttctacctgggtttttctcagggctaaatggaaaagcacagggcccagaaaggttggagttaatcattcacttaaaagcattaggaggaagtgtcaaagcatcagtcatgaatagattatgtctctctgactacagtcagaccatcaattcactaagaccttatactctgtaagtgttggtaaaggaagaaaactgctaaattgcatgttaccctttactagaaattcattcctttggcacagattttatttatttggggctgtttaatgtgtctgtaaatcatgaaatataaaagcaagattcagtgtagcagagttggtgcttcttctgacaagctaacttgaccatatttctttatctgtgctctaacatgtgtcatattgttttctttttgtaaaccataaaatgggtgaacttccaaaaatcaagggtcatgttttaaaatcatggaacttttagaaataccatatctgtatctctattcctgcattttataaatctgtaaaggaagaaaactgaaaggaagaactagactgagtcttacctttctctgacctaagataaactgataaaactttttacttgatatttggagaagtcattaactggattctagttaatttcccatattgggcagtttagaggagacccagccaaccaaattatgatctagcaaatttaacataggggaagagggatagtaaactatttttcagtagatttgcactttaaacttaggaactggatgttggtggaaaggacttccatagggcagatgggtaaatatctagcctgcacttggatgttagagaatcaaacctcacccttgctcgttctaaacccacatgagtagttaactgtcttttgacataatcagagtcaggatttccctttttccctacttgagtcgtcttccatgtctgttacatccaagatcatccctctgggggatgtgtcaagtagttctcctactcagaatagaagctttgcgaattatcattcccacctctagattttaaatgaatgtagagttgtctaacattatatgggtgggaggctctttgcctctgtgatcagtagggtacctgcctctgaggtgctactgcctggagggatcactcccatcaaaagactggtgagttggaagctaagagcacatgcgcatagccagctcctctcccaggctggcagtcatgattacgagcatcattccagaatctttggcttctagaaccaactccattctgaagaacattttaacatctatgaataccttggtaataatcttttatacacaggagttttgtagcatgactttatgactaaacttattgtgaattaagttatttagaaatgttgagtttctgaatgttattttgtgatttgtttcaaaatggtaataaattgtgttattttgtaaaaaaaaaaaaaagtatatttttggtacatgattattagttttagctaatatagagcaattatataaacttctagtgatattcagtccaaagaaattcagcctttggataacatgtaccatgcagtttgtgtggtgtgtgtgtgtgtgtgtgtgtgtgtgcacgtgcatgagagagagtgaaagagagaggtgttttttgttttgttttttttgagacggagtctcactctgttgcccaggctggagtgcactggcacaatctcggcttactgcaacctccacctcccgtgttcaagcgagtctcctgcctcagcctcccgagtactgggactacaggcgcacaccaccatgcttggctaatttttgtatttttagtagagacgaagtttcaccatgctggccaggttggtctcgaactcttgacctcgtgatctgcccgccacagcctcccaaagagctaggattacaggcacgagccaccgcgcacggccagaggcattcatttctttagctaagtttttttttcttagtaggtttttttctcccaggcttgtaactcttccccagttctttgggcactatttcaaattattaggcttctggaaagagtgcttccagggacagcaagttactactgcacttgaccattcctagtcctcacctgattaccagaaggtacgcaaggtaaaagttagctgataggccctgaattgagaaaaaggaatcaccaagcaatatccgtaacattacacattttgccagcacattttctatgctatcagctaaaacgtaattttggtcacaaaatagggctgtagtgtagtttctacttcttattccagttgtttgattatgaggatacatttcttgctgctgtcctccactaaacagcagacaaattgccaggtgtgctggctcatgcctgtaatcccagtgctttgggaggccaaggcaggagtttgagaccagcctaggcaacatcgtgagaccccatctctacaaaaaaaaaaaaagaaaaaaaaaattagttgggcatggcaatgccgcctgtggtcctagctactggggaggctgaggcaggattgcttgaacccagaagtttgaggttacagtgagctatgatcatgtcactgcaagaccctgtccctaaaaaaaggaaaaacaaatagaagacaaatttcaatttctgagtttatacaaagaaagccttaattcagatcataaatatcccattgttatttttagttcattgtttcctagaacaaaggatggacatttaggatcctcacattgatttatgtcatatatatgtattgcattgaatatatatatacgcatgtagatacatacaattgttatatataattaaaagtcagaatcttaggtgataactgtcagacctctgagcccaagctaagccatcgcatcccctgtgacttgcacgtatacatccagatggcctgaagtaactgaagatccacaaaagaagtaaaaatagccttaactgatgacattccaccattgtgatttgttcctgccccaccctaactgatcaatgtactttgtaatctcccccacccttaagaaggttctttttaattctccccacccttgagaatgtactttgtgagctccacccactgtctgcaaaacattgctcttaacttcagcgcctatcccaaaacctataagaactgatgataatccaccaccctttgctgactctcttttcggactcagcccgcctgcacccaggtgaaataaacagccatgttactcacacaaa

SEQ ID NO: 128572 - DNA, 526 bp, Homo sapiens
  Payload ID: 5165
  Gene Symbol: DNAL1
  Gene Name: dynein, axonemal, light chain 1
  ENST ID: ENST00000554113
  CDS Start-End: 356-526
gcggccgccacgcagtcccacaatgccccgctcgcaccaccctgagggcggagagaaaggaccgctgccggggatagggcttccgccgagagcgccgagaagtgcgcacgcgcactgaccccgcgggccctagcaaccagagcagtgacagtagcaaccgccggaatggaagctttcactgtctacaaactgcattgaaaaaattgccaacctgaatggcttaaaaaacttgaggatattatctttaggaagaaacaacataaagaacttaaatggactggaggcagtaggggacacattagaagaactgtggatctcctacaattttattgagaagttgaaagggatccacataatgaagaaattgaagattctctacatgtctaataacctggtaaaagactgggctgagtttgtgaagctggcagaactgccatgcctcgaagacctggtgtttgtaggcaatcccttggaagagaaacattctgctgagaataactggattgaagaagcaaccaagagagtg

SEQ ID NO: 128573 - DNA, 639 bp, Homo sapiens
  Payload ID: 5165
  Gene Symbol: DNAL1
  Gene Name: dynein, axonemal, light chain 1
  ENST ID: ENST00000559993
  CDS Start-End: 445-639
gaagagaaaactggccagaggccatctgaagccaaagagataaaactttatgcccagattccccctatagagaagatggatgcatccttgtccatgcttgctaattgcgagaagctttcactgtctacaaactgcattgaaaaaattgccaacctgaatggcttaaaaaacttgaggatattatctttaggaagaaacaacataaagaacttaaatggactgagatggggtttcaccgtagtagccaggatggtctcgatctcctgacctcatgatccgcctgcctcggcctcccaaagtgctgggattacaggcgtgagccaccacacctgggcaaaatttgatatttgtgatgttctaaataaattggaggcagtaggggacacattagaagaactgtggatctcctacaattttattgagaagttgaaagggatccacataatgaagaaattgaagattctctacatgtctaataacctggtaaaagactgggctgagtttgtgaagctggcagaactgccatgcctcgaagacctggtgtttgtaggcaatcccttggaagagaaacattctgctgagaataactggattgaagaagcaaccaagagagtgcccaaactgaaaaagctggatggt

SEQ ID NO: 128574 - DNA, 1504 bp, Homo sapiens
  Payload ID: 5166
  Gene Symbol: DNAL4
  Gene Name: dynein, axonemal, light chain 4
  Uniprot ID: O96015
  ENST ID: ENST00000216068
  CDS Start-End: 246-563
gggcaggacttccttgctggttgctaagacactcttgtttcgctccttgacaaccctggcgggggttcgctggctgcggccccggctccggcccccgcaggagcagcaccccccggggaaagacattttctgctcccaccgagttggcagggcctgcttcctgaatctcctgggtgtgtcttaactgccagtcccagcacctcctgaaagccccactctcctccagtggtcacagtggaaggatcatgggagaaacagaagggaagaaagatgaggctgattataagcgactgcagaccttccctctggtcaggcactcggacatgccagaggagatgcgcgtggagaccatggagctatgtgtcacagcctgtgagaaattctccaacaacaacgagagcgccgccaagatgatcaaagagacaatggacaagaagttcggctcctcctggcacgtggtgatcggcgagggctttgggtttgagatcacccacgaggtgaagaacctcctctacctgtacttcgggggcaccctggctgtgtgcgtctggaagtgctcctgacactctgtcccctgccccgtcccctgcagggccttttcctgccactcatctggggtggggagcagccctaggcaggtcctggtttttccaaggagagttggggtcttttctttttgtctttgtgtaccagtttcctgagccacgcccagtgtgtgaacttgacatctccatccccaggctctcaaccgtctccctcggagtctcagggtgtggacggggcagcgggcatgggtctgtgtgggagacgtggggtggggcggtgtgacagggtagaggaggtgggagatgagatcttccgcacaggaacacgccagtccccctttctccagggctgccttccccttgcatcctgggagccccactgccctgccatccccagtactgccgggaagtgtcggccgtccttgtcattagtggtcatatgaaaatggccccaagaaggagatgattctttcaagggacacaggcagcttctctccttgtcctctggggaggtgctgacccctcagaaaccccttcccccaacttgaccccaggctgaacagaccactgcatctcactgggccagcagcccccccagcccccagccttggtggggaccaagcagcctttcccgtcccctcctcgacccgtacagttgagagccaggggctggtgtgtgggagctgctacctggcagtttctcgaggggtcaccgagcctctggtgggacacctgggcaggagtgctctcaccacgaggctgcttccgcagggaaccctggcctgcccgcgacttcgcatcagggaccgcatgctgatttgtactgctctctgctgggttttctatgttcttttcgagtgtgggaaaagggttttagtagaagggtgaatcgtattttacacagcggtcttatttatataaatgtcttggtttttacaattaaaatgaccaaaaactga

SEQ ID NO: 128575 - DNA, 631 bp, Homo sapiens
  Payload ID: 5166
  Gene Symbol: DNAL4
  Gene Name: dynein, axonemal, light chain 4
  ENST ID: ENST00000406199
  CDS Start-End: 271-477
aaattctcgtcaacgtccggtgagggggcaggacttccttgctggttgctaagacactcttgtttcgctccttgacaaccctggcgggggttcgctggctgcggccccggctccggcccccgcaggagcagcaccccccggggaaagacattttctgctcccaccgagttggcagggcctgcttcctgaatctcctgggtgtgtcttaactgccagtcccagcacctcctgaaagccccactctcctccagtggtcacagtggaaggatcatgggagaaacagaagggaagaaagatgaggctgattataagcgactgcagaccttccctctggtcaggcactcggacatgccagaggagatgcgcgtggagaccatggagctatgtgtcacagcctgtgagaaattctccaacaacaacgaggtattgccagcagtgcaggcggcccctcgtgcttttgatggcccctgtgggtgaataaagtggcccctgttccctgcagttggctccagacagtactgctaggatgaggccagagccttccttggaagcattcagtctggggaaagtcagtgagtgagaggctggcgctgactccaggcactgacggtcacacccagccctagaggag

SEQ ID NO: 128576 - DNA, 2649 bp, Homo sapiens
  Payload ID: 5167
  Gene Symbol: DNALI1
  Gene Name: dynein, axonemal, light intermediate chain 1
  Uniprot ID: O14645
  ENST ID: ENST00000296218
  CDS Start-End: 11-853
ggcggtttccatggtgacggcaaacaaggcccacactggacagggcagctgctgggttgctactctcgcctccgccatgattccgcccgcagactctttgctcaagtacgacaccccagtgctggtgagccggaacacggagaaacggagccccaaggctcggctactgaaagtcagcccccagcagcctggaccttcaggttcagccccacagccacccaagaccaagctcccctcaactccctgtgtcccagatcctacaaagcaggcagaagaaatcttgaatgccatactacccccaagggagtgggtggaagacacgcagctatggatccagcaggtgtccagcacccctagcaccaggatggacgtggtgcacctccaggagcagttagacttaaagctgcagcagcggcaggccagggaaacaggcatctgccctgtccgcagggaactctactcacagtgttttgatgagttgatccgggaggtcaccatcaactgtgcggagagggggctgctgctgctgcgagtccgggacgagatccgcatgaccatcgctgcctaccagaccctgtacgagagcagcgtggcgtttggcatgaggaaggcactgcaggctgagcaggggaagtcagacatggagaggaaaatcgcagaattggagacggaaaagagagacctggagaggcaagtgaacgagcagaaggcaaaatgtgaagccactgagaagcgggagagcgagaggcggcaggtggaggagaagaagcacaatgaggagattcagttcctgaagcgaacaaatcagcagctgaaggcccaactggaaggcattattgcaccaaagaagtgataatttccacatgattaatttccaacaagacacttgggagttatttactgtgttcctctggcagccaataaaatcatcataagccctttgtaataaaaagctagtttcctgagtgaacaagccataacctcccctaaacaccacctaggtatttgttagaagtcacactattactccaatgtcatcagacacctaaggtctgccagccaggctcctggctgggcaatggaagatggtgtggccctgttagtctccgtgtgtggcttactagccagccttgggaactgccaactcaaattctaagaaagccactgctttctcatcatcactctataccaatacttatttctggccaaatgaatctgcttctctgcccctcaaacttttagttcacaattcatcttctaccttaacttgggcttcttgggcctctggccttccttacttaatgtcttcttttccctactctaatgcatttctaactcactttggagctttggttttctaatgtattatccccacttgccagtcaactggaccccttcctcctcggtttcagactgcctacattaggaaacaatggcagtcaaacccatggctttggagaaagtaaatgtttgccagaaaggaatactagtcacagtggcctttgtgagttgtctgcaactcagctcttcccccagcacagatctgttccccttatcctgcagaaaatcaagccctgactctgcactccccgaagtagtgatgttaattaacaactgaagaggtaactaaatctcacatgcaggtctaatgactaataattggagtacggctgctagacaactgcattttagtatttctcttccattctcctggttttgtagacccagaagattgaatgagtgacataaatctttagttcggggcaagccagggtgggctagggtggtaagctggaggacttcatccttcagttaggctgcacaagtaacattacctaaaaggcactaacatgctcaggttccccagaaagaggcgtaagaagggcctctccttagcagagcttccacctgccatccgtcttgggttcagtgagcttcaaggctcacaatggaagcactgtcatttccccagaaaagctgtgttccctatgctgaacacaccatacacattctcatctggaatctaaggagcagcttttaccctgatccagtatcctgaggaattttaagcctccactcaaatgacctgcctgtgttgtcatttccatgggaaagaactctttccacgagatctgctagttccaggcctctaagacaggaacgtatgtgccataagtgggtctacttcacagactcaatgaggcagaaattattgtagttttctcctatttcttctgcacccaactttctccttgtatttcaaaggccaggccatgtacactaacgtccttgaaatttgcagttctgtatgcttctattccaaatcattcattaccaataaaaacgaaataccaccctttccattttatagacctcatcccctatttctgtcagacagttatatgacagggtgactgtggaacctcttagttcatccaaagtctacctgaagtgctagactttcagactcttatcactgaaatccttaaggttgaggaggctttatttccctagcactggtgaagggcttcaactgtcaaacctcagaacaaatgcattagggccttagaaatgtcaatggggcaggaagaaaacacaatttctaactgcctgtttttgtataatttaataaaaaccttttaaacatta

SEQ ID NO: 128577 - DNA, 14333 bp, Homo sapiens
  Payload ID: 5168
  Gene Symbol: DYNC1H1
  Gene Name: dynein, cytoplasmic 1, heavy chain 1
  Uniprot ID: Q14204
  ENST ID: ENST00000360184
  CDS Start-End: 165-14105
ctggcagtggctgcctttagggcggagccggctcccgctctcctcagtctgcggtgggctagcggacggtccggcttccggcggccgtttctgtctcttgctggctgtctcgctgagtcgcggccgccttctcatcgctcctggaaggtcccgagcgcgacaccatgtcggagcccgggggcggcggcggcgaggacggctcggccggattggaagtgtcggccgtgcagaatgtggcggacgtgtcggtgctgcagaagcacctgcgcaagctggtgccgctgctgctggaggacggcggcgaggcgccggccgcgctggaggcggcgctggaggagaagagcgccctggagcagatgcgcaagttcctttcggacccgcaggtccacacggtgctggtggagcgctccacgctcaaagaggacgtcggtgatgaaggagaagaagaaaaagaattcatttcctataacatcaacatagacattcattatggggttaaatccaatagcttggcattcattaaacgtactcccgtgattgatgcagataaacccgtgtcttctcagctccgggtccttacactcagtgaagactcgccctacgaaactttgcattctttcattagcaatgcagtggctcctttttttaagtcctacattagagagtctggcaaggcagacagggatggtgataaaatggctccttcagttgaaaagaagattgcagaactcgaaatgggactccttcacttgcagcaaaatattgaaattccggagatcagcctgccgattcatccaatgatcacaaatgttgcaaaacagtgttatgagcgtggagaaaagccaaaagttacagactttggtgataaggttgaagacccaacatttcttaatcagttacaatctggagttaaccgctggatccgagaaattcaaaaagtgaccaaactggatcgagatcctgcatcaggaactgccttacaggaaattagtttttggctaaacttggaacgtgcgttataccgcatccaggagaaacgggagagcccggaagttctcctgactctggatatcttgaaacatggcaagcgcttccatgccaccgtcagttttgacactgacacaggtctaaaacaggctttggaaactgtgaatgactacaatcctctgatgaaagatttccctctgaatgatttgctgtctgccacggagctggacaaaataagacaggcgcttgttgccattttcacacatttgagaaagatccgaaacacaaaatatcctattcagagggcactgcgtttggtggaggcaatttcaagagacttgagttctcaattactcaaagtattgggcactaggaaattgatgcatgttgcttatgaagaatttgaaaaagttatggtagcatgctttgaagtttttcagacttgggatgatgagtatgagaaacttcaggtattgttgagagacatcgtcaaaagaaaaagggaagaaaatctgaagatggtgtggcgtatcaaccctgcccacaggaagctgcaggcccgccttgaccagatgagaaaatttagacgccagcatgaacagctaagagctgttatcgtcagggtcctgaggccacaggtcacggcagttgcacaacagaatcaaggagaggtccctgaaccccaagatatgaaagtggctgaggttctctttgatgctgcagatgcaaatgccattgaggaagtaaaccttgcttatgagaacgtcaaggaagtggatggactggatgtttccaaagagggcacggaagcctgggaggctgctatgaagaggtacgatgagaggatcgacagagtggagacccggatcaccgctcgccttcgggatcagcttggcacagccaagaatgccaacgagatgtttaggattttctccaggtttaatgcactgtttgtcaggcctcacatccgtggggccattcgcgaataccagacccagctgatccagcgcgtgaaagatgacattgagtctcttcacgacaagttcaaggtccagtacccacagagtcaggcttgtaagatgagtcacgttcgtgacttgccccctgtgtcagggtctatcatctgggctaaacagatcgacaggcagctgacggcctacatgaagcgggtggaagatgtccttggcaagggctgggagaatcacgtggaggggcagaagctgaagcaggatggagacagcttccgcatgaagctcaacacgcaggagatctttgatgactgggcaaggaaggtgcagcagcgcaacctcggtgtctcggggcgcattttcaccatcgaaagtactcgggttcggggccgaactggaaatgtgcttaagctgaaagttaactttcttcctgagattatcacactatccaaagaagtccggaacctcaaatggcttggtttccgcgtcccactggcgattgtgaacaaagcccatcaagcaaaccagctttacccgtttgccatctcactgatcgagagcgttcgtacctatgaacggacctgcgagaaggtggaggagcggaacaccatttcccttttggtggctggcttgaaaaaggaagtgcaggccctgatcgcagaaggcattgcgttggtgtgggagtcctacaaacttgacccatatgtacagcgcttagcagagactgtcttcaacttccaagaaaaggtggatgatctgctgatcattgaagaaaaaatagacctagaagtccgttccttggaaacttgtatgtatgaccataagacattctcggaaatcttgaacagagtccagaaagcagtggatgacttaaatctgcactcctattccaatttgcccatctgggtcaacaagcttgacatggagattgaaagaatattgggcgtccgtctgcaagctggcctgagagcttggacgcaggttcttcttggacaagctgaagataaagcagaagttgacatggacacagatgctccacaagttagtcacaagcctggtggagagccaaagatcaaaaatgtcgttcatgagctaagaataaccaatcaggtaatctacttgaatccaccaattgaagagtgcagatacaagctgtatcaggaaatgtttgcctggaagatggttgtactgtctctccccaggatccagagtcagaggtaccaggtgggtgtacattacgaattgactgaggaagagaaattctatcggaatgctttaacacggatgcctgatggccctgttgccctggaagagtcgtattctgctgtcatgggcattgtatctgaagttgaacagtatgtcaaggtttggcttcagtatcagtgtttatgggatatgcaagctgaaaacatctataacagacttggagaagatctcaacaaatggcaggctctcctggtccaaataaggaaggccagaggaacctttgacaatgcagaaaccaagaaagagtttggaccagtagttatagattatggcaaggtacaatctaaggtgaacttgaaatatgactcttggcataaggaggttcttagcaaatttgggcagatgctaggatcaaacatgacggaattccattcccagatctcaaagtcccgccaagagttggagcagcactcagtagacacggccagcacctccgatgcagtgaccttcatcacctatgtgcagtctttgaaacggaagatcaagcagtttgagaagcaagttgagctctaccgcaatggccagcgcttactggaaaagcaaaggttccagttcccaccttcctggctttatattgacaacatcgagggagagtggggagccttcaatgacatcatgcggcgaaaggactctgccattcagcagcaggtggcaaacctgcaaatgaagattgtccaggaggatcgggccgtggaaagccgcaccaccgacctgctgactgactgggagaagaccaagcctgtcacgggcaaccttcgcccagaagaggcacttcaggctctcaccatatatgaggggaagtttggtaggctgaaggacgacagagagaagtgtgcaaaggccaaggaggcgctggaattgacagatactgggcttctcagtggcagtgaagagcgcgtgcaggtggccttagaagaattacaggacctcaaaggcgtttggtcagaactttctaaggtttgggagcaaatcgatcagatgaaggagcaaccctgggtttcagtacagcctcgaaagcttcgacaaaatttggatgccctcctgaaccagctgaaaagcttccctgcccggttgcgacagtatgcgtcctatgagtttgttcagaggcttctgaaaggttacatgaagataaatatgctggtgattgaactgaaatccgaagcacttaaagaccgccattggaaacagctcatgaaaaggcttcacgttaattgggttgtttctgagctaacccttggccaaatctgggatgttgacttgcagaaaaatgaagcgattgtcaaggatgtactgcttgtggcacaaggggagatggctttggaagaatttttgaagcagataagagaagtgtggaatacttatgaactagacttggttaattatcagaacaagtgccgcttgatccgtggctgggatgacctcttcaacaaggtcaaagaacacatcaacagcgtctcggccatgaagctctctccgtattacaaggtttttgaagaggatgctctcagctgggaagataagctgaacaggatcatggctctctttgatgtgtggattgatgtgcagaggcggtgggtctacctggaaggtatcttcacaggcagtgcagatatcaagcacctgctgccagtggaaacccagcggtttcagagcatcagcactgagtttttggctctaatgaaaaaagtgtccaagtctccccttgttatggatgttctgaacatccagggagtacagaggtctctggaaagattggcagacctgctaggaaagatccagaaagcattgggagaatatctggaaagagagcggtcatctttccccaggttctattttgtgggtgatgaagatttgcttgaaatcattggaaacagcaagaatgtcgctaaattacagaaacacttcaagaagatgtttgctggagtttcgagcatcatcctgaacgaggataactctgttgttttgggtatttcatctcgggaaggagaggaggttatgtttaaaactcctgtgtcaattactgaacatcccaaaatcaatgagtggctcacattggtagaaaaggagatgagagtcaccctggccaaactgcttgctgagtctgttacggaagttgagatttttggtaaagcaacttcaattgacccaaatacctacatcacttggattgataaataccaggcccagcttgtggttttgtcagcccagatagcctggtctgagaacgtggagaccgcactgagcagcatgggcggaggtggagatgccgcgcccttgcactctgtgctgagcaatgtggaggtcaccctcaatgtgttagcagactctgtcctcatggagcagcccccactccgaaggcggaagctagaacacttgattacagagttggttcaccagagagatgttacaaggtccttgatcaaaagcaagattgacaacgccaaatcttttgaatggctcagccagatgcgattttactttgaccctaagcaaactgatgtgttacagcagttgtcaattcaaatggcaaatgccaaatttaactatggctttgagtacctgggtgttcaggacaaactggtccagacccccctcactgaccgctgctatttgacaatgacacaagccttggaggccaggctggggggttccccatttggacctgctggaactgggaaaacagagtctgtcaaagctcttggccatcagcttggacggtttgttttagttttcaactgtgatgaaacctttgatttccaggcaatgggccggatctttgtgggcctttgccaggtgggtgcctggggctgctttgacgagttcaaccgcctggaggagcggatgctctcggctgtgtcccagcaggtgcagtgcatacaggaagcactgcgtgaacattccaaccccaactacgacaagacctctgcccccattacttgtgagctgctgaacaaacaagtcaaggtgagcccggacatggccatcttcatcaccatgaaccctggctacgcgggccggtctaaccttcctgacaacttgaagaagctgttccggagcttggccatgaccaagcccgaccggcagttaatcgcccaggtcatgctgtactcacagggtttccgcactgctgaagtgcttgccaacaaaatcgtcccgttttttaaactatgcgatgagcagctctcttcccaaagccattatgacttcggtcttcgggctttgaagagtgtgctggtgagtgcaggcaatgtgaagagagagagaatccagaagataaagagggagaaagaggaacgaggggaagcagttgatgaaggagaaattgctgaaaatctccctgaacaagagattctgatacagagcgtctgtgagacgatggtgccaaagctggtggcagaggacatcccgctgctcttcagcctcctgtcggacgtgttccctggagtccagtatcacaggggtgagatgactgcccttcgagaggagctgaagaaagtgtgtcaggagatgtatttgacatatggagatggagaagaagttggtggaatgtgggttgaaaaggttctccagctctatcagatcacccagatcaatcatggcctgatgatggtggggccctcgggaagtgggaagagcatggcctggcgtgtcctgctgaaggcattggagagactcgagggtgtggaaggtgtggcccatatcatcgaccccaaggccatcagcaaagaccacctctacggaaccctggaccccaacaccagggaatggacagatgggctcttcacacacgtgctgagaaagatcatcgacagcgtgagaggcgagctgcagaagcgccagtggatcgtcttcgatggcgatgtggatccagagtgggttgagaacttgaactcagtgctggatgacaataagctcctaactttgcccaatggagagcgcctcagtcttccacccaatgtgagaataatgtttgaggtacaggacttgaaatacgcgaccttggccacagtgtcgcgctgcggcatggtctggttcagtgaggatgtgctgagcaccgacatgatcttcaacaacttcctggccaggctgcgcagcatcccgctggatgaaggggaggatgaggcacagcggcggcgtaagggcaaagaggatgagggggaggaggccgcttcccccatgctgcagatccaaagagatgcagctacgatcatgcaaccgtacttcacgtccaacggcctggtcaccaaggcgctagagcacgccttccagctggagcacatcatggacctaacacgcctgcgctgcctgggctcgctcttctccatgctgcaccaggcctgccgcaacgtggcgcagtataacgccaaccatcccgacttccccatgcagatcgagcagctggagcgctacattcagcgatatctggtttatgccatactctggtccctgtctggagacagccggctaaaaatgagagcagagctgggtgaatacatcagaagaatcacgaccgtgcctctgcccactgcgcccaacatacccattatcgattatgaggtgtccatcagcggagaatggtctccgtggcaggccaaggtgcctcagattgaagtggagacgcacaaggtggcagcccctgatgtcgtcgtgccaacgctggacacagtccgccacgaagccctcttgtacacttggctggccgaacacaagcccctggtcttgtgtggccctcctgggtctggcaagaccatgacactcttcagcgccctccgggccttgcctgacatggaggtggtgggtctcaacttctccagtgctactactccagagctgcttctgaagacttttgatcactactgcgagtacaggcgcacacctaatggggtggttttggctcctgttcaacttggaaagtggctggtgttgttctgtgatgaaatcaacttgccagatatggataaatatgggacccagagggtcatatccttcatcagacagatggtggagcacggaggcttttaccgtacctcagatcaaacatgggtgaagctggagagaatccagtttgttggggcttgtaatccccccacagaccctggaagaaagcccctctcacacaggttcctgcgccacgtgcctgtcgtgtatgtggattacccgggccccgcctccctcacacagatctacggcaccttcaaccgcgccatgctgaggctcattccatccctgcggacgtatgcagagccgctcactgctgccatggtggagttctacaccatgtctcaggagagattcacccaggatacacaacctcactatatctattcaccccgtgaaatgactaggtgggtgagaggcatctttgaagcgctgagacctctggagaccctgcctgttgaaggcctcattcggatttgggcacatgaagctctgcgtctcttccaagatagactcgtagaggatgaggagaggcgttggactgatgagaacatcgacacggttgctctgaagcacttccctaacatcgacagagagaaggcaatgagccgacccatcttgtacagcaactggctgtcaaaggattacatcccagtagaccaagaagagttaagagattatgtcaaagctaggctgaaggtcttttatgaagaagaacttgatgttccgctggtgctgtttaatgaagtcctagaccacgtgctgaggattgacagaatattccgtcaacctcaaggccacttgcttctgattggtgttagtggagcaggaaaaactaccctgtctcgtttcgtcgcctggatgaacggtttgagtgtgtaccagattaaggtccataggaagtacacaggggaagactttgatgaagatctacggacagtgttgagacgttctggctgtaaaaatgaaaagatagcatttataatggatgaatctaatgtgttagattctggattcctggagcgaatgaatacccttctggccaatggagaggtgcctggtctctttgaaggagacgagtatgccaccttgatgacgcagtgcaaagagggggcacagaaggaaggcctgatgctggactcgcacgaggagctctacaagtggttcactagccaggttatccgcaacctccacgtcgtgttcaccatgaacccgtcctcggagggactcaaggaccgggcagctacatcaccagcacttttcaacaggtgtgtgttgaattggtttggagactggtccaccgaagcactgtatcaggttggcaaagaattcacaagtaagatggatctggagaagccaaattacatcgtgcctgattacatgccagttgtgtatgataagctgccgcagccaccatcccatcgggaagccattgtgaacagctgtgtgtttgttcatcagactcttcaccaggcgaatgctcggctagcaaagcgaggcggcagaacgatggccatcacccctcgccactacctggacttcatcaatcactatgccaacctgttccacgagaagcggagcgagctggaggagcagcagatgcacttgaacgtggggctcaggaagatcaaagagacagtcgaccaggtagaagaactgcgtcgtgacttgaggataaagagccaagagctggaggtgaagaatgcagcagccaatgacaagctgaaaaagatggtgaaagaccagcaggaggctgaaaagaagaaggttatgagccaagaaatccaggaacagctgcataagcagcaggaggtaattgcagacaaacagatgagtgtcaaagaagatcttgataaggtggaacctgccgtcattgaggcccagaatgctgtgaagtcgatcaagaagcagcacctggtggaggtgaggtccatggccaaccctcctgctgctgtgaagctggcgctggagtccatctgcctgctgctgggggaaagcaccacagactggaagcagatccgctccatcatcatgcgggagaacttcatccccaccatcgtcaacttctctgcagaggagatcagtgacgccataagggagaagatgaagaaaaattacatgtccaatccaagttacaattatgaaattgtgaatcgggcttccctggcttgcggccctatggtgaaatgggcaattgcacagcttaactatgcagacatgttaaagagagtggagcccctacgcaatgagctgcagaagctggaagatgacgccaaggacaaccagcagaaggccaacgaggtggagcagatgatccgagacctggaagccagcatcgcccgctacaaggaggaatacgccgtcctgatctcagaggcccaggccatcaaggcagacctggcagctgtcgaggcaaaagtaaaccggagcactgctcttctgaagagcttgtctgctgaacgtgaacgatgggaaaaaacaagtgaaactttcaaaaaccagatgtccaccattgctggggactgtctcttgtcagctgcgttcattgcctacgcgggttactttgaccagcagatgcgtcagaacttgttcactacctggtcccatcacctacagcaagccaacatccagttccgtacagatattgccaggacggaatacctttccaatgctgatgagcgtcttcgctggcaggccagctccttgcctgctgatgacctttgcacagaaaatgccatcatgctgaaacgattcaataggtatccgctgatcattgacccctctggacaggccacagaattcattatgaatgaatataaggatcgtaagatcacacggaccagcttcctggatgacgccttcagaaagaacttagagagtgcactgagattcggtaacccccttctggtccaggatgtggaaagctacgatccagttttgaacccggtgctgaaccgtgaagtgcggcgaacaggggggagagtgctgatcactctcggggaccaggacatagacctgtcgccatcgtttgtcatcttcctgtccacccgggatccaactgtcgagttcccaccagatctctgttcccgggttacttttgtaaacttcacagttacccgtagcagtttacaaagccagtgtctaaatgaagtacttaaagcagaaagacctgatgtggacgagaaacgatctgatcttcttaaacttcaaggggaatttcagctccgtttgcgtcagctggaaaaatctctactacaagctctgaacgaggtgaaagggcgcattttggatgacgacacgatcataaccactctggagaacctgaagagagaggctgcagaggtcaccaggaaagttgaggagacggacattgtcatgcaggaggtggagaccgtgtcccagcagtacctcccgctctccaccgcctgcagcagcatctacttcaccatggagtccctcaagcagatacacttcttgtaccagtactccctccagtttttcctggacatttatcacaacgtcctatacgagaacccgaacctgaagggtgtcaccgaccacacacagcgcctgtccattataacaaaggacctcttccaggtggcgtttaaccgagtggctcgaggcatgctgcatcaggaccacattacctttgccatgctgctggcaagaatcaaactgaagggcaccgtgggggagcccacctacgatgcagaattccagcacttcttgagaggaaatgagattgtcctgagtgctggctccacccccaggatccagggcctgactgtggagcaggcggaggcggtggtgaggctgagctgccttcccgcgtttaaggacttgattgcaaaggttcaggcagacgagcaatttggcatctggctggacagcagctccccggagcagactgtgccctacctctggagtgaagaaacacctgcaacacccattggccaggccatccaccgcctgctcctgatccaggctttccggcccgatcgcctgttggccatggcccacatgtttgtttcaacaaaccttggggagtctttcatgtccatcatggagcagccgctcgacctgacccacattgtgggcacagaggtgaagcccaacactcctgtcttaatgtgctctgtgcctggttatgatgccagtggacatgtcgaggaccttgcagccgagcagaacacgcagatcacttcaattgcaatcggctctgcagaaggctttaaccaagcagataaggcaataaacaccgctgtaaagtcgggcaggtgggtgatgctgaagaatgtgcatctggccccagggtggctgatgcagctggagaagaagttgcattccctgcagccgcatgcctgcttccgactcttcctcaccatggagatcaaccccaaggtgcctgtgaatctgctccgtgcgggccgcatctttgtgttcgagccaccgccaggggtgaaggccaacatgctgaggacgttcagcagcattcccgtctcacggatatgcaagtctcccaacgagcgtgcccgcttgtacttcctgctggcctggtttcatgcgatcatccaagaacgcttacgatacgcaccactggggtggtcaaagaagtatgaatttggagagtctgacctgcggtcagcttgcgatacggtggacacgtggctggatgacacggccaagggcaggcagaacatctcaccggataagatcccgtggtctgcactaaagaccttaatggcccagtccatttatggcgggcgcgtggacaacgagtttgaccagcgtctgctcaacaccttcctggagcgcctgttcacaaccaggagtttcgacagtgagtttaagctggcatgcaaggtcgacggacataaagacattcaaatgccagatggcatcaggcgagaggagtttgtgcagtgggtggagttgctccccgacacccagacgccctcctggctgggcctgcccaacaacgccgagagagtcctccttaccacacagggtgtggacatgatcagtaaaatgctgaagatgcagatgttggaggatgaggacgacctggcctacgcagagactgagaagaagacgaggacagactccacgtccgacgggcgccctgcctggatgcggacactgcacaccaccgcgtccaactggctgcacctcatcccccagacgctgagccacctcaagcgcaccgtggagaatatcaaggatcctttgttcaggttctttgagagagaagtgaagatgggcgcaaagctgcttcaggacgttcgccaggaccttgcagatgtcgtccaggtgtgcgaaggaaagaagaagcagaccaactacttgcgcacgctgatcaacgagctagtgaaagggatcttgcctcggagctggtcccactacacggtgcctgccggcatgaccgtcatccagtgggtgtccgacttcagcgagaggatcaaacagctgcagaacatctcactggcagctgcatctggtggcgccaaggagctaaagaacatccacgtgtgcctgggtggcctgttcgtgcctgaggcgtacatcactgccaccaggcagtatgtggcccaggccaacagctggtccctggaggagctctgcctggaagtcaacgtcaccacctcacagggcgccacccttgacgcttgcagcttcggagtcacgggtttgaaacttcaaggggccacgtgcaacaacaacaagctgtcactgtccaatgccatctcaaccgcccttcccctgacgcagctgcgctgggtcaagcagacaaacaccgagaagaaggccagtgtggtaaccttacctgtctacctgaacttcacccgtgcagacctcatcttcaccgtggacttcgaaattgctacaaaggaggatcctcgcagcttctacgagcggggtgtcgcagtcttgtgcacagagtaaacttttctagctgcccctttctgtaatagtgaaagttggtatttaacatttattcatttttaaaatatttggaaggtctgagcttgtgaaaagaaagtggttggtctgaggttggaggaagctgaatggaatctgacggttgggagtggtggaaattggaaggataccaggaggtatttgggaaggccaatggcgtggctcctttgaggaaataaaacactaagcatg

SEQ ID NO: 128578 - DNA, 539 bp, Homo sapiens
  Payload ID: 5168
  Gene Symbol: DYNC1H1
  Gene Name: dynein, cytoplasmic 1, heavy chain 1
  ENST ID: ENST00000553423
  CDS Start-End: 1-539
tcagaacttgttcactacctggtcccatcacctacagcaagccaacatccagttccgtacagatattgccaggacggaatacctttccaatgctgatgagcgtcttcgctggcaggccagctccttgcctgctgatgacctttgcacagaaaatgccatcatgctgaaacgattcaataggtatccgctgatcattgacccctctggacaggccacagaattcattatgaatgaatataaggatcgtaagatcacacggaccagcttcctggatgacgccttcagaaagaacttagagagtgcactgagattcggtaacccccttctggtccaggtcgagttcccaccagatctctgttcccgggttacttttgtaaacttcacagttacccgtagcagtttacaaagccagtgtctaaatgaagtacttaaagcagaaagacctgatgtggacgagaaacgatctgatcttcttaaacttcaaggggaatttcagctccgtttgcgtcagctggaaaaatctctactacaagctctga

SEQ ID NO: 128579 - DNA, 2950 bp, Homo sapiens
  Payload ID: 5169
  Gene Symbol: DYNC1I1
  Gene Name: dynein, cytoplasmic 1, intermediate chain 1
  Uniprot ID: O14576
  ENST ID: ENST00000324972
  CDS Start-End: 194-2131
ctgggagagaggaagtgatcgctcccggaggagcgcgagccgagcggccggcgcagcgtgagacagcacatcctgcccgcgccggccccgccaccttcgggagccgcctgcaccaacgctgccgccgcccaggagccgccgccggctcggggagcccagttccgccgctgccgagcgcgtccaggaaaccaacatgtctgacaaaagtgacttaaaagctgagctagagcgcaaaaagcagcgcttagcacagataagagaagagaagaaacggaaggaagaggagaggaaaaagaaagaggctgatatgcagcagaagaaagaacccgttcaggacgactctgatctggatcgcaaacgacgagagacagaggctttgctgcaaagcattggtatctcaccggagccgcctctagtgcagccgctgcattttttaacatgggatacctgttattttcattatttagtcccaacccctatgtctccctcctcgaaatcagtgagcactcccagtgaagctggaagccaagactcaggcgatctggggccattaacaaggaccctgcagtgggacacagacccctcagtgctccagctgcagtcagactcagaacttggaagaagactgcataaactgggcgtgtcaaaggtcacccaagtggatttcctgccaagggaagtagtgtcctactcaaaggagacccagactcctcttgccacgcatcagtctgaagaggatgaggaagatgaggaaatggtggaatctaaagttggccaggactcagaactggaaaatcaggacaaaaaacaggaagtgaaggaagcccctccaagagagttgacagaggaagaaaaacagcagatccttcattcagaggaatttctcatcttttttgaccggacaatacgggtaattgaaagagccctggctgaagattccgacatcttttttgactacagcggccgagagttagaggaaaaagatggggatgttcaggctggagccaatctttctttcaatcgtcagttctatgatgaacattggtccaagcatcgagtggtcacttgtatggactggtccctccagtaccctgagctgatggtggcttcttacaacaacaatgaagatgctccccatgaaccagatggagtggccttggtttggaacatgaagtttaagaaaaccacaccagaatacgtcttccactgtcagtcctctgtgatgtcggtctgcttcgcccgtttccatcctaacttggtggttggtgggacttactcgggccagattgtcctctgggacaatcgcagtcatcgaaggactccagtgcagcggacacccttatcagctgctgcacacacgcatcccgtgtactgtgtaaatgttgttgggacccagaatgctcataacctcatcactgtctccactgatggcaaaatgtgttcctggagcctggacatgctctcaactccacaggagagcatggagctggtgtacaataagtccaagcctgtcgctgttaccggaatggctttcccaacgggagacgtcaataacttcgtggttggcagtgaggaaggtacagtctacacggcttgtcgtcatggaagcaaagcaggtattggtgaggtctttgaaggtcaccaagggccagtgacaggaattaactgccacatggcagtgggcccaatcgacttttctcacctgtttgtcacatcatcatttgactggactgtcaaactgtggaccaccaagcacaacaagccgctctactcctttgaagacaatgcagactatgtgtacgatgtcatgtggtcccccgtgcatcctgcgctttttgcctgcgtggacgggatggggcgcttggacctctggaacctcaacaatgacaccgaggttccaacagcaagtgtggccattgagggggcatccgccctaaaccgtgttcgttgggcccaagctggcaaagaagttgctgttggggactcggaaggccgtatttgggtctatgacgttggagagcttgcagttccccacaatgatgaatggacccgatttgccaggacccttgtggaaattcgtgctaacagagctgatagcgaggaggaaggcactgttgagttatctgcctagtggaaatgagccacccccactgcagcccccacctttgtgtcctagagctcagcgtctgcagtcaagtctcttgtattcggtgtccattcagtatcagtattgctgtgatattttgggtgccatattgtgccagctttgctccaagtattctaaatgtgtcccatcatgctttccactgacccaaaattcaccacagcatttctatctttatatttctgtctcaaaaatgaagagaagggggttatgggttaagttgctgccttttaactactttgtagctgtatttaatagctggaaacctctggttaaatttgtgcttacatgcactcctggcatagtcctattaaatccatatgaagccagatatgattgggtgcagatgtggtgttcctcatattatggtacagggccaaagacttgagacgtggtgttttacatggtgactcacattatgaatggatttactagaagaacattgctgctccttatttattgtagtgtgctgcatggaacgtatttatttgaaagcattaaaataaatgatcctagagcatgtgcataatgagaggactgtattctctctgctgctgttgaggttatattaagttccacatagcaattacagtatgccagttccactgaagacatgaaatctttagaggtttcttgcagtgaacgaaatgaattttaatgcctattatttctgggtactttaacaatatttcaaatatcattgaccactaatacttctcactgaagctaacacagtctgacaaaagtctatggttcctaaatatgacatcagtgttgccaataaaa

SEQ ID NO: 128580 - DNA, 2843 bp, Homo sapiens
  Payload ID: 5169
  Gene Symbol: DYNC1I1
  Gene Name: dynein, cytoplasmic 1, intermediate chain 1
  Uniprot ID: O14576
  ENST ID: ENST00000359388
  CDS Start-End: 186-2012
gaggaagtgatcgctcccggaggagcgcgagccgagcggccggcgcagcgtgagacagcacatcctgcccgcgccggccccgccaccttcgggagccgcctgcaccaacgctgccgccgcccaggagccgccgccggctcggggagcccagttccgccgctgccgagcgcgtccaggaaaccaacatgtctgacaaaagtgacttaaaagctgagctagagcgcaaaaagcagcgcttagcacagataagagaagagaagaaacggaaggaagaggagaggaaaaagaaagaggctgatatgcagcagaagaaagaacccgttcaggacgactctgatctggatcgcaaacgacgagagacagaggctttgctgcaaagcattggtatctcaccggagccgcctctagtcccaacccctatgtctccctcctcgaaatcagtgagcactcccagtgaagctggaagccaagactcaggcgatctggggccattaacaagaagaagactgcataaactgggcgtgtcaaaggtcacccaagtggatttcctgccaagggaagtagtgtcctactcaaaggagacccagactcctcttgccacgcatcagtctgaagaggatgaggaagatgaggaaatggtggaatctaaagttggccaggactcagaactggaaaatcaggacaaaaaacaggaagtgaaggaagcccctccaagagagttgacagaggaagaaaaacagcagatccttcattcagaggaatttctcatcttttttgaccggacaatacgggtaattgaaagagccctggctgaagattccgacatcttttttgactacagcggccgagagttagaggaaaaagatggggatgttcaggctggagccaatctttctttcaatcgtcagttctatgatgaacattggtccaagcatcgagtggtcacttgtatggactggtccctccagtaccctgagctgatggtggcttcttacaacaacaatgaagatgctccccatgaaccagatggagtggccttggtttggaacatgaagtttaagaaaaccacaccagaatacgtcttccactgtcagtcctctgtgatgtcggtctgcttcgcccgtttccatcctaacttggtggttggtgggacttactcgggccagattgtcctctgggacaatcgcagtcatcgaaggactccagtgcagcggacacccttatcagctgctgcacacacgcatcccgtgtactgtgtaaatgttgttgggacccagaatgctcataacctcatcactgtctccactgatggcaaaatgtgttcctggagcctggacatgctctcaactccacaggagagcatggagctggtgtacaataagtccaagcctgtcgctgttaccggaatggctttcccaacgggagacgtcaataacttcgtggttggcagtgaggaaggtacagtctacacggcttgtcgtcatggaagcaaagcaggtattggtgaggtctttgaaggtcaccaagggccagtgacaggaattaactgccacatggcagtgggcccaatcgacttttctcacctgtttgtcacatcatcatttgactggactgtcaaactgtggaccaccaagcacaacaagccgctctactcctttgaagacaatgcagactatgtgtacgatgtcatgtggtcccccgtgcatcctgcgctttttgcctgcgtggacgggatggggcgcttggacctctggaacctcaacaatgacaccgaggttccaacagcaagtgtggccattgagggggcatccgccctaaaccgtgttcgttgggcccaagctggcaaagaagttgctgttggggactcggaaggccgtatttgggtctatgacgttggagagcttgcagttccccacaatgatgaatggacccgatttgccaggacccttgtggaaattcgtgctaacagagctgatagcgaggaggaaggcactgttgagttatctgcctagtggaaatgagccacccccactgcagcccccacctttgtgtcctagagctcagcgtctgcagtcaagtctcttgtattcggtgtccattcagtatcagtattgctgtgatattttgggtgccatattgtgccagctttgctccaagtattctaaatgtgtcccatcatgctttccactgacccaaaattcaccacagcatttctatctttatatttctgtctcaaaaatgaagagaagggggttatgggttaagttgctgccttttaactactttgtagctgtatttaatagctggaaacctctggttaaatttgtgcttacatgcactcctggcatagtcctattaaatccatatgaagccagatatgattgggtgcagatgtggtgttcctcatattatggtacagggccaaagacttgagacgtggtgttttacatggtgactcacattatgaatggatttactagaagaacattgctgctccttatttattgtagtgtgctgcatggaacgtatttatttgaaagcattaaaataaatgatcctagagcatgtgcataatgagaggactgtattctctctgctgctgttgaggttatattaagttccacatagcaattacagtatgccagttccactgaagacatgaaatctttagaggtttcttgcagtgaacgaaatgaattttaatgcctattatttctgggtactttaacaatatttcaaatatcattgaccactaatacttctcactgaagctaacacagtctgacaaaagtctatggttcctaaatatgacatcagtgttgccaataaaatgtttcaaacca

SEQ ID NO: 128581 - DNA, 2947 bp, Homo sapiens
  Payload ID: 5169
  Gene Symbol: DYNC1I1
  Gene Name: dynein, cytoplasmic 1, intermediate chain 1
  Uniprot ID: O14576
  ENST ID: ENST00000447467
  CDS Start-End: 230-2116
agactgagtgctccggggagctgtcagtgtcaggctctgggagagaggaagtgatcgctcccggaggagcgcgagccgagcggccggcgcagcgtgagacagcacatcctgcccgcgccggccccgccaccttcgggagccgcctgcaccaacgctgccgccgcccaggagccgccgccggctcggggagcccagttccgccgctgccgagcgcgtccaggaaaccaacatgtctgacaaaagtgacttaaaagctgagctagagcgcaaaaagcagcgcttagcacagataagagaagagaagaaacggaaggaagaggagaggaaaaagaaagaggctgatatgcagcagaagaaagaacccgttcaggacgactctgatctggatcgcaaacgacgagagacagaggctttgctgcaaagcattggtatctcaccggagccgcctctagtcccaacccctatgtctccctcctcgaaatcagtgagcactcccagtgaagctggaagccaagactcaggcgatctggggccattaacaaggaccctgcagtgggacacagacccctcagtgctccagctgcagtcagactcagaacttggaagaagactgcataaactgggcgtgtcaaaggtcacccaagtggatttcctgccaagggaagtagtgtcctactcaaaggagacccagactcctcttgccacgcatcagtctgaagaggatgaggaagatgaggaaatggtggaatctaaagttggccaggactcagaactggaaaatcaggacaaaaaacaggaagtgaaggaagcccctccaagagagttgacagaggaagaaaaacagcagatccttcattcagaggaatttctcatcttttttgaccggacaatacgggtaattgaaagagccctggctgaagattccgacatcttttttgactacagcggccgagagttagaggaaaaagatggggatgttcaggctggagccaatctttctttcaatcgtcagttctatgatgaacattggtccaagcatcgagtggtcacttgtatggactggtccctccagtaccctgagctgatggtggcttcttacaacaacaatgaagatgctccccatgaaccagatggagtggccttggtttggaacatgaagtttaagaaaaccacaccagaatacgtcttccactgtcagtcctctgtgatgtcggtctgcttcgcccgtttccatcctaacttggtggttggtgggacttactcgggccagattgtcctctgggacaatcgcagtcatcgaaggactccagtgcagcggacacccttatcagctgctgcacacacgcatcccgtgtactgtgtaaatgttgttgggacccagaatgctcataacctcatcactgtctccactgatggcaaaatgtgttcctggagcctggacatgctctcaactccacaggagagcatggagctggtgtacaataagtccaagcctgtcgctgttaccggaatggctttcccaacgggagacgtcaataacttcgtggttggcagtgaggaaggtacagtctacacggcttgtcgtcatggaagcaaagcaggtattggtgaggtctttgaaggtcaccaagggccagtgacaggaattaactgccacatggcagtgggcccaatcgacttttctcacctgtttgtcacatcatcatttgactggactgtcaaactgtggaccaccaagcacaacaagccgctctactcctttgaagacaatgcagactatgtgtacgatgtcatgtggtcccccgtgcatcctgcgctttttgcctgcgtggacgggatggggcgcttggacctctggaacctcaacaatgacaccgaggttccaacagcaagtgtggccattgagggggcatccgccctaaaccgtgttcgttgggcccaagctggcaaagaagttgctgttggggactcggaaggccgtatttgggtctatgacgttggagagcttgcagttccccacaatgatgaatggacccgatttgccaggacccttgtggaaattcgtgctaacagagctgatagcgaggaggaaggcactgttgagttatctgcctagtggaaatgagccacccccactgcagcccccacctttgtgtcctagagctcagcgtctgcagtcaagtctcttgtattcggtgtccattcagtatcagtattgctgtgatattttgggtgccatattgtgccagctttgctccaagtattctaaatgtgtcccatcatgctttccactgacccaaaattcaccacagcatttctatctttatatttctgtctcaaaaatgaagagaagggggttatgggttaagttgctgccttttaactactttgtagctgtatttaatagctggaaacctctggttaaatttgtgcttacatgcactcctggcatagtcctattaaatccatatgaagccagatatgattgggtgcagatgtggtgttcctcatattatggtacagggccaaagacttgagacgtggtgttttacatggtgactcacattatgaatggatttactagaagaacattgctgctccttatttattgtagtgtgctgcatggaacgtatttatttgaaagcattaaaataaatgatcctagagcatgtgcataatgagaggactgtattctctctgctgctgttgaggttatattaagttccacatagcaattacagtatgccagttccactgaagacatgaaatctttagaggtttcttgcagtgaacgaaatgaattttaatgcctattatttctgggtactttaacaatatttcaaatatcattgaccactaatacttctcactgaagctaacacagtctgacaaaagtctatggttcctaaatatgacatcagtgttgccaataaaatgtttcaaacca

SEQ ID NO: 128582 - DNA, 2895 bp, Homo sapiens
  Payload ID: 5169
  Gene Symbol: DYNC1I1
  Gene Name: dynein, cytoplasmic 1, intermediate chain 1
  Uniprot ID: O14576
  ENST ID: ENST00000437599
  CDS Start-End: 187-2064
agaggaagtgatcgctcccggaggagcgcgagccgagcggccggcgcagcgtgagacagcacatcctgcccgcgccggccccgccaccttcgggagccgcctgcaccaacgctgccgccgcccaggagccgccgccggctcggggagcccagttccgccgctgccgagcgcgtccaggaaaccaacatgtctgacaaaagtgacttaaaagctgagctagagcgcaaaaagcagcgcttagcacagataagagaagagaagaaacggaaggaagaggagaggaaaaagaaagaggctgatatgcagcagaagaaagaacccgttcaggacgactctgatctggatcgcaaacgacgagagacagaggctttgctgcaaagcattggtatctcaccggagccgcctctagtgcagccgctgcattttttaacatgggatacctgttattttcattatttagtcccaacccctatgtctccctcctcgaaatcagtgagcactcccagtgaagctggaagccaagactcaggcgatctggggccattaacaagaagaagactgcataaactgggcgtgtcaaaggtcacccaagtggatttcctgccaagggaagtagtgtcctactcaaaggagacccagactcctcttgccacgcatcagtctgaagaggatgaggaagatgaggaaatggtggaatctaaagttggccaggactcagaactggaaaatcaggacaaaaaacaggaagtgaaggaagcccctccaagagagttgacagaggaagaaaaacagcagatccttcattcagaggaatttctcatcttttttgaccggacaatacgggtaattgaaagagccctggctgaagattccgacatcttttttgactacagcggccgagagttagaggaaaaagatggggatgttcaggctggagccaatctttctttcaatcgtcagttctatgatgaacattggtccaagcatcgagtggtcacttgtatggactggtccctccagtaccctgagctgatggtggcttcttacaacaacaatgaagatgctccccatgaaccagatggagtggccttggtttggaacatgaagtttaagaaaaccacaccagaatacgtcttccactgtcagtcctctgtgatgtcggtctgcttcgcccgtttccatcctaacttggtggttggtgggacttactcgggccagattgtcctctgggacaatcgcagtcatcgaaggactccagtgcagcggacacccttatcagctgctgcacacacgcatcccgtgtactgtgtaaatgttgttgggacccagaatgctcataacctcatcactgtctccactgatggcaaaatgtgttcctggagcctggacatgctctcaactccacaggagagcatggagctggtgtacaataagtccaagcctgtcgctgttaccggaatggctttcccaacgggagacgtcaataacttcgtggttggcagtgaggaaggtacagtctacacggcttgtcgtcatggaagcaaagcaggtattggtgaggtctttgaaggtcaccaagggccagtgacaggaattaactgccacatggcagtgggcccaatcgacttttctcacctgtttgtcacatcatcatttgactggactgtcaaactgtggaccaccaagcacaacaagccgctctactcctttgaagacaatgcagactatgtgtacgatgtcatgtggtcccccgtgcatcctgcgctttttgcctgcgtggacgggatggggcgcttggacctctggaacctcaacaatgacaccgaggttccaacagcaagtgtggccattgagggggcatccgccctaaaccgtgttcgttgggcccaagctggcaaagaagttgctgttggggactcggaaggccgtatttgggtctatgacgttggagagcttgcagttccccacaatgatgaatggacccgatttgccaggacccttgtggaaattcgtgctaacagagctgatagcgaggaggaaggcactgttgagttatctgcctagtggaaatgagccacccccactgcagcccccacctttgtgtcctagagctcagcgtctgcagtcaagtctcttgtattcggtgtccattcagtatcagtattgctgtgatattttgggtgccatattgtgccagctttgctccaagtattctaaatgtgtcccatcatgctttccactgacccaaaattcaccacagcatttctatctttatatttctgtctcaaaaatgaagagaagggggttatgggttaagttgctgccttttaactactttgtagctgtatttaatagctggaaacctctggttaaatttgtgcttacatgcactcctggcatagtcctattaaatccatatgaagccagatatgattgggtgcagatgtggtgttcctcatattatggtacagggccaaagacttgagacgtggtgttttacatggtgactcacattatgaatggatttactagaagaacattgctgctccttatttattgtagtgtgctgcatggaacgtatttatttgaaagcattaaaataaatgatcctagagcatgtgcataatgagaggactgtattctctctgctgctgttgaggttatattaagttccacatagcaattacagtatgccagttccactgaagacatgaaatctttagaggtttcttgcagtgaacgaaatgaattttaatgcctattatttctgggtactttaacaatatttcaaatatcattgaccactaatacttctcactgaagctaacacagtctgacaaaagtctatggttcctaaatatgacatcagtgttgccaataaaatgtttcaaacca

SEQ ID NO: 128583 - DNA, 958 bp, Homo sapiens
  Payload ID: 5169
  Gene Symbol: DYNC1I1
  Gene Name: dynein, cytoplasmic 1, intermediate chain 1
  ENST ID: ENST00000413338
  CDS Start-End: 180-530
gtgatcgctcccggaggagcgcgagccgagcggccggcgcagcgtgagacagcacatcctgcccgcgccggccccgccaccttcgggagccgcctgcaccaacgctgccgccgcccaggagccgccgccggctcggggagcccagttccgccgctgccgagcgcgtccaggaaaccaacatgtctgacaaaagtgacttaaaagctgagctagagcgcaaaaagcagcgcttagcacagataagagaagagaagaaacggaaggaagaggagaggaaaaagaaagaggctgatatgcagcagaagaaagaacccgttcaggacgactctgatctggatcgcaaacgacgagagacagaggctttgctgcaaagcattggtatctcaccggagccgcctctagtcccaacccctatgtctccctcctcgaaatcagtgagcactcccagtgaagctggaagccaagactcaggcgatctggggccattaacaagagacgaagcattgctatattccccaggctggtcttgaacttctggcctcaaatgattctcctccctcttcatcccaaagtggtgggatcctcctgcctctccctcccaaagtgctgagattacaggcaggacccattgtgcccagcctaaaaatctcttactattatagaaacaacacctgtgtattttatacaactagaaaatataaatgagcaaaaataacaaaataaaaacatcatgtttccaccaccagagtagcactcttagcaccttagtgcttattcttttatattatatgtatgtcatcatatataatgataaatgacatcttactgtgaaaactgttgaacctgctttttcaatcaagtgtatttttatatttcaatgtattttcaccttatctagtatctacactatcttcaaatttccccaattggccccaataaaatcctgtagtatttaaaa

SEQ ID NO: 128584 - DNA, 2393 bp, Homo sapiens
  Payload ID: 5169
  Gene Symbol: DYNC1I1
  Gene Name: dynein, cytoplasmic 1, intermediate chain 1
  Uniprot ID: O14576
  ENST ID: ENST00000457059
  CDS Start-End: 101-1987
atatctctaggggtttatgacaggctgttttcttttctcagtgtggggatgaattgctccattatcatctaaattggaagtcatgatgatggaaaccaacatgtctgacaaaagtgacttaaaagctgagctagagcgcaaaaagcagcgcttagcacagataagagaagagaagaaacggaaggaagaggagaggaaaaagaaagaggctgatatgcagcagaagaaagaacccgttcaggacgactctgatctggatcgcaaacgacgagagacagaggctttgctgcaaagcattggtatctcaccggagccgcctctagtcccaacccctatgtctccctcctcgaaatcagtgagcactcccagtgaagctggaagccaagactcaggcgatctggggccattaacaaggaccctgcagtgggacacagacccctcagtgctccagctgcagtcagactcagaacttggaagaagactgcataaactgggcgtgtcaaaggtcacccaagtggatttcctgccaagggaagtagtgtcctactcaaaggagacccagactcctcttgccacgcatcagtctgaagaggatgaggaagatgaggaaatggtggaatctaaagttggccaggactcagaactggaaaatcaggacaaaaaacaggaagtgaaggaagcccctccaagagagttgacagaggaagaaaaacagcagatccttcattcagaggaatttctcatcttttttgaccggacaatacgggtaattgaaagagccctggctgaagattccgacatcttttttgactacagcggccgagagttagaggaaaaagatggggatgttcaggctggagccaatctttctttcaatcgtcagttctatgatgaacattggtccaagcatcgagtggtcacttgtatggactggtccctccagtaccctgagctgatggtggcttcttacaacaacaatgaagatgctccccatgaaccagatggagtggccttggtttggaacatgaagtttaagaaaaccacaccagaatacgtcttccactgtcagtcctctgtgatgtcggtctgcttcgcccgtttccatcctaacttggtggttggtgggacttactcgggccagattgtcctctgggacaatcgcagtcatcgaaggactccagtgcagcggacacccttatcagctgctgcacacacgcatcccgtgtactgtgtaaatgttgttgggacccagaatgctcataacctcatcactgtctccactgatggcaaaatgtgttcctggagcctggacatgctctcaactccacaggagagcatggagctggtgtacaataagtccaagcctgtcgctgttaccggaatggctttcccaacgggagacgtcaataacttcgtggttggcagtgaggaaggtacagtctacacggcttgtcgtcatggaagcaaagcaggtattggtgaggtctttgaaggtcaccaagggccagtgacaggaattaactgccacatggcagtgggcccaatcgacttttctcacctgtttgtcacatcatcatttgactggactgtcaaactgtggaccaccaagcacaacaagccgctctactcctttgaagacaatgcagactatgtgtacgatgtcatgtggtcccccgtgcatcctgcgctttttgcctgcgtggacgggatggggcgcttggacctctggaacctcaacaatgacaccgaggttccaacagcaagtgtggccattgagggggcatccgccctaaaccgtgttcgttgggcccaagctggcaaagaagttgctgttggggactcggaaggccgtatttgggtctatgacgttggagagcttgcagttccccacaatgatgaatggacccgatttgccaggacccttgtggaaattcgtgctaacagagctgatagcgaggaggaaggcactgttgagttatctgcctagtggaaatgagccacccccactgcagcccccacctttgtgtcctagagctcagcgtctgcagtcaagtctcttgtattcggtgtccattcagtatcagtattgctgtgatattttgggtgccatattgtgccagctttgctccaagtattctaaatgtgtcccatcatgctttccactgacccaaaattcaccacagcatttctatctttatatttctgtctcaaaaatgaagagaagggggttatgggttaagttgctgccttttaactactttgtagctgtatttaatagctggaaacctctggttaaatttgtgcttacatgcactcctggcatagtcctattaaatccatatgaagccagatatgattgggtgcagatgtggtgttcctcatattatggtaca

SEQ ID NO: 128585 - DNA, 540 bp, Homo sapiens
  Payload ID: 5169
  Gene Symbol: DYNC1I1
  Gene Name: dynein, cytoplasmic 1, intermediate chain 1
  ENST ID: ENST00000518089
  CDS Start-End: 155-540
gaaatctccatgcatccgagctcagtggaggaatgtttattgagtccatagaaatttgagcagggcatatctctaggggtttatgacaggctgttttcttttctcagtgtggggatgaattgctccattatcatctaaattggaagaaaccaacatgtctgacaaaagtgacttaaaagctgagctagagcgcaaaaagcagcgcttagcacagataagagaagagaagaaacggaaggaagaggagaggaaaaagaaagaggctgatatgcagcagaagaaagaacccgttcaggacgactctgatctggatcgcaaacgacgagagacagaggctttgctgcaaagcattggtatctcaccggagccgcctctagtcccaacccctatgtctccctcctcgaaatcagtgagcactcccagtgaagctggaagccaagactcaggcgatctggggccattaacaaggaccctgcagtgggacacagacccctcagtgctccagctgcagtcagactcagaacttgggtatatgtctgc

SEQ ID NO: 128586 - DNA, 575 bp, Homo sapiens
  Payload ID: 5169
  Gene Symbol: DYNC1I1
  Gene Name: dynein, cytoplasmic 1, intermediate chain 1
  ENST ID: ENST00000524053
  CDS Start-End: 320-575
agtgtcaggctctgggagagaggaagtgatcgctcccggaggagcgcgagccgagcggccggcgcagcgtgagacagcacatcctgcccgcgccggccccgccaccttcgggagccgcctgcaccaacgctgccgccgcccaggagccgccgccggctcggggagcccagttccgccgctgccgagcgcgtccagtctcactctgccacccaggctagagtgcagtgcatgattataactcattgtaaccgtgaattcttggcgtcaagctgtcctcccgcctcagcctcccaaagcactggggttacaggaaaccaacatgtctgacaaaagtgacttaaaagctgagctagagcgcaaaaagcagcgcttagcacagataagagaagagaagaaacggaaggaagaggagaggaaaaagaaagaggctgatatgcagcagaagaaagaacccgttcaggacgactctgatctggatcgcaaacgacgagagacagaggctttgctgcaaagcattggtatctcaccggagccgcctctagtcccaacccctatgtctccctcctcgaaatcag

SEQ ID NO: 128587 - DNA, 2146 bp, Homo sapiens
  Payload ID: 5169
  Gene Symbol: DYNC1I1
  Gene Name: dynein, cytoplasmic 1, intermediate chain 1
  ENST ID: ENST00000537881
  CDS Start-End: 512-2146
aggggcgcgggcgtggagggcgtgggcagggggcggggcgagccccgcagactgagtgctccggggagctgtcagtgtcaggctctgggagagaggaagtgatcgctcccggaggagcgcgagccgagcggccggcgcagcgtgagacagcacatcctgcccgcgccggccccgccaccttcgggagccgcctgcaccaacgctgccgccgcccaggagccgccgccggctcggggagcccagttccgccgctgccgagcgcgtccaggaaaccaacatgtctgacaaaagtgacttaaaagctgagctagagcgcaaaaagcagcgcttagcacagataagagaagagaagaaacggaaggaagaggagaggaaaaagaaagaggctgatatgcagcagaagaaagaacccgttcaggacgactctgatctggatcgcaaacgacgagagacagaggctttgctgcaaagcattggtatctcaccggagccgcctctagtcccaacccctatgtctccctcctcgaaatcagtgagcactcccagtgaagctggaagccaagactcaggcgatctggggccattaacaaggaccctgcagtgggacacagacccctcagtgctccagctgcagtcagactcagaacttggaagaagactgcataaactgggcgtgtcaaaggtcacccaagtggatttcctgccaagggaagtagtgtcctactcaaaggagacccagactcctcttgccacgcatcagtctgaagaggatgaggaagatgaggaaatggtggaatctaaagttggccaggactcagaactggaaaatcaggacaaaaaacaggaagtgaaggaagcccctccaagagagttgacagaggaagaaaaacagcagatccttcattcagaggaatttctcatcttttttgaccggacaatacgggtaattgaaagagccctggctgaagattccgacatcttttttgactacagcggccgagagttagaggaaaaagatggggatgttcaggctggagccaatctttctttcaatcgtcagttctatgatgaacattggtccaagcatcgagtggtcacttgtatggactggtccctccagtaccctgagctgatggtggcttcttacaacaacaatgaagatgctccccatgaaccagatggagtggccttggtttggaacatgaagtttaagaaaaccacaccagaatacgtcttccactgtcagtcctctgtgatgtcggtctgcttcgcccgtttccatcctaacttggtggttggtgggacttactcgggccagattgtcctctgggacaatcgcagtcatcgaaggactccagtgcagcggacacccttatcagctgctgcacacacgcatcccgtgtactgtgtaaatgttgttgggacccagaatgctcataacctcatcactgtctccactgatggcaaaatgtgttcctggagcctggacatgctctcaactccacaggagagcatggagctggtgtacaataagtccaagcctgtcgctgttaccggaatggctttcccaacgggagacgtcaataacttcgtggttggcagtgaggaaggtacagtctacacggcttgtcgtcatggaagcaaagcaggtattggtgaggtctttgaaggtcaccaagggccagtgacaggaattaactgccacatggcagtgggcccaatcgacttttctcacctgtttgtcacatcatcatttgactggactgtcaaactgtggaccaccaagcacaacaagccgctctactcctttgaagacaatgcagactatgtgtacgatgtcatgtggtcccccgtgcatcctgcgctttttgcctgcgtggacgggatggggcgcttggacctctggaacctcaacaatgacaccgaggttccaacagcaagtgtggccattgagggggcatccgccctaaaccgtgttcgttgggcccaagctggcaaagaagttgctgttggggactcggaaggccgtatttgggtctatgacgttggagagggtcttgctatgttgccaggctggtctcaaaattcctggactcaagcaatcctcctatgttggcctcccaaagtgctgggattacagacatga

SEQ ID NO: 128588 - DNA, 2249 bp, Homo sapiens
  Payload ID: 5169
  Gene Symbol: DYNC1I1
  Gene Name: dynein, cytoplasmic 1, intermediate chain 1
  Uniprot ID: O14576
  ENST ID: ENST00000630942
  CDS Start-End: 190-1998
gagagaggaagtgatcgctcccggaggagcgcgagccgagcggccggcgcagcgtgagacagcacatcctgcccgcgccggccccgccaccttcgggagccgcctgcaccaacgctgccgccgcccaggagccgccgccggctcggggagcccagttccgccgctgccgagcgcgtccaggaaaccaacatgtctgacaaaagtgacttaaaagctgagctagagcgcaaaaagcagcgcttagcacagataagagaagagaagaaacggaaggaagaggagaggaaaaagaaagaggctgatatgcagcagaagaaagaacccgttcaggacgactctgatctggatcgcaaacgacgagagacagaggctttgctgcaaagcattggtatctcaccggagccgcctctagtcccaacccctatgtctccctcctcgaaatcagtgagcactcccagtgaagctggaagccaagactcaggcgatctggggccattaacaagaagaagactgcataaactgggcgtgtcaaaggtcacccaagtggatttcctgccaagggaagtagtgtcctactcaaaggagacccagactcctcttgccacgcatcagtctgaagaggatgaggaagatgaggaaatggtggaatctaaagttggccaggactcagaactggaaaatcaggacaaaaaacaggaagtgaaggaagcccctccaagagagttgacagaggaagaaaaacagcagatccttcattcagaggaatttctcatcttttttgaccggacaatacgggtaattgaaagagccctggctgaagattccgacatcttttttgactacagcggccgagagttagaggaaaaagatggggatgttcaggctggagccaatctttctttcaatcgtcagttctatgatgaacattggtccaagcatcgagtggtcacttgtatggactggtccctccagtaccctgagctgatggtggcttcttacaacaacaatgaagatgctccccatgaaccagatggagtggccttggtttggaacatgaagtttaagaaaaccacaccagaatacgtcttccactgtcagtcctctgtgatgtcggtctgcttcgcccgtttccatcctaacttggtggttggtgggacttactcgggccagattgtcctctgggacaatcgcagtcatcgaaggactccagtgcagcggacacccttatcagctgctgcacacacgcatcccgtgtactgtgtaaatgttgttgggacccagaatgctcataacctcatcactgtctccactgatggcaaaatgtgttcctggagcctggacatgctctcaactccacaggagagcatggagctggtgtacaataagtccaagcctgtcgctgttaccggaatggctttcccaacgggagacgtcaataacttcgtggttggcagtgaggaaggtacagtctacacggcttgtcgtcatggaagcaaagcaggtattggtgaggtctttgaaggtcaccaagggccagtgacaggaattaactgccacatggcagtgggcccaatcgacttttctcacctgtttgtcacatcatcatttgactggactgtcaaactgtggaccaccaagcacaacaagccgctctactcctttgaagacaatgcagactatgtgtacgatgtcatgtggtcccccgtgcatcctgcgctttttgcctgcgtggacgggatggggcgcttggacctctggaacctcaacaatgacaccgaggttccaacagcaagtgtggccattgagggggcatccgccctaaaccgtgttcgttgggcccaagctggcaaagaagttgctgttggggactcggaaggccgtatttgggtctatgacgttggagagggtcttgctatgttgccaggctggtctcaaaattcctggactcaagcaatcctcctatgttggcctcccaaagtgctgggattacagacatgagccactgtgcccagctatgcctgcttgttatatcagctactgagagatgagtaccaaaatctggaagtataattgtggatatcttttagttctttcagttctatcagcttttgttttctgtatccaaagctttgttattaggtgcctacatattgaggatttcatgtgtttgcgatgaactgacccttttatcaatatgaaatgttgctgtttattcctagtaataatcctttttcttaaatctactttga

SEQ ID NO: 128589 - DNA, 2589 bp, Homo sapiens
  Payload ID: 5170
  Gene Symbol: DYNC1I2
  Gene Name: dynein, cytoplasmic 1, intermediate chain 2
  Uniprot ID: Q13409
  ENST ID: ENST00000340296
  CDS Start-End: 229-2067
aattcccagaacgcactgctcgtcgcacgcaggttttccttgttgccggggtttgtagttcttctcgatcgtgtcagtttgtaaggcgagggcggaagttggattcctggcctgagaatattaggcgtagttttccagtttttggcaaagcggaaatacttaaggcccctgggttgactgggttctttgttttatctaccggcttctgctttacgacaggtcacaaacatgtcagacaaaagtgaattaaaggctgagttggaacgtaagaagcagcgactggcccaaatcagagaggaaaagaagagaaaagaagaagaaaggaaaaaaaaagaaacagaccagaagaaggaagctgttgctcctgtgcaagaagaatcagatcttgaaaaaaaaaggagagaagctgaagcattgcttcaaagcatggggctaactccagaatcccccattgtccctcctcctatgtctccatcctccaaatctgtgagcactccaagtgaagctggaagccaagactctggagatggcgccgtgggatctagacgaggacctattaaacttggaatggctaaaatcacgcaagtcgactttcctcctcgagaaattgtcacgtatacaaaggaaactcagactccagttatggctcaacccaaagaagatgaagaggaagatgatgatgtagtggctcctaaaccacctattgaacctgaagaagagaaaactttaaagaaagatgaggaaaatgatagtaaagctccccctcatgagctgactgaagaagaaaagcaacaaatcttgcactctgaggaatttttaagtttctttgaccattctacaagaattgtagaaagagctctttctgagcagattaacatcttctttgactatagtgggagagatttggaagacaaagaaggagagattcaagcaggtgctaaactgtcattaaatcgacaattttttgacgaacgttggtcaaagcatcgggtggttagttgtttggattggtcatctcagtatccggagttactcgtggcttcctataacaacaatgaagatgcccctcatgagcctgatggtgtggcccttgtatggaatatgaaatacaaaaaaactaccccagagtatgtgtttcactgccagtcagctgtgatgtctgccacatttgcaaaatttcatccaaatcttgttgttggtggtacatattcaggccaaattgtgctttgggataaccgtagcaataaaagaactccagtgcaaagaactccactgtcagcagctgcacacacacaccctgtatattgtgtaaatgttgttggaacacaaaatgctcacaatctgattagcatctctactgatggaaaaatttgttcatggagtctggacatgctttcccatccacaggatagcatggagttggttcataaacagtcaaaagcagtagctgtgacatctatgtccttccctgttggagatgtcaacaactttgttgttgggagtgaagaaggttctgtgtacacagcatgccgccatggcagcaaagctggaatcagtgagatgtttgaggggcatcaaggaccaatcactggcatccattgtcatgcagctgttggagcagtagacttctcacatctttttgtcacttcatcgtttgactggacagtaaagctttggacaactaagaataacaagcctttgtattcatttgaagataatgcagactatgtttatgatgttatgtggtcacctacccacccagccctgtttgcctgtgtggatggcatggggagattggatttgtggaatctcaataatgacacagaggtaccaactgccagcatttctgtggagggtaatcctgctcttaatcgtgtgagatggacccattctggcagagagattgctgtgggtgattctgaaggacagattgttatatacgatgtgggagagcagattgctgttccccgcaatgatgaatgggcacggtttggccgaacacttgcagaaattaatgcaaaccgagctgatgcagaggaggaagcagctacccgaatacctgcttagttcctgaaaaggggagtgtaactagtggatttgggaaaggttcttaagtagatcctgagactatttgcatgcttctgtctaaatgataattaaaaggaaatttcatggattaaaccatgggtttaatgcagcaaggaaacttacaatgtccctttatatataacatgcatcttgttttggatttgtgtcattttttaatatagctgattgacttcacagaaagcagcttttttgaattctaatacataggtgtatatttggtattagttattttgagttcttttcaacttataacactgtatacagttatttctaaagcacagatgaaataagttctgcatatttttaaataatcacagttccctgttatacagataatgttctcactacccataatatgtaggaacattgtttctccttagccgtagtatgcatacacctatccatgttcattctgacatcctttgttgtctttataattcatgtggtagttacctataaataaaaacaaatatgcgttaa

SEQ ID NO: 128590 - DNA, 2604 bp, Homo sapiens
  Payload ID: 5170
  Gene Symbol: DYNC1I2
  Gene Name: dynein, cytoplasmic 1, intermediate chain 2
  Uniprot ID: Q13409
  ENST ID: ENST00000397119
  CDS Start-End: 168-2084
ttctcgatcgtgtcagtttgtaaggcgagggcggaagttggattcctggcctgagaatattaggcgtagttttccagtttttggcaaagcggaaatacttaaggcccctgggttgactgggttctttgttttatctaccggcttctgctttacgacaggtcacaaacatgtcagacaaaagtgaattaaaggctgagttggaacgtaagaagcagcgactggcccaaatcagagaggaaaagaagagaaaagaagaagaaaggaaaaaaaaagaaacagaccagaagaaggaagctgttgctcctgtgcaagaagaatcagatcttgaaaaaaaaaggagagaagctgaagcattgcttcaaagcatggggctaactccagaatcccccattgttttttctgaatactgggtccctcctcctatgtctccatcctccaaatctgtgagcactccaagtgaagctggaagccaagactctggagatggcgccgtgggatctaggacgctgcattgggatacagatccatcagttcttcagcttcactcagattccgatttgggacgaggacctattaaacttggaatggctaaaatcacgcaagtcgactttcctcctcgagaaattgtcacgtatacaaaggaaactcagactccagttatggctcaacccaaagaagatgaagaggaagatgatgatgtagtggctcctaaaccacctattgaacctgaagaagagaaaactttaaagaaagatgaggaaaatgatagtaaagctccccctcatgagctgactgaagaagaaaagcaacaaatcttgcactctgaggaatttttaagtttctttgaccattctacaagaattgtagaaagagctctttctgagcagattaacatcttctttgactatagtgggagagatttggaagacaaagaaggagagattcaagcaggtgctaaactgtcattaaatcgacaattttttgacgaacgttggtcaaagcatcgggtggttagttgtttggattggtcatctcagtatccggagttactcgtggcttcctataacaacaatgaagatgcccctcatgagcctgatggtgtggcccttgtatggaatatgaaatacaaaaaaactaccccagagtatgtgtttcactgccagtcagctgtgatgtctgccacatttgcaaaatttcatccaaatcttgttgttggtggtacatattcaggccaaattgtgctttgggataaccgtagcaataaaagaactccagtgcaaagaactccactgtcagcagctgcacacacacaccctgtatattgtgtaaatgttgttggaacacaaaatgctcacaatctgattagcatctctactgatggaaaaatttgttcatggagtctggacatgctttcccatccacaggatagcatggagttggttcataaacagtcaaaagcagtagctgtgacatctatgtccttccctgttggagatgtcaacaactttgttgttgggagtgaagaaggttctgtgtacacagcatgccgccatggcagcaaagctggaatcagtgagatgtttgaggggcatcaaggaccaatcactggcatccattgtcatgcagctgttggagcagtagacttctcacatctttttgtcacttcatcgtttgactggacagtaaagctttggacaactaagaataacaagcctttgtattcatttgaagataatgcagactatgtttatgatgttatgtggtcacctacccacccagccctgtttgcctgtgtggatggcatggggagattggatttgtggaatctcaataatgacacagaggtaccaactgccagcatttctgtggagggtaatcctgctcttaatcgtgtgagatggacccattctggcagagagattgctgtgggtgattctgaaggacagattgttatatacgatgtgggagagcagattgctgttccccgcaatgatgaatgggcacggtttggccgaacacttgcagaaattaatgcaaaccgagctgatgcagaggaggaagcagctacccgaatacctgcttagttcctgaaaaggggagtgtaactagtggatttgggaaaggttcttaagtagatcctgagactatttgcatgcttctgtctaaatgataattaaaaggaaatttcatggattaaaccatgggtttaatgcagcaaggaaacttacaatgtccctttatatataacatgcatcttgttttggatttgtgtcattttttaatatagctgattgacttcacagaaagcagcttttttgaattctaatacataggtgtatatttggtattagttattttgagttcttttcaacttataacactgtatacagttatttctaaagcacagatgaaataagttctgcatatttttaaataatcacagttccctgttatacagataatgttctcactacccataatatgtaggaacattgtttctccttagccgtagtatgcatacacctatccatgttcattctgacatcctttgttgtctttataattcatgtggtagttacctataaataaaaacaaatatgcgtt

SEQ ID NO: 128591 - DNA, 2572 bp, Homo sapiens
  Payload ID: 5170
  Gene Symbol: DYNC1I2
  Gene Name: dynein, cytoplasmic 1, intermediate chain 2
  Uniprot ID: Q13409
  ENST ID: ENST00000409197
  CDS Start-End: 212-2050
ttttatttctgggagcgacctcgttctggtgaggctatttgtccctaagctctcgccgtagcagccgccgcccatccctctttgtgtgctttggaaagccgcggagctggtggtggctacagttggtgttgggggcttaggcgagggacgttaccgggaagttgcaggcgggaggactcttccccatccagtcacctgacaggtcacaaacatgtcagacaaaagtgaattaaaggctgagttggaacgtaagaagcagcgactggcccaaatcagagaggaaaagaagagaaaagaagaagaaaggaaaaaaaaagaaacagaccagaagaaggaagctgttgctcctgtgcaagaagaatcagatcttgaaaaaaaaaggagagaagctgaagcattgcttcaaagcatggggctaactccagaatcccccattgtccctcctcctatgtctccatcctccaaatctgtgagcactccaagtgaagctggaagccaagactctggagatggcgccgtgggatctagacgaggacctattaaacttggaatggctaaaatcacgcaagtcgactttcctcctcgagaaattgtcacgtatacaaaggaaactcagactccagttatggctcaacccaaagaagatgaagaggaagatgatgatgtagtggctcctaaaccacctattgaacctgaagaagagaaaactttaaagaaagatgaggaaaatgatagtaaagctccccctcatgagctgactgaagaagaaaagcaacaaatcttgcactctgaggaatttttaagtttctttgaccattctacaagaattgtagaaagagctctttctgagcagattaacatcttctttgactatagtgggagagatttggaagacaaagaaggagagattcaagcaggtgctaaactgtcattaaatcgacaattttttgacgaacgttggtcaaagcatcgggtggttagttgtttggattggtcatctcagtatccggagttactcgtggcttcctataacaacaatgaagatgcccctcatgagcctgatggtgtggcccttgtatggaatatgaaatacaaaaaaactaccccagagtatgtgtttcactgccagtcagctgtgatgtctgccacatttgcaaaatttcatccaaatcttgttgttggtggtacatattcaggccaaattgtgctttgggataaccgtagcaataaaagaactccagtgcaaagaactccactgtcagcagctgcacacacacaccctgtatattgtgtaaatgttgttggaacacaaaatgctcacaatctgattagcatctctactgatggaaaaatttgttcatggagtctggacatgctttcccatccacaggatagcatggagttggttcataaacagtcaaaagcagtagctgtgacatctatgtccttccctgttggagatgtcaacaactttgttgttgggagtgaagaaggttctgtgtacacagcatgccgccatggcagcaaagctggaatcagtgagatgtttgaggggcatcaaggaccaatcactggcatccattgtcatgcagctgttggagcagtagacttctcacatctttttgtcacttcatcgtttgactggacagtaaagctttggacaactaagaataacaagcctttgtattcatttgaagataatgcagactatgtttatgatgttatgtggtcacctacccacccagccctgtttgcctgtgtggatggcatggggagattggatttgtggaatctcaataatgacacagaggtaccaactgccagcatttctgtggagggtaatcctgctcttaatcgtgtgagatggacccattctggcagagagattgctgtgggtgattctgaaggacagattgttatatacgatgtgggagagcagattgctgttccccgcaatgatgaatgggcacggtttggccgaacacttgcagaaattaatgcaaaccgagctgatgcagaggaggaagcagctacccgaatacctgcttagttcctgaaaaggggagtgtaactagtggatttgggaaaggttcttaagtagatcctgagactatttgcatgcttctgtctaaatgataattaaaaggaaatttcatggattaaaccatgggtttaatgcagcaaggaaacttacaatgtccctttatatataacatgcatcttgttttggatttgtgtcattttttaatatagctgattgacttcacagaaagcagcttttttgaattctaatacataggtgtatatttggtattagttattttgagttcttttcaacttataacactgtatacagttatttctaaagcacagatgaaataagttctgcatatttttaaataatcacagttccctgttatacagataatgttctcactacccataatatgtaggaacattgtttctccttagccgtagtatgcatacacctatccatgttcattctgacatcctttgttgtctttataattcatgtggtagttacctataaataaaaacaaatatgcgttaa

SEQ ID NO: 128592 - DNA, 2583 bp, Homo sapiens
  Payload ID: 5170
  Gene Symbol: DYNC1I2
  Gene Name: dynein, cytoplasmic 1, intermediate chain 2
  Uniprot ID: Q13409
  ENST ID: ENST00000409773
  CDS Start-End: 140-2056
catccctctttgtgtgctttggaaagccgcggagctggtggtggctacagttggtgttgggggcttaggcgagggacgttaccgggaagttgcaggcgggaggactcttccccatccagtcacctgacaggtcacaaacatgtcagacaaaagtgaattaaaggctgagttggaacgtaagaagcagcgactggcccaaatcagagaggaaaagaagagaaaagaagaagaaaggaaaaaaaaagaaacagaccagaagaaggaagctgttgctcctgtgcaagaagaatcagatcttgaaaaaaaaaggagagaagctgaagcattgcttcaaagcatggggctaactccagaatcccccattgttttttctgaatactgggtccctcctcctatgtctccatcctccaaatctgtgagcactccaagtgaagctggaagccaagactctggagatggcgccgtgggatctaggacgctgcattgggatacagatccatcagttcttcagcttcactcagattccgatttgggacgaggacctattaaacttggaatggctaaaatcacgcaagtcgactttcctcctcgagaaattgtcacgtatacaaaggaaactcagactccagttatggctcaacccaaagaagatgaagaggaagatgatgatgtagtggctcctaaaccacctattgaacctgaagaagagaaaactttaaagaaagatgaggaaaatgatagtaaagctccccctcatgagctgactgaagaagaaaagcaacaaatcttgcactctgaggaatttttaagtttctttgaccattctacaagaattgtagaaagagctctttctgagcagattaacatcttctttgactatagtgggagagatttggaagacaaagaaggagagattcaagcaggtgctaaactgtcattaaatcgacaattttttgacgaacgttggtcaaagcatcgggtggttagttgtttggattggtcatctcagtatccggagttactcgtggcttcctataacaacaatgaagatgcccctcatgagcctgatggtgtggcccttgtatggaatatgaaatacaaaaaaactaccccagagtatgtgtttcactgccagtcagctgtgatgtctgccacatttgcaaaatttcatccaaatcttgttgttggtggtacatattcaggccaaattgtgctttgggataaccgtagcaataaaagaactccagtgcaaagaactccactgtcagcagctgcacacacacaccctgtatattgtgtaaatgttgttggaacacaaaatgctcacaatctgattagcatctctactgatggaaaaatttgttcatggagtctggacatgctttcccatccacaggatagcatggagttggttcataaacagtcaaaagcagtagctgtgacatctatgtccttccctgttggagatgtcaacaactttgttgttgggagtgaagaaggttctgtgtacacagcatgccgccatggcagcaaagctggaatcagtgagatgtttgaggggcatcaaggaccaatcactggcatccattgtcatgcagctgttggagcagtagacttctcacatctttttgtcacttcatcgtttgactggacagtaaagctttggacaactaagaataacaagcctttgtattcatttgaagataatgcagactatgtttatgatgttatgtggtcacctacccacccagccctgtttgcctgtgtggatggcatggggagattggatttgtggaatctcaataatgacacagaggtaccaactgccagcatttctgtggagggtaatcctgctcttaatcgtgtgagatggacccattctggcagagagattgctgtgggtgattctgaaggacagattgttatatacgatgtgggagagcagattgctgttccccgcaatgatgaatgggcacggtttggccgaacacttgcagaaattaatgcaaaccgagctgatgcagaggaggaagcagctacccgaatacctgcttagttcctgaaaaggggagtgtaactagtggatttgggaaaggttcttaagtagatcctgagactatttgcatgcttctgtctaaatgataattaaaaggaaatttcatggattaaaccatgggtttaatgcagcaaggaaacttacaatgtccctttatatataacatgcatcttgttttggatttgtgtcattttttaatatagctgattgacttcacagaaagcagcttttttgaattctaatacataggtgtatatttggtattagttattttgagttcttttcaacttataacactgtatacagttatttctaaagcacagatgaaataagttctgcatatttttaaataatcacagttccctgttatacagataatgttctcactacccataatatgtaggaacattgtttctccttagccgtagtatgcatacacctatccatgttcattctgacatcctttgttgtctttataattcatgtggtagttacctataaataaaaacaaatatgcgttaactttt

SEQ ID NO: 128593 - DNA, 2159 bp, Homo sapiens
  Payload ID: 5170
  Gene Symbol: DYNC1I2
  Gene Name: dynein, cytoplasmic 1, intermediate chain 2
  Uniprot ID: Q13409
  ENST ID: ENST00000410079
  CDS Start-End: 167-2059
tctcgatcgtgtcagtttgtaaggcgagggcggaagttggattcctggcctgagaatattaggcgtagttttccagtttttggcaaagcggaaatacttaaggcccctgggttgactgggttctttgttttatctaccggcttctgctttacgacaggtcacaaacatgtcagacaaaagtgaattaaaggctgagttggaacgtaagaagcagcgactggcccaaatcagagaggaaaagaagagaaaagaagaagaaaggaaaaaaaaagaaacagaccagaagaaggaagctgttgctcctgtgcaagaagaatcagatcttgaaaaaaaaaggagagaagctgaagcattgcttcaaagcatggggctaactccagaatcccccattgctgagcaacctctccgtgtagtaacagcggatacctgtctatttcactatttagtccctcctcctatgtctccatcctccaaatctgtgagcactccaagtgaagctggaagccaagactctggagatggcgccgtgggatctagacgaggacctattaaacttggaatggctaaaatcacgcaagtcgactttcctcctcgagaaattgtcacgtatacaaaggaaactcagactccagttatggctcaacccaaagaagatgaagaggaagatgatgatgtagtggctcctaaaccacctattgaacctgaagaagagaaaactttaaagaaagatgaggaaaatgatagtaaagctccccctcatgagctgactgaagaagaaaagcaacaaatcttgcactctgaggaatttttaagtttctttgaccattctacaagaattgtagaaagagctctttctgagcagattaacatcttctttgactatagtgggagagatttggaagacaaagaaggagagattcaagcaggtgctaaactgtcattaaatcgacaattttttgacgaacgttggtcaaagcatcgggtggttagttgtttggattggtcatctcagtatccggagttactcgtggcttcctataacaacaatgaagatgcccctcatgagcctgatggtgtggcccttgtatggaatatgaaatacaaaaaaactaccccagagtatgtgtttcactgccagtcagctgtgatgtctgccacatttgcaaaatttcatccaaatcttgttgttggtggtacatattcaggccaaattgtgctttgggataaccgtagcaataaaagaactccagtgcaaagaactccactgtcagcagctgcacacacacaccctgtatattgtgtaaatgttgttggaacacaaaatgctcacaatctgattagcatctctactgatggaaaaatttgttcatggagtctggacatgctttcccatccacaggatagcatggagttggttcataaacagtcaaaagcagtagctgtgacatctatgtccttccctgttggagatgtcaacaactttgttgttgggagtgaagaaggttctgtgtacacagcatgccgccatggcagcaaagctggaatcagtgagatgtttgaggggcatcaaggaccaatcactggcatccattgtcatgcagctgttggagcagtagacttctcacatctttttgtcacttcatcgtttgactggacagtaaagctttggacaactaagaataacaagcctttgtattcatttgaagataatgcagactatgtttatgatgttatgtggtcacctacccacccagccctgtttgcctgtgtggatggcatggggagattggatttgtggaatctcaataatgacacagaggtaccaactgccagcatttctgtggagggtaatcctgctcttaatcgtgtgagatggacccattctggcagagagattgctgtgggtgattctgaaggacagattgttatatacgatgtgggagagcagattgctgttccccgcaatgatgaatgggcacggtttggccgaacacttgcagaaattaatgcaaaccgagctgatgcagaggaggaagcagctacccgaatacctgcttagttcctgaaaaggggagtgtaactagtggatttgggaaaggttcttaagtagatcctgagactatttgcatgcttctgtctaaatgataattaaaaggaaa

SEQ ID NO: 128594 - DNA, 2196 bp, Homo sapiens
  Payload ID: 5170
  Gene Symbol: DYNC1I2
  Gene Name: dynein, cytoplasmic 1, intermediate chain 2
  Uniprot ID: Q13409
  ENST ID: ENST00000409317
  CDS Start-End: 176-2074
atttgtccctaagctctcgccgtagcagccgccgcccatccctctttgtgtgctttggaaagccgcggagctggtggtggctacagttggtgttgggggcttaggcgagggacgttaccgggaagttgcaggcgggaggactcttccccatccagtcacctgacaggtcacaaacatgtcagacaaaagtgaattaaaggctgagttggaacgtaagaagcagcgactggcccaaatcagagaggaaaagaagagaaaagaagaagaaaggaaaaaaaaagaaacagaccagaagaaggaagctgttgctcctgtgcaagaagaatcagatcttgaaaaaaaaaggagagaagctgaagcattgcttcaaagcatggggctaactccagaatcccccattgtccctcctcctatgtctccatcctccaaatctgtgagcactccaagtgaagctggaagccaagactctggagatggcgccgtgggatctaggacgctgcattgggatacagatccatcagttcttcagcttcactcagattccgatttgggacgaggacctattaaacttggaatggctaaaatcacgcaagtcgactttcctcctcgagaaattgtcacgtatacaaaggaaactcagactccagttatggctcaacccaaagaagatgaagaggaagatgatgatgtagtggctcctaaaccacctattgaacctgaagaagagaaaactttaaagaaagatgaggaaaatgatagtaaagctccccctcatgagctgactgaagaagaaaagcaacaaatcttgcactctgaggaatttttaagtttctttgaccattctacaagaattgtagaaagagctctttctgagcagattaacatcttctttgactatagtgggagagatttggaagacaaagaaggagagattcaagcaggtgctaaactgtcattaaatcgacaattttttgacgaacgttggtcaaagcatcgggtggttagttgtttggattggtcatctcagtatccggagttactcgtggcttcctataacaacaatgaagatgcccctcatgagcctgatggtgtggcccttgtatggaatatgaaatacaaaaaaactaccccagagtatgtgtttcactgccagtcagctgtgatgtctgccacatttgcaaaatttcatccaaatcttgttgttggtggtacatattcaggccaaattgtgctttgggataaccgtagcaataaaagaactccagtgcaaagaactccactgtcagcagctgcacacacacaccctgtatattgtgtaaatgttgttggaacacaaaatgctcacaatctgattagcatctctactgatggaaaaatttgttcatggagtctggacatgctttcccatccacaggatagcatggagttggttcataaacagtcaaaagcagtagctgtgacatctatgtccttccctgttggagatgtcaacaactttgttgttgggagtgaagaaggttctgtgtacacagcatgccgccatggcagcaaagctggaatcagtgagatgtttgaggggcatcaaggaccaatcactggcatccattgtcatgcagctgttggagcagtagacttctcacatctttttgtcacttcatcgtttgactggacagtaaagctttggacaactaagaataacaagcctttgtattcatttgaagataatgcagactatgtttatgatgttatgtggtcacctacccacccagccctgtttgcctgtgtggatggcatggggagattggatttgtggaatctcaataatgacacagaggtaccaactgccagcatttctgtggagggtaatcctgctcttaatcgtgtgagatggacccattctggcagagagattgctgtgggtgattctgaaggacagattgttatatacgatgtgggagagcagattgctgttccccgcaatgatgaatgggcacggtttggccgaacacttgcagaaattaatgcaaaccgagctgatgcagaggaggaagcagctacccgaatacctgcttagttcctgaaaaggggagtgtaactagtggatttgggaaaggttcttaagtagatcctgagactatttgcatgcttctgtctaaatgataattaaaaggaaatttcatggattaaaccatgggt

SEQ ID NO: 128595 - DNA, 2552 bp, Homo sapiens
  Payload ID: 5170
  Gene Symbol: DYNC1I2
  Gene Name: dynein, cytoplasmic 1, intermediate chain 2
  Uniprot ID: Q13409
  ENST ID: ENST00000409453
  CDS Start-End: 108-2021
agctggtggtggctacagttggtgttgggggcttaggcgagggacgttaccgggaagttgcaggcgggaggactcttccccatccagtcacctgacaggtcacaaacatgtcagacaaaagtgaattaaaggctgagttggaacgtaagaagcagcgactggcccaaatcagagaggaaaagaagagaaaagaagaagaaaggaaaaaaaaagaaacagaccagaagaaggaagctgttgctcctgtgcaagaagaatcagatcttgaaaaaaaaaggagagaagctgaagcattgcttcaaagcatggggctaactccagaatcccccattgttttttctgaatactgggtccctcctcctatgtctccatcctccaaatctgtgagcactccaagtgaagctggaagccaagactctggagatggcgccgtgggatctaggacgctgcattgggatacagatccatcagttcttcagcttcactcagattccgatttgggacgaggacctattaaacttggaatggctaaaatcacgcaagtcgactttcctcctcgagaaattgtcacgtatacaaaggaaactcagactccagttatggctcaacccaaagaagatgaagaggaagatgatgatgtagtggctcctaaaccacctattgaacctgaagaagagaaaactttaaagaaagatgaggaaaatgatagtaaagctccccctcatgagctgactgaagaagaaaagcaacaaatcttgcactctgaggaatttttaagtttctttgaccattctacaagaattgtagaaagagctctttctgagcagattaacatcttctttgactatagtgggagagatttggaagacaaagaaggagagattcaagcaggtgctaaactgtcattaaatcgacaattttttgacgaacgttggtcaaagcatcgggtggttagttgtttggattggtcatctcagtatccggagttactcgtggcttcctataacaacaatgaagatgcccctcatgagcctgatggtgtggcccttgtatggaatatgaaatacaaaaaaactaccccagagtatgtgtttcactgccagtcagctgtgatgtctgccacatttgcaaaatttcatccaaatcttgttgttggtggtacatattcaggccaaattgtgctttgggataaccgtagcaataaaagaactccagtgcaaagaactccactgtcagcagctgcacacacacaccctgtatattgtgtaaatgttgttggaacacaaaatgctcacaatctgattagcatctctactgatggaaaaatttgttcatggagtctggacatgctttcccatccacaggatagcatggagttggttcataaacagtcaaaagcagtagctgtgacatctatgtccttccctgttggagatgtcaacaactttgttgttgggagtgaagaaggttctgtgtacacagcatgccgccatggcagcaaagctggaatcagtgagatgtttgaggggcatcaaggaccaatcactggcatccattgtcatgcagctgttggagcagtagacttctcacatctttttgtcacttcatcgtttgactggacagtaaagctttggacaactaagaataacaagcctttgtattcatttgaagataatgcagactatgtttatgatgttatgtggtcacctacccacccagccctgtttgcctgtgtggatggcatggggagattggatttgtggaatctcaataatgacacagaggtaccaactgccagcatttctgtggagggtaatcctgctcttaatcgtgtgagatggacccattctggcagagagattgctgtgggtgattctgaaggacagattgttatatacgatgtgggagagattgctgttccccgcaatgatgaatgggcacggtttggccgaacacttgcagaaattaatgcaaaccgagctgatgcagaggaggaagcagctacccgaatacctgcttagttcctgaaaaggggagtgtaactagtggatttgggaaaggttcttaagtagatcctgagactatttgcatgcttctgtctaaatgataattaaaaggaaatttcatggattaaaccatgggtttaatgcagcaaggaaacttacaatgtccctttatatataacatgcatcttgttttggatttgtgtcattttttaatatagctgattgacttcacagaaagcagcttttttgaattctaatacataggtgtatatttggtattagttattttgagttcttttcaacttataacactgtatacagttatttctaaagcacagatgaaataagttctgcatatttttaaataatcacagttccctgttatacagataatgttctcactacccataatatgtaggaacattgtttctccttagccgtagtatgcatacacctatccatgttcattctgacatcctttgttgtctttataattcatgtggtagttacctataaataaaaacaaatatgcgttaacttttcaaa

SEQ ID NO: 128596 - DNA, 741 bp, Homo sapiens
  Payload ID: 5170
  Gene Symbol: DYNC1I2
  Gene Name: dynein, cytoplasmic 1, intermediate chain 2
  ENST ID: ENST00000456808
  CDS Start-End: 179-741
gctatttgtccctaagctctcgccgtagcagccgccgcccatccctctttgtgtgctttggaaagccgcggagctggtggtggctacagttggtgttgggggcttaggcgagggacgttaccgggaagttgcaggcgggaggactcttccccatccagtcacctgacaggtcacaaacatgtcagacaaaagtgaattaaaggctgagttggaacgtaagaagcagcgactggcccaaatcagagaggaaaagaagagaaaagaagaagaaaggaaaaaaaaagaaacagaccagaagaaggaagctgttgctcctgtgcaagaagaatcagatcttgaaaaaaaaaggagagaagctgaagcattgcttcaaagcatggggctaactccagaatcccccattgctgagcaacctctccgtgtagtaacagcggatacctgtctatttcactatttagtccctcctcctatgtctccatcctccaaatctgtgagcactccaagtgaagctggaagccaagactctggagatggcgccgtgggatctagacgaggacctattaaacttggaatggctaaaatcacgcaagtcgactttcctcctcgagaaattgtcacgtatacaaaggaaactcagactccagttatggctcaacccaaagaagatgaagaggaagatgatgatgtagtggctcctaaaccacctattgaacctgaagaagagaaaactttaaagaaaga

SEQ ID NO: 128597 - DNA, 808 bp, Homo sapiens
  Payload ID: 5170
  Gene Symbol: DYNC1I2
  Gene Name: dynein, cytoplasmic 1, intermediate chain 2
  ENST ID: ENST00000438879
  CDS Start-End: 166-808
ctcgatcgtgtcagtttgtaaggcgagggcggaagttggattcctggcctgagaatattaggcgtagttttccagtttttggcaaagcggaaatacttaaggcccctgggttgactgggttctttgttttatctaccggcttctgctttacgacaggtcacaaacatgtcagacaaaagtgaattaaaggctgagttggaacgtaagaagcagcgactggcccaaatcagagaggaaaagaagagaaaagaagaagaaaggaaaaaaaaagaaacagaccagaagaaggaagctgttgctcctgtgcaagaagaatcagatcttgaaaaaaaaaggagagaagctgaagcattgcttcaaagcatggggctaactccagaatcccccattgctgagcaacctctccgtgtagtaacagcggatacctgtctatttcactatttagtccctcctcctatgtctccatcctccaaatctgtgagcactccaagtgaagctggaagccaagactctggagatggcgccgtgggatctaggacgctgcattgggatacagatccatcagttcttcagcttcactcagattccgatttgggacgaggacctattaaacttggaatggctaaaatcacgcaagtcgactttcctcctcgagaaattgtcacgtatacaaaggaaactcagactccagttatggctcaacccaaagaagatgaagaggaagatgatgatgtagtggctcctaaaccacctattgaacctgaagaagagaaaactttaaagaaagatgaggaaaatgatagtaaag

SEQ ID NO: 128598 - DNA, 622 bp, Homo sapiens
  Payload ID: 5170
  Gene Symbol: DYNC1I2
  Gene Name: dynein, cytoplasmic 1, intermediate chain 2
  ENST ID: ENST00000425485
  CDS Start-End: 66-622
tctcttgagttttaagaacgtgaacatgtcggtcatggaggaaggctctggcttctgtcacaaacatgtcagacaaaagtgaattaaaggctgagttggaacgtaagaagcagcgactggcccaaatcagagaggaaaagaagagaaaagaagaagaaaggaaaaaaaaagaaacagaccagaagaaggaagctgttgctcctgtgcaagaagaatcagatcttgaaaaaaaaaggagagaagctgaagcattgcttcaaagcatggggctaactccagaatcccccattgtccctcctcctatgtctccatcctccaaatctgtgagcactccaagtgaagctggaagccaagactctggagatggcgccgtgggatctagacgaggacctattaaacttggaatggctaaaatcacgcaagtcgactttcctcctcgagaaattgtcacgtatacaaaggaaactcagactccagttatggctcaacccaaagaagatgaagaggaagatgatgatgtagtggctcctaaaccacctattgaacctgaagaagagaaaactttaaagaaagatgaggaaaatgatagtaaagctccccctcatgagctgactgaagaaga

SEQ ID NO: 128599 - DNA, 585 bp, Homo sapiens
  Payload ID: 5170
  Gene Symbol: DYNC1I2
  Gene Name: dynein, cytoplasmic 1, intermediate chain 2
  ENST ID: ENST00000423910
  CDS Start-End: 66-585
tctcttgagttttaagaacgtgaacatgtcggtcatggaggaaggctctggcttctgtcacaaacatgtcagacaaaagtgaattaaaggctgagttggaacgtaagaagcagcgactggcccaaatcagagaggaaaagaagagaaaagaagaagaaaggaaaaaaaaagaaacagaccagaagaaggaagctgttgctcctgtgcaagaagaatcagatcttgaaaaaaaaaggagagaagctgaagcattgcttcaaagcatggggctaactccagaatcccccattgctgagcaacctctccgtgtagtaacagcggatacctgtctatttcactatttagtccctcctcctatgtctccatcctccaaatctgtgagcactccaagtgaagctggaagccaagactctggagatggcgccgtgggatctagacgaggacctattaaacttggaatggctaaaatcacgcaagtcgactttcctcctcgagaaattgtcacgtatacaaaggaaactcagactccagttatggctcaacccaaagaagatgaagaggaagatgatgatgtagtggctccta

SEQ ID NO: 128600 - DNA, 980 bp, Homo sapiens
  Payload ID: 5170
  Gene Symbol: DYNC1I2
  Gene Name: dynein, cytoplasmic 1, intermediate chain 2
  ENST ID: ENST00000452242
  CDS Start-End: 229-980
aattcccagaacgcactgctcgtcgcacgcaggttttccttgttgccggggtttgtagttcttctcgatcgtgtcagtttgtaaggcgagggcggaagttggattcctggcctgagaatattaggcgtagttttccagtttttggcaaagcggaaatacttaaggcccctgggttgactgggttctttgttttatctaccggcttctgctttacgacaggtcacaaacatgtcagacaaaagtgaattaaaggctgagttggaacgtaagaagcagcgactggcccaaatcagagaggaaaagaagagaaaagaagaagaaaggaaaaaaaaagaaacagaccagaagaaggaagctgttgctcctgtgcaagaagaatcagatcttgaaaaaaaaaggagagaagctgaagcattgcttcaaagcatggggctaactccagaatcccccattgtccctcctcctatgtctccatcctccaaatctgtgagcactccaagtgaagctggaagccaagactctggagatggcgccgtgggatctaggacgctgcattgggatacagatccatcagttcttcagcttcactcagattccgatttgggacgaggacctattaaacttggaatggctaaaatcacgcaagtcgactttcctcctcgagaaattgtcacgtatacaaaggaaactcagactccagttatggctcaacccaaagaagatgaagaggaagatgatgatgtagtggctcctaaaccacctattgaacctgaagaagagaaaactttaaagaaagatgaggaaaatgatagtaaagctccccctcatgagctgactgaagaagaaaagcaacaaatcttgcactctgaggaatttttaagtttctttgaccattctacaagaattgtagaaagagctctttctgagcagattaacatcttctttgactatagtgggagagatttggaagacaaagaagg

SEQ ID NO: 128601 - DNA, 589 bp, Homo sapiens
  Payload ID: 5170
  Gene Symbol: DYNC1I2
  Gene Name: dynein, cytoplasmic 1, intermediate chain 2
  ENST ID: ENST00000443458
  CDS Start-End: 171-589
gcggtgactcattgcggcccggcgagaggagtccactcctttcccttctcgaccctccagaggcggcctggggagccttgaggcttgtccggcgcccactggcttcttccggacgccctgccgtggaccgcgccctcttggccgtgaccccaggggagaaagtcacaaacatgtcagacaaaagtgaattaaaggctgagttggaacgtaagaagcagcgactggcccaaatcagagaggaaaagaagagaaaagaagaagaaaggaaaaaaaaagaaacagaccagaagaaggaagctgttgctcctgtgcaagaagaatcagatcttgaaaaaaaaaggagagaagctgaagcattgcttcaaagcatggggctaactccagaatcccccattgttttttctgaatactgggtccctcctcctatgtctccatcctccaaatctgtgagcactccaagtgaagctggaagccaagactctggagatggcgccgtgggatctaggacgctgcattgggatacagatccatcagttcttcagcttcactcagattccgatttgggacgaggacctattaaacttggaat

SEQ ID NO: 128602 - DNA, 564 bp, Homo sapiens
  Payload ID: 5170
  Gene Symbol: DYNC1I2
  Gene Name: dynein, cytoplasmic 1, intermediate chain 2
  ENST ID: ENST00000422646
  CDS Start-End: 12-564
aggtcacaaacatgtcagacaaaagtgaattaaaggctgagttggaacgtaagaagcagcgactggcccaaatcagagaggaaaagaagagaaaagaagaagaaaggaaaaaaaaagaaacagaccagaagaaggaagctgttgctcctgtgcaagaagaatcagatcttgaaaaaaaaaggagagaagctgaagcattgcttcaaagcatggggctaactccagaatcccccattgtccctcctcctatgtctccatcctccaaatctgtgagcactccaagtgaagctggaagccaagactctggagatggcgccgtgggatctaggacgctgcattgggatacagatccatcagttcttcagcttcactcagattccgatttgggacgaggacctattaaacttggaatggctaaaatcacgcaagtcgactttcctcctcgagaaattgtcacgtatacaaaggaaactcagactccagttatggctcaacccaaagaagatgaagaggaagatgatgatgtagtggctcctaaaccacctattgaacctgaagaagaga

SEQ ID NO: 128603 - DNA, 582 bp, Homo sapiens
  Payload ID: 5170
  Gene Symbol: DYNC1I2
  Gene Name: dynein, cytoplasmic 1, intermediate chain 2
  ENST ID: ENST00000411953
  CDS Start-End: 129-582
gtgtgctttggaaagccgcggagctggtggtggctacagttggtgttgggggcttaggcgagggacgttaccgggaagttgcaggcgggaggactcttccccatccagtcacctgacaggtcacaaacatgtcagacaaaagtgaattaaaggctgagttggaacgtaagaagcagcgactggcccaaatcagagaggaaaagaagagaaaagaagaagaaaggaaaaaaaaagaaacagaccagaagaaggaagctgttgctcctgtgcaagaagaatcagatcttgaaaaaaaaaggagagaagctgaagcattgcttcaaagcatggggctaactccagaatcccccattgctgagcaacctctccgtgtagtaacagcggatacctgtctatttcactatttagtccctcctcctatgtctccatcctccaaatctgtgagcactccaagtgaagctggaagccaagactctggagatggcgccgtgggatctaggacgctgcattgggatacagatccatcagttcttcagcttcactcagattccgatttgggacgaggacctattaaacttggaa

SEQ ID NO: 128604 - DNA, 577 bp, Homo sapiens
  Payload ID: 5170
  Gene Symbol: DYNC1I2
  Gene Name: dynein, cytoplasmic 1, intermediate chain 2
  ENST ID: ENST00000412370
  CDS Start-End: 166-577
gactcattgcggcccggcgagaggagtccactcctttcccttctcgaccctccagaggcggcctggggagccttgaggcttgtccggcgcccactggcttcttccggacgccctgccgtggaccgcgccctcttggccgtgaccccaggggagaaagtcacaaacatgtcagacaaaagtgaattaaaggctgagttggaacgtaagaagcagcgactggcccaaatcagagaggaaaagaagagaaaagaagaagaaaggaaaaaaaaagaaacagaccagaagaaggaagctgttgctcctgtgcaagaagaatcagatcttgaaaaaaaaaggagagaagctgaagcattgcttcaaagcatggggctaactccagaatcccccattgctgagcaacctctccgtgtagtaacagcggatacctgtctatttcactatttagtccctcctcctatgtctccatcctccaaatctgtgagcactccaagtgaagctggaagccaagactctggagatggcgccgtgggatctagacgaggacctattaaacttggaatggctaaaatcacgcaag

SEQ ID NO: 128605 - DNA, 566 bp, Homo sapiens
  Payload ID: 5170
  Gene Symbol: DYNC1I2
  Gene Name: dynein, cytoplasmic 1, intermediate chain 2
  ENST ID: ENST00000430778
  CDS Start-End: 237-566
agttttaagaacgtgaacatgtcggtcatggaggaaggctctggcttctttgacgttgaacaaaatataatgtgcctagcgtagcatacagttacgtatggaagttctcttcaccagccgtttgtatggagctgtttagaggtgtagaaagagtggaataagaaacacggtctcttgcttttagtttgttcaaacaaatcttggaagatattgtgtatatatttcaggtcacaaacatgtcagacaaaagtgaattaaaggctgagttggaacgtaagaagcagcgactggcccaaatcagagaggaaaagaagagaaaagaagaagaaaggaaaaaaaaagaaacagaccagaagaaggaagctgttgctcctgtgcaagaagaatcagatcttgaaaaaaaaaggagagaagctgaagcattgcttcaaagcatggggctaactccagaatcccccattgtccctcctcctatgtctccatcctccaaatctgtgagcactccaagtgaagctggaagccaagactctggagatggcgccgtgggatctaggacgctgcattgg

SEQ ID NO: 128606 - DNA, 1047 bp, Homo sapiens
  Payload ID: 5170
  Gene Symbol: DYNC1I2
  Gene Name: dynein, cytoplasmic 1, intermediate chain 2
  ENST ID: ENST00000435234
  CDS Start-End: 133-1047
gactgttcttccctcaaggcctccctgcctgtgttccacgtcgcaactcgaagggcggcttggcagttcctgctgacatccccgcccggcccagctttggggaggaaaggcggggagacctgggtcacaaacatgtcagacaaaagtgaattaaaggctgagttggaacgtaagaagcagcgactggcccaaatcagagaggaaaagaagagaaaagaagaagaaaggaaaaaaaaagaaacagaccagaagaaggaagctgttgctcctgtgcaagaagaatcagatcttgaaaaaaaaaggagagaagctgaagcattgcttcaaagcatggggctaactccagaatcccccattgtccctcctcctatgtctccatcctccaaatctgtgagcactccaagtgaagctggaagccaagactctggagatggcgccgtgggatctagacgaggacctattaaacttggaatggctaaaatcacgcaagtcgactttcctcctcgagaaattgtcacgtatacaaaggaaactcagactccagttatggctcaacccaaagaagatgaagaggaagatgatgatgtagtggctcctaaaccacctattgaacctgaagaagagaaaactttaaagaaagatgaggaaaatgatagtaaagctccccctcatgagctgactgaagaagaaaagcaacaaatcttgcactctgaggaatttttaagtttctttgaccattctacaagaattgtagaaagagctctttctgagcagattaacatcttctttgactatagtgggagagatttggaagacaaagaaggagagattcaagcaggtgctaaactgtcattaaatcgacaattttttgacgaacgttggtcaaagcatcgggtggttagttgtttggattggtcatctcagtatccggagttactcgtggcttcctataacaacaatgaagatgcccctcatgagcctgatggtgtggcccttgtatggaatatgaaatacaaaaaaactaccccagagtatgtgtttcactgc

SEQ ID NO: 128607 - DNA, 566 bp, Homo sapiens
  Payload ID: 5170
  Gene Symbol: DYNC1I2
  Gene Name: dynein, cytoplasmic 1, intermediate chain 2
  ENST ID: ENST00000445378
  CDS Start-End: 92-457
agttggtgttgggggcttaggcgagggacgttaccgggaagttgcaggcgggaggactcttccccatccagtcacctgacaggtcacaaacatgtcagacaaaagtgaattaaaggctgagttggaacgtaagaagcagcgactggcccaaatcagagaggaaaagaagagaaaagaagaagaaaggaaaaaaaaagaaacagaccagaagaaggaagctgttgctcctgtgcaagaagaatcagatcttgaaaaaaaaaggagagaagctgaagcattgcttcaaagcatggggctaactccagaatcccccattgacgaggacctattaaacttggaatggctaaaatcacgcaagtcgactttcctcctcgagaaattgtcacgtatacaaaggaaactcagactccagttatggctcaacccaaagaagatgaagaggaagatgatgatgtagtggctcctaaaccacctattgaacctgaagaagagaaaactttaaagaaagatgaggaaaatgatagtaaagctccccctcatgagctgactgaagaagaaaagcaaca

SEQ ID NO: 128608 - DNA, 2494 bp, Homo sapiens
  Payload ID: 5170
  Gene Symbol: DYNC1I2
  Gene Name: dynein, cytoplasmic 1, intermediate chain 2
  Uniprot ID: Q13409
  ENST ID: ENST00000508530
  CDS Start-End: 137-1972
cggaagttggattcctggcctgagaatattaggcgtagttttccagtttttggcaaagcggaaatacttaaggcccctgggttgactgggttctttgttttatctaccggcttctgctttacgacaggtcacaaacatgtcagacaaaagtgaattaaaggctgagttggaacgtaagaagcagcgactggcccaaatcagagaggaaaagaagagaaaagaagaagaaaggaaaaaaaaagaaacagaccagaagaaggaagctgttgctcctgtgcaagaagaatcagatcttgaaaaaaaaaggagagaagctgaagcattgcttcaaagcatggggctaactccagaatcccccattgtccctcctcctatgtctccatcctccaaatctgtgagcactccaagtgaagctggaagccaagactctggagatggcgccgtgggatctagacgaggacctattaaacttggaatggctaaaatcacgcaagtcgactttcctcctcgagaaattgtcacgtatacaaaggaaactcagactccagttatggctcaacccaaagaagatgaagaggaagatgatgatgtagtggctcctaaaccacctattgaacctgaagaagagaaaactttaaagaaagatgaggaaaatgatagtaaagctccccctcatgagctgactgaagaagaaaagcaacaaatcttgcactctgaggaatttttaagtttctttgaccattctacaagaattgtagaaagagctctttctgagcagattaacatcttctttgactatagtgggagagatttggaagacaaagaaggagagattcaagcaggtgctaaactgtcattaaatcgacaattttttgacgaacgttggtcaaagcatcgggtggttagttgtttggattggtcatctcagtatccggagttactcgtggcttcctataacaacaatgaagatgcccctcatgagcctgatggtgtggcccttgtatggaatatgaaatacaaaaaaactaccccagagtatgtgtttcactgccagtcagctgtgatgtctgccacatttgcaaaatttcatccaaatcttgttgttggtggtacatattcaggccaaattgtgctttgggataaccgtagcaataaaagaactccagtgcaaagaactccactgtcagcagctgcacacacacaccctgtatattgtgtaaatgttgttggaacacaaaatgctcacaatctgattagcatctctactgatggaaaaatttgttcatggagtctggacatgctttcccatccacaggatagcatggagttggttcataaacagtcaaaagcagtagctgtgacatctatgtccttccctgttggagatgtcaacaactttgttgttgggagtgaagaaggttctgtgtacacagcatgccgccatggcagcaaagctggaatcagtgagatgtttgaggggcatcaaggaccaatcactggcatccattgtcatgcagctgttggagcagtagacttctcacatctttttgtcacttcatcgtttgactggacagtaaagctttggacaactaagaataacaagcctttgtattcatttgaagataatgcagactatgtttatgatgttatgtggtcacctacccacccagccctgtttgcctgtgtggatggcatggggagattggatttgtggaatctcaataatgacacagaggtaccaactgccagcatttctgtggagggtaatcctgctcttaatcgtgtgagatggacccattctggcagagagattgctgtgggtgattctgaaggacagattgttatatacgatgtgggagagattgctgttccccgcaatgatgaatgggcacggtttggccgaacacttgcagaaattaatgcaaaccgagctgatgcagaggaggaagcagctacccgaatacctgcttagttcctgaaaaggggagtgtaactagtggatttgggaaaggttcttaagtagatcctgagactatttgcatgcttctgtctaaatgataattaaaaggaaatttcatggattaaaccatgggtttaatgcagcaaggaaacttacaatgtccctttatatataacatgcatcttgttttggatttgtgtcattttttaatatagctgattgacttcacagaaagcagcttttttgaattctaatacataggtgtatatttggtattagttattttgagttcttttcaacttataacactgtatacagttatttctaaagcacagatgaaataagttctgcatatttttaaataatcacagttccctgttatacagataatgttctcactacccataatatgtaggaacattgtttctccttagccgtagtatgcatacacctatccatgttcattctgacatcctttgttgtctttataattcatgtggtagttacctataaataaaaacaaatatgcgttaa

SEQ ID NO: 128609 - DNA, 2504 bp, Homo sapiens
  Payload ID: 5171
  Gene Symbol: DYNC1LI1
  Gene Name: dynein, cytoplasmic 1, light intermediate chain 1
  Uniprot ID: Q9Y6G9
  ENST ID: ENST00000273130
  CDS Start-End: 105-1676
gtgcgctgaacgccccatatccgggttcccgccgcctccaccgccaccgcctcagccgcctcgcacatttagtcttgccgggagtggtgtgattcccgaccaagatggcggccgtggggcgagtcggctccttcggttcttctccgccgggattatcctcgacttacactggcggccccttgggcaacgagatagcgtcgggcaacggtggcgccgcggcaggcgacgacgaggacgggcagaacctttggtcctgcatcctcagcgaggtctccacccgctcgcgctccaagctccctgcggggaagaacgtgctactgctgggtgaagatggagctggaaaaacaagcttaataagaaaaattcagggaatagaggagtataagaaaggaagaggattggaatatttgtacttaaatgtgcatgatgaagacagggatgatcaaacaagatgtaatgtttggatcttagatggagacctatatcacaaaggcctccttaaattttcactggatgccgtatctctgaaggatactctagttatgctggttgttgacatgtcaaagccttggactgctttggattctttacagaaatgggcaagtgttgttagagaacatgttgacaaactgaaaatccctcctgaagaaatgaaacaaatggaacaaaagttgattagagacttccaagaatatgtagagccaggagaagacttcccggcttctccccagagaagaaatactgcgtcacaagaagacaaagatgacagtgtagttttacctctgggtgcggatacacttacacataacttgggcattccagtactagtagtttgcacaaagtgtgatgccattagtgtattggagaaagaacatgactacagagatgaacattttgattttattcagtcacatatccggaagttttgtttacagtatggtgcagcacttatttacacttcagtaaaagaaaacaaaaatatagacttagtatataaatacatcgttcagaaactatatggatttccctataagattcctgctgttgttgtggaaaaggatgcagtatttattccagcagggtgggataatgataagaaaataggaatattacatgaaaattttcaaacattaaaagcagaagataattttgaagacatcataactaaaccacctgttcgaaagtttgtacatgagaaggaaattatggcagaagatgatcaggtgtttcttatgaagctacagtcccttttagcaaagcaaccaccaactgcagctggaaggcctgtggatgcctcaccaagagtcccaggaggctccccacgaacaccaaatagatctgtatcatctaatgttgccagcgtgtcacccattcctgctgggtcaaaaaaaattgatccaaacatgaaagctggagctacaagtgaaggcgttctggcaaatttcttcaacagtttgttgagtaaaaagactggctctccaggaggccctggtgtgagtggtggtagccctgcaggtggggctggaggtggaagcagtggtttaccaccatccaccaaaaagtcaggccagaagcctgtcttagatgttcatgcagaactagacagaattacacgaaaaccagttacagtttctcccacaacacctacatctcctacggaaggagaagcttcttgaagataccaaataaagccatttattctgttttctgggataatgtaaacatgcctctgccttttccttcaaaagtggaattagaaagctggagtgcttcttcagatggactaaatttatgtcgtgtgtgtgtgtgtgtgtgtgtgtggttacccattttttagaaggagccgtacagaagaaaaattattctacattatgtaggattgctgtttgcattgccattttgcataagaaagtaatttttgattttgaaaatctcaaaacttttagatctgaaatacagccatgtgatcgatcatattctaaaggctatttaaaacatgtaaaaggatttggggaacggcagaaaacatgcagtttgggcatttgactgacttggaagtctaagcttattttagttataactattaaaatcatttttaaaaatttgttagttttgctgacagagaaaaatcgtcagttgtcagattttgcacaccacaataaatgtaccaccacacacggaatatgctaagaaaactatcagatagcgtttgatacactagtcattgtctcaatcactgatcctgtaagttgtcatcaaaatatgatttagaaatattggccaaggtgttgctttaactgaggagaaaagaaagcacactgcctaaatgtgtaaaagaaaaatgcagaggttattaaaatgtaaagaagtaacaatctttggatttgtctatacatatatatatatatatatggctttgccttaatatacccccttttttgtttgtgactttcaactgtaatcagttaataaagtatttattctctgcattcaggttcaaataa

SEQ ID NO: 128610 - DNA, 616 bp, Homo sapiens
  Payload ID: 5171
  Gene Symbol: DYNC1LI1
  Gene Name: dynein, cytoplasmic 1, light intermediate chain 1
  ENST ID: ENST00000413350
  CDS Start-End: 47-616
acagccggcccagccccgccccgcctcgcctcccgacctgtcgcggatggctgggagagaaggggaacacgagacccttgacccaggacctgcggggacccgccctccctcaggtgaagatggagctggaaaaacaagcttaataagaaaaattcagggaatagaggagtataagaaaggaagaggattggaatatttgtacttaaatgtgcatgatgaagacagggatgatcaaacaagatgtaatgtttggatcttagatggagacctatatcacaaaggcctccttaaattttcactggatgccgtatctctgaaggatactctagttatgctggttgttgacatgtcaaagccttggactgctttggattctttacagaaatgggcaagtgttgttagagaacatgttgacaaactgaaaatccctcctgaagaaatgaaacaaatggaacaaaagttgattagagacttccaagaatatgtagagccaggagaagacttcccggcttctccccagagaagaaatactgcgtcacaagaagacaaagatgacagtgtagttttacctctgggtgcggatacacttacacataacttgggcattccagtacta

SEQ ID NO: 128611 - DNA, 1827 bp, Homo sapiens
  Payload ID: 5171
  Gene Symbol: DYNC1LI1
  Gene Name: dynein, cytoplasmic 1, light intermediate chain 1
  ENST ID: ENST00000432458
  CDS Start-End: 89-1312
atatccgggttcccgccgcctccaccgccaccgcctcagccgcctcgcacatttagtcttgccgggagtggtgtgattcccgaccaagatggcggccgtggggcgagtcggctccttcggttcttctccgccgggattatcctcgacttacactggcggccccttgggcaacgagatagcgtcgggcaacggtggcgccgcggcaggcgacgacgaggacgggcagaacctttggtcctgcatcctcagcgaggtctccacccgctcgcgctccaagctccctgcggggaagaacgtgctactgctggtgattagagacttccaagaatatgtagagccaggagaagacttcccggcttctccccagagaagaaatactgcgtcacaagaagacaaagatgacagtgtagttttacctctgggtgcggatacacttacacataacttgggcattccagtactagtagtttgcacaaagtgtgatgccattagtgtattggagaaagaacatgactacagagatgaacattttgattttattcagtcacatatccggaagttttgtttacagtatggtgcagcacttatttacacttcagtaaaagaaaacaaaaatatagacttagtatataaatacatcgttcagaaactatatggatttccctataagattcctgctgttgttgtggaaaaggatgcagtatttattccagcagggtgggataatgataagaaaataggaatattacatgaaaattttcaaacattaaaagcagaagataattttgaagacatcataactaaaccacctgttcgaaagtttgtacatgagaaggaaattatggcagaagatgatcaggtgtttcttatgaagctacagtcccttttagcaaagcaaccaccaactgcagctggaaggcctgtggatgcctcaccaagagtcccaggaggctccccacgaacaccaaatagatctgtatcatctaatgttgccagcgtgtcacccattcctgctgggtcaaaaaaaattgatccaaacatgaaagctggagctacaagtgaaggcgttctggcaaatttcttcaacagtttgttgagtaaaaagactggctctccaggaggccctggtgtgagtggtggtagccctgcaggtggggctggaggtggaagcagtggtttaccaccatccaccaaaaagtcaggccagaagcctgtcttagatgttcatgcagaactagacagaattacacgaaaaccagttacagtttctcccacaacacctacatctcctacggaaggagaagcttcttgaagataccaaataaagccatttattctgttttctgggataatgtaaacatgcctctgccttttccttcaaaagtggaattagaaagctggagtgcttcttcagatggactaaatttatgtcgtgtgtgtgtgtgtgtgtgtgtgtggttacccattttttagaaggagccgtacagaagaaaaattattctacattatgtaggattgctgtttgcattgccattttgcataagaaagtaatttttgattttgaaaatctcaaaacttttagatctgaaatacagccatgtgatcgatcatattctaaaggctatttaaaacatgtaaaaggatttggggaacggcagaaaacatgcagtttgggcatttgactgacttggaagtctaagcttattttagttataactattaaaatcatttttaaaaatttgttagttttgctgacagagaaaaatcgtcagttgtcagattttgcacaccacaataaatgtaccaccacacacggaatatgctaag

SEQ ID NO: 128612 - DNA, 666 bp, Homo sapiens
  Payload ID: 5171
  Gene Symbol: DYNC1LI1
  Gene Name: dynein, cytoplasmic 1, light intermediate chain 1
  ENST ID: ENST00000424991
  CDS Start-End: 89-666
atatccgggttcccgccgcctccaccgccaccgcctcagccgcctcgcacatttagtcttgccgggagtggtgtgattcccgaccaagatggcggccgtggggcgagtcggctccttcggttcttctccgccgggattatcctcgacttacactggcggccccttgggcaacgagatagcgtcgggcaacggtggcgccgcggcaggcgacgacgaggacgggcagaacctttggtcctgcatcctcagcgaggtctccacccgctcgcgctccaagctccctgcggggaagaacgtgctactgctggatggagtttcactcttgttgccccggctagagtgtaatggcaagatttcggctcactgcaacctccacctcctaggttcaagcgattctcctgcctcagcctcctgcgtagctgggattacaggtgaagatggagctggaaaaacaagcttaataagaaaaattcagggaatagaggagtataagaaaggaagaggattggaatatttgtacttaaatgtgcatgatgaagacagggatgatcaaacaagatgtaatgtttggatcttagatggagacctatatcacaaaggcctccttaaattttcactggatgccgtatctctgaaggatactctagttatgctggttgttgacat

SEQ ID NO: 128613 - DNA, 4515 bp, Homo sapiens
  Payload ID: 5172
  Gene Symbol: DYNC1LI2
  Gene Name: dynein, cytoplasmic 1, light intermediate chain 2
  Uniprot ID: O43237
  ENST ID: ENST00000258198
  CDS Start-End: 208-1686
gccgcccgccacctcggcggcctcgcaacccgtgggagcccgtggccatcgcagacctagaggacacgttgggcggcgcagtcgccgcggcaaggtcggcgggcggcgcggcgcgagggacggcgagcggggggcggcccggcccgggtcctcgcgggtcctcggcgggcccgggggagggccctctttgtggctgcagttggcaagatggcgccggtgggggtggagaagaagctgctgctaggtcccaacgggcccgcggtggcggccgccggcgacctgaccagtgaggaggaggaaggccagagcctatggtcctccattctgagcgaagtgtccacccgcgccaggtccaagctgccgtccggcaagaacatcctggtcttcggtgaagatggttctggtaaaacaaccctcatgactaaactacaaggagctgagcatggcaaaaaaggaagaggcctagaatatctctacctcagtgtccatgatgaggaccgagatgatcacacgcgctgcaacgtgtggattctggatggagacttgtaccacaaaggcctgctgaaatttgcagtttctgctgaatccttgccagagaccctcgtcatttttgttgcagacatgtctagaccttggactgtgatggaatctctgcagaaatgggctagtgttttacgtgagcacattgataaaatgaaaattccaccagaaaaaatgagggagctggaacggaagtttgtgaaagattttcaagactatatggaacctgaagaaggttgtcaaggttccccacagagaagaggccctctgacctcaggctccgatgaagaaaatgttgccctgcctctgggtgacaatgtgctgactcataacctggggatcccggtgttggtggtgtgcacaaagtgtgatgcggtgagtgtcctggagaaggagcacgattacagggatgagcatttggactttatccagtcacacctgcggaggttctgccttcagtatggagctgccttgatttacacatcagtgaaagaagagaaaaacctcgacttgttgtataagtatattgttcataaaacatacggtttccacttcaccacacctgccttagttgtggaaaaggatgccgtttttatacctgcaggctgggacaatgaaaagaaaatagctattttacatgaaaattttacaaccgtgaagccggaagatgcatatgaagactttattgtgaaacctcccgtgagaaagctggtccacgacaaagagttggcagcagaagatgagcaggtgttcctaatgaagcaacagtcactccttgccaagcaaccagccactcccacgagagcttctgaatctcctgcaagaggaccctctggctctccaaggacccagggtcggggagggccagccagtgtgcctagctcctccccaggcacgtcagtaaaaaagccggacccaaacatcaaaaataatgcagcaagtgaaggggtgttggccagcttcttcaacagtctgttgagtaaaaagacaggctctcctggaagtcctggtgctggtggggtgcagagcacagccaagaagtcaggacaaaagactgtgttgtcaaatgttcaggaagaactggatagaatgactcgaaagccagactctatggtaacaaactcttcaacagaaaatgaagcctgaacctccttaaaaagtgcatatgtcgaatgaccaaataactatgtatattgatctgctaagaccaggatttttctgatatggcacatgctatcagttttttggggcaggggagatgaactttaaaaaaaaaaaaaaaacttcattggcttgtccgagtgtgaaatgcacatttaggaaggttacatgtcagaccctttgttaaggataacccttggactctggggcatgtggctcttttgtgggaggcaagcacatctgggcttcttgtggaggggaaggtagagtgaaagaaagagggcccactttctaacagggtggagcaaatgagaccaagaaatcattggtaagatgatggttagtctgaccagtttcatgttagtaaattcacttgttcttgggaagcagattaagtagcagaaagtccaggaaagaaagaccagaaggagtaatgagacaagtgatggtggggaagctgaatgttgagggaggtggaggaaggaggagatgagcagtgtcagtaaatactgtgcattcagtagaagttgaagaatcattgttagaagcatttccaaacaaaacactaagcaaaatgggaattaggcttattttgaatgcatctttaacttacgaaagatgtactaattgtgggggtgcctgagtcaggcggagctgacccaggggtgggaacgatggcagctgcccaggacccatgtgcttggcccaggctatgtcctcgtgagaggtactggggtccacggatatgtgttgtggggcagacagtcactgtgggatgtcttcaaagtcagcagttacagaattagtttactttgaattttgttgtctaaatagctcctgctttattttttaaattaaattttttgtttttactatcacaggctggcctaactaatacaaaataggtgatgaacctctggttttaccataatgcaatgtgccacggaaagtttgggggaggtttttaatgtaattgcactctggttaattggctcgtaccaagccctgccttatgacttgtggaaagcttcaaggagttccactgatgcaaaagggtcttttcctagcttcctggtctgatcagtgctatgagatggacagataagtgtgaatgttttatacagaaaatggaaatgatacatttctcttgttaggtgttttcataaaatgtagcattttttttcttatggaaataagagtttcaggtgtctccccacctagggcaaattcatgcacattgtcatgttataccaccattctggaaatgatttctgtggatttgaaattgcacttttaattttatatatgacagcatttaaatgcaaacactaccatgaatttaatgtataaaatgttgtcaaaccaagggaaaaaaccacagttcaccatgtggagtttactttttttatatgaatgtttgttgtactgtgtctaagcataacttccctaatgtcattacttttacataccagatttgactgaccactaatgtagtactggggataacttaatatcctatgttgtgtcaagactctttgaagactttcttgaattgctttcgtaaaggtctgaacactgttaaggagaaagctgagtatcaacttgcctttctgatagaaatgtttcttgtgccagttttattgttgagatatactatttttttccttttttaattcagttttttaaaaaaacaaatgtattgtggcttccagttaccaggttgtctaggtaatgacagtaaactgactgtagaatgataattgtggtatagtgaccaatagatgccaaacagcttgtggcctcactaaaggtggggtcgcttagtccccgggagtaaaatgagtgacctcagaaacaagaattcctggaaaggcacatgccgaagaggaatatggtataattttaaattttaatgcaaaattttaatttgtctttattttttatcatttgaactgataagcactttttgtgtcaatataaaatatactaaaactgatgaaatgctaagacatgtcttgtgaaggaaggtttcttggagaccacttttatttactcatgagaagtggaagctcctagtatcagaagaagctgatacatagtgtcatgtgctcagtggttgccaaagtctaccaactttggggagctgcagggttctttttgggaggtgggaggaagggagatgagttttgttattttggggttttcaagcattggaaccaaaggccaaataataaacagcctttagtttttaaagtaaaattcattttatttgcagagtacacttgtatggtagactgttaaagacaattttatgactatttatgcacattataatggttacatctgctttttgtctttaaaataaaaaaaaaaatcagagaaaagcccacctttgaatacgtggctgaagataacagccaagaattggtctttcctaaaaatgcaacagataatgctgctagattgttattttgtttgcacttttttttgattggcattttaaaatcggtatttaaactgaagacattgtcatgttttattaatttaacaaagttgaaagtgactgctctgtacatcatgaccttaacaatgttaatgctgtaagtgaaagttcactgtcgtctgtatactaaatttattggtgtttctaacttaaaagtaagactgcagattatcccccaccagccttagtccaggggtgtggctctgtccgggtgcagtatgcagtcatgtggaaccttgctttctagtcctgggaaaaaaagatgtctctaattactggcttcaataaacacgaatccagactgcttacaa

SEQ ID NO: 128614 - DNA, 1502 bp, Homo sapiens
  Payload ID: 5172
  Gene Symbol: DYNC1LI2
  Gene Name: dynein, cytoplasmic 1, light intermediate chain 2
  Uniprot ID: O43237
  ENST ID: ENST00000443351
  CDS Start-End: 11-1258
agttggcaagatggcgccggtgggggtggagaagaagctgctgctaggtcccaacgggcccgcggtggcggccgccggcgacctgaccagtgaggaggaggaaggccagagcctatggtcctccattctgagcgaagtgtccacccgcgccaggtccaagctgccgtccggcaagaacatcctggtcttcggtgaagatggttctggtaaaacaaccctcatgactaaactacaaggagctgagcatggcaaaaaaggaagaggcctagaatatctctacctcagtgtccatgatgaggaccgagatgttgtgaaagattttcaagactatatggaacctgaagaaggttgtcaaggttccccacagagaagaggccctctgacctcaggctccgatgaagaaaatgttgccctgcctctgggtgacaatgtgctgactcataacctggggatcccggtgttggtggtgtgcacaaagtgtgatgcggtgagtgtcctggagaaggagcacgattacagggatgagcatttggactttatccagtcacacctgcggaggttctgccttcagtatggagctgccttgatttacacatcagtgaaagaagagaaaaacctcgacttgttgtataagtatattgttcataaaacatacggtttccacttcaccacacctgccttagttgtggaaaaggatgccgtttttatacctgcaggctgggacaatgaaaagaaaatagctattttacatgaaaattttacaaccgtgaagccggaagatgcatatgaagactttattgtgaaacctcccgtgagaaagctggtccacgacaaagagttggcagcagaagatgagcaggtgttcctaatgaagcaacagtcactccttgccaagcaaccagccactcccacgagagcttctgaatctcctgcaagaggaccctctggctctccaaggacccagggtcggggagggccagccagtgtgcctagctcctccccaggcacgtcagtaaaaaagccggacccaaacatcaaaaataatgcagcaagtgaaggggtgttggccagcttcttcaacagtctgttgagtaaaaagacaggctctcctggaagtcctggtgctggtggggtgcagagcacagccaagaagtcaggacaaaagactgtgttgtcaaatgttcaggaagaactggatagaatgactcgaaagccagactctatggtaacaaactcttcaacagaaaatgaagcctgaacctccttaaaaagtgcatatgtcgaatgaccaaataactatgtatattgatctgctaagaccaggatttttctgatatggcacatgctatcagttttttggggcaggggagatgaactttaaaaaaaaaaaaaaaacttcattggcttgtccgagtgtgaaatgcacatttaggaaggttacatgtcagaccctttgttaaggataacccttggactctggggcatgtggctcttttgtggga

SEQ ID NO: 128615 - DNA, 1145 bp, Homo sapiens
  Payload ID: 5172
  Gene Symbol: DYNC1LI2
  Gene Name: dynein, cytoplasmic 1, light intermediate chain 2
  ENST ID: ENST00000440564
  CDS Start-End: 4-819
aagatggcgccggtgggggtggagaagaagctgctgctaggtcccaacgggcccgcggtggcggccgccggcgacctgaccagtgaggaggaggaaggccagagcctatggtcctccattctgagcgaagtgtccacccgcgccaggtccaagctgccgtccggcaagaacatcctggtcttcgatcacacgcgctgcaacgtgtggattctggatggagacttgtaccacaaaggcctgctgaaatttgcagtttctgctgaatccttgccagagaccctcgtcatttttgttgcagacatgtctagaccttggactgtgatggaatctctgcagaaatgggctagtgttttacgtgagcacattgataaaatgaaaattccaccagaaaaaatgagggagctggaacggaagtttgtgaaagattttcaagactatatggaacctgaagaaggttgtcaaggttccccacagagaagaggccctctgacctcaggctccgatgaagaaaatgttgccctgcctctgggtgacaatgtgctgactcataacctggggatcccggtgttggtggtgtgcacaaagtgtgatgcggtgagtgtcctggagaaggagcacgattacagggatgagcatttggactttatccagtcacacctgcggaggttctgccttcagtatggagctgccttgatttacacatcagtgaaagaagagaaaaacctcgacttgttgtataagtatattgttcataaaacatacggtttccacttcaccacacctgccttagttgtggaaaaggatgccgtttttatgtgagttattttgagctgatgctttgaaactcttctttttaaagtacatttgctttttacattttaccccttcaaggaaggtgccttctgtctgtgtcttctacagccagctctctcactgcaccttctctctgttcctttccggattatgaggcatctgcctgagggaagtgggtggtgtggtcaggggtgctgcctttcttcctcgagagcaagttgccaaaacctaagccagccatttttggcactcactgtcaactctggtaaaatactggctggggagggaatatagggaattgtgcttgggggatcctgaatgtcttctattaa

SEQ ID NO: 128616 - DNA, 573 bp, Homo sapiens
  Payload ID: 5172
  Gene Symbol: DYNC1LI2
  Gene Name: dynein, cytoplasmic 1, light intermediate chain 2
  ENST ID: ENST00000568180
  CDS Start-End: 11-181
agttggcaagatggcgccggtgggggtggagaagaagctgctgctaggtcccaacgggcccgcggtggcggccgccggcgacctgaccagtgaggaggaggaaggccagagcctatgctgccgtccggcaagaacatcctggtcttcggtgaagatggttctggtaaaacaaccctcatgactaaactacaaggagctgagcatggcaaaaaaggaagaggcctagaatatctctacctcagtgtccatgatgaggaccgagatgatcacacgcgctgcaacgtgtggattctggatggagacttgtaccacaaaggcctgctgaaatttgcagtttctgctgaatccttgccagagaccctcgtcatttttgttgcagacatgtctagaccttggactgtgatggaatctctgcagaaatgggctagtgttttacgtgagcacattgataaaatgaaaattccaccagaaaaaatgagggagctggaacggaagtttgtgaaagattttcaagactatatggaacctgaagaaggttgtcaaggttccccacagagaagaggccctctgacc

SEQ ID NO: 128617 - DNA, 568 bp, Homo sapiens
  Payload ID: 5172
  Gene Symbol: DYNC1LI2
  Gene Name: dynein, cytoplasmic 1, light intermediate chain 2
  ENST ID: ENST00000566150
  CDS Start-End: 11-568
agttggcaagatggcgccggtgggggtggagaagaagctgctgctaggtcccaacgggcccgcggtggcggccgccggcgacctgaccagtgaggaggaggaaggccagagcctatggtcctccattctgagcgaagtgtccacccgcgccaggtccaagctgccgtccggcaagaacatcctggtcttcggtgaagatggttctggtaaaacaaccctcatgactaaactacaaggagctgagcatggcaaaaaaggaagaggcctagaatatctctacctcagtgtccatgatgaggaccgagatgacatgtctagaccttggactgtgatggaatctctgcagaaatgggctagtgttttacgtgagcacattgataaaatgaaaattccaccagaaaaaatgagggagctggaacggaagtttgtgaaagattttcaagactatatggaacctgaagaaggttgtcaaggttccccacagagaagaggccctctgacctcaggctccgatgaagaaaatgttgccctgcctctgggtgacaatgtgctgactcataacctgggg

SEQ ID NO: 128618 - DNA, 641 bp, Homo sapiens
  Payload ID: 5172
  Gene Symbol: DYNC1LI2
  Gene Name: dynein, cytoplasmic 1, light intermediate chain 2
  ENST ID: ENST00000569320
  CDS Start-End: 1-504
gcaggctgggacaatgaaaagaaaatagctattttacatgaaaattttacaaccgtgaagccggaagatgcatatgaagactttattgtgaaacctcccgtgagaaagctggtccacgacaaagagttggcagcagaagatgagcaggtgttcctaatgaagcaacaggaatctcctgcaagaggaccctctggctctccaaggacccagggtcggggagggccagccagtgtgcctagctcctccccaggcacgtcagtaaaaaagccggacccaaacatcaaaaataatgcagcaagtgaaggggtgttggccagcttcttcaacagtctgttgagtaaaaagacaggctctcctggaagtcctggtgctggtggggtgcagagcacagccaagaagtcaggacaaaagactgtgttgtcaaatgttcaggaagaactggatagaatgactcgaaagccagactctatggtaacaaactcttcaacagaaaatgaagcctgaacctccttaaaaagtgcatatgtcgaatgaccaaataactatgtatattgatctgctaagaccaggatttttctgatatggcacatgctatcagttttttggggcaggggagatgaactttaaaaaaaaaaaaaaaa

SEQ ID NO: 128619 - DNA, 563 bp, Homo sapiens
  Payload ID: 5172
  Gene Symbol: DYNC1LI2
  Gene Name: dynein, cytoplasmic 1, light intermediate chain 2
  ENST ID: ENST00000564559
  CDS Start-End: 1-277
cactcccacgagagcttctgaatctcctgcaagaggaccctctggctctccaaggacccagggtcggggagggccagccagtgtgcctagctcctccccaggcacgtcagtaaaaaagccggacccaaacatcaaaaataatgcagcaagtgaaggggtgttggccagcttcttcaacagtctgttgagtaaaaagacaggctctcctggaagtcctggtgctggtggggtgcagagcacagccaagaagtcagagtcaaggcctcctcctccctgaagctccctacttgtcacatacacacctctgtggcagccacccacctgtccttccatgtaagcaggacaaaagactgtgttgtcaaatgttcaggaagaactggatagaatgactcgaaagccagactctatggtaacaaactcttcaacagaaaatgaagcctgaacctccttaaaaagtgcatatgtcgaatgaccaaataactatgtatattgatctgctaagaccaggatttttctgatatggcacatgctatcagttttttggggcaggggagatgaacttt

SEQ ID NO: 128620 - DNA, 355 bp, Homo sapiens
  Payload ID: 5172
  Gene Symbol: DYNC1LI2
  Gene Name: dynein, cytoplasmic 1, light intermediate chain 2
  ENST ID: ENST00000563628
  CDS Start-End: 1-150
ctggtccacgacaaagagttggcagcagaagatgagcaggtgttcctaatgaagcaacagtcactccttgccaagcaaccagccactcccacgagagcttctgacaaaagactgtgttgtcaaatgttcaggaagaactggatagaatgactcgaaagccagactctatggtaacaaactcttcaacagaaaatgaagcctgaacctccttaaaaagtgcatatgtcgaatgaccaaataactatgtatattgatctgctaagaccaggatttttctgatatggcacatgctatcagttttttggggcaggggagatgaactttaaaaaaaaaaaaaaaacttcattggcttgtc

SEQ ID NO: 128621 - DNA, 566 bp, Homo sapiens
  Payload ID: 5172
  Gene Symbol: DYNC1LI2
  Gene Name: dynein, cytoplasmic 1, light intermediate chain 2
  ENST ID: ENST00000564090
  CDS Start-End: 11-133
agttggcaagatggcgccggtgggggtggagaagaagctgctgctaggtcccaacgggcccgcggtggcggccgccggcgacctgaccagtgaggaggaggaaggccagagcctatgcccggcccggggctgaccactcttgccattgtcgccacaggtcctccattctgagcgaagtgtccacccgcgccaggtccaagctgccgtccggcaagaacatcctggtcttcggtgaagatggttctggtaaaacaaccctcatgactaaactacaaggagctgagcatggcaaaaaaggaagaggcctagaatatctctacctcagtgtccatgatgaggaccgagatgatcacacgcgctgcaacgtgtggattctggatggagacttgtaccacaaaggcctgctgaaatttgcagtttctgctgaatccttgccagagaccctcgtcatttttgttgcagacatgtctagaccttggactgtgatggaatctctgcagaaatgggctagtgttttacgtgagcacattgataaaatgaaaattccaccagaaaaaatgagggag

SEQ ID NO: 128622 - DNA, 2984 bp, Homo sapiens
  Payload ID: 5173
  Gene Symbol: DYNC2H1
  Gene Name: dynein, cytoplasmic 2, heavy chain 1
  Uniprot ID: Q8NCM8
  ENST ID: ENST00000334267
  CDS Start-End: 54-2816
ctggtttcttcttccttcccccttcccccaacttccctccaccccttccaatcatggcgaacgggactgcggacgttcggaagctcttcatcttcactactacccagaattacttcgggttgatgtctgaactctgggatcagccactgttgtgcaactgtcttgaaatcaacaacttcttggatgacggcaaccagatgctcctcagggtgcagcgatccgacgcaggaatctccttttccaacacgattgagtttggtgacacaaaagataaagtgctggtgtttttcaagctgcgacctgaagtaattactgatgagaatctacatgataacattcttgtttcatctatgttagagtcacctattagttctctttaccaagcagtacggcaagtattcgcaccaatgttgttaaaggatcaggaatggagcagaaactttgatcccaaacttcagaatcttttgagtgaactagaagctgggttgggtatagttctacgaagatcagacactaacttaacaaaattgaaatttaaggaagatgacacacgaggtatccttacaccaagcgatgagttccagttttggatagaacaagctcaccgtggaaataaacagattagtaaagaaagagccaattattttaaagaattatttgaaacaattgcaagagagttttataacttggacagtctatccttactagaagttgttgacttggtggagactactcaggatgttgtagatgatgtgtggagacaaacagaacatgatcattatcctgagtcacgaatgttgcatctcttagacatcataggtggttcatttggaaggtttgttcagaaaaagttgggaactttgaacctgtgggaagatccttattatcttgtgaaagaaagtctgaaagctggtatttcaatttgtgaacagtgggtgatagtctgtaatcatctaacaggtcaggtgtggcagcgctatgttcctcatccatggaaaaatgaaaaatattttccagaaacacttgacaaacttggcaaacgccttgaagaggtcttggctattagaacaattcatgagaagtttctctattttctacctgccagtgaagagaaaatcatatgcctcactcgagtatttgaaccttttactggcctgaatcctgtgcaatataatccatatactgagcccttgtggaaagctgcggtgtctcaatatgaaaagattattgcacctgcggaacaaaaaatagcaggaaaattgaaaaattatatttcagaaattcaagacagtccacagcagcttcttcaagcattcctgaaatataaagagttggtaaagcgtccaactataagcaaagaattgatgttagaaagagaaactttactggcaagacttgtggactcaattaaagattttcgattagactttgagaatcggtgccgaggaattcctggtgatgcatctggaccactttctggcaaaaatctttcagaagttgtcaacagtatagtttgggttcgccagttggaattgaaggtagatgatactatcaagattgcagaggctcttttatctgacttgccaggatttcgatgtttccatcaaagtgccaaagatctcttagaccagcttaaactatatgaacaggaacaatttgatgattggtccagggatattcaatcaggtttatctgattccagatctggtttgtgtattgaggctagtagtcgaattatggaattggattctaatgatggattactaaaagtgcattattcagatcgtttggtgattcttctgagagaagttcgtcagctctctgcacttggctttgttattcctgccaaaatacagcaagttgcaaacattgcacagaaattctgcaagcaagcaattattcttaaacaagtggcacatttttataattctattgatcaacaaatgattcaaagtcagaggccaatgatgttacaatctgccttagcatttgaacagataattaagaattcaaaagcaggaagtggagggaaatcacagataacttgggataatcctaaagaattagaaggctatatccaaaaactccaaaatgctgctgaacggcttgccactgaaaatagaaaactgagaaaatggcacactacattttgtgaaaaggtggttgttcttatgaatattgatctgcttcggcagcaacagcgctggaaagatggattacaagaattgagaactggcttagcaactgtagaagcacagtgtcctctcgcatggcagagcaagtgggaaggcccagaagatcccttacaatacctgagaggtcttgttgcccgtgcccttgcaatacagaactgggtagataaagctgaaaaacaggctcttctctctgaaacacttgacctatcagaacttttccatccagacacatttcttaatgctcttcgccaggaaactgcaagggcagtgggtcgttctgtggatagccttaaatttgtagcctcatggaaaggtcgactgcaagaagcaaagctacaaattaagatcagtggcttgttactagaaggatgtagttttgatggaaatcaactttctgaaaatcagcttgattctcccagcgtgtcatcagtgctcccttgttttatgggctggattccacaggatgcatgtggtccatattctccggatgagtgcatctctttgcctgtttacacaagtgctgaaagggatcgtgtggttaccaatattgatgttccatgtgggggcaaccaagaccagtggattcagtgtggagcagctctattcctaaaaaatcagtagaatctaatgacaacaaaagccatcttcacaaaagggaacattgattctttaagctttaaatcaaacatgtggtcagtctacatttgaaatgttagttcaaaatattaacatatagttatgttgttgatgtcactgaaattttaatgtgtaaaagcagcactgtgcatc

SEQ ID NO: 128623 - DNA, 13678 bp, Homo sapiens
  Payload ID: 5173
  Gene Symbol: DYNC2H1
  Gene Name: dynein, cytoplasmic 2, heavy chain 1
  Uniprot ID: Q8NCM8
  ENST ID: ENST00000375735
  CDS Start-End: 145-13068
gactacccctggcaaccgcgaagctctgcggtcccgcggtcgggctacgggtttgagcaaagctcctctcttcccttcacttccctccggactggtttcttcttccttcccccttcccccaacttccctccaccccttccaatcatggcgaacgggactgcggacgttcggaagctcttcatcttcactactacccagaattacttcgggttgatgtctgaactctgggatcagccactgttgtgcaactgtcttgaaatcaacaacttcttggatgacggcaaccagatgctcctcagggtgcagcgatccgacgcaggaatctccttttccaacacgattgagtttggtgacacaaaagataaagtgctggtgtttttcaagctgcgacctgaagtaattactgatgagaatctacatgataacattcttgtttcatctatgttagagtcacctattagttctctttaccaagcagtacggcaagtattcgcaccaatgttgttaaaggatcaggaatggagcagaaactttgatcccaaacttcagaatcttttgagtgaactagaagctgggttgggtatagttctacgaagatcagacactaacttaacaaaattgaaatttaaggaagatgacacacgaggtatccttacaccaagcgatgagttccagttttggatagaacaagctcaccgtggaaataaacagattagtaaagaaagagccaattattttaaagaattatttgaaacaattgcaagagagttttataacttggacagtctatccttactagaagttgttgacttggtggagactactcaggatgttgtagatgatgtgtggagacaaacagaacatgatcattatcctgagtcacgaatgttgcatctcttagacatcataggtggttcatttggaaggtttgttcagaaaaagttgggaactttgaacctgtgggaagatccttattatcttgtgaaagaaagtctgaaagctggtatttcaatttgtgaacagtgggtgatagtctgtaatcatctaacaggtcaggtgtggcagcgctatgttcctcatccatggaaaaatgaaaaatattttccagaaacacttgacaaacttggcaaacgccttgaagaggtcttggctattagaacaattcatgagaagtttctctattttctacctgccagtgaagagaaaatcatatgcctcactcgagtatttgaaccttttactggcctgaatcctgtgcaatataatccatatactgagcccttgtggaaagctgcggtgtctcaatatgaaaagattattgcacctgcggaacaaaaaatagcaggaaaattgaaaaattatatttcagaaattcaagacagtccacagcagcttcttcaagcattcctgaaatataaagagttggtaaagcgtccaactataagcaaagaattgatgttagaaagagaaactttactggcaagacttgtggactcaattaaagattttcgattagactttgagaatcggtgccgaggaattcctggtgatgcatctggaccactttctggcaaaaatctttcagaagttgtcaacagtatagtttgggttcgccagttggaattgaaggtagatgatactatcaagattgcagaggctcttttatctgacttgccaggatttcgatgtttccatcaaagtgccaaagatctcttagaccagcttaaactatatgaacaggaacaatttgatgattggtccagggatattcaatcaggtttatctgattccagatctggtttgtgtattgaggctagtagtcgaattatggaattggattctaatgatggattactaaaagtgcattattcagatcgtttggtgattcttctgagagaagttcgtcagctctctgcacttggctttgttattcctgccaaaatacagcaagttgcaaacattgcacagaaattctgcaagcaagcaattattcttaaacaagtggcacatttttataattctattgatcaacaaatgattcaaagtcagaggccaatgatgttacaatctgccttagcatttgaacagataattaagaattcaaaagcaggaagtggagggaaatcacagataacttgggataatcctaaagaattagaaggctatatccaaaaactccaaaatgctgctgaacggcttgccactgaaaatagaaaactgagaaaatggcacactacattttgtgaaaaggtggttgttcttatgaatattgatctgcttcggcagcaacagcgctggaaagatggattacaagaattgagaactggcttagcaactgtagaagcacagggattccaagcaagtgacatgcatgcatggaaacaacactggaatcatcaactgtacaaagctctggagcatcagtaccagatgggcttagaagcacttaatgagaatttgccagaaataaatatagacttaacttacaaacagggacgattacaattcaggcccccttttgaagaaatccgggctaaatattatagagaaatgaagagattcatcggcattccaaatcagtttaagggagtgggtgaggcaggagatgaatctattttttctattatgattgatagaaatgcaagtggatttttgacgattttcagcaaagcagaagatctgtttagaagattgtcagctgttttacaccaacataaggaatggattgtaattgggcaagttgatatggaagctctggtggaaaagcatctttttactgtacatgattgggagaaaaattttaaagcattaaaaataaaggggaaagaagtagaacgacttccaagtgctgtcaaggtagattgtttaaatattaattgcaaccctgtgaagactgtgattgatgatctcatccagaagttatttgatctgcttgttctttctttgaagaagtccatacaggctcatttacatgaaattgatacatttgttactgaggctatggaagtcttaacaattatgccccagtctgtggaagaaattggtgatgcaaatctacaatatagtaagttacaagaacggaagccagagattttgcccttatttcaagaagctgaagacaaaaacagacttttacgaactgtggctggtggaggtttagaaacaattagtaatttgaaagccaagtgggataaatttgagttaatgatggaaagtcaccaacttatgattaaagaccagattgaagtgatgaaaggaaatgtgaaatcacgtcttcagatctattatcaagaactggaaaaatttaaagctcgttgggaccaactaaagcctggtgatgatgttattgaaactggccaacataatactcttgataaaagtgcaaagttaataaaagagaaaaaaattgagtttgatgatcttgaagtcacaagaaaaaagctggttgatgattgccatcattttagactggaagagcctaatttctccctggcaagtagtatctctaaagatatcgagagctgtgcccaaatttgggccttttatgaagagtttcaacaaggatttcaggaaatggccaatgaagactggatcacttttcggactaagacatacctgtttgaggaatttttgatgaactggcatgacagattaaggaaggttgaagaacattcagtgatgacagtgaaattacaatcagaggttgacaaatataaaatcgtaattcctatcttgaaatatgtgagaggggagcatctttctccagatcactggcttgacctttttcgtctccttggacttcctagggggactagtctagagaaactactgtttggtgatttgctcagagtagctgatacaattgtagccaaagctgccgaccttaaagatttaaatagtcgggcacaaggtgaagttacaatcagagaagctttacgtgaacttgatctttggggagttggagcagtgtttacattaattgattatgaagacagccaaagtcgaactatgaagctgattaaagactggaaagatatagtaaatcaggttggagataatagatgccttctccaatccttaaaggattctccttattataaaggatttgaagataaagtatcaatttgggaaagaaaacttgcagagttagatgaatacctgcagaatttaaatcatattcagagaaagtgggtgtatttggaacccattttcggccgtggagcattgccaaaagaacagacacgcttcaacagagttgatgaagattttagatcaataatgactgatatcaagaaagacaatagagtcacaacattaactactcatgctggaataagaaattctctactaacaatacttgatcagcttcaaagatgtcagaaatcattaaatgaatttttggaggaaaaacgctcagcattcccaagattttattttattggtgatgatgacttattagaaatattgggccagtctaccaacccatcagtgattcagtctcacctgaagaagctttttgctggtattaacagtgtttgctttgatgagaaatcaaaacatataactgcaatgaaatctttagagggagaagttgtaccttttaaaaataaagttcctctatcaaataatgtagagacatggttgaatgatttggccttagaaatgaagaaaactttggaacagttgttgaaggaatgtgttactactgggcgaagttctcaaggtgcagttgacccatctctgttcccttcacagattttatgcttggcggagcagattaaattcactgaagatgtagaaaatgctattaaagatcatagtcttcatcagattgaaacacaactggtgaataagttagagcaatatactaacattgatacaagttctgaggatccagggaatactgaatcgggcatcctggagcttaaacttaaagccctaattcttgacattatccataatattgatgtggtaaagcagttaaaccaaattcaggttcatacaactgaagactgggcttggaaaaaacaacttagattctatatgaaaagtgatcatacatgttgtgttcaaatggtggattctgaatttcagtatacttatgaatatcagggtaatgcttccaaactggtttatactccactgacagacaagtgctacttaactctcactcaagccatgaagatgggacttggaggaaatccttatggaccagctggaactgggaaaacggaatcagtaaaggctttaggtggacttcttggaagacaagttttagtctttaattgtgatgagggcatcgatgtgaagtcaatgggacgaatatttgttggtttggtgaagtgtggggcctggggttgttttgatgaatttaataggctggaagaatctgtactgtcagcagtttctatgcaaatccagacaattcaagatgctttgaagaatcatagaactgtatgtgaactgcttggcaaggaggtagaagtaaattctaattctggaatttttatcactatgaatcctgctggaaaaggttatggaggaagacaaaaactgcctgataatcttaaacagcttttcaggcccgtagctatgtctcatccagacaatgagcttattgcagaagttattctctattcggaaggctttaaagacgctaaagtattgagcagaaaattggtagctattttcaatctatctagggaacttttgacacctcagcaacattatgattggggtttgagagctttgaagacagttctgagaggaagtggaaatctccttagacagctaaacaaaagtggcactacacagaatgctaatgaaagtcatattgtggtacaagcactgaggcttaataccatgtcaaagtttacgtttactgattgcacccggtttgatgcactgataaaagatgtctttccgggaattgaattgaaagaagtggaatatgatgaactaagtgctgcattaaagcaggtctttgaagaggccaattatgaaattatacccaatcagatcaaaaaggctttagaattgtatgaacagttatgccagaggatgggagttgttattgttggtccaagtggtgctggaaaatcaacgctttggagaatgttaagggctgcgctttgtaaaactggcaaagtagtgaaacaatatactatgaatcccaaagctatgcctcgatatcaattattaggccatattgacatggacacaagagaatggtctgatggtgttttgacaaatagtgctcgtcaagtggttcgggaacctcaagatgtcagctcatggataatctgtgatggtgatattgaccctgaatggatagaatctctgaattctgttctggatgataatcgactgctgactatgcccagtggagaaaggattcagtttggcccaaatgttaactttgtatttgaaactcatgatttaagttgtgcatcaccagccacaatatctagaatgggaatgatctttcttagtgatgaagagacagatcttaattctctgataaaatcttggttgaggaatcagcctgctgaatatagaaataatcttgaaaattggattggagattattttgaaaaggctttacaatgggttctaaagcagaatgactatgtggtagaaacaagtttggttgggactgtgatgaatggtttgtcacatctacatggttgcagagatcatgacgaattcattattaatctcataaggggacttggtggaaatctgaatatgaagtcacgtttggaatttaccaaagaggtttttcattgggcacgagaatctcctccagactttcacaaacctatggatacctactatgactctactaggggtcgattagcaacatatgtgcttaagaagccagaagacttgactgctgatgatttcagtaacggcttaactcttccagtcattcagactcctgacatgcaacgaggtctagattatttcaaaccatggttaagttctgatactaaacagccctttattctggtaggaccagaaggatgtggcaaagggatgctgctcaggtacgcattttcacaactccggtccactcaaattgctacagttcactgtagtgcacaaaccacttctcgacatctcctgcagaaactgagccagacttgcatggtaatcagtactaatactggtcgtgtatacagaccaaaagactgtgaaagacttgttctgtacttaaaagatatcaacctacctaaacttgataaatgggggaccagtactttggtagcattcctacaacaggtattgacgtatcaaggattttatgatgaaaatttggaatgggttggtctagaaaatattcaaattgtggcttctatgtcagctggaggaagactgggaagacataaacttactaccagatttacttccatcgttcgtctttgttctatagattacccagaaagagagcagttacaaacgatttatggagcatatttggaaccagttctacataaaaatctgaagaatcattctatttggggttcttcatcaaaaatttatcttttagcaggatctatggtacaagtgtatgaacaggtgcgagccaaatttacagttgatgattatagtcactatttctttactccttgcattcttacccaatgggttcttggcttatttagatatgatttagaaggaggatcctcaaaccatccactagattatgtgttagaaattgtagcatatgaggcacggcgcttatttcgtgacaaaattgttggtgcaaaggaacttcatttatttgacatcattttaacatcagtgtttcaaggagattggggctcagacatattagacaatatgtcagatagtttctacgttacatggggagctcggcataattcaggagcaagggcagccccaggacaaccattacctccacatggaaaaccacttggaaaactaaactctactgatctcaaggatgttattaaaaagggtcttattcattatggacgagataaccagaatttagacattttacttttccacgaagtcttggagtatatgtctaggatagatagagtgctgagtttccctggaggttcacttctattagcaggacgcagtggtgtaggtcgtcggaccatcacttctttagtcagtcacatgcatggagcggtcctgttttctccaaagatttccagaggatatgaactgaagcagttcaaaaatgatctcaaacatgtgctgcaacttgcaggaattgaagcacaacaggtagttttacttcttgaggattaccagtttgtacatcctacatttttggagatgatcaatagccttttgtcttcaggtgaagttcctggactctatactcttgaagaattagagcccttgctgttaccacttaaggatcaagcttcacaagatggtttttttggaccagtcttcaattacttcacatatagaattcagcaaaacttgcatattgtcttgataatggattctgcaaattcaaacttcatgataaactgtgagagtaatccagctttgcataagaaatgccaggtgttgtggatggagggttggtccaatagcagtatgaagaaaatacctgaaatgttattcagtgaaacaggtggtggagaaaaatacaatgataaaaaacgaaaagaagaaaagaaaaaaaattcagttgatcctgattttctaaaatcatttttattaatccatgaatcttgtaaagcatatggtgctacaccaagccgatacatgacctttttacatgtgtattctgccattagtagtagcaagaaaaaggaattattaaaaagacaaagtcatttgcaggctggtgtatctaaactaaatgaagctaaagctcttgtggatgaactgaacagaaaagctggagaacaaagtgtgttacttaaaacgaagcaagatgaagcagatgctgcccttcaaatgatcacagtgtcaatgcaggatgctagtgagcaaaaaacagaacttgaaagactgaagcacagaatagcagaagaagttgttaaaattgaagaaagaaaaaataaaattgatgatgaattaaaagaagtacaacctttagtcaatgaagctaaactagcagttggaaacattaagcccgaatcactttcagaaattcgctcactacgcatgccacctgatgtaattagagatattcttgaaggagttttaaggttgatgggtatctttgatacatcttgggtgagcatgaaaagtttccttgcaaaaagaggtgtaagagaagacatagcaacctttgatgcccgaaatatttcaaaggaaataagagagagtgttgaagaacttctttttaaaaataaaggctcttttgatccaaagaatgctaagcgtgccagtactgcagctgcacctttggctgcctgggtgaaagccaatattcagtattcccatgtcttggaacgaattcatcctttggaaactgaacaggcaggattagaatcgaatctgaagaaaactgaagacagaaaaaggaaactagaggagcttcttaattctgttggtcaaaaggtatcagaactcaaagaaaaatttcagagcaggacttcagaagctgccaaacttgaggctgaagtaagcaaggcacaagaaacaatcaaagctgcagaagtcttaattaatcagcttgacagagaacataagagatggaatgcacaggttgtagagataacagaggaattagctactcttcctaaaagagctcaacttgctgctgcatttattacatatctttctgctgctcctgaatctctgagaaaaacctgtttggaagaatggaccaagtcagctggtcttgagaaatttgatctgaggagatttctttgtactgaaagtgagcagttaatttggaaaagtgaaggcctaccatcagatgacctttccatagaaaatgctcttgtaatattacagagtcgagtgtgcccatttcttatagatccttcttcccaagctacagagtggttaaaaacacatttgaaagactcacgtttagaagttatcaatcagcaggatagtaactttatcacagctcttgaattagcagtacgttttgggaaaacccttattatacaagagatggatggtgtagaacctgttctttatccattattgagacgagatctggttgctcaaggaccacgttatgtggtacaaataggtgacaaaattattgactacaatgaagaattccgcctctttttgtcaacaagaaacccaaatccttttattccaccggatgcagcttccattgttactgaggttaactttactacaacaagaagtggattacgagggcagcttttagctttaaccattcagcatgagaaacctgatttagaagaacagaaaacaaaactattacaacaggaagaagataagaaaatacagctagccaagctcgaagaatctcttctagagacacttgccacatctcaaggcaatattttggaaaataaggatttgattgagtctttgaatcagacaaaagcaagcagtgcacttattcaagagtcacttaaagaatcttacaaactccaaatttcccttgatcaagaacgggatgcctatctccccctggctgagagtgccagcaagatgtacttcattatttctgatttgtccaaaattaataacatgtaccgttttagtttggctgcttttctccgacttttccaacgagctctacaaaacaaacaggattctgaaaatacagaacagagaatccagtcacttatcagctcattacaacatatggtatatgaatatatatgtcgttgtctatttaaggctgatcagttgatgttcgctttgcattttgttcgaggcatgcatcctgaactttttcaagaaaatgaatgggatacgtttacaggtgtggttgttggagacatgttacggaaagctgactctcaacaaaaaatacgtgatcagcttccgtcttggatagatcaggaacgaagctgggccgtggcaacattaaagattgctctccccagtctttatcagaccctctgctttgaagatgcagctctgtggcgtacttattataataattcaatgtgtgagcaagagtttccatctatccttgcaaagaaagtttccttatttcagcagattcttgtagtacaggcgctaagaccggacagattgcaaagtgccatggctctttttgcatgtaaaactctgggactgaaagaggtgtccccactgcctctaaatctcaaacgtttatacaaagagacactggaaattgaacccatcttgataattatttctccgggtgctgatccttctcaggaacttcaagaactagctaatgctgaaagaagcggagagtgttatcaccaggttgccatgggtcaaggtcaagctgatttagcaattcaaatgctaaaagaatgtgcccgcaatggagactggctctgtttgaagaacttacatcttgtggtatcttggctgccagttctggaaaaggaattgaatactcttcaacctaaagatacctttcgtctttggctcactgcagaagttcatcccaactttactcctattttactacagtcaagtctgaagataacatatgagtcacctccaggtttaaagaagaatttaatgcgtacttatgagtcttggactcctgagcaaattagcaaaaaagataatacacatcgagctcatgctctcttcagtcttgcatggtttcatgctgcatgtcaagaaagaagaaactatattcctcagggttggacaaagttttatgaattttctttatcagatcttcgggctgggtacaacattattgacagactttttgatggtgccaaagatgtacaatgggaatttgtacatggtttacttgaaaatgctatttatggaggacgtatagacaactattttgaccttagagttcttcagtcatacctgaagcagttttttaattcttcagttattgatgtattcaaccaaaggaacaagaaaagcatttttccatattccgtatctctaccacaatcctgcagcattttggactatcgtgctgtcattgagaaaattccagaggacgacaaacctagtttctttggtctgcctgccaatatcgctcgctcatctcagcgcatgatcagttctcaggttatttcacagttgaggattttgggcagatccataacagctggttccaaatttgatagagaaatctggtctaatgaactttctcctgtcctcaatctctggaagaaactaaaccagaattcaaacctaatacatcagaaagtgcctcctcctaacgatcgacaaggatctccaatactgtcattcatcattcttgaacaatttaatgctattcgtttagtacaaagtgtccaccagtctcttgctgctctcagcaaagtcatcagaggaactactttactgagttcagaagtacaaaaattggcaagtgctttattaaaccaaaagtgtcctctcgcatggcagagcaagtgggaaggcccagaagatcccttacaatacctgagaggtcttgttgcccgtgcccttgcaatacagaactgggtagataaagctgaaaaacaggctcttctctctgaaacacttgacctatcagaacttttccatccagacacatttcttaatgctcttcgccaggaaactgcaagggcagtgggtcgttctgtggatagccttaaatttgtagcctcatggaaaggtcgactgcaagaagcaaagctacaaattaagatcagtggcttgttactagaaggatgtagttttgatggaaatcaactttctgaaaatcagcttgattctcccagcgtgtcatcagtgctcccttgttttatgggctggattccacaggatgcatgtggtccatattctccggatgagtgcatctctttgcctgtttacacaagtgctgaaagggatcgtgtggttaccaatattgatgttccatgtgggggcaaccaagaccagtggattcagtgtggagcagctctattcctaaaaaatcagtagaatctaatgacaacaaaagccatcttcacaaaagggaacattgattctttaagctttaaatcaaacatgtggtcagtctacatttgaaatgttagttcaaaatattaacatatagttatgttgttgatgtcactgaaattttaatgtgtaaaagcagcactgtgcatcttttaaagtaataaattaatggagttattgttaaaacagagtattcttttgacaacattaaatatttctgtgagaaagttcacttttccagtggctcaaaaatttgttttaggtcagagattttaagtggtatattaaccaataataaatattttggctgtcatttgtgtcataattatttaataaaagagcattcataatttttgcagtcttcccatgactctttttacatactgaagaatgtattataaagttataatgaatgtataaaagtatcaacatgaatataattatactatgctaattataatatacaaatatataattattgtcataattatatacttataactaatatcttaaggtaattcaaataggaataattcaggtgacataataatggaggataaattctggttattaaacattcagcttttttgtg

SEQ ID NO: 128624 - DNA, 12945 bp, Homo sapiens
  Payload ID: 5173
  Gene Symbol: DYNC2H1
  Gene Name: dynein, cytoplasmic 2, heavy chain 1
  Uniprot ID: Q8NCM8
  ENST ID: ENST00000398093
  CDS Start-End: 1-12945
atggcgaacgggactgcggacgttcggaagctcttcatcttcactactacccagaattacttcgggttgatgtctgaactctgggatcagccactgttgtgcaactgtcttgaaatcaacaacttcttggatgacggcaaccagatgctcctcagggtgcagcgatccgacgcaggaatctccttttccaacacgattgagtttggtgacacaaaagataaagtgctggtgtttttcaagctgcgacctgaagtaattactgatgagaatctacatgataacattcttgtttcatctatgttagagtcacctattagttctctttaccaagcagtacggcaagtattcgcaccaatgttgttaaaggatcaggaatggagcagaaactttgatcccaaacttcagaatcttttgagtgaactagaagctgggttgggtatagttctacgaagatcagacactaacttaacaaaattgaaatttaaggaagatgacacacgaggtatccttacaccaagcgatgagttccagttttggatagaacaagctcaccgtggaaataaacagattagtaaagaaagagccaattattttaaagaattatttgaaacaattgcaagagagttttataacttggacagtctatccttactagaagttgttgacttggtggagactactcaggatgttgtagatgatgtgtggagacaaacagaacatgatcattatcctgagtcacgaatgttgcatctcttagacatcataggtggttcatttggaaggtttgttcagaaaaagttgggaactttgaacctgtgggaagatccttattatcttgtgaaagaaagtctgaaagctggtatttcaatttgtgaacagtgggtgatagtctgtaatcatctaacaggtcaggtgtggcagcgctatgttcctcatccatggaaaaatgaaaaatattttccagaaacacttgacaaacttggcaaacgccttgaagaggtcttggctattagaacaattcatgagaagtttctctattttctacctgccagtgaagagaaaatcatatgcctcactcgagtatttgaaccttttactggcctgaatcctgtgcaatataatccatatactgagcccttgtggaaagctgcggtgtctcaatatgaaaagattattgcacctgcggaacaaaaaatagcaggaaaattgaaaaattatatttcagaaattcaagacagtccacagcagcttcttcaagcattcctgaaatataaagagttggtaaagcgtccaactataagcaaagaattgatgttagaaagagaaactttactggcaagacttgtggactcaattaaagattttcgattagactttgagaatcggtgccgaggaattcctggtgatgcatctggaccactttctggcaaaaatctttcagaagttgtcaacagtatagtttgggttcgccagttggaattgaaggtagatgatactatcaagattgcagaggctcttttatctgacttgccaggatttcgatgtttccatcaaagtgccaaagatctcttagaccagcttaaactatatgaacaggaacaatttgatgattggtccagggatattcaatcaggtttatctgattccagatctggtttgtgtattgaggctagtagtcgaattatggaattggattctaatgatggattactaaaagtgcattattcagatcgtttggtgattcttctgagagaagttcgtcagctctctgcacttggctttgttattcctgccaaaatacagcaagttgcaaacattgcacagaaattctgcaagcaagcaattattcttaaacaagtggcacatttttataattctattgatcaacaaatgattcaaagtcagaggccaatgatgttacaatctgccttagcatttgaacagataattaagaattcaaaagcaggaagtggagggaaatcacagataacttgggataatcctaaagaattagaaggctatatccaaaaactccaaaatgctgctgaacggcttgccactgaaaatagaaaactgagaaaatggcacactacattttgtgaaaaggtggttgttcttatgaatattgatctgcttcggcagcaacagcgctggaaagatggattacaagaattgagaactggcttagcaactgtagaagcacagggattccaagcaagtgacatgcatgcatggaaacaacactggaatcatcaactgtacaaagctctggagcatcagtaccagatgggcttagaagcacttaatgagaatttgccagaaataaatatagacttaacttacaaacagggacgattacaattcaggcccccttttgaagaaatccgggctaaatattatagagaaatgaagagattcatcggcattccaaatcagtttaagggagtgggtgaggcaggagatgaatctattttttctattatgattgatagaaatgcaagtggatttttgacgattttcagcaaagcagaagatctgtttagaagattgtcagctgttttacaccaacataaggaatggattgtaattgggcaagttgatatggaagctctggtggaaaagcatctttttactgtacatgattgggagaaaaattttaaagcattaaaaataaaggggaaagaagtagaacgacttccaagtgctgtcaaggtagattgtttaaatattaattgcaaccctgtgaagactgtgattgatgatctcatccagaagttatttgatctgcttgttctttctttgaagaagtccatacaggctcatttacatgaaattgatacatttgttactgaggctatggaagtcttaacaattatgccccagtctgtggaagaaattggtgatgcaaatctacaatatagtaagttacaagaacggaagccagagattttgcccttatttcaagaagctgaagacaaaaacagacttttacgaactgtggctggtggaggtttagaaacaattagtaatttgaaagccaagtgggataaatttgagttaatgatggaaagtcaccaacttatgattaaagaccagattgaagtgatgaaaggaaatgtgaaatcacgtcttcagatctattatcaagaactggaaaaatttaaagctcgttgggaccaactaaagcctggtgatgatgttattgaaactggccaacataatactcttgataaaagtgcaaagttaataaaagagaaaaaaattgagtttgatgatcttgaagtcacaagaaaaaagctggttgatgattgccatcattttagactggaagagcctaatttctccctggcaagtagtatctctaaagatatcgagagctgtgcccaaatttgggccttttatgaagagtttcaacaaggatttcaggaaatggccaatgaagactggatcacttttcggactaagacatacctgtttgaggaatttttgatgaactggcatgacagattaaggaaggttgaagaacattcagtgatgacagtgaaattacaatcagaggttgacaaatataaaatcgtaattcctatcttgaaatatgtgagaggggagcatctttctccagatcactggcttgacctttttcgtctccttggacttcctagggggactagtctagagaaactactgtttggtgatttgctcagagtagctgatacaattgtagccaaagctgccgaccttaaagatttaaatagtcgggcacaaggtgaagttacaatcagagaagctttacgtgaacttgatctttggggagttggagcagtgtttacattaattgattatgaagacagccaaagtcgaactatgaagctgattaaagactggaaagatatagtaaatcaggttggagataatagatgccttctccaatccttaaaggattctccttattataaaggatttgaagataaagtatcaatttgggaaagaaaacttgcagagttagatgaatacctgcagaatttaaatcatattcagagaaagtgggtgtatttggaacccattttcggccgtggagcattgccaaaagaacagacacgcttcaacagagttgatgaagattttagatcaataatgactgatatcaagaaagacaatagagtcacaacattaactactcatgctggaataagaaattctctactaacaatacttgatcagcttcaaagatgtcagaaatcattaaatgaatttttggaggaaaaacgctcagcattcccaagattttattttattggtgatgatgacttattagaaatattgggccagtctaccaacccatcagtgattcagtctcacctgaagaagctttttgctggtattaacagtgtttgctttgatgagaaatcaaaacatataactgcaatgaaatctttagagggagaagttgtaccttttaaaaataaagttcctctatcaaataatgtagagacatggttgaatgatttggccttagaaatgaagaaaactttggaacagttgttgaaggaatgtgttactactgggcgaagttctcaaggtgcagttgacccatctctgttcccttcacagattttatgcttggcggagcagattaaattcactgaagatgtagaaaatgctattaaagatcatagtcttcatcagattgaaacacaactggtgaataagttagagcaatatactaacattgatacaagttctgaggatccagggaatactgaatcgggcatcctggagcttaaacttaaagccctaattcttgacattatccataatattgatgtggtaaagcagttaaaccaaattcaggttcatacaactgaagactgggcttggaaaaaacaacttagattctatatgaaaagtgatcatacatgttgtgttcaaatggtggattctgaatttcagtatacttatgaatatcagggtaatgcttccaaactggtttatactccactgacagacaagtgctacttaactctcactcaagccatgaagatgggacttggaggaaatccttatggaccagctggaactgggaaaacggaatcagtaaaggctttaggtggacttcttggaagacaagttttagtctttaattgtgatgagggcatcgatgtgaagtcaatgggacgaatatttgttggtttggtgaagtgtggggcctggggttgttttgatgaatttaataggctggaagaatctgtactgtcagcagtttctatgcaaatccagacaattcaagatgctttgaagaatcatagaactgtatgtgaactgcttggcaaggaggtagaagtaaattctaattctggaatttttatcactatgaatcctgctggaaaaggttatggaggaagacaaaaactgcctgataatcttaaacagcttttcaggcccgtagctatgtctcatccagacaatgagcttattgcagaagttattctctattcggaaggctttaaagacgctaaagtattgagcagaaaattggtagctattttcaatctatctagggaacttttgacacctcagcaacattatgattggggtttgagagctttgaagacagttctgagaggaagtggaaatctccttagacagctaaacaaaagtggcactacacagaatgctaatgaaagtcatattgtggtacaagcactgaggcttaataccatgtcaaagtttacgtttactgattgcacccggtttgatgcactgataaaagatgtctttccgggaattgaattgaaagaagtggaatatgatgaactaagtgctgcattaaagcaggtctttgaagaggccaattatgaaattatacccaatcagatcaaaaaggctttagaattgtatgaacagttatgccagaggatgggagttgttattgttggtccaagtggtgctggaaaatcaacgctttggagaatgttaagggctgcgctttgtaaaactggcaaagtagtgaaacaatatactatgaatcccaaagctatgcctcgatatcaattattaggccatattgacatggacacaagagaatggtctgatggtgttttgacaaatagtgctcgtcaagtggttcgggaacctcaagatgtcagctcatggataatctgtgatggtgatattgaccctgaatggatagaatctctgaattctgttctggatgataatcgactgctgactatgcccagtggagaaaggattcagtttggcccaaatgttaactttgtatttgaaactcatgatttaagttgtgcatcaccagccacaatatctagaatgggaatgatctttcttagtgatgaagagacagatcttaattctctgataaaatcttggttgaggaatcagcctgctgaatatagaaataatcttgaaaattggattggagattattttgaaaaggctttacaatgggttctaaagcagaatgactatgtggtagaaacaagtttggttgggactgtgatgaatggtttgtcacatctacatggttgcagagatcatgacgaattcattattaatctcataaggggacttggtggaaatctgaatatgaagtcacgtttggaatttaccaaagaggtttttcattgggcacgagaatctcctccagactttcacaaacctatggatacctactatgactctactaggggtcgattagcaacatatgtgcttaagaagccagaagacttgactgctgatgatttcagtaacggcttaactcttccagtcattcagactcctgacatgcaacgaggtctagattatttcaaaccatggttaagttctgatactaaacagccctttattctggtaggaccagaaggatgtggcaaagggatgctgctcaggtacgcattttcacaactccggtccactcaaattgctacagttcactgtagtgcacaaaccacttctcgacatctcctgcagaaactgagccagacttgcatggtaatcagtactaatactggtcgtgtatacagaccaaaagactgtgaaagacttgttctgtacttaaaagatatcaacctacctaaacttgataaatgggggaccagtactttggtagcattcctacaacaggtattgacgtatcaaggattttatgatgaaaatttggaatgggttggtctagaaaatattcaaattgtggcttctatgtcagctggaggaagactgggaagacataaacttactaccagatttacttccatcgttcgtctttgttctatagattacccagaaagagagcagttacaaacgatttatggagcatatttggaaccagttctacataaaaatctgaagaatcattctatttggggttcttcatcaaaaatttatcttttagcaggatctatggtacaagtgtatgaacaggtgcgagccaaatttacagttgatgattatagtcactatttctttactccttgcattcttacccaatgggttcttggcttatttagatatgatttagaaggaggatcctcaaaccatccactagattatgtgttagaaattgtagcatatgaggcacggcgcttatttcgtgacaaaattgttggtgcaaaggaacttcatttatttgacatcattttaacatcagtgtttcaaggagattggggctcagacatattagacaatatgtcagatagtttctacgttacatggggagctcggcataattcaggagcaagggcagccccaggacaaccattacctccacatggaaaaccacttggaaaactaaactctactgatctcaaggatgttattaaaaagggtcttattcattatggacgagataaccagaatttagacattttacttttccacgaagtcttggagtatatgtctaggatagatagagtgctgagtttccctggaggttcacttctattagcaggacgcagtggtgtaggtcgtcggaccatcacttctttagtcagtcacatgcatggagcggtcctgttttctccaaagatttccagaggatatgaactgaagcagttcaaaaatgatctcaaacatgtgctgcaacttgcaggaattgaagcacaacaggtagttttacttcttgaggattaccagtttgtacatcctacatttttggagatgatcaatagccttttgtcttcaggtgaagttcctggactctatactcttgaagaattagagcccttgctgttaccacttaaggatcaagcttcacaagatggtttttttggaccagtcttcaattacttcacatatagaattcagcaaaacttgcatattgtcttgataatggattctgcaaattcaaacttcatgataaactgtgagagtaatccagctttgcataagaaatgccaggtgttgtggatggagggttggtccaatagcagtatgaagaaaatacctgaaatgttattcagtgaaacaggtggtggagaaaaatacaatgataaaaaacgaaaagaagaaaagaaaaaaaattcagttgatcctgattttctaaaatcatttttattaatccatgaatcttgtaaagcatatggtgctacaccaagccgatacatgacctttttacatgtgtattctgccattagtagtagcaagaaaaaggaattattaaaaagacaaagtcatttgcaggctggtgtatctaaactaaatgaagctaaagctcttgtggatgaactgaacagaaaagctggagaacaaagtgtgttacttaaaacgaagcaagatgaagcagatgctgcccttcaaatgatcacagtgtcaatgcaggatgctagtgagcaaaaaacagaacttgaaagactgaagcacagaatagcagaagaagttgttaaaattgaagaaagaaaaaataaaattgatgatgaattaaaagaagtacaacctttagtcaatgaagctaaactagcagttggaaacattaagcccgaatcactttcagaaattcgctcactacgcatgccacctgatgtaattagagatattcttgaaggagttttaaggttgatgggtatctttgatacatcttgggtgagcatgaaaagtttccttgcaaaaagaggtgtaagagaagacatagcaacctttgatgcccgaaatatttcaaaggaaataagagagagtgttgaagaacttctttttaaaaataaaggctcttttgatccaaagaatgctaagcgtgccagtactgcagctgcacctttggctgcctgggtgaaagccaatattcagtattcccatgtcttggaacgaattcatcctttggaaactgaacaggcaggattagaatcgaatctgaagaaaactgaagacagaaaaaggaaactagaggagcttcttaattctgttggtcaaaaggtatcagaactcaaagaaaaatttcagagcaggacttcagaagctgccaaacttgaggctgaagtaagcaaggcacaagaaacaatcaaagctgcagaagtcttaattaatcagcttgacagagaacataagagatggaatgcacaggttgtagagataacagaggaattagctactcttcctaaaagagctcaacttgctgctgcatttattacatatctttctgctgctcctgaatctctgagaaaaacctgtttggaagaatggaccaagtcagctggtcttgagaaatttgatctgaggagatttctttgtactgaaagtgagcagttaatttggaaaagtgaaggcctaccatcagatgacctttccatagaaaatgctcttgtaatattacagatcattggtttgaaatcatggagtcgagtgtgcccatttcttatagatccttcttcccaagctacagagtggttaaaaacacatttgaaagactcacgtttagaagttatcaatcagcaggatagtaactttatcacagctcttgaattagcagtacgttttgggaaaacccttattatacaagagatggatggtgtagaacctgttctttatccattattgagacgagatctggttgctcaaggaccacgttatgtggtacaaataggtgacaaaattattgactacaatgaagaattccgcctctttttgtcaacaagaaacccaaatccttttattccaccggatgcagcttccattgttactgaggttaactttactacaacaagaagtggattacgagggcagcttttagctttaaccattcagcatgagaaacctgatttagaagaacagaaaacaaaactattacaacaggaagaagataagaaaatacagctagccaagctcgaagaatctcttctagagacacttgccacatctcaaggcaatattttggaaaataaggatttgattgagtctttgaatcagacaaaagcaagcagtgcacttattcaagagtcacttaaagaatcttacaaactccaaatttcccttgatcaagaacgggatgcctatctccccctggctgagagtgccagcaagatgtacttcattatttctgatttgtccaaaattaataacatgtaccgttttagtttggctgcttttctccgacttttccaacgagctctacaaaacaaacaggattctgaaaatacagaacagagaatccagtcacttatcagctcattacaacatatggtatatgaatatatatgtcgttgtctatttaaggctgatcagttgatgttcgctttgcattttgttcgaggcatgcatcctgaactttttcaagaaaatgaatgggatacgtttacaggtgtggttgttggagacatgttacggaaagctgactctcaacaaaaaatacgtgatcagcttccgtcttggatagatcaggaacgaagctgggccgtggcaacattaaagattgctctccccagtctttatcagaccctctgctttgaagatgcagctctgtggcgtacttattataataattcaatgtgtgagcaagagtttccatctatccttgcaaagaaagtttccttatttcagcagattcttgtagtacaggcgctaagaccggacagattgcaaagtgccatggctctttttgcatgtaaaactctgggactgaaagaggtgtccccactgcctctaaatctcaaacgtttatacaaagagacactggaaattgaacccatcttgataattatttctccgggtgctgatccttctcaggaacttcaagaactagctaatgctgaaagaagcggagagtgttatcaccaggttgccatgggtcaaggtcaagctgatttagcaattcaaatgctaaaagaatgtgcccgcaatggagactggctctgtttgaagaacttacatcttgtggtatcttggctgccagttctggaaaaggaattgaatactcttcaacctaaagatacctttcgtctttggctcactgcagaagttcatcccaactttactcctattttactacagtcaagtctgaagataacatatgagtcacctccaggtttaaagaagaatttaatgcgtacttatgagtcttggactcctgagcaaattagcaaaaaagataatacacatcgagctcatgctctcttcagtcttgcatggtttcatgctgcatgtcaagaaagaagaaactatattcctcagggttggacaaagttttatgaattttctttatcagatcttcgggctgggtacaacattattgacagactttttgatggtgccaaagatgtacaatgggaatttgtacatggtttacttgaaaatgctatttatggaggacgtatagacaactattttgaccttagagttcttcagtcatacctgaagcagttttttaattcttcagttattgatgtattcaaccaaaggaacaagaaaagcatttttccatattccgtatctctaccacaatcctgcagcattttggactatcgtgctgtcattgagaaaattccagaggacgacaaacctagtttctttggtctgcctgccaatatcgctcgctcatctcagcgcatgatcagttctcaggttatttcacagttgaggattttgggcagatccataacagctggttccaaatttgatagagaaatctggtctaatgaactttctcctgtcctcaatctctggaagaaactaaaccagaattcaaacctaatacatcagaaagtgcctcctcctaacgatcgacaaggatctccaatactgtcattcatcattcttgaacaatttaatgctattcgtttagtacaaagtgtccaccagtctcttgctgctctcagcaaagtcatcagaggaactactttactgagttcagaagtacaaaaattggcaagtgctttattaaaccaaaagtgtcctctcgcatggcagagcaagtgggaaggcccagaagatcccttacaatacctgagaggtcttgttgcccgtgcccttgcaatacagaactgggtagataaagctgaaaaacaggctcttctctctgaaacacttgacctatcagaacttttccatccagacacatttcttaatgctcttcgccaggaaactgcaagggcagtgggtcgttctgtggatagccttaaatttgtagcctcatggaaaggtcgactgcaagaagcaaagctacaaattaagatcagtggcttgttactagaaggatgtagttttgatggaaatcaactttctgaaaatcagcttgattctcccagcgtgtcatcagtgctcccttgttttatgggctggattccacaggatgcatgtggtccatattctccggatgagtgcatctctttgcctgtttacacaagtgctgaaagggatcgtgtggttaccaatattgatgttccatgtgggggcaaccaagaccagtggattcagtgtggagcagctctattcctaaaaaatcagtag

SEQ ID NO: 128625 - DNA, 2479 bp, Homo sapiens
  Payload ID: 5173
  Gene Symbol: DYNC2H1
  Gene Name: dynein, cytoplasmic 2, heavy chain 1
  ENST ID: ENST00000528670
  CDS Start-End: 1-1137
caaaaaatacgtgatcagcttccgtcttggatagatcaggaacgaagctgggccgtggcaacattaaagattgctctccccagtctttatcagaccctctgctttgaagatgcagctctgtggcgtacttattataataattcaatgtgtgagcaagagtttccatctatccttgcaaagaaagtttccttatttcagcagattcttgtagtacaggcgctaagaccggacagattgcaaagtgccatggctctttttgcatgtaaaactctgggactgaaagaggtgtccccactgcctctaaatctcaaacgtttatacaaagagacactggaaattgaacccatcttgataattatttctccgggtgctgatccttctcaggaacttcaagaactagctaatgctgaaagaagcggagagtgttatcaccaggttgccatgggtcaaggtcaagctgatttagcaattcaaatgctaaaagaatgtgcccgcaatggagactggctctgtttgaagaacttacatcttgtggtatcttggctgccagttctggaaaaggaattgaatactcttcaacctaaagatacctttcgtctttggctcactgcagaagttcatcccaactttactcctattttactacagtcaagtctgaagataacatatgagtcacctccaggtttaaagaagaatttaatgcgtacttatgagtcttggactcctgagcaaattagcaaaaaagataatacacatcgagctcatgctctcttcagtcttgcatggtttcatgctgcatgtcaagaaagaagaaactatattcctcagggttggacaaagttttatgaattttctttatcagatcttcgggctgggtacaacattattgacagactttttgatggtgccaaagatgtacaatgggaatttgtacatggtttacttgaaaatgctatttatggaggacgtatagacaactattttgaccttagagttcttcagtcatacctgaagcagttttttaattcttcagttattgatgtattcaaccaaaggaacaagaaaagcatttttccatattccgtatctctaccacaatcctgcagcattttggtaggactatcgtgctgtcattgagaaaattccagaggacgacaaacctagtttctttggtctgcctgccaatatcgctcgctcatctcagcgcatgatcagttctcaggttatttcacagttgaggattttgggcagatccataacagctggttccaaatttgatagagaaatctggtctaatgaactttctcctgtcctcaatctctggaagaaactaaaccagaattcaaacctaatacatcagaaagtgcctcctcctaacgatcgacaaggatctccaatactgtcattcatcattcttgaacaatttaatgctattcgtttagtacaaagtgtccaccagtctcttgctgctctcagcaaagtcatcagaggaactactttactgagttcagaagtacaaaaattggcaagtgctttattaaaccaaaagtgtcctctcgcatggcagagcaagtgggaaggcccagaagatcccttacaatacctgagaggtcttgttgcccgtgcccttgcaatacagaactgggtagataaagctgaaaaacaggctcttctctctgaaacacttgacctatcagaacttttccatccagacacatttcttaatgctcttcgccaggaaactgcaagggcagtgggtcgttctgtggatagccttaaatttgtagcctcatggaaaggtcgactgcaagaagcaaagctacaaattaagatcagtggcttgttactagaaggatgtagttttgatggaaatcaactttctgaaaatcagcttgattctcccagcgtgtcatcagtgctcccttgttttatgggctggattccacaggatgcatgtggtccatattctccggatgagtgcatctctttgcctgtttacacaagtgctgaaagggatcgtgtggttaccaatattgatgttccatgtgggggcaaccaagaccagtggattcagtgtggagcagctctattcctaaaaaatcagtagaatctaatgacaacaaaagccatcttcacaaaagggaacattgattctttaagctttaaatcaaacatgtggtcagtctacatttgaaatgttagttcaaaatattaacatatagttatgttgttgatgtcactgaaattttaatgtgtaaaagcagcactgtgcatcttttaaagtaataaattaatggagttattgttaaaacagagtattcttttgacaacattaaatatttctgtgagaaagttcacttttccagtggctcaaaaatttgttttaggtcagagattttaagtggtatattaaccaataataaatattttggctgtcatttgtgtcataattatttaataaaagagcattcataatttt

SEQ ID NO: 128626 - DNA, 767 bp, Homo sapiens
  Payload ID: 5173
  Gene Symbol: DYNC2H1
  Gene Name: dynein, cytoplasmic 2, heavy chain 1
  ENST ID: ENST00000533197
  CDS Start-End: 1-675
gttatttcacagttgaggattttgggcagatccataacagctggttccaaatttgatagagaaatctggtctaatgaactttctcctgtcctcaatctctggaagaaactaaaccagtgtcctctcgcatggcagagcaagtgggaaggcccagaagatcccttacaatacctgagaggtcttgttgcccgtgcccttgcaatacagaactgggtagataaagctgaaaaacaggctcttctctctgaaacacttgacctatcagaacttttccatccagacacatttcttaatgctcttcgccaggaaactgcaagggcagtgggtcgttctgtggatagccttaaatttgtagcctcatggaaaggtcgactgcaagaagcaaagctacaaattaagatcagtggcttgttactagaaggatgtagttttgatggaaatcaactttctgaaaatcagcttgattctcccagcgtgtcatcagtgctcccttgttttatgggctggattccacaggatgcatgtggtccatattctccggatgagtgcatctctttgcctgtttacacaagtgctgaaagggatcgtgtggttaccaatattgatgttccatgtgggggcaaccaagaccagtggattcagtgtggagcagctctattcctaaaaaatcagtagaatctaatgacaacaaaagccatcttcacaaaagggaacattgattctttaagctttaaatcaaacatgtggtcagtctacatttgaaatgt

SEQ ID NO: 128627 - DNA, 1399 bp, Homo sapiens
  Payload ID: 5174
  Gene Symbol: DYNC2LI1
  Gene Name: dynein, cytoplasmic 2, light intermediate chain 1
  Uniprot ID: Q8TCX1
  ENST ID: ENST00000260605
  CDS Start-End: 101-1156
agaaggcctcactcccagactccttgcggagctcgccgcctgattctaggctggtcactactccgagcctgtgacgtttgcggcagccaggccgtcgacgatgcccagtgaaactctctgggaaattgcaaaagctgaagtggaaaaaaggggaattaatggaagtgaaggtgatggagctgaaattgcagaaaaatttgttttcttcattggcagtaaaaatgggggaaagactactattattctaaggtgtcttgacagagatgaaccaccaaaaccaaccttagctttggaatatacatatggaagaagagcaaaagggcacaacacaccaaaagatatcgctcacttttgggaactcggtggaggaacctctttattggacttaatcagcatacccatcacaggtgacaccttacggacgttttctcttgttctcgttctggatctttcaaaacctaatgatctctggcccaccatggaaaatctcttgcaagccacaaaaagccatgtagacaaagtgataatgaaactgggaaagacaaatgctaaagcagtttctgaaatgagacagaagatctggaataatatgccgaaggatcatcctgatcatgaattaattgacccatttccggtacctctggtcataattggaagtaaatatgatgtttttcaggattttgagtctgagaagagaaaggtaatatgcaagacacttcgatttgttgcacattattatggagcatcattaatgtttaccagtaaatcagaagctctattactaaaaatacgtggagttatcaaccagttggcatttggcattgacaaaagcaaatcaatatgtgtggatcagaataaaccgctgtttatcacagcaggattggattctttcggtcaaataggatctcctcctgttcctgaaaatgacattggaaagcttcatgcccactcacctatggagttgtggaaaaaagtgtatgaaaagctctttccaccaaagagtattaacacgctgaaagatatcaaggaccctgcgagagatcctcagtatgctgaaaatgaagtcgatgagatgagaattcagaaggatctggaactggaacagtacaaaagaagttcttccaagtcttggaaacaaatcgagcttgattcttgaacctatttcaattattgtatatttatttcttcttttccaaatacaaataagattatactgtgaattaactattgtggcaatatgtgaagaaagttaaactgtataatttgttaaaggacaagctggatttcttggactagtgcatctccctgtatatcttgaagctttttaaaaggaaaaattattgtagaaccacgtgtaattttttttaaaataaaagaatcttctactacctacctctaa

SEQ ID NO: 128628 - DNA, 1253 bp, Homo sapiens
  Payload ID: 5174
  Gene Symbol: DYNC2LI1
  Gene Name: dynein, cytoplasmic 2, light intermediate chain 1
  ENST ID: ENST00000378587
  CDS Start-End: 1-956
ggggaattaatggaagtgaaggtgatggagctgaaattgcagaaaaatttgttttcttcattggcagtaaaaatgggggaaagactactattattctaaggtgtcttgacagagatgaaccaccaaaaccaaccttagctttggaatatacatatggaagaagagcaaaagggcacaacacaccaaaagatatcgctcacttttgggaactcggtggaggaacctctttattggacttaatcagcatacccatcacaggtgacaccttacggacgttttctcttgttctcgttctggatctttcaaaacctaatgatctctggcccaccatggaaaatctcttgcaagccacaaaaagccatgtagacaaagtgataatgaaactgggaaagacaaatgctaaagcagtttctgaaatgagacagaagatctggaataatatgccgaaggatcatcctgatcatgaattaattgacccatttccggtacctctggtcataattggaagtaaatatgatgtttttcaggattttgagtctgagaagagaaaggtaatatgcaagacacttcgatttgttgcacattattatggagcatcattaatgtttaccagtaaatcagaagctctattactaaaaatacgtggagttatcaaccagttggcatttggcattgacaaaagcaaatcaatatgtgtggatcagaataaaccgctgtttatcacagcaggattggattctttcggtcaaataggatctcctcctgttcctgaaaatgacattggaaagcttcatgcccactcacctatggagttgtggaaaaaagtgtatgaaaagctctttccaccaaagagtattaacacgctgaaagatatcaaggaccctgcgagagatcctcagtatgctgaaaatgaagtcgatgagatgagaattcagaaggatctggtattatcctaaacatttacttaatttcatctgaaattttaacacaaaacctggggtgccttgggaattccttacatttttctctatgtatttacttagagtatcttctttactattaaaattatttaagtagtacatctatttaaataacacactaatagtatactgtagaaaaaataaaaatttgatatgaataaagaaaaatttttaaatcacctgtcatcccaccacccagacatgacttagtgttcacataaacctttttgattttccagttttcattatattaaagatgagtggtgattctta

SEQ ID NO: 128629 - DNA, 2903 bp, Homo sapiens
  Payload ID: 5174
  Gene Symbol: DYNC2LI1
  Gene Name: dynein, cytoplasmic 2, light intermediate chain 1
  Uniprot ID: Q8TCX1
  ENST ID: ENST00000398823
  CDS Start-End: 76-510
gcggagctcgccgcctgattctaggctggtcactactccgagcctgtgacgtttgcggcagccaggccgtcgacgatgcccagtgaaactctctgggaaattgcaaaagctgaagtggaaaaaaggggaattaatggaagtgaaggtgatggagctgaaattgcagaaaaatttgttttcttcattggcagtaaaaatgggggaaagactactattattctaaggtgtcttgacagagatgaaccaccaaaaccaaccttagctttggaatatacatatggaagaagagcaaaagggcacaacacaccaaaagatatcgctcacttttgggaactcggtggaggaacctctttattggacttaatcagcatacccatcacaggtgacaccttacgctcctggcaactatcatccctactgcctgtctctatgaatttgaccactccagtacctcatataaatgaaatcattcattatttgtccttttgttatttatttcatttagcataacgtcttcagggttcttccgtttgtagtatgtgtcaggatttccctcacttctaaggctaaataatgttccattgtgtaaacaaataccacagttcagttatccgttaatccatgcagaacatttgggttgttttcatcttttgactattgtgagtaatgctggtatgaacattggtgtacattatctgtttaaatctcttccttcagttcttttgggtttagactcagaagtggaattgctggatcatctggtaattctatggtgaattttttgaggaatcactatactattttacacagtggctgcaccattttacattcccataagcaatgtacaggggttctaatttctctgtatcctcactaatacttgttatcttctcatttaaaaaaatgttttaggccaggagtggtggcttacacctgtaatcccaacactttgggaggctgaggtgggtagatcacctgaggtcaggagttcgagaccagcctgggcaacatggtgaaacctcgtctctactaaaaatacaaaaattagccggatgtggtggtgcatgcctgtgatcccagctacttgggaggctgaggcaggagaatggcttgaacccgggaggcagaggttgcagtgagctgagatcatgccactgtactccagcctggacaatagagactcctcctccaaaaacaacaacaaaaaaatgttttgacaatagctagcctaatggataggaagttggacatcttttcatgtgttaattggccatctgtatatcttctttggcgaaatgtctatttgagtcttttgccttctttttttttttttttaatatagttgagttggggtctcactatgttgcccaggctggtcttgaactcctggcctcaagtgatcctcctgcctcagcttcccaaagctctagaattacagacatgagccaccatccctggcctctttgcccatttttgaacaggaatgtttgtttttgttgccgagtctaggtttatgtttgatgggcatgaacagaatacaagtgcatgtggtgatggtggtcatgtatctggtggtcaggagtgtgctttcagagagacagaatggtattgcagaaaaacgtgtaactttggatctaaataccagttctacaatttactaattatataaatctgtgcctcagacttctaatctataaaatggacattataacatcttctggagagggttattgtggagattaactaggtagttccctagcaaggtccacccatatatctattttcttctcctttacctgattattgtgttactgtttttgcttcttttattatttttgcttcccttttttggagcacacagtaaaactggatgtaaacgtggcattgtcgatgcaaatgcttggagcttctctatttgaactaaactacttttaattttagttcaaacagaaacttagttccactattgtaacacttaaatattactagaggaaagtattggaataaataaggctatgactttggttttttgtttttgggagtcttagaataatgctacggtttttttttccccttaaggtatattttagttattcttagataaatttcagtacattaggatttcaaaatggtaattattttgagtcttttttgaaaagtgtttttatttctttaggacgttttctcttgttctcgttctggatctttcaaaacctaatgatctctggcccaccatggaaaatctcttgcaagccacaaaaagccatgtagacaaagtgataatgaaactgggaaagacaaatgctaaagcagtttctgaaatgagacagaagatctggaataatatgccgaaggatcatcctgtgagttgctgtttgggattattactggaatccttagtcccatttatagttaatgataacatcacaaacaacttctttagatttttatgcatgacttgaaattcatttgatgtagatgaacctgttcactggaaaattacagcaatttattaaaacctcagtaagagcaaaacaaggaagaagattccttatatcttcttgttagacatcttctgtgattgttatggcatattacaccaatcagagaaatagagttttaaagtagtggtttgatattgattttataatctctgtaaaaatgaagataaaaagccagattgtacaaaagtcacctgacaaagactagatgaagctacaactttaagcaaggggtagagttgtaatagccttcaccatcactctgtattttacattcatttcgtttctgtcacttattcagtatctttttatcatctgacagctaattaaattataaagttgctatgatggtaacacaagttcttcaaatacaataataaatatcatcatctggaaaactga

SEQ ID NO: 128630 - DNA, 1133 bp, Homo sapiens
  Payload ID: 5174
  Gene Symbol: DYNC2LI1
  Gene Name: dynein, cytoplasmic 2, light intermediate chain 1
  Uniprot ID: Q8TCX1
  ENST ID: ENST00000406852
  CDS Start-End: 91-696
actcccagactccttgcggagctcgccgcctgattctaggctggtcactactccgagcctgtgacgtttgcggcagccaggccgtcgacgatgcccagtgaaactctctgggaaattgcaaaagctgaagtggaaaaaaggggaattaatggaagtgaaggtgatggagctgaaattgcagaaaaatttgttttcttcattggcagtaaaaatgggggaaagactactattattctaaggtgtcttgacagagatgaaccaccaaaaccaaccttagctttggaatatacatatggaagaagagcaaaagggcacaacacaccaaaagatatcgctcacttttgggaactcggtggaggaacctctttattggacttaatcagcatacccatcacaggtgacaccttacggacgttttctcttgttctcgttctggatctttcaaaacctaatgatctctggcccaccatggaaaatctcttgcaagccacaaaaagccatgtagacaaagtgataatgaaactgggaaagacaaatgctaaagcagtttctgaaatgagacagaagatctggaataatatgccgaaggatcatcctgtgagttgctgtttgggattattactggaatccttagtcccatttatagttaatgataacatcacaaacaacttctttagatttttatgcatgacttgaaattcatttgatgtagatgaacctgttcactggaaaattacagcaatttattaaaacctcagtaagagcaaaacaaggaagaagattccttatatcttcttgttagacatcttctgtgattgttatggcatattacaccaatcagagaaatagagttttaaagtagtggtttgatattgattttataatctctgtaaaaatgaagataaaaagccagattgtacaaaagtcacctgacaaagactagatgaagctacaactttaagcaaggggtagagttgtaatagccttcaccatcactctgtattttacattcatttcgtttctgtcacttattcagtatctttttatcatctgacagctaattaaattataaagttgctatgatggtaacacaagttcttcaaatacaataataaatatcatcatctggaaaa

SEQ ID NO: 128631 - DNA, 713 bp, Homo sapiens
  Payload ID: 5174
  Gene Symbol: DYNC2LI1
  Gene Name: dynein, cytoplasmic 2, light intermediate chain 1
  ENST ID: ENST00000462426
  CDS Start-End: 54-281
aggctggtcactactccgagcctgtgacgtttgcggcagccaggccgtcgacgatgcccagacagagtctcgctctgttgcccaggctggagtgcagtggcacgatcttggctcaatacaacatccacctcctgagttcagtgaaactctctgggaaattgcaaaagctgaagtggaaaaaaggggaattaatggaagtgaaggtgatggagctgaaattgcagaaaaatttgttttcttcattggcagtaaaaatgggggaaagactactattattctaaggtgtcttgacagagatgaaccaccaaaaccaaccttagctttggaatatacatatggaagaagagcaaaagggcacaacacaccaaaagatatcgctcacttttgggaactcggtggaggaacctctttattggacttaatcagcatacccatcacaggtgacaccttacggacgttttctcttgttctcgttctggatctttcaaaacctaatgatctctggcccaccatggaaaatctcttgcaagccacaaaaagccatgtagacaaagtgataatgaaactgggaaagacaaatgctaaagcagtttctgaaatgagacagaagatctggaataatatgccgaaggatcatcctcaggatcatgaattaattgacccatttccggtacctctggtcataattggaagtaaatatgatgtttttcagg

SEQ ID NO: 128632 - DNA, 547 bp, Homo sapiens
  Payload ID: 5174
  Gene Symbol: DYNC2LI1
  Gene Name: dynein, cytoplasmic 2, light intermediate chain 1
  ENST ID: ENST00000496980
  CDS Start-End: 91-375
actcccagactccttgcggagctcgccgcctgattctaggctggtcactactccgagcctgtgacgtttgcggcagccaggccgtcgacgatgcccagtgaaactctctgggaaattgcaaaagctgaagtggaaaaaaggggaattaatggaagtgaaggtgatggagctgaaattgcagaaaaatttgttttcttcattggcagtaaaaatgggagtctcgctctgtcgcctaggttcgagtgcagtggtgtgatctcggctcactgcagcctctgcctcctgggttcacaccattctcctgcctcagcctcccaagttgctgggactgcaggtgcccacgaccacgcctgggaaagactactattattctaaggtgtcttgacagagatgaaccaccaaaaccaaccttagctttggaatatacatatggaagaagagcaaaagggcacaacacaccaaaagatatcgctcacttttgggaactcggtggaggaacctctttattggacttaatcagcatacccatcacaggtgacaccttacg

SEQ ID NO: 128633 - DNA, 568 bp, Homo sapiens
  Payload ID: 5174
  Gene Symbol: DYNC2LI1
  Gene Name: dynein, cytoplasmic 2, light intermediate chain 1
  ENST ID: ENST00000479242
  CDS Start-End: 91-309
actcccagactccttgcggagctcgccgcctgattctaggctggtcactactccgagcctgtgacgtttgcggcagccaggccgtcgacgatgcccagtgaaactctctgggaaattgcaaaagctgaagtggaaaaaaggggaattaatggaagtgaaggtgatggagctgaaattgcagaaaaatttgttttcttcattggcagtaaaaatgggggaaagactactattattctaaggtgtcttgacagccaaaagatatcgctcacttttgggaactcggtggaggaacctctttattggacttaatcagcatacccatcacaggtgacaccttacggacgttttctcttgttctcgttctggatctttcaaaacctaatgatctctggcccaccatggaaaatctcttgcaagccacaaaaagccatgtagacaaagtgataatgaaactgggaaagacaaatgctaaagcagtttctgaaatgagacagaagatctggaataatatgccgaaggatcatcctgatcatgaattaattgacccatttccggtacctctggtcat

SEQ ID NO: 128634 - DNA, 1346 bp, Homo sapiens
  Payload ID: 5174
  Gene Symbol: DYNC2LI1
  Gene Name: dynein, cytoplasmic 2, light intermediate chain 1
  Uniprot ID: Q8TCX1
  ENST ID: ENST00000605786
  CDS Start-End: 58-1116
ttctaggctggtcactactccgagcctgtgacgtttgcggcagccaggccgtcgacgatgcccagtgaaactctctgggaaattgcaaaagctgaagtggaaaaaaggggaattaatggaagtgaaggtgatggagctgaaattgcagaaaaatttgttttcttcattggcagtaaaaatgggggaaagactactattattctaaggtgtcttgacagagatgaaccaccaaaaccaaccttagctttggaatatacatatggaagaagagcaaaagggcacaacacaccaaaagatatcgctcacttttgggaactcggtggaggaacctctttattggacttaatcagcatacccatcacaggtgacaccttacggacgttttctcttgttctcgttctggatctttcaaaacctaatgatctctggcccaccatggaaaatctcttgcaagccacaaaaagccatgtagacaaagtgataatgaaactgggaaagacaaatgctaaagcagtttctgaaatgagacagaagatctggaataatatgccgaaggatcatcctcaggatcatgaattaattgacccatttccggtacctctggtcataattggaagtaaatatgatgtttttcaggattttgagtctgagaagagaaaggtaatatgcaagacacttcgatttgttgcacattattatggagcatcattaatgtttaccagtaaatcagaagctctattactaaaaatacgtggagttatcaaccagttggcatttggcattgacaaaagcaaatcaatatgtgtggatcagaataaaccgctgtttatcacagcaggattggattctttcggtcaaataggatctcctcctgttcctgaaaatgacattggaaagcttcatgcccactcacctatggagttgtggaaaaaagtgtatgaaaagctctttccaccaaagagtattaacacgctgaaagatatcaaggaccctgcgagagatcctcagtatgctgaaaatgaagtcgatgagatgagaattcagaaggatctggaactggaacagtacaaaagaagttcttccaagtcttggaaacaaatcgagcttgattcttgaacctatttcaattattgtatatttatttcttcttttccaaatacaaataagattatactgtgaattaactattgtggcaatatgtgaagaaagttaaactgtataatttgttaaaggacaagctggatttcttggactagtgcatctccctgtatatcttgaagctttttaaaaggaaaaattattgtagaaccacgtgtaattttttttaaaataaaagaatcttctac

SEQ ID NO: 128635 - DNA, 720 bp, Homo sapiens
  Payload ID: 5175
  Gene Symbol: DYNLL1
  Gene Name: dynein, light chain, LC8-type 1
  Uniprot ID: P63167
  ENST ID: ENST00000242577
  CDS Start-End: 168-437
ggcgggagcagggcggggcctgagcactaggcggcggcggctggcgtggggctgcttagatgcgccacggtttcggtagcgacggtatctctagccgggcctgagctgtgctagcacctcccccaggagaccgttgcagtcggccagcccccttctccacggtaaccatgtgcgaccgaaaggccgtgatcaaaaatgcggacatgtcggaagagatgcaacaggactcggtggagtgcgctactcaggcgctggagaaatacaacatagagaaggacattgcggctcatatcaagaaggaatttgacaagaagtacaatcccacctggcattgcatcgtggggaggaacttcggtagttatgtgacacatgaaaccaaacacttcatctacttctacctgggccaagtggccattcttctgttcaaatctggttaaaagcatggactgtgccacacacccagtgatccatccaaaaacaaggactgcagcctaaattccaaataccagagactgaaattttcagccttgctaagggaacatctcgatgtttgaacctttgttgtgttttgtacagggcattctctgtactagtttgtcgtggttataaaacaattagcagaatagcctacatttgtatttattttctattccatacttctgcccacgttgttttctctcaaaatccattcctttaaaaaataaatctgatgcagatgtg

SEQ ID NO: 128636 - DNA, 697 bp, Homo sapiens
  Payload ID: 5175
  Gene Symbol: DYNLL1
  Gene Name: dynein, light chain, LC8-type 1
  Uniprot ID: P63167
  ENST ID: ENST00000392508
  CDS Start-End: 147-416
ggcggctggcgtggggctgcttagatgcgccacggtttcggtagcgacggtatctctagccgggcctgagctgtgctagcacctcccccaggagaccgttgcagtcggccagcccccttctccacggccttgcccactaggtaaccatgtgcgaccgaaaggccgtgatcaaaaatgcggacatgtcggaagagatgcaacaggactcggtggagtgcgctactcaggcgctggagaaatacaacatagagaaggacattgcggctcatatcaagaaggaatttgacaagaagtacaatcccacctggcattgcatcgtggggaggaacttcggtagttatgtgacacatgaaaccaaacacttcatctacttctacctgggccaagtggccattcttctgttcaaatctggttaaaagcatggactgtgccacacacccagtgatccatccaaaaacaaggactgcagcctaaattccaaataccagagactgaaattttcagccttgctaagggaacatctcgatgtttgaacctttgttgtgttttgtacagggcattctctgtactagtttgtcgtggttataaaacaattagcagaatagcctacatttgtatttattttctattccatacttctgcccacgttgttttctctcaaaatccattcctttaaaaaataaatctgatgcagatg

SEQ ID NO: 128637 - DNA, 814 bp, Homo sapiens
  Payload ID: 5175
  Gene Symbol: DYNLL1
  Gene Name: dynein, light chain, LC8-type 1
  Uniprot ID: P63167
  ENST ID: ENST00000392509
  CDS Start-End: 262-531
gctgacagggagagcctggggccgggccgtgtggatgccatccccgagcgcggttcgcgctcggctgaggcgctggacaagtggcttgggctcccgcgcctcagtttctctctgtggcgccgcctacctcacagacttgtgagcactcactgacgtgggtagcgcccagggcctgcggggcgcaggagagctggagtcaggcggagaccgcaggctgaccccgcagcggccgggctgtcgcggcccccacctcaggtaaccatgtgcgaccgaaaggccgtgatcaaaaatgcggacatgtcggaagagatgcaacaggactcggtggagtgcgctactcaggcgctggagaaatacaacatagagaaggacattgcggctcatatcaagaaggaatttgacaagaagtacaatcccacctggcattgcatcgtggggaggaacttcggtagttatgtgacacatgaaaccaaacacttcatctacttctacctgggccaagtggccattcttctgttcaaatctggttaaaagcatggactgtgccacacacccagtgatccatccaaaaacaaggactgcagcctaaattccaaataccagagactgaaattttcagccttgctaagggaacatctcgatgtttgaacctttgttgtgttttgtacagggcattctctgtactagtttgtcgtggttataaaacaattagcagaatagcctacatttgtatttattttctattccatacttctgcccacgttgttttctctcaaaatccattcctttaaaaaataaatctgatgcagatgtg

SEQ ID NO: 128638 - DNA, 581 bp, Homo sapiens
  Payload ID: 5175
  Gene Symbol: DYNLL1
  Gene Name: dynein, light chain, LC8-type 1
  ENST ID: ENST00000550178
  CDS Start-End: 322-525
gtggggctgcttagatgcgccacggtttcggtagcgacggtatctctagccgggcctgagctgtgctagcacctcccccaggagaccgttgcagtcggccagcccccttctccacggtgagaaactcggggggccagggggtgtcctcgctgccttatttcgccccactccggacttagccctccgcgtagcccgcgcttcctgagaagtggggtggggggcgtcgtcccgtggtggcgccggccggggtgggggcagttagtgcctggggggcgcggcccaactcaaccccttaccccaggccttgcccactaggtaaccatgtgcgaccgaaaggccgtgatcaaaaatgcggacatgtcggaagagatgcaacaggactcggtggagtgcgctactcaggcgctggagaaatacaacatagagaaggacattgcggctcatatcaagaaggtgaggatgggcgcgggggccgatacgcagccgggagcagggggttccttccccccgatcctgctttcctaagggcgcctgacaggtcccgggaatactgctggcggcttggggcgtagaagcttcca

SEQ ID NO: 128639 - DNA, 719 bp, Homo sapiens
  Payload ID: 5175
  Gene Symbol: DYNLL1
  Gene Name: dynein, light chain, LC8-type 1
  Uniprot ID: P63167
  ENST ID: ENST00000549989
  CDS Start-End: 310-579
agatgcgccacggtttcggtagcgacggtatctctagccgggcctgagctgtgctagcacctcccccaggagaccgttgcagtcggccagcccccttctccacggtgagaaactcggggggccagggggtgtcctcgctgccttatttcgccccactccggacttagccctccgcgtagcccgcgcttcctgagaagtggggtggggggcgtcgtcccgtggtggcgccggccggggtgggggcagttagtgcctggggggcgcggcccaactcaaccccttaccccaggccttgcccactaggtaaccatgtgcgaccgaaaggccgtgatcaaaaatgcggacatgtcggaagagatgcaacaggactcggtggagtgcgctactcaggcgctggagaaatacaacatagagaaggacattgcggctcatatcaagaaggaatttgacaagaagtacaatcccacctggcattgcatcgtggggaggaacttcggtagttatgtgacacatgaaaccaaacacttcatctacttctacctgggccaagtggccattcttctgttcaaatctggttaaaagcatggactgtgccacacacccagtgatccatccaaaaacaaggactgcagcctaaattccaaataccagagactgaaattttcagccttgctaagggaacatctcgatgtttgaacctttgttgtgttttgtacagg

SEQ ID NO: 128640 - DNA, 1376 bp, Homo sapiens
  Payload ID: 5175
  Gene Symbol: DYNLL1
  Gene Name: dynein, light chain, LC8-type 1
  ENST ID: ENST00000550845
  CDS Start-End: 125-328
agatgcgccacggtttcggtagcgacggtatctctagccgggcctgagctgtgctagcacctcccccaggagaccgttgcagtcggccagcccccttctccacggccttgcccactaggtaaccatgtgcgaccgaaaggccgtgatcaaaaatgcggacatgtcggaagagatgcaacaggactcggtggagtgcgctactcaggcgctggagaaatacaacatagagaaggacattgcggctcatatcaagaaggtgaggatgggcgcgggggccgatacgcagccgggagcagggggttccttccccccgatcctgctttcctaagggcgcctgacaggtcccgggaatactgctggcggcttggggcgtagaagcttccagaaaggacgcagatgcattttgcgctcctgtggagaagaccagacccccggcgtccgaagtttttttttttttttttttaattacccagctccgcggggggaaagcgccacctagcaacggtatctaagatcagggagcagcggttcccccttctgtgtggttcctgcgccgaggatccatctgggtgttccggaggggggagctgcgtgggtgtttccagccgggccgggaggagatcttgccagccttccagtggggagttgagggaaggtggtgggtggtggcggggctgggggctggggtaggggcttggtaaatggcagtctagaaagccggcaggactgccaacttctcgagcagtgtttgctggaagggaagaaagctggcagcctaagccgtgggagggttccagtcgagaatgggaagatgaaagacttcagatggaacagaaataaatgccttttttgacaaacgcagcagtgcgtgcctctagcttgcaagagcgttactccccttcatagctttaaaaggttttcgcactgcgtgcagttagagtagctaaatcttgtgtgacgctccacaaacacttgtaagaattttgcagagaaagataaccgttgccacccaatgccccccacaggcattctactccccagtacctcttagggtgggagaaatggtgaagagttgttcctacaacttgctaacctagtggacagggtagtagattagcatcatccggatagatgtgaagaggacggctgtttggataataattaaggataaaatttggccagttgacagattctgtttccagcagtttttacagcaacagtggagtgcttcagtattgtgttcctgtaaatttaattttgatccgcaatcatttggtatacaatgctgtttgaagttttgtcctattggaaaagtcttgtgttgcaggggtgcagttaagatctttgtgatgaggaatgggatgggctaatttttt

SEQ ID NO: 128641 - DNA, 662 bp, Homo sapiens
  Payload ID: 5175
  Gene Symbol: DYNLL1
  Gene Name: dynein, light chain, LC8-type 1
  Uniprot ID: P63167
  ENST ID: ENST00000548342
  CDS Start-End: 366-635
gatgccatccccgagcgcggttcgcgctcggctgaggcgctggacaagtggcttgggctcccgcgcctcagtttctctctgtggcgccgcctacctcacagacttgtgagcactcactgacgtgggtagcgcccagggcctgcggggcgcaggagagctggagtcaggcggagaccgcaggctgaccccgcagcggccgggctgtcgcggcccccacctcagagccactggtggccgcagaagacagtccacgtgtcttaaccagacttacaagactccaaagatgggtgccttgtatcaagcaggtgctcaacaaatgtctgctgaaaaaatgatgcagggtgcggtggttcacgcaggtaaccatgtgcgaccgaaaggccgtgatcaaaaatgcggacatgtcggaagagatgcaacaggactcggtggagtgcgctactcaggcgctggagaaatacaacatagagaaggacattgcggctcatatcaagaaggaatttgacaagaagtacaatcccacctggcattgcatcgtggggaggaacttcggtagttatgtgacacatgaaaccaaacacttcatctacttctacctgggccaagtggccattcttctgttcaaatctggttaaaagcatggactgtgccacacacccagt

SEQ ID NO: 128642 - DNA, 616 bp, Homo sapiens
  Payload ID: 5175
  Gene Symbol: DYNLL1
  Gene Name: dynein, light chain, LC8-type 1
  ENST ID: ENST00000548214
  CDS Start-End: 142-345
ctaggcggcggcggctggcgtggggctgcttagatgcgccacggtttcggtagcgacggtatctctagccgggcctgagctgtgctagcacctcccccaggagaccgttgcagtcggccagcccccttctccacggtaaccatgtgcgaccgaaaggccgtgatcaaaaatgcggacatgtcggaagagatgcaacaggactcggtggagtgcgctactcaggcgctggagaaatacaacatagagaaggacattgcggctcatatcaagaaggtgaggatgggcgcgggggccgatacgcagccgggagcagggggttccttccccccgatcctgctttcctaagggcgcctgacaggtcccgggaatactgctggcggcttggggcgtagaagcttccagaaaggacgcagatgcattttgcgctcctgtggagaagaccagacccccggcgtccgaagtttttttttttttttttttaattacccagctccgcggggggaaagcgccacctagcaacggtatctaagatcagggagcagcggttcccccttctgtgtggttcctgcgccgaggatccatctgggtgttccggaggggggagctgcgtgggtgt

SEQ ID NO: 128643 - DNA, 794 bp, Homo sapiens
  Payload ID: 5175
  Gene Symbol: DYNLL1
  Gene Name: dynein, light chain, LC8-type 1
  ENST ID: ENST00000549649
  CDS Start-End: 669-794
gggagagcctggggccgggccgtgtggatgccatccccgagcgcggttcgcgctcggctgaggcgctggacaagtggcttgggctcccgcgcctcagtttctctctgtggcgccgcctacctcacagacttgtgagcactcactgacgtgggtagcgcccagggcctgcggggcgcaggagagctggagtcaggcggagaccgcaggctgaccccgcagcggccgggctgtcgcggcccccacctcagagccactggtggccgcagaagacagtccacgtgtcttaaccagacttacaagactccaaagatgggtgccttgtatcaagcaggtgctcaacaaatgtctgctgaaaaaatgatgcagggtgcggtggttcacgcagtaaagatggggtttcaccatgttagccaggatggtcttgatctcctgacctcgtgatccgcctgcctcggcctcccaaagtgctgggattacaggcgtgagccaccacacccggccatataaggaaagactgcctcacctgagcaagaagcttcaccctggacaaaaaccccggggctcaacactcccaaatccacccggatccccatccccaaccccttaaaggatgtccgcattgcttggcagagaccccactcttggggataatcccttaattcgtaaccatgtgcgaccgaaaggccgtgatcaaaaatgcggacatgtcggaagagatgcaacaggactcggtggagtgcgctactcaggcgctggagaaatacaacatagagaaggacattgcggctcatatc

SEQ ID NO: 128644 - DNA, 595 bp, Homo sapiens
  Payload ID: 5175
  Gene Symbol: DYNLL1
  Gene Name: dynein, light chain, LC8-type 1
  ENST ID: ENST00000552870
  CDS Start-End: 111-254
agatgcgccacggtttcggtagcgacggtatctctagccgggcctgagctgtgctagcacctcccccaggagaccgttgcagtcggccagcccccttctccacggtaaccatgtgcgaccgaaaggccgtgatcaaaaatgcggacatgtcggaagagatgcaacaggactcggtggagtgcgctactcaggcgctggagaaatacaacatagagaaggacattgcggctcatatcaagaaggaacttcggtagttatgtgacacatgaaaccaaacacttcatctacttctacctgggccaagtggccattcttctgttcaaatctggttaaaagcatggactgtgccacacacccagtgatccatccaaaaacaaggactgcagcctaaattccaaataccagagactgaaattttcagccttgctaagggaacatctcgatgtttgaacctttgttgtgttttgtacagggcattctctgtactagtttgtcgtggttataaaacaattagcagaatagcctacatttgtatttattttctattccatacttctgcccacgttgttttctctcaaaatccattcctttaaaa

SEQ ID NO: 128645 - DNA, 6805 bp, Homo sapiens
  Payload ID: 5176
  Gene Symbol: DYNLL2
  Gene Name: dynein, light chain, LC8-type 2
  Uniprot ID: Q96FJ2
  ENST ID: ENST00000579991
  CDS Start-End: 279-548
gctcagcggcagagcggagcggagctgtgaggcgccagtgcggagcgggcgggcgggcgggcggcgtgaggcggagcgcgggcggccggcgaaactccaagggcggaccgcggcagggagcgatcggcctcgggctgcgggagccggagaccgcggcggcggcggctgctgcagctgcaggaggagcccagggaacaccgcccctgcctgtgctctgcctcgggccatcgctcctccccagggcccagtgcggactcgcctccgtgaagtgtcacaccatgtctgaccggaaggcagtgatcaagaacgcagacatgtctgaggacatgcaacaggatgccgttgactgcgccacgcaggccatggagaagtacaatatagagaaggacattgctgcctatatcaagaaggaatttgacaagaaatataaccctacctggcattgtatcgtgggccgaaattttggcagctacgtcacacacgagacaaagcacttcatctatttttacttgggtcaagttgcaatcctcctcttcaagtcaggctaggtggccatggtgaaggtgtcagtggcggcggcagcgatggcaagcaggcggcgttgctgggactgttttgcactggagccagcatcaggatgtcctctccaatggctgtgctactgcatggactgtatactcgatttcatgtgtatgtcgcagtaaacaaaaccaaacctctttctgtttagttgcctgggggaagaaggctgctttatgtttatttttcaagactttaaaaatattttttggttgtattgcactaggaaatctctcccacctctcccttttctctttctttccctatacaaaataaaaggcccaccatagagactaggcggccgaaagactaggagggctgaggaaaagaaataggtctctggaggtggaactaaaactgtgcagctgcctcttcctggcggtggatgctgctttgggagggccagggaggctgcagggggacagtgttgggattgtcaaggaaaaaggggtaggaaggaaggtggagggattgatctagtaccagggagaatattccactgaactgtgattctatggcttggggcggagggtggggtggggatgccttctttaggggccctgagatgtgtttgtctgtggtgtgtgggagtggggagcagatttgtcttgctgtctttgtcagaatttctaagtaagggctgtgtctttgtggattaccttcttttgttcttcctgccagagatcatgacaggaggatgctggggtaggattagcttgaatcttttttttctttacatttttctcctgtctgctccctgcttagccctcagtttcctcattcctctggagttctcttagagcagcccctgttgttagttggctggcaagggaatttctggtgactgtagttccttagttaggtcttagcaatcaaaccaaattgatgtctcccttgactcttctgtgtatatgtgtgaatatgtgtgtatatgtgtgtgtatgtgtgtgtggggtttggggtagaagggagggagggggcaggacagtgtggaatctctagggtgtatgggtaggtagggggcacagttagttctaagtgggcttttatgctaaaagcctctggggatatctgttttgaaaataaagataggtgtcccctccttgctgtcatctagcccagacactctgcttgctctctggctgtctgctccctgggaaggctttaggaggaccacccaggacaggatgaccatgctgccatctgctctggagctgggtctcagtgcagagggacagtgactgtggatggttgcagtctctggtgggaggtgaggatagaagtgataaagagctaagaggagcttctgggagccttggaggaggtcagtcttgcagtggtgaagccaggacataggagatggagcagggctgtgagaggaggagattctgaggaggatgcaggggaaatcttgtctgttaatgaaataggagtggggtggggtttggggtggggtggtcattgccgtttgagctgctgattttcatgagtcgccttcaaaactctcgtgtagggttgacaatgtgggggggtgggggatccagcttattcttttattttcaagtccattcttggggctggtggggaggcaggagaatacccctccctaagcccttagtgtgtgccgagcttgctttgtgatgttggcaggggaggggagacctgggtggtgactgagttccctttatcaaacccttcagtgggcacaaaattgagtgcttgattttaggttttatttttttatgaatgtccaaatctgtgtttccccctgccctcccagactgtgtggccagttgaaagtgtctggtttgtgttcatctctccctcatttctggagcagggcctgagaccctgccacatctcctatgctctgcatccacgcctcttttggacattaaaggttgattgatgcacctctgcactgtttgggtctctttggggatgaggggttggcatggtggcagtggtgccacacagtgggtgagggtggagagtctccagggtggaatagaatggggactgaagggaagaccagccactagatactgattggcctgtagcagcacttatttgtgcctaggcttatgccccttaagtagaggaaaactaaccagcagcactcacccttaagggctcctgggttctgccttccttggtggtgatggccaggtgaatcatattttgtgtctttgggatagtaactgctaccttcccagctgccgtcatggacctgcctgagctttgctgcttcaacttttgcccaaagctcttatctttcatactcctcccttctcggctttcctgaacctggagactatttagcaaagggtctggccactcagaaatggaaagctggggatatttagaaagatggcacctcttttggtggaacctaagtgattctctgaatcctctgttgcccagacacacaactcgagaaatcagcagtgccaagacttctgagagtgtctgcccacccctgactccaccatcgtgtgactgcaattctcttggaggtgttagggagccagaggtgctttgccctctttgtgttactatttctttactcaaaaatatttaagagttcttgtatgcttgggcctaggatgctgttcacagaggagaatgagacaagtaagttctaggcttctatgacatacacattcttatgtgtagagcagacatacacacactgatcaactttttccaatagtgataaatgtgttatcaaggaaatgaactgggcaatgagctattgagtgttggaggtaggtagatagggttcctccagttaggaaggtggttggctgatcttggggagaagttctacctctggggcagtgaggtcctaagggattaagttgagagactctagagccccaacttctgttactgctttagctgtcgtgagtaatttgacagagctggagctttgggagggagagtgaggccacagttcacatttcatcagggatgagtgtctccagggccaaagctcatctactttcttccctgatgaaagaggcagtccaggtggcatctgtgaacaacacattcctgcacaggtaggtgcacagtgctcatctggaagactaatcctgcagggcttcctggaggagatgagcctccacttttcggggcccaggatgggaaagtatgtgagcatgtgtcactgaagggactgtggaaagcagatggaaattgtggaattctctcggaacaatgcagccattattagaactgtgcccataggagcatcaatatccctgctccttgtatcctgttctccagtcttctggggaccccctttgactgaacccaaccaaatggcagatgacaaggcagacccaggatgcagtctgtagggttcagtccccctccccactgggaacagcaggaaagggcaaggtggtgacaatctaagggaggcaaatggataataaccagcatggtagggaatcttctttgttgctgtggcactgtcgatctctgttccctgaactctagtgtcctccagactagatttaaggtgtggttccccgctaaattattctctcacctcctttcagtctttgctcaaacatccttttatcagagaggctttctgacatcctgtgcaagatagcacctctcccccatcgctgttatccttacccagtttaattccacgtagcatctgccaacgcttgacatatttgttttttgtttactttctggcctgtgacaactagaatataagctctgtgagagcatttttctcttaactgcttatcttcaagtaaacagaacagtgcctgtcctgtaggaagtgtttgatacatacagattgctcaaatgaaaaaagaagggtgcgagcaagcctggacaggcctggtgccccagggcagccttgccttttctgaagagaatggctgccttaggcacggctctccttgctgcccaagccttgccaccttgaaaggcgtgagagggtcactcccaggtgtattcaagcaagagtgcctgagccactcttgcttggcagtatgggaggatgaaatagtgtgttcataaagtgcattttatttttaaagcatttcagtttatgttgctgaaacctgagagcgcccccctgagctagactcagtaatcattagacacatttttggataagcaaactgaatcagagaaggtgagtggcaaagcccatgtagctggtggcattactagaacttagcactgtgatgcacaaaggcttaactgggtttggcagcaagggtctcatggatactctttaagatgtaggcccagatctcttagtagtgaatccctgatgttccctctcttggggctctggtttagcaaggacagcgaggatactttcctctctccctcctccttactcctctctactaaggattaaggagccacctcttcctccttaaggcctttgggagagatgggtctcctggtattagaaaggagagcagacgcctagagttctgacctcttgggcctcccctaaacaaaaagcatagccccttcactaccctagtaacaagtatgacctgttgcctgttgaggtcaggtgtacctgtgtgtctctctctgtgatgtatgtgggcttggtgtccacatcaatgtgcgtgaatactcctacccacagactgctactgtgccaatatagaggttcataagaaagataaaagagaaccagcagaaccccaggttctgcctctccttcctccctttgcccagataaaggtgtacagtgtttgtggtgaggctgctggacactgctgttttgggctttctagagagaatgcaaacatgcaaaaacagtgtggtagtgtaggcagaacaagatctagaatcagaagacctggagtcgaatctcagctccaacacccactggatgaacgtggacaagctgcttgatctctcagatcctcgatttcttcatctgtaagatggaaacaatatgtgtcttttctaaggggaaagatcaaatgacatcatgtatgtgaaaatgcttagaaatgggtgatgatgatgatgatgatactgattattagggtatctaataaagttggggaaagaacaaaatccccccctcacaccctattgcaccaccagccttctccctccctgctcaattatacccatgttatagggaaggaaatagggaagaaacttgtctaaggtcacatggatgttcgcaacaattgggatgcagaacttgatctgactcccaggccaggtttgattttgatttgcagtggcagagaggactaattttttactaggttctgagccctgtactgaactctggattgccctgtacttggtggtggtatacagttcagcagtttttagcatatacacgaatttgtgcagccataaccactatctaattctagaacatttttatcacccccaaaagaaatcatgtacccatttgcagtcacttgccattccctcttctccccagccctgggaaaccactgacctaccttatatctctatgaatttgcctaatctggacatttcatataaatgcaattgtacatgtggccttttgtttctggcttctttcacttagcatgttttcaaggttcatttgtgctgtagcatttatcagtactttgttcctttttctagctgagtaacgtgtgggtatatcacattttgtttattcatctgttgagggatgtttgggttgtttctactttttgactattgtgattagtgctgctatgaacattgatgtacagatttttgtgtagatatgttttcaattatcttggggcatcttttatttttaatgtcagttttctatttttaaaaaatctagacaggttggcaaatcatttctgtaaagagtcagtaaatattttagcctttgtggtccatgacattaggtatacagattacaatttctgaactctgccattccagtgtgagagcagccatagataatatgtaaacaaatgagcatggctatgttccaataaaacttttaaaaagcaggggacagattgggcctgtggaccatagtataccaacccttaatctaaatgacacattcacatgatacattattctaaaggcacaaaaagcaaaaattctccctcccacctctgtcttccagctacggggttaccttccttgaagcagttaatgttatgagattttgtgtctccttttagacacagttaataatgagcattaaagtggctatatacta

SEQ ID NO: 128646 - DNA, 1464 bp, Homo sapiens
  Payload ID: 5177
  Gene Symbol: DYNLRB1
  Gene Name: dynein, light chain, roadblock-type 1
  Uniprot ID: Q9NP97
  ENST ID: ENST00000300469
  CDS Start-End: 16-159
ccggatcggtcggaaatggcagaggtggaggagacactgaagcgactgcagagccagaagggagtgcagggaatcatcgtcgtgaacacagaaggaggctgggagcccttgggacactgtggagacaggagcaggccccctgctcagggctgcccctgatcagttgggtggcctgaggcaactcctttccccgcttcagccctcaactgcctcgagtcctgtgatggtccagggaatctcttttgggcacttcttgctctaagacctgaaagacttttgtcactaagagagaaactgtcttctgggactggacattttgactccaaggagacaaccccaggggccaacagccccagctgtgacccccaggcttccacatgaactcacaaaggagaggccctcattcttgccttaaaactgcccctaaagccaagccttttcactgggaagccctagctgcttaccttttggatactagtgagtgctgcttttttgtatactcatggggctgattgcaccatagctgagaacgtggaatgcagaatgagcccacctggctttgaatctgggccctacttaacttatcagctatgtggttttgggcataagccactttctctgttaagttttctcatttgtaaaatgtgggtcataattctgccttcctctaggggaagcttttagaatagtgcctggcatgaaatgcctatgaatgtctcagttagtgtgtgtgtgtctttaacttgcgtcccattctcagggcccccacatcagtgtctcgtttacatctcacacagtgaccctgcgaggcaagggtttgcccagtttgcagatgagaaacccaaagctgagagaggtgtggggaaccgcccaaggtcacccagctgtgaatgaacgtggtcagaacacagaatctgagttggtcacacttcccactgatccatggggcctttaagccctctggaagcttccattaaagatgattatttgaggataattgtattgggatgcctatgatcttatctagggttttcctacccatccccaacattcagctcagctgcctctttcttgaggacaccctcactgatcaccccagcccagccagagtggttgctcctgctcctgcccctgaacctatgacatacccaagtcccaatactttcgagccatctgccactgccttttgacatctctgccttggctagattcaaatggtgtttcataataaaagtctgagtttaagcagctttaccgaaaacgcaagggaagtttcattccatttatacttctccagaccccctgccatcctctgctgctacccacacaggcagaataaaaggcttaaatgtgtaagtcccatgaaggcaaagattggtctcttgtgttcactgctgtctgtagtacttaggatggtgttggcccagagttggtgtttgattaaagtatctgttgaatttttta

SEQ ID NO: 128647 - DNA, 675 bp, Homo sapiens
  Payload ID: 5177
  Gene Symbol: DYNLRB1
  Gene Name: dynein, light chain, roadblock-type 1
  Uniprot ID: Q9NP97
  ENST ID: ENST00000357156
  CDS Start-End: 51-341
cacaggactcgctaagtgttcgctacgcggggctaccggatcggtcggaaatggcagaggtggaggagacactgaagcgactgcagagccagaagggagtgcagggaatcatcgtcgtgaacacagaaggcattcccatcaagagcaccatggacaaccccaccaccacccagtatgccagcctcatgcacagcttcatcctgaaggcacggagcaccgtgcgtgacatcgacccccagaacgatctcaccttccttcgaattcgctccaagaaaaatgaaattatggttgcaccagataaagactatttcctgattgtgattcagaatccaaccgaataagccactctcttggctccctgtgtcattccttaatttaatgccccccaagaatgttaatgtcaatcatgtcagtggactagcacatggcagtcgcttggaacccactcacaccaatccagtgaccgtgtgtgggctggcggctcttctcccccaccaacggaacccctgtgtgcaccaaccttccccagagctccggagcgccctctcctcacttccaggttttggagcaagagcttgcaggaagcccgcacccagcttccttctgaccttcagttcactttgtcgcccttggagaaagctgtttttctttaactaaaaataaccaaaatgctta

SEQ ID NO: 128648 - DNA, 1044 bp, Homo sapiens
  Payload ID: 5177
  Gene Symbol: DYNLRB1
  Gene Name: dynein, light chain, roadblock-type 1
  ENST ID: ENST00000374846
  CDS Start-End: 264-710
ggaaatggtgagcgtgcgccggggtcttgtggctggcggccgcccaccaccccacgccaggccttcagtcttccgaggatgaggggatctcagagctccggacagggaatcggtggtggctgggcgtggccgggcccgggccccagccgacttgagggtggaacccggcggcggaggcctctaaagcctgaccgaggcggggccgccggatcccgctgccccttgaccggaagcgggagcccagcctcggccaggaagagatgatgggcgaggggtgggcggcggccctgcagcctagagttttggggccttggtgcgcgatggcaaccctggcaacgtttcccgggagctcagtttgtggcaggctctgccaagcactttatgtatcttgtatttcctccgcctcctcccagctctgtgaggcagaggtggaggagacactgaagcgactgcagagccagaagggagtgcagggaatcatcgtcgtgaacacagaaggcattcccatcaagagcaccatggacaaccccaccaccacccagtatgccagcctcatgcacagcttcatcctgaaggcacggagcaccgtgcgtgacatcgacccccagaacgatctcaccttccttcgaattcgctccaagaaaaatgaaattatggttgcaccagataaagactatttcctgattgtgattcagaatccaaccgaataagccactctcttggctccctgtgtcattccttaatttaatgccccccaagaatgttaatgtcaatcatgtcagtggactagcacatggcagtcgcttggaacccactcacaccaatccagtgaccgtgtgtgggctggcggctcttctcccccaccaacggaacccctgtgtgcaccaaccttccccagagctccggagcgccctctcctcacttccaggttttggagcaagagcttgcaggaagcccgcacccagcttccttctgaccttcagttcactttgtcgcccttggagaaagctgtttttctttaactaaaaataaccaaaatgctta

SEQ ID NO: 128649 - DNA, 497 bp, Homo sapiens
  Payload ID: 5178
  Gene Symbol: DYNLRB2
  Gene Name: dynein, light chain, roadblock-type 2
  Uniprot ID: Q8TF09
  ENST ID: ENST00000305904
  CDS Start-End: 121-411
cagccctgacgcttccgtggggccacttccttttttgtctcctagcaacggcgggtagcgttgttgacatcccgggaggctgtgccgccggcctgagcccagagtttcgcggcctccgcgatggcagaggtggaggaaaccttaaagaggatccagagtcataaaggggttattggaactatggttgtaaatgcagaaggtattcccatccgaacaaccttggacaactcaacaactgttcaatatgcaggccttcttcatcacctgacaatgaaagccaaaagcacagttcgtgatattgatcctcagaacgacctgacttttcttaggatcagatcaaagaaacatgaaatcatggtagctccagataaggaatatcttctgatcgtcattcagaatccatgtgaatagacctgcgatggccaaggctgtttaagcgacactgggttggaaacacttggctctctcatgagtattaaaattctatttcaatctaa

SEQ ID NO: 128650 - DNA, 514 bp, Homo sapiens
  Payload ID: 5178
  Gene Symbol: DYNLRB2
  Gene Name: dynein, light chain, roadblock-type 2
  ENST ID: ENST00000338542
  CDS Start-End: 53-217
atcccgggaggctgtgccgccggcctgagcccagagtttcgcggcctccgcgatggcagaggtggaggaaaccttaaagaggatccagagtcataaaggggttattggaactatggttgtaaatgcagaagatccacgctttgtgaccttcaagtatgcaagacagctgactgccttccagagaaaaagtggccaacaaatcacaataaaagattagcaaggtattcccatccgaacaaccttggacaactcaacaactgttcaatatgcaggccttcttcatcacctgacaatgaaagccaaaagcacagttcgtgatattgatcctcagaacgacctgacttttcttaggatcagatcaaagaaacatgaaatcatggtagctccagataaggaatatcttctgatcgtcattcagaatccatgtgaatagacctgcgatggccaaggctgtttaagcgacactgggttggaaacacttggctctctcatgagtattaaaattctatttcaa

SEQ ID NO: 128651 - DNA, 409 bp, Homo sapiens
  Payload ID: 5178
  Gene Symbol: DYNLRB2
  Gene Name: dynein, light chain, roadblock-type 2
  ENST ID: ENST00000568035
  CDS Start-End: 85-207
gtctcctagcaacggcgggtagcgttgttgacatcccgggaggctgtgccgccggcctgagcccagagtttcgcggcctccgcgatggcagaggtggaggaaaccttaaagaggatccagagtcataaaggggttattggaactatggttgtaaatgcagaagataaggaatatcttctgatcgtcattcagaatccatgtgaatagacctgcgatggccaaggctgtttaagcgacactgggttggaaacacttggctctctcatgagtattaaaattctatttcaatctaactgacccttcaaacattcttttctatttctatatctaaactgttctgcatgtctcatttagtcccttttgattatattgtgaagttgtactttagtgatacaataagtgaattctg

SEQ ID NO: 128652 - DNA, 971 bp, Homo sapiens
  Payload ID: 5178
  Gene Symbol: DYNLRB2
  Gene Name: dynein, light chain, roadblock-type 2
  ENST ID: ENST00000561880
  CDS Start-End: 50-184
ccgggaggctgtgccgccggcctgagcccagagtttcgcggcctccgcgatggcagaggtggaggaaaccttaaagaggatccagagtcataaaggggttattggaactatggttgtaaatgcagaagggaagaagactaacaccatgtcacagagcaagaacttcagagcagactcactatagacaagatgttcaggggagtgcatttcatataaaaatatgttaacttagtactcaagtagtcagttaatggcttctgaaagatttatgcacaaaaatgttcatcatcaccccattagctataaaaaatataaggtaccaaatgaccaaacaataggagattgattatatgtccataaaatagtgaagtatgcagttattaaaaataatgttgatgacattgtcaacaaggacaacttgtatgttataattttgtgaagaaaaaagcaacagtcaagtttgtaaatatagtttcacacaactatacttaaaaatctacgtagcgacaaaaggatttgagggaaataaactaaaattgttaccagagagggataagccatcacttttttctcttctttacaactatcagtgttttccaatacttccacactgtacttattacttttctaatcagaaaaaatattaaccaaaattaaatttcataataggtattcccatccgaacaaccttggacaactcaacaactgttcaatatgcaggccttcttcatcacctgacaatgaaagccaaaagcacagttcgtgatattgatcctcagaacgacctgacttttcttaggatcagatcaaagaaacatgaaatcatggtagctccagataaggaatatcttctgatcgtcattcagaatccatgtgaatagacctgcgatggccaaggctgtttaagcgacactgggttggaaacacttggctctctcatgagtattaaaattctatttcaatctaactga

SEQ ID NO: 128653 - DNA, 492 bp, Homo sapiens
  Payload ID: 5178
  Gene Symbol: DYNLRB2
  Gene Name: dynein, light chain, roadblock-type 2
  ENST ID: ENST00000562982
  CDS Start-End: 32-409
gtggttatcacattaattcgtgcctcaatgaatgaatgaatggacaaacacaggccgggagcctgacccacttccctcttccctcccgggacccactgctccaggattgggcgaacctcaggcagaggtggaggaaaccttaaagaggatccagagtcataaaggggttattggaactatggttgtaaatgcagaaggtattcccatccgaacaaccttggacaactcaacaactgttcaatatgcaggccttcttcatcacctgacaatgaaagccaaaagcacagttcgtgatattgatcctcagaacgacctgacttttcttaggatcagatcaaagaaacatgaaatcatggtagctccagataaggaatatcttctgatcgtcattcagaatccatgtgaatagacctgcgatggccaaggctgtttaagcgacactgggttggaaacacttggctctctcatgagtattaaaattctatttcaatc

SEQ ID NO: 128654 - DNA, 774 bp, Homo sapiens
  Payload ID: 5179
  Gene Symbol: DYNLT1
  Gene Name: dynein, light chain, Tctex-type 1
  ENST ID: ENST00000367085
  CDS Start-End: 31-309
gggagccggaggggacgcgccggaggaaagatggaagactaccaggctgcggaggagactgcttttgttgttgatgaagtgagcaacattgtaaaagaggctatagaaagcgcaattggtggtaacgcttatcaacacagcaaagtgaaccagtggaccacaaatgtagtagaacaaactttaagccaactcaccaagctgggaaaaccatttaaatacatcggtaatggagtcttgtttcttttatatttgcgggatggttttttaacactgatcagaggggcatccagtaccagaaacaacagctaacgtggctcaactcaaggaaggctcctggtgggagtcggtcgtgtgtgtagtatacgttagcgtacgcttgaccatttggctgctggtacaattgcagatcgtatgtgaagcgggatcttacaggaggtcccatcagatgcttttagaacaagtgaagcatagaggaagtgtggacagcccccagctgacagtggctcaacttagaatttttcaactttgatggatttaccagggtattaagtgcatttgcaacttacattttcatatattgttgatttatgatgggtttatgggatgttgtaagtcaaggagcacctataatttgtcaatatagtgagacaaggcaatctgtccctataatttttatcgagaacatcaaccacgtggagctacatacattgtacgtttgctaaaagtggacagaatgacatttgtgttacccagtagacttctctaacaaaaatt

SEQ ID NO: 128655 - DNA, 2891 bp, Homo sapiens
  Payload ID: 5179
  Gene Symbol: DYNLT1
  Gene Name: dynein, light chain, Tctex-type 1
  ENST ID: ENST00000367088
  CDS Start-End: 2174-2377
ttttcgtactgtaaccatatgggaggtgatacagtgcctttcctttgtgattaaggtcacggtagtcacttggaaggatcctttaagcttccagaaatgacttaatctctaagatattgcaaattgttcttcactcagtgagttggttttgtttccaagtccgacttctgagtacagcaagtgaggtggcttcgggcagtcagctcctgaaccccctaaaaagaaagggcagggcctgcagtggacagcagccagacagggaggaagactcactgccaagtcagggttctctgccttgattccctcaggatgcacgttgactgagggccccaggggttgccctctcgaaggcgtgtccagagctacgtacctttcctgggactcagcagtaactttaaacgcttgtgctcatgtgaagagcacattggcaggcaagtgcctgactaatgttattttcaggatgaccttttacccattcagatctaccatgtgtaaaaggaaaactatactcctggcactagattcctgcaggcagcccacctcctgagtcatccagacactgacagagaacagccatgctggcagctggtggttagtcctggagtcggagggcagcactgggaaagaaaaataattacctggagataatgtaatcatcgtacattttacaagtaatggtgctttaaaaaaatctcctcaaggtcaaactgatcctcctaatcagtttacatcatggaagagagaattacatcttaaatggattacttcagcagcttcagttaatttatacaaaaatcaaccaactcattaagcctctctattggttaatgattctagcagccagttgaaatggaagaagagaatgaattctagtttaaagtgaagtcttagattgtggcatgattaaaacaaaacagggccaggtgtggtggcttacgcctgtaatcccagcattttgggaggctgaggcgggaggatcacctgaggtcaggagttcgagaccagcctggccaacatgatgaaaccccatctctactaaaaatacgaaaattagccgggtgtggtggagggcacctgtaatcccagctacttgggaggctgaggcaggagaatcacttgaacctgggaggcagagattgcagtgagctgagattgcgccactgcattccagcctgggctacagagcgacactccgtctcaaaaataaataaataaaaataaaacaatacctttaaattatgtgcatgtattctagtcttctggtttctgaagactgtaatgccatccttggtaaagctgaacagtctagttagattatttctaaggtcttcatttctacattatgttcattacctacatttgcatttatcaatgtagtggaaatatcttttaaataaatcaaacttaactgaatgttcttccttacagactgcttttgttgttgatgaagtgagcaacattgtaaaagaggctatagaaagcgcaattggtggtaacgcttatcaacacagcaaagtgaaccagtggaccacaaatgtagtagaacaaactttaagccaactcaccaagctgggaaaaccatttaaatacatcggtaatggagtcttgtttcttttatatttgcgggatggttttttaacactgatcagaggggcatccagtaccagaaacaacagctaacgtggctcaactcaaggaaggctcctggtgggagtcggtcgtgtgtgtagtatacgttagcgtacgcttgaccatttggctgctggtacaattgcagatcgtatgtgaagcgggatcttacaggaggtcccatcagatgcttttagaacaagtgaagcatagaggaagtgtggacagcccccagctgacagtggctcaacttagaatttttcaactttgatggatttaccagggtattaagtgcatttgcaacttacattttcatatattgttgatttatgatgggtttatgggatgttgtaagtcaaggagcacctataatttgtcaatatagtgagacaaggcaatctgtccctataatttttatcgagaacatcaaccacgtggagctacatacattgtacgtttgctaaaagtggacagaatgacatttgtgttacccagtagacttctctaacaaaaatttgttttaacttaagtgacctgtgtaattatgcagaagaatggagctggattacacacagcaagttcctgcttctgggacagctctactgacggtatgattttcattcatgtttgtgaagttttgttgtgtgaaatatatgactggaagtttcctatctttgaatgcaatgcatgtttatcaccttttaaaacatttaataatagacttgccaaggttctttgtgtagcatagagatgggtacttgaatgttggccttattgtgagtaaaacgtcgtcccccagctttccctgccgtaaatgctgctctcttccctcccgcagggagctgcactgtgcgatgggagaataagaccatgtactgcatcgtcagtgccttcggactgtctatttgacctgcagtccagcctatggcctttctccttttgtctctagttcatcctctaaccaccagccatgaattcagtgaactcttttctcattctctttgttttgtggcactttcacaatgtagaggaaaaaaccaaatgaccgcactgtgatgtgaatggcaccgaagtcagatgagtatccctgtaggtcacctgcagcctgcgttgccacttgtcttaactctgaatatttcatttcaaaggtgctaaaatctgaaatctgctagtgtgaaacttgctctactctctgaaatgattcaaatacactaattttccatactttatacttttgttagaataaattattcaaatctaaa

SEQ ID NO: 128656 - DNA, 726 bp, Homo sapiens
  Payload ID: 5179
  Gene Symbol: DYNLT1
  Gene Name: dynein, light chain, Tctex-type 1
  Uniprot ID: P63172
  ENST ID: ENST00000367089
  CDS Start-End: 32-373
agggagccggaggggacgcgccggaggaaagatggaagactaccaggctgcggaggagactgcttttgttgttgatgaagtgagcaacattgtaaaagaggctatagaaagcgcaattggtggtaacgcttatcaacacagcaaagtgaaccagtggaccacaaatgtagtagaacaaactttaagccaactcaccaagctgggaaaaccatttaaatacatcgtgacctgtgtaattatgcagaagaatggagctggattacacacagcaagttcctgcttctgggacagctctactgacgggagctgcactgtgcgatgggagaataagaccatgtactgcatcgtcagtgccttcggactgtctatttgacctgcagtccagcctatggcctttctccttttgtctctagttcatcctctaaccaccagccatgaattcagtgaactcttttctcattctctttgttttgtggcactttcacaatgtagaggaaaaaaccaaatgaccgcactgtgatgtgaatggcaccgaagtcagatgagtatccctgtaggtcacctgcagcctgcgttgccacttgtcttaactctgaatatttcatttcaaaggtgctaaaatctgaaatctgctagtgtgaaacttgctctactctctgaaatgattcaaatacactaattttccatactttatacttttgttagaataaattattcaaatctaaa

SEQ ID NO: 128657 - DNA, 2217 bp, Homo sapiens
  Payload ID: 5180
  Gene Symbol: DYNLT3
  Gene Name: dynein, light chain, Tctex-type 3
  Uniprot ID: P51808
  ENST ID: ENST00000378578
  CDS Start-End: 128-478
caaaggcggggattgcgtagggaaaggccctaggccataaacgggggtggggcctccccggaggccagtgcgcggccgcggtgctctaccggcgtgtcgctccgccccagggagagccggcgctaccatggaggagtaccatcgccactgcgacgaggttggcttcaatgctgaggaagcccacaatattgtcaaagagtgtgtagatggggttttaggtggtgaagattataatcacaacaacatcaaccagtggactgcaagcatagtggaacaatccttaacacacctggttaagttgggaaaagcctataaatatattgtgacctgtgcagtggtccagaagagcgcatatggctttcacacagccagctcctgtttttgggataccacatctgatggaacctgtaccgtaagatgggagaaccggaccatgaactgtattgtcaacgtttttgccattgctattgttctttaactgactaaaaatgttgggctaaagccattaacttaagaatttgtcagtgtatcctttccaaaaagagtaatagttgtttactagtgtgctagatgaaaagcgtgcaatatgctttaaagctatcaacaaaaactgaatattataagcaagcaatatcatagtaattggcagattagctcatattctatacagcatcgtttaaataggaaaaatttaatgctagcaaaaaataaatttagaaatatggcatgacatgaaaatacaatcttatatttacaccagcttttcactaatattttgtacctaaggtgatggggaactccattcagataataaaattctctttcagctagagaagttaacaggaataaatatatgaacaaaaaagctgcaaggataaatgtggagaaaatgatgagaattagctaacatttttaagtttttttaaactttcttcccctcagttgtacttaatatttagtggaaagtaataatttttttaattttctatcaactaatagtatagtaacaactatgattaacttgtttactttttctgaggattagtaaatcaattttttttaatttcaaatttttggatttacacttgagggtaaattaaatctggtaaactgaatttcctagttaaataaaattagttgcagtatatgatgaacagtgtatgactcaaacagctgccttacaattcactcattccatgtggaacaaacatttatcagatgcctattatgggcatatgtctctgctaagcaccatagttgtcaatgtgctgtgcaaatgctaagttccttttagcaattgttcagttggaagacgtattaatatttggggaaggaaaagaaagtagttgttttacaagggaggaaaaaagtgaatctggttacacatatggaagtaagcaaaatgaaaagcacttattgctttctgacagaattatagatgtaattttaagagttgctcctagcaagttaaaagtgcatataaaatatgcaactcttagttaaaggccttattatcagtcttacctatacaagtagtaaattttgtcattgctttagttacaaccatctgtaaataacttaaaagacttattatgtggggttcaaattgagtggaataaagtatagattaaaagtatacaatccttagcacgttatctcagggcttatgaaatgtaattaaatttattaagaaaatagatgaaaaattagggtacacagctggccaccaaatgcgaagtcaatctgctacttaaccctgaaaacaaaatcagttttgcatattaccactaacactaatacatatagagagcggaaccataactcattgaattttggagaggaataagcttagcgttaatattgacaatattaaggcaatattcttgtaggaatactatgtgcatgtttgatattttgccaaataacaataattaataattgttcaatgtttaagaataatattaacaaaataaaggagtttaatgcagtgatctttgtttttggcacatcaaaaattctcagtcattattcatgtttctttatgctgctggcttttgtgccctggaagatcataatagtgaccaaaatatacatgcagacttgttttttattattgttgtttaagcataatttaagaaaaaaaatttttacctggtgaacttgctatctgctctgtttctagttaaaatataataaatattatcttcctgtgctgta

SEQ ID NO: 128658 - DNA, 920 bp, Homo sapiens
  Payload ID: 5180
  Gene Symbol: DYNLT3
  Gene Name: dynein, light chain, Tctex-type 3
  ENST ID: ENST00000378581
  CDS Start-End: 5-463
taccatggaggagtaccatcgccactgcgacgaggttggcttcaatgctgaggaagcccacaatattgtcaaagagtgtgtagatggggttttaggtggtgaagattataatcacaacaacatcaaccagtggactgcaagcatagtggaacaatccttaacacacctggttaagttgggaaaagcctataaatatattgtgacctgtgcagtggtccagaagagcgcatatggctttcacacagccagctcctgtttttgggataccacatctgatggaacctgtaccgtaagatgggagaaccggaccatgaactgtggagtcttgctctgtcgcccaggctggagtgcagtgatgcaatttcggctcactgcaacctctgcctcccaggttcaagtgattcttctgcctcagcctcccgagtacctggaactacaggcacacgccataacgcctggctaatttttatatttttagtagagatggggttttgccatgttggccaggatggtctcgaactcctgacctcaagtgatccacccacctcggcctctcaaaatgctgggattacaagcgcgagccaccctgcccggccgaaaagatctcaaacattcatctcttacaagatttagatgactatcatcaatatgccttaacatcagtagtttaggagactctagcccactttgtctagttgcaaactgtaattctccctgtggtcccactgaatatcattccacagcattcttggatatatatgatgtattgacaattcaggtctagatagaaatggcccctattgcttcatgaagaatatcctttccccaaatgtcttctgaggagctcaagattaaagctagtatcctgtacagacacttgcaggactgctagtatgatatatattgaccctatgggagac

SEQ ID NO: 128659 - DNA, 719 bp, Homo sapiens
  Payload ID: 5180
  Gene Symbol: DYNLT3
  Gene Name: dynein, light chain, Tctex-type 3
  ENST ID: ENST00000432389
  CDS Start-End: 319-687
ctcccagcgagggcggtcccaagagttggggtgcggcgtcctccgagcccgggtcctctcccctgggcccgggatccgccccgcccgacccgttctccccaccccaaagtcctgagattcggggtgggaggggtggccaggagcgcgcggatcagacggtggggtcggggcagggttgggaggacgaggcctgacttgggtgcgaggagtgggcatggggtgacgggcgccgccctcctaccgggcgggcctcgaaaacgggtcttcccgctgctgcctccgtcccttggcttcctcagcgcgggtgctgcagcccccatggctcggagtctcggggtcctggtggcactgccattcccgctcccggttggcttcaatgctgaggaagcccacaatattgtcaaagagtgtgtagatggggttttaggtggtgaagattataatcacaacaacatcaaccagtggactgcaagcatagtggaacaatccttaacacacctggttaagttgggaaaagcctataaatatattgtgacctgtgcagtggtccagaagagcgcatatggctttcacacagccagctcctgtttttgggataccacatctgatggaacctgtaccgtaagatgggagaaccggaccatgaactgtattgtcaacgtttttgccattgctattgttctttaactgactaaaaatgttgggctaaagccattaac

SEQ ID NO: 128660 - DNA, 2079 bp, Homo sapiens
  Payload ID: 5181
  Gene Symbol: DBNDD1
  Gene Name: dysbindin (dystrobrevin binding protein 1) domain containing 1
  Uniprot ID: Q9H9R9
  ENST ID: ENST00000002501
  CDS Start-End: 133-609
gccgcggccccccggttgctgccccgatgcgctgcgcccggagccggggccgagtcgctgccgcagctgttggggcgcccgggccaggcgacgccgccgtcgcccgtgcccctcccagaccgcaccggccgcatggagcccccggagggcgccggcaccggagagatcgttaaggaggctgaggtgccgcaggctgcgctgggcgtcccagcccaggggacaggggacaatggccacacgcctgtggaggaggaggtcgggggcatcccagtaccagcaccggggctcctgcaggtcacggagaggaggcagcctctgagcagcgtctcctctctggaggtccacttcgacctcctggacctcactgagctcaccgacatgtcggaccaggagctggccgaggtctttgctgactcggacgacgagaacctcaacaccgagtccccagcaggtctgcacccgctgccccgggccggctacctgcgctccccttcctggacgaggacaagggctgagcagagccacgagaagcagcccctaggcgaccccgagcggcaggccacagtcctggacacgtttctcactgtggagaggccccaggaggactagaccatctccacctgccccagctcctgcagggatggggtccgaacacgatggcagatctgggcagtgctgacccagcagacacacttcacccgcccacgaggctccagccgtcacctcctgacacacaccctgggggcagctctctgccagccccgagaccggccttgtctgctgggcacgggtcttcgcctcacttggagaccagccggctttcctgggggacacacggggcccccggatgcctctgggagccccagcacaagcacagcccagtggccttacgtccagctcgttcctgggccccgagtcaggaagacagcgtcacggagtcactgccaggaacgtgctgaggaatggagtggcccacggcggccttggggtgaaggggacccaggcctgtgacagccactccaggaactcctgggggtgctccaacctccgcgttttcctgtgctgccaagctcagaagccagaggcgggtttggtagtggctaatgggacaatgtgctgtccagcaaagcacacatggagaagcggccccaaaattcccaccttgatttccatcctgccccttcttctactccacggaggcgctgtctcactagggtcccctccccaaggctcagctctaagacctgcacctgcttctcttggcccctgcgtgacagacaagtccattccctccttagctcagaacaccaaatatcaccagactgcctaagagacttgatgacacctcccggaatgctctcggggtggggttcacctctccttgtcctgcacccactgctaggccacattctcgtttctgctcacatcccattgcccggctacaaggcctgcccacggcccttaaacttgctgggcaggtttggagcccatgggaccccgtgggtctctgtccaggagcagcagaggaggctgacaggccctgctccctctgctctgggggtgtctgggagccccagctcacaccctcccaatgcttatatgctgaagctcacagaatgggcttcttgcctgacagcaagtcaaagaatgagtttaatatcaaagtgtaagcttactttccatccccaagccagcctgccccctgccccatttcccatgagcacacttctggggaaggaaaacaggctcctggccttcactctcagcagagctttggagatgccccaggcatgccctgagctccttctgtgtacctgctcccacttctgagccacccgctgcccctccgcactgctggcaaacccagttcctgcctcagccaggtctccttccctggtttccagtcacacagagcccagcagctttctctttcagtcccataagggcagccttgtgtccctggccacacttccacccgccagggtcttcctccccatctttccatccttcctgctgagcttccacagagctcgtttgcaaacagggggattaaagcatcactgcgcattcgaaggcctg

SEQ ID NO: 128661 - DNA, 2081 bp, Homo sapiens
  Payload ID: 5181
  Gene Symbol: DBNDD1
  Gene Name: dysbindin (dystrobrevin binding protein 1) domain containing 1
  Uniprot ID: Q9H9R9
  ENST ID: ENST00000304733
  CDS Start-End: 75-611
gtgagccgagattgcaccactgcactccagcctgggtgacagagcgagactccatctaaaaaaaataaataaacatgggagaaacctggaagaatatttgctcaactgtgaggcatggttggtggctaagggatcacagaatggcaggcctgcctattcctcctgagatcgttaaggaggctgaggtgccgcaggctgcgctgggcgtcccagcccaggggacaggggacaatggccacacgcctgtggaggaggaggtcgggggcatcccagtaccagcaccggggctcctgcaggtcacggagaggaggcagcctctgagcagcgtctcctctctggaggtccacttcgacctcctggacctcactgagctcaccgacatgtcggaccaggagctggccgaggtctttgctgactcggacgacgagaacctcaacaccgagtccccagcaggtctgcacccgctgccccgggccggctacctgcgctccccttcctggacgaggacaagggctgagcagagccacgagaagcagcccctaggcgaccccgagcggcaggccacagtcctggacacgtttctcactgtggagaggccccaggaggactagaccatctccacctgccccagctcctgcagggatggggtccgaacacgatggcagatctgggcagtgctgacccagcagacacacttcacccgcccacgaggctccagccgtcacctcctgacacacaccctgggggcagctctctgccagccccgagaccggccttgtctgctgggcacgggtcttcgcctcacttggagaccagccggctttcctgggggacacacggggcccccggatgcctctgggagccccagcacaagcacagcccagtggccttacgtccagctcgttcctgggccccgagtcaggaagacagcgtcacggagtcactgccaggaacgtgctgaggaatggagtggcccacggcggccttggggtgaaggggacccaggcctgtgacagccactccaggaactcctgggggtgctccaacctccgcgttttcctgtgctgccaagctcagaagccagaggcgggtttggtagtggctaatgggacaatgtgctgtccagcaaagcacacatggagaagcggccccaaaattcccaccttgatttccatcctgccccttcttctactccacggaggcgctgtctcactagggtcccctccccaaggctcagctctaagacctgcacctgcttctcttggcccctgcgtgacagacaagtccattccctccttagctcagaacaccaaatatcaccagactgcctaagagacttgatgacacctcccggaatgctctcggggtggggttcacctctccttgtcctgcacccactgctaggccacattctcgtttctgctcacatcccattgcccggctacaaggcctgcccacggcccttaaacttgctgggcaggtttggagcccatgggaccccgtgggtctctgtccaggagcagcagaggaggctgacaggccctgctccctctgctctgggggtgtctgggagccccagctcacaccctcccaatgcttatatgctgaagctcacagaatgggcttcttgcctgacagcaagtcaaagaatgagtttaatatcaaagtgtaagcttactttccatccccaagccagcctgccccctgccccatttcccatgagcacacttctggggaaggaaaacaggctcctggccttcactctcagcagagctttggagatgccccaggcatgccctgagctccttctgtgtacctgctcccacttctgagccacccgctgcccctccgcactgctggcaaacccagttcctgcctcagccaggtctccttccctggtttccagtcacacagagcccagcagctttctctttcagtcccataagggcagccttgtgtccctggccacacttccacccgccagggtcttcctccccatctttccatccttcctgctgagcttccacagagctcgtttgcaaacagggggattaaagcatcactgcgcattcgaaggcctg

SEQ ID NO: 128662 - DNA, 2689 bp, Homo sapiens
  Payload ID: 5181
  Gene Symbol: DBNDD1
  Gene Name: dysbindin (dystrobrevin binding protein 1) domain containing 1
  ENST ID: ENST00000392973
  CDS Start-End: 733-1227
tagccgggcgtgctggtgcatgcctgtaatcccatctactcagggggatgaggcaggagaatcgctcaaacccaaggggcagaggttgcagtgagccgagattgcaccactgcactccagcctgggtgacagagcgagactccatctaaaaaaaataaataaacatgggagaaacctggaagaatatttgctcaactgtgaggcatggttggtggctaagggatcacagaatggcaggcctgcctattcctcctggtttgtaactttcatttaatgagaatgtattattctgaactcaaatacgacatcagtttttaaaaggaaaagtcagtccacagtggagaggggctgttctggtttgaaggggaccaagaggctggacatggaaatccatgggcgatccttcaggggaccctgggccgagctagaaatcagaggccaggacggcactggaatgcagccacgcgggccctggtgggacttccacgcctgcatggtcggctttcatgggtgcttgcgtaccaaaggtgatctggatctcagattccttgttcactaggggaggccagggcccaaggggaaggagcagcctccttgaagcccctcaaccccttgtctgggtccaggcatgaggccacaagcccagccatcccatcacctgctggtcactgcccagagtttcaaaggactggatgtgccaagtcctcacacccagccccgcgtcctggggggatgtgggagccctgtggatctcaaggtgacactgtgtctttggatgcagagatcgttaaggaggctgaggtgccgcaggctgcgctgggcgtcccagcccaggggacaggggacaatggccacacgcctgtggaggaggaggtcgggggcatcccagtaccagcaccggggctcctgcaggtcacggagaggaggcagcctctgagcagcgtctcctctctggaggtccacttcgacctcctggacctcactgagctcaccgacatgtcggaccaggagctggccgaggtctttgctgactcggacgacgagaacctcaacaccgagtccccagcaggtctgcacccgctgccccgggccggctacctgcgctccccttcctggacgaggacaagggctgagcagagccacgagaagcagcccctaggcgaccccgagcggcaggccacagtcctggacacgtttctcactgtggagaggccccaggaggactagaccatctccacctgccccagctcctgcagggatggggtccgaacacgatggcagatctgggcagtgctgacccagcagacacacttcacccgcccacgaggctccagccgtcacctcctgacacacaccctgggggcagctctctgccagccccgagaccggccttgtctgctgggcacgggtcttcgcctcacttggagaccagccggctttcctgggggacacacggggcccccggatgcctctgggagccccagcacaagcacagcccagtggccttacgtccagctcgttcctgggccccgagtcaggaagacagcgtcacggagtcactgccaggaacgtgctgaggaatggagtggcccacggcggccttggggtgaaggggacccaggcctgtgacagccactccaggaactcctgggggtgctccaacctccgcgttttcctgtgctgccaagctcagaagccagaggcgggtttggtagtggctaatgggacaatgtgctgtccagcaaagcacacatggagaagcggccccaaaattcccaccttgatttccatcctgccccttcttctactccacggaggcgctgtctcactagggtcccctccccaaggctcagctctaagacctgcacctgcttctcttggcccctgcgtgacagacaagtccattccctccttagctcagaacaccaaatatcaccagactgcctaagagacttgatgacacctcccggaatgctctcggggtggggttcacctctccttgtcctgcacccactgctaggccacattctcgtttctgctcacatcccattgcccggctacaaggcctgcccacggcccttaaacttgctgggcaggtttggagcccatgggaccccgtgggtctctgtccaggagcagcagaggaggctgacaggccctgctccctctgctctgggggtgtctgggagccccagctcacaccctcccaatgcttatatgctgaagctcacagaatgggcttcttgcctgacagcaagtcaaagaatgagtttaatatcaaagtgtaagcttactttccatccccaagccagcctgccccctgccccatttcccatgagcacacttctggggaaggaaaacaggctcctggccttcactctcagcagagctttggagatgccccaggcatgccctgagctccttctgtgtacctgctcccacttctgagccacccgctgcccctccgcactgctggcaaacccagttcctgcctcagccaggtctccttccctggtttccagtcacacagagcccagcagctttctctttcagtcccataagggcagccttgtgtccctggccacacttccacccgccagggtcttcctccccatctttccatccttcctgctgagcttccacagagctcgtttgcaaacagggggattaaagcatcactgcgcattcg

SEQ ID NO: 128663 - DNA, 567 bp, Homo sapiens
  Payload ID: 5181
  Gene Symbol: DBNDD1
  Gene Name: dysbindin (dystrobrevin binding protein 1) domain containing 1
  ENST ID: ENST00000568330
  CDS Start-End: 1-239
atccagggcgctctgtgagtctgtcattacccagcgcgagtcaggcccctcctgtgcccctcgccagccccgaggggcgcccgcacacagtcggcgccccacacgcaagtacctggaagagaacaagaggacgccagcgggcgcggccgccaaatgccagtggaaaggtggaaaccagattccgcgagagccccgtccagcccgcccaacccccaggcctgaaacgggccatgccatgacacagcactcggcttctcagacaggagagatcgttaaggaggctgaggtgccgcaggctgcgctgggcgtcccagcccaggggacaggggacaatggccacacgcctgtggaggaggaggtcgggggcatcccagtaccagcaccggggctcctgcaggtcacggagaggaggcagcctctgagcagcgtctcctctctggaggtccacttcgacctcctggacctcactgagctcaccgacatgtcggaccaggagctggccgaggtctttgctgactcggacgacgagaacctcaacaccgagtccccagcaggtctgcacccgct

SEQ ID NO: 128664 - DNA, 993 bp, Homo sapiens
  Payload ID: 5181
  Gene Symbol: DBNDD1
  Gene Name: dysbindin (dystrobrevin binding protein 1) domain containing 1
  Uniprot ID: Q9H9R9
  ENST ID: ENST00000568838
  CDS Start-End: 11-847
ttgcttcaaaatgacccagcagtggagggaagtgaatgaggacagagaagcagtggcccaggccaggagctggcaatcgctgaatctgggcgatagggacatgggggtcagtttcatcgaaactgccttggcgctctctgcagcccgggcccgccgccctctccttacctcccatcccccatcccgccccttccagcctcccaagcacacgccctcgcccccacccgccccccgcgttaattcgcgccatccagggcgctctgtgagtctgtcattacccagcgcgagtcaggcccctcctgtgcccctcgccagccccgaggggcgcccgcacacagtcggcgccccacacgcaagtacctggaagagaacaagaggacgccagcgggcgcggccgccaaagatcgttaaggaggctgaggtgccgcaggctgcgctgggcgtcccagcccaggggacaggggacaatggccacacgcctgtggaggaggaggtcgggggcatcccagtaccagcaccggggctcctgcaggtcacggagaggaggcagcctctgagcagcgtctcctctctggaggtccacttcgacctcctggacctcactgagctcaccgacatgtcggaccaggagctggccgaggtctttgctgactcggacgacgagaacctcaacaccgagtccccagcaggtctgcacccgctgccccgggccggctacctgcgctccccttcctggacgaggacaagggctgagcagagccacgagaagcagcccctaggcgaccccgagcggcaggccacagtcctggacacgtttctcactgtggagaggccccaggaggactagaccatctccacctgccccagctcctgcagggatggggtccgaacacgatggcagatctgggcagtgctgacccagcagacacacttcacccgcccacgaggctccagccgtcacctcctgacacacaccctgggggcagctctctg

SEQ ID NO: 128665 - DNA, 1036 bp, Homo sapiens
  Payload ID: 5182
  Gene Symbol: DBNDD2
  Gene Name: dysbindin (dystrobrevin binding protein 1) domain containing 2
  Uniprot ID: Q9BQY9
  ENST ID: ENST00000357275
  CDS Start-End: 81-566
gtgcgtcctctggagaagtgcgcgcgtgtaagtgtggcgagtgtggccaagggtgccggaggcagggttcgggagctgacatggacccaaatcctcgggccgccctggagcgccagcagctccgccttcgggagcggcaaaaattcttcgaggacattttacagccagagacagagtttgtctttcctctgtcccatctgcatctcgagtcgcagagaccccccataggtagtatctcatccatggaagtgaatgtggacacactggagcaagtagaacttattgaccttggggacccggatgcagcagatgtgttcttgccttgcgaagatcctccaccaaccccccagtcgtctgggatggacaaccatttggaggagctgagcctgccggtgcctacatcagacaggaccacatctaggacctcctcctcctcctcctccgactcctccaccaacctgcatagcccaaatccaagtgatgatggagcagatacgcccttggcacagtcggatgaagaggaggaaaggggtgatggaggggcagagcctggagcctgcagctagcagtgggcccctgcctacagactgaccacgctggctattctccacatgagaccacaggcccagccagagcctgtcgggagaagaccagactctttacttgcagtaggcaccagaggtgggaaggatggtgggattgtgtacctttctaagaattaaccctctcctgctttactgctaattttttcctgctgcaaccctcccaccagtttttggcttactcctgagatatgatttgcaaatgaggagagagaagatgaggttggacaagatgccactgcttttcttagcactcttccctcccctaaaccatcccgtagtcttctaatacagtctctcagacaagtgtctctagatggatgtgaactccttaactcatcaagtaaggtggtactcaagccatgctgcctccttacatcctttttggaacagagcacggtataaataataaactaataataatatgccaacca

SEQ ID NO: 128666 - DNA, 1078 bp, Homo sapiens
  Payload ID: 5182
  Gene Symbol: DBNDD2
  Gene Name: dysbindin (dystrobrevin binding protein 1) domain containing 2
  Uniprot ID: Q9BQY9
  ENST ID: ENST00000360981
  CDS Start-End: 123-608
cccgggagccctggaggcgcagccccaccccggccggcgcggctcgctcccacgcccccgccgcggcctcgctggagcggacggactgagtcagagggggcgccagcgctgcaggagctgacatggacccaaatcctcgggccgccctggagcgccagcagctccgccttcgggagcggcaaaaattcttcgaggacattttacagccagagacagagtttgtctttcctctgtcccatctgcatctcgagtcgcagagaccccccataggtagtatctcatccatggaagtgaatgtggacacactggagcaagtagaacttattgaccttggggacccggatgcagcagatgtgttcttgccttgcgaagatcctccaccaaccccccagtcgtctgggatggacaaccatttggaggagctgagcctgccggtgcctacatcagacaggaccacatctaggacctcctcctcctcctcctccgactcctccaccaacctgcatagcccaaatccaagtgatgatggagcagatacgcccttggcacagtcggatgaagaggaggaaaggggtgatggaggggcagagcctggagcctgcagctagcagtgggcccctgcctacagactgaccacgctggctattctccacatgagaccacaggcccagccagagcctgtcgggagaagaccagactctttacttgcagtaggcaccagaggtgggaaggatggtgggattgtgtacctttctaagaattaaccctctcctgctttactgctaattttttcctgctgcaaccctcccaccagtttttggcttactcctgagatatgatttgcaaatgaggagagagaagatgaggttggacaagatgccactgcttttcttagcactcttccctcccctaaaccatcccgtagtcttctaatacagtctctcagacaagtgtctctagatggatgtgaactccttaactcatcaagtaaggtggtactcaagccatgctgcctccttacatcctttttggaacagagcacggtataaataataaactaataataatatgccaacca

SEQ ID NO: 128667 - DNA, 1417 bp, Homo sapiens
  Payload ID: 5182
  Gene Symbol: DBNDD2
  Gene Name: dysbindin (dystrobrevin binding protein 1) domain containing 2
  Uniprot ID: Q9BQY9
  ENST ID: ENST00000372710
  CDS Start-End: 156-947
agcactggaggaagggaaccctccaccctgagatctctgtctctatcctatcctgtccctggccttctgaggcaagcggggccaattaaggggaaaacgtacctcctccatttgtgctgaaccaatccctccaacccctctcaggagggcatgatatggagagttgggcattggctgtgttccctgaatacagagtatctctcttgtggtgcctggaactggcatcccctttgtggagcttagggcaagccccgcctctgcatgagacttggtttgtgggacacacttggtttcagggaaggggaaagaggtcaccaagggcagaggtgtccaggccggagccaggggccccactgttgggatgctggctgcagtggggcgccccaagcccaggtcccctctgtcttctctttcgactttgcagctgtacttgttttgctcctctacccgcaggagctgacatggacccaaatcctcgggccgccctggagcgccagcagctccgccttcgggagcggcaaaaattcttcgaggacattttacagccagagacagagtttgtctttcctctgtcccatctgcatctcgagtcgcagagaccccccataggtagtatctcatccatggaagtgaatgtggacacactggagcaagtagaacttattgaccttggggacccggatgcagcagatgtgttcttgccttgcgaagatcctccaccaaccccccagtcgtctgggatggacaaccatttggaggagctgagcctgccggtgcctacatcagacaggaccacatctaggacctcctcctcctcctcctccgactcctccaccaacctgcatagcccaaatccaagtgatgatggagcagatacgcccttggcacagtcggatgaagaggaggaaaggggtgatggaggggcagagcctggagcctgcagctagcagtgggcccctgcctacagactgaccacgctggctattctccacatgagaccacaggcccagccagagcctgtcgggagaagaccagactctttacttgcagtaggcaccagaggtgggaaggatggtgggattgtgtacctttctaagaattaaccctctcctgctttactgctaattttttcctgctgcaaccctcccaccagtttttggcttactcctgagatatgatttgcaaatgaggagagagaagatgaggttggacaagatgccactgcttttcttagcactcttccctcccctaaaccatcccgtagtcttctaatacagtctctcagacaagtgtctctagatggatgtgaactccttaactcatcaagtaaggtggtactcaagccatgctgcctccttacatcctttttggaacagagcacggtataaataataaactaataataatatgccaacca

SEQ ID NO: 128668 - DNA, 1537 bp, Homo sapiens
  Payload ID: 5182
  Gene Symbol: DBNDD2
  Gene Name: dysbindin (dystrobrevin binding protein 1) domain containing 2
  Uniprot ID: Q9BQY9
  ENST ID: ENST00000372712
  CDS Start-End: 582-1067
tagcgttgtgacctgggcggcagctctaagagcctttcccgggaatcggcgtcagcgcctcgctcctccgccgccagcccgcggccgcacggtctccccagacttccgtggccctgccttggccagtcggggttgggtccctctccacctctgtggcgcccgtggagctggccagggtctgggatacgctgggtgcagatgaggtggggaaggcagtctgcggaggatgacgtctgatcctcaagctagaaactcccttgcctctggtgatgggctcagagcagaacgccgggaaggagatgagcgaatgggaatgaatgcaccgacctgggctggcccatagcctcagtgctctggcagggtctcagcttctcagccctaggggtcaggaggcctgctctgaactggacccagaacccgcctttccaattgctcctcactgactaatggggagataagtcagtgagatgtgtcccaggagggggacgcataaagagctgttggagttcaaaggaaagatggtagtctcctaaatagctcaccttcacaagcagggtcttgtatttgaggcaggagctgacatggacccaaatcctcgggccgccctggagcgccagcagctccgccttcgggagcggcaaaaattcttcgaggacattttacagccagagacagagtttgtctttcctctgtcccatctgcatctcgagtcgcagagaccccccataggtagtatctcatccatggaagtgaatgtggacacactggagcaagtagaacttattgaccttggggacccggatgcagcagatgtgttcttgccttgcgaagatcctccaccaaccccccagtcgtctgggatggacaaccatttggaggagctgagcctgccggtgcctacatcagacaggaccacatctaggacctcctcctcctcctcctccgactcctccaccaacctgcatagcccaaatccaagtgatgatggagcagatacgcccttggcacagtcggatgaagaggaggaaaggggtgatggaggggcagagcctggagcctgcagctagcagtgggcccctgcctacagactgaccacgctggctattctccacatgagaccacaggcccagccagagcctgtcgggagaagaccagactctttacttgcagtaggcaccagaggtgggaaggatggtgggattgtgtacctttctaagaattaaccctctcctgctttactgctaattttttcctgctgcaaccctcccaccagtttttggcttactcctgagatatgatttgcaaatgaggagagagaagatgaggttggacaagatgccactgcttttcttagcactcttccctcccctaaaccatcccgtagtcttctaatacagtctctcagacaagtgtctctagatggatgtgaactccttaactcatcaagtaaggtggtactcaagccatgctgcctccttacatcctttttggaacagagcacggtataaataataaactaataataatatgccaacca

SEQ ID NO: 128669 - DNA, 1207 bp, Homo sapiens
  Payload ID: 5182
  Gene Symbol: DBNDD2
  Gene Name: dysbindin (dystrobrevin binding protein 1) domain containing 2
  Uniprot ID: Q9BQY9
  ENST ID: ENST00000372717
  CDS Start-End: 154-492
ctcgttcccggctcccagggcccgtcggtcccccgggagccctggaggcgcagccccaccccggccggcgcggctcgctcccacgcccccgccgcggcctcgctggagcggacggactgagtcagagggggcgccagcgctgcaggagctgacatggacccaaatcctcgggccgccctggagcgccagcagctccgccttcgggagcggcaaaaattcttcgaggacattttacagccagagacagagtttgtctttcctctgtcccatctgcatctcgagtcgcagagaccccccataggtagtatctcatccatggaagtgaatgtggacacactggagcaagtagaacttattgaccttggggacccggatgcagcagatgtgttcttgccttgcgaagatcctccaccaaccccccagtcgtctggtatgcccctctgctttggggacttcagtgccagtcagccagagccggatgtcaggctctgaaacgaggctacaaggctgggctggggaagtacacaaggatggacaaccatttggaggagctgagcctgccggtgcctacatcagacaggaccacatctaggacctcctcctcctcctcctccgactcctccaccaacctgcatagcccaaatccaagtgatgatggagcagatacgcccttggcacagtcggatgaagaggaggaaaggggtgatggaggggcagagcctggagcctgcagctagcagtgggcccctgcctacagactgaccacgctggctattctccacatgagaccacaggcccagccagagcctgtcgggagaagaccagactctttacttgcagtaggcaccagaggtgggaaggatggtgggattgtgtacctttctaagaattaaccctctcctgctttactgctaattttttcctgctgcaaccctcccaccagtttttggcttactcctgagatatgatttgcaaatgaggagagagaagatgaggttggacaagatgccactgcttttcttagcactcttccctcccctaaaccatcccgtagtcttctaatacagtctctcagacaagtgtctctagatggatgtgaactccttaactcatcaagtaaggtggtactcaagccatgctgcctccttacatcctttttggaacagagcacggtataaataataaactaataataatatgccaacca

SEQ ID NO: 128670 - DNA, 1481 bp, Homo sapiens
  Payload ID: 5182
  Gene Symbol: DBNDD2
  Gene Name: dysbindin (dystrobrevin binding protein 1) domain containing 2
  Uniprot ID: Q9BQY9
  ENST ID: ENST00000372720
  CDS Start-End: 232-1011
cgagtgtggccaagggtgccggaggcagggttcgggtgcgtagtcgttgcgtgggcgctgcccaaaaggcgcagagcatcaagtgtgcgtgggcagaaccggcgcgggcgcccgccgcgggtctgcgcggggcgggggcgcagcaagtgcatccgagcgagcggagactagcgcaccggcgtcggtggcgagggtggtgcagaggagtccggctgggcggagggaggaaggatgggtgcgggtaactttttgaccgccttggaagtaccagtagccgcgctcgcaggggctgcctccgaccgccgggcgagctgcgagcgagtgagcccgccaccgcccctcccccacttccgcctcccgcctcttcctcgttcccggctcccagggcccgtgtccaggccggagccaggggccccactgttgggatgctggctgcagtggggcgccccaagcccaggtcccctctgtcttctctttcgactttgcagctgtacttgttttgctcctctacccgcaggagctgacatggacccaaatcctcgggccgccctggagcgccagcagctccgccttcgggagcggcaaaaattcttcgaggacattttacagccagagacagagtttgtctttcctctgtcccatctgcatctcgagtcgcagagaccccccataggtagtatctcatccatggaagtgaatgtggacacactggagcaagtagaacttattgaccttggggacccggatgcagcagatgtgttcttgccttgcgaagatcctccaccaaccccccagtcgtctgggatggacaaccatttggaggagctgagcctgccggtgcctacatcagacaggaccacatctaggacctcctcctcctcctcctccgactcctccaccaacctgcatagcccaaatccaagtgatgatggagcagatacgcccttggcacagtcggatgaagaggaggaaaggggtgatggaggggcagagcctggagcctgcagctagcagtgggcccctgcctacagactgaccacgctggctattctccacatgagaccacaggcccagccagagcctgtcgggagaagaccagactctttacttgcagtaggcaccagaggtgggaaggatggtgggattgtgtacctttctaagaattaaccctctcctgctttactgctaattttttcctgctgcaaccctcccaccagtttttggcttactcctgagatatgatttgcaaatgaggagagagaagatgaggttggacaagatgccactgcttttcttagcactcttccctcccctaaaccatcccgtagtcttctaatacagtctctcagacaagtgtctctagatggatgtgaactccttaactcatcaagtaaggtggtactcaagccatgctgcctccttacatcctttttggaacagagcacggtataaataataaactaataataatatgccaacca

SEQ ID NO: 128671 - DNA, 1202 bp, Homo sapiens
  Payload ID: 5182
  Gene Symbol: DBNDD2
  Gene Name: dysbindin (dystrobrevin binding protein 1) domain containing 2
  Uniprot ID: Q9BQY9
  ENST ID: ENST00000372722
  CDS Start-End: 149-487
agccgggcgagtcccagggcaggggtcctccgccgccttgcacctgccctgctgggcggcaccgggtcagtgccctgccccctcctgcgggtcccaactctctctttcccatcgtgcgtcctctggagaagtgcgcgcgtgagctgacatggacccaaatcctcgggccgccctggagcgccagcagctccgccttcgggagcggcaaaaattcttcgaggacattttacagccagagacagagtttgtctttcctctgtcccatctgcatctcgagtcgcagagaccccccataggtagtatctcatccatggaagtgaatgtggacacactggagcaagtagaacttattgaccttggggacccggatgcagcagatgtgttcttgccttgcgaagatcctccaccaaccccccagtcgtctggtatgcccctctgctttggggacttcagtgccagtcagccagagccggatgtcaggctctgaaacgaggctacaaggctgggctggggaagtacacaaggatggacaaccatttggaggagctgagcctgccggtgcctacatcagacaggaccacatctaggacctcctcctcctcctcctccgactcctccaccaacctgcatagcccaaatccaagtgatgatggagcagatacgcccttggcacagtcggatgaagaggaggaaaggggtgatggaggggcagagcctggagcctgcagctagcagtgggcccctgcctacagactgaccacgctggctattctccacatgagaccacaggcccagccagagcctgtcgggagaagaccagactctttacttgcagtaggcaccagaggtgggaaggatggtgggattgtgtacctttctaagaattaaccctctcctgctttactgctaattttttcctgctgcaaccctcccaccagtttttggcttactcctgagatatgatttgcaaatgaggagagagaagatgaggttggacaagatgccactgcttttcttagcactcttccctcccctaaaccatcccgtagtcttctaatacagtctctcagacaagtgtctctagatggatgtgaactccttaactcatcaagtaaggtggtactcaagccatgctgcctccttacatcctttttggaacagagcacggtataaataataaactaataataatatgccaacca

SEQ ID NO: 128672 - DNA, 1118 bp, Homo sapiens
  Payload ID: 5182
  Gene Symbol: DBNDD2
  Gene Name: dysbindin (dystrobrevin binding protein 1) domain containing 2
  Uniprot ID: Q9BQY9
  ENST ID: ENST00000372723
  CDS Start-End: 163-648
caggaatcaggggcagccgggcgagtcccagggcaggggtcctccgccgccttgcacctgccctgctgggcggcaccgggtcagtgccctgccccctcctgcgggtcccaactctctctttcccatcgtgcgtcctctggagaagtgcgcgcgtgagctgacatggacccaaatcctcgggccgccctggagcgccagcagctccgccttcgggagcggcaaaaattcttcgaggacattttacagccagagacagagtttgtctttcctctgtcccatctgcatctcgagtcgcagagaccccccataggtagtatctcatccatggaagtgaatgtggacacactggagcaagtagaacttattgaccttggggacccggatgcagcagatgtgttcttgccttgcgaagatcctccaccaaccccccagtcgtctgggatggacaaccatttggaggagctgagcctgccggtgcctacatcagacaggaccacatctaggacctcctcctcctcctcctccgactcctccaccaacctgcatagcccaaatccaagtgatgatggagcagatacgcccttggcacagtcggatgaagaggaggaaaggggtgatggaggggcagagcctggagcctgcagctagcagtgggcccctgcctacagactgaccacgctggctattctccacatgagaccacaggcccagccagagcctgtcgggagaagaccagactctttacttgcagtaggcaccagaggtgggaaggatggtgggattgtgtacctttctaagaattaaccctctcctgctttactgctaattttttcctgctgcaaccctcccaccagtttttggcttactcctgagatatgatttgcaaatgaggagagagaagatgaggttggacaagatgccactgcttttcttagcactcttccctcccctaaaccatcccgtagtcttctaatacagtctctcagacaagtgtctctagatggatgtgaactccttaactcatcaagtaaggtggtactcaagccatgctgcctccttacatcctttttggaacagagcacggtataaataataaactaataataatatgccaacca

SEQ ID NO: 128673 - DNA, 1233 bp, Homo sapiens
  Payload ID: 5182
  Gene Symbol: DBNDD2
  Gene Name: dysbindin (dystrobrevin binding protein 1) domain containing 2
  ENST ID: ENST00000443296
  CDS Start-End: 1-518
acacttggtttcagggaaggggaaagaggtcaccaagggcagaggtgtccaggccggagccaggggccccactgttgggatgctggctgcagtggggcgccccaagcccaggtcccctctgtcttctctttcgactttgcagctgtacttgttttgctcctctacccgcaggagctgacatggacccaaatcctcgggccgccctggagcgccagcagctccgccttcgggagcggcaaaaattcttcgaggacattttacagccagagacagagtttgtctttcctctgtcccatctgcatctcgagtcgcagagaccccccataggtagtatctcatccatggaagtgaatgtggacacactggagcaagtagaacttattgaccttggggacccggatgcagcagatgtgttcttgccttgcgaagatcctccaccaaccccccagtcgtctggtatgcccctctgctttggggacttcagtgccagtcagccagagccggatgtcaggctctgaaacgaggctacaaggctgggctggggaagtacacaaggatggacaaccatttggaggagctgagcctgccggtgcctacatcagacaggaccacatctaggacctcctcctcctcctcctccgactcctccaccaacctgcatagcccaaatccaagtgatgatggagcagatacgcccttggcacagtcggatgaagaggaggaaaggggtgatggaggggcagagcctggagcctgcagctagcagtgggcccctgcctacagactgaccacgctggctattctccacatgagaccacaggcccagccagagcctgtcgggagaagaccagactctttacttgcagtaggcaccagaggtgggaaggatggtgggattgtgtacctttctaagaattaaccctctcctgctttactgctaattttttcctgctgcaaccctcccaccagtttttggcttactcctgagatatgatttgcaaatgaggagagagaagatgaggttggacaagatgccactgcttttcttagcactcttccctcccctaaaccatcccgtagtcttctaatacagtctctcagacaagtgtctctagatggatgtgaactccttaactcatcaagtaaggtggtactcaagccatgctgcctccttacatcctttttggaacagagcacggtataaataataaactaataataatatgccaacca

SEQ ID NO: 128674 - DNA, 6796 bp, Homo sapiens
  Payload ID: 5183
  Gene Symbol: DYSF
  Gene Name: dysferlin
  Uniprot ID: O75923
  ENST ID: ENST00000258104
  CDS Start-End: 278-6520
gggtggaagatgagcagaagcccctgttctcggaacgccggctgacaagcggggtgagcgcagccggggcggggacccagcctagcccactggagcagccgggggtggcccgttcccctttaagagcaactgctctaagccaggagccagagattcgagccggcctcgcccagccagccctctccagcgaggggacccacaagcggcgcctcggccctcccgacctttccgagccctctttgcgccctgggcgcacggggccctacacgcgccaagcatgctgagggtcttcatcctctatgccgagaacgtccacacacccgacaccgacatcagcgatgcctactgctccgcggtgtttgcaggggtgaagaagagaaccaaagtcatcaagaacagcgtgaaccctgtatggaatgagggatttgaatgggacctcaagggcatccccctggaccagggctctgagcttcatgtggtggtcaaagaccatgagacgatggggaggaacaggttcctgggggaagccaaggtcccactccgagaggtcctcgccacccctagtctgtccgccagcttcaatgcccccctgctggacaccaagaagcagcccacaggggcctcgctggtcctgcaggtgtcctacacaccgctgcctggagctgtgcccctgttcccgccccctactcctctggagccctccccgactctgcctgacctggatgtagtggcagacacaggaggagaggaagacacagaggaccagggactcactggagatgaggcggagccattcctggatcaaagcggaggcccgggggctcccaccaccccaaggaaactaccttcacgtcctccgccccactaccccgggatcaaaagaaagcgaagtgcgcctacatctagaaagctgctgtcagacaaaccgcaggatttccagatcagggtccaggtgatcgaggggcgccagctgccgggggtgaacatcaagcctgtggtcaaggttaccgctgcagggcagaccaagcggacgcggatccacaagggaaacagcccactcttcaatgagactcttttcttcaacttgtttgactctcctggggagctgtttgatgagcccatctttatcacggtggtagactctcgttctctcaggacagatgctctcctcggggagttccggatggacgtgggcaccatttacagagagccccggcacgcctatctcaggaagtggctgctgctctcagaccctgatgacttctctgctggggccagaggctacctgaaaacaagcctttgtgtgctggggcctggggacgaagcgcctctggagagaaaagacccctctgaagacaaggaggacattgaaagcaacctgctccggcccacaggcgtagccctgcgaggagcccacttctgcctgaaggtcttccgggccgaggacttgccgcagatggacgatgccgtgatggacaacgtgaaacagatctttggcttcgagagtaacaagaagaacttggtggacccctttgtggaggtcagctttgcggggaaaatgctgtgcagcaagatcttggagaagacggccaaccctcagtggaaccagaacatcacactgcctgccatgtttccctccatgtgcgaaaaaatgaggattcgtatcatagactgggaccgcctgactcacaatgacatcgtggctaccacctacctgagtatgtcgaaaatctctgcccctggaggagaaatagaagaggagcctgcaggtgctgtcaagccttcgaaagcctcagacttggatgactacctgggcttcctccccacttttgggccctgctacatcaacctctatggcagtcccagagagttcacaggcttcccagacccctacacagagctcaacacaggcaagggggaaggtgtggcttatcgtggccggcttctgctctccctggagaccaagctggtggagcacagtgaacagaaggtggaggaccttcctgcggatgacatcctccgggtggagaagtaccttaggaggcgcaagtactccctgtttgcggccttctactcagccaccatgctgcaggatgtggatgatgccatccagtttgaggtcagcatcgggaactacgggaacaagttcgacatgacctgcctgccgctggcctccaccactcagtacagccgtgcagtctttgacgggtgccactactactacctaccctggggtaacgtgaaacctgtggtggtgctgtcatcctactgggaggacatcagccatagaatcgagactcagaaccagctgcttgggattgctgaccggctggaagctggcctggagcaggtccacctggccctgaaggcgcagtgctccacggaggacgtggactcgctggtggctcagctgacggatgagctcatcgcaggctgcagccagcctctgggtgacatccatgagacaccctctgccacccacctggaccagtacctgtaccagctgcgcacccatcacctgagccaaatcactgaggctgccctggccctgaagctcggccacagtgagctccctgcagctctggagcaggcggaggactggctcctgcgtctgcgtgccctggcagaggagccccagaacagcctgccggacatcgtcatctggatgctgcagggagacaagcgtgtggcataccagcgggtgcccgcccaccaagtcctcttctcccggcggggtgccaactactgtggcaagaattgtgggaagctacagacaatctttctgaaatatccgatggagaaggtgcctggcgcccggatgccagtgcagatacgggtcaagctgtggtttgggctctcagtggatgagaaggagttcaaccagtttgctgaggggaagctgtctgtctttgctgaaacctatgagaacgagactaagttggcccttgttgggaactggggcacaacgggcctcacctaccccaagttttctgacgtcacgggcaagatcaagctacccaaggacagcttccgcccctcggccggctggacctgggctggagattggttcgtgtgtccggagaagactctgctccatgacatggacgccggtcacctgagcttcgtggaagaggtgtttgagaaccagacccggcttcccggaggccagtggatctacatgagtgacaactacaccgatgtgaacggggagaaggtgcttcccaaggatgacattgagtgcccactgggctggaagtgggaagatgaggaatggtccacagacctcaaccgggctgtcgatgagcaaggctgggagtatagcatcaccatccccccggagcggaagccgaagcactgggtccctgctgagaagatgtactacacacaccgacggcggcgctgggtgcgcctgcgcaggagggatctcagccaaatggaagcactgaaaaggcacaggcaggcggaggcggagggcgagggctgggagtacgcctctctttttggctggaagttccacctcgagtaccgcaagacagatgccttccgccgccgccgctggcgccgtcgcatggagccactggagaagacggggcctgcagctgtgtttgcccttgagggggccctgggcggcgtgatggatgacaagagtgaagattccatgtccgtctccaccttgagcttcggtgtgaacagacccacgatttcctgcatattcgactatgggaaccgctaccatctacgctgctacatgtaccaggcccgggacctggctgcgatggacaaggactctttttctgatccctatgccatcgtctccttcctgcaccagagccagaagacggtggtggtgaagaacacccttaaccccacctgggaccagacgctcatcttctacgagatcgagatctttggcgagccggccacagttgctgagcaaccgcccagcattgtggtggagctgtacgaccatgacacttatggtgcagacgagtttatgggtcgctgcatctgtcaaccgagtctggaacggatgccacggctggcctggttcccactgacgaggggcagccagccgtcgggggagctgctggcctcttttgagctcatccagagagagaagccggccatccaccatattcctggttttgaggtgcaggagacatcaaggatcctggatgagtctgaggacacagacctgccctacccaccaccccagagggaggccaacatctacatggttcctcagaacatcaagccagcgctccagcgtaccgccatcgagatcctggcatggggcctgcggaacatgaagagttaccagctggccaacatctcctcccccagcctcgtggtagagtgtgggggccagacggtgcagtcctgtgtcatcaggaacctccggaagaaccccaactttgacatctgcaccctcttcatggaagtgatgctgcccagggaggagctctactgcccccccatcaccgtcaaggtcatcgataaccgccagtttggccgccggcctgtggtgggccagtgtaccatccgctccctggagagcttcctgtgtgacccctactcggcggagagtccatccccacagggtggcccagacgatgtgagcctactcagtcctggggaagacgtgctcatcgacattgatgacaaggagcccctcatccccatccaggaggaagagttcatcgattggtggagcaaattctttgcctccataggggagagggaaaagtgcggctcctacctggagaaggattttgacaccctgaaggtctatgacacacagctggagaatgtggaggcctttgagggcctgtctgacttttgtaacaccttcaagctgtaccggggcaagacgcaggaggagacagaagatccatctgtgattggtgaatttaagggcctcttcaaaatttatcccctcccagaagacccagccatccccatgcccccaagacagttccaccagctggccgcccagggaccccaggagtgcttggtccgtatctacattgtccgagcatttggcctgcagcccaaggaccccaatggaaagtgtgatccttacatcaagatctccatagggaagaaatcagtgagtgaccaggataactacatcccctgcacgctggagcccgtatttggaaagatgttcgagctgacctgcactctgcctctggagaaggacctaaagatcactctctatgactatgacctcctctccaaggacgaaaagatcggtgagacggtcgtcgacctggagaacaggctgctgtccaagtttggggctcgctgtggactcccacagacctactgtgtctctggaccgaaccagtggcgggaccagctccgcccctcccagctcctccacctcttctgccagcagcatagagtcaaggcacctgtgtaccggacagaccgtgtaatgtttcaggataaagaatattccattgaagagatagaggctggcaggatcccaaacccacacctgggcccagtggaggagcgtctggctctgcatgtgcttcagcagcagggcctggtcccggagcacgtggagtcacggcccctctacagccccctgcagccagacatcgagcaggggaagctgcagatgtgggtcgacctatttccgaaggccctggggcggcctggacctcccttcaacatcaccccacggagagccagaaggtttttcctgcgttgtattatctggaataccagagatgtgatcctggatgacctgagcctcacgggggagaagatgagcgacatttatgtgaaaggttggatgattggctttgaagaacacaagcaaaagacagacgtgcattatcgttccctgggaggtgaaggcaacttcaactggaggttcattttccccttcgactacctgccagctgagcaagtctgtaccattgccaagaaggatgccttctggaggctggacaagactgagagcaaaatcccagcacgagtggtgttccagatctgggacaatgacaagttctcctttgatgattttctgggctccctgcagctcgatctcaaccgcatgcccaagccagccaagacagccaagaagtgctccttggaccagctggatgatgctttccacccagaatggtttgtgtccctttttgagcagaaaacagtgaagggctggtggccctgtgtagcagaagagggtgagaagaaaatactggcgggcaagctggaaatgaccttggagattgtagcagagagtgagcatgaggagcggcctgctggccagggccgggatgagcccaacatgaaccctaagcttgaggacccaaggcgccccgacacctccttcctgtggtttacctccccatacaagaccatgaagttcatcctgtggcggcgtttccggtgggccatcatcctcttcatcatcctcttcatcctgctgctgttcctggccatcttcatctacgccttcccgaactatgctgccatgaagctggtgaagcccttcagctgaggactctcctgccctgtagaaggggccgtggggtcccctccagcatgggactggcctgcctcctccgcccagctcggcgagctcctccagacctcctaggcctgattgtcctgccagggtgggcagacagacagatggaccggcccacactcccagagttgctaacatggagctctgagatcaccccacttccatcatttccttctcccccaacccaacgcttttttggatcagctcagacatatttcagtataaaacagttggaaccacacagca

SEQ ID NO: 128675 - DNA, 6543 bp, Homo sapiens
  Payload ID: 5183
  Gene Symbol: DYSF
  Gene Name: dysferlin
  Uniprot ID: O75923
  ENST ID: ENST00000394120
  CDS Start-End: 142-6387
tctccgcggaggagcagcgaaggcgacagctctcttggcgcggctgcctgggagccgggcgcttgctgggtgggtgctcgggcccggtgctcccgctcccgccctgactgcgcgcctgtgtgccgccggggctgcccagccatgctgtgctgcctgctggtgagggccagcaacctccccagtgcgaagaaggaccggcgcagcgaccctgtcgcaagcctgactttccgaggggtgaagaagagaaccaaagtcatcaagaacagcgtgaaccctgtatggaatgagggatttgaatgggacctcaagggcatccccctggaccagggctctgagcttcatgtggtggtcaaagaccatgagacgatggggaggaacaggttcctgggggaagccaaggtcccactccgagaggtcctcgccacccctagtctgtccgccagcttcaatgcccccctgctggacaccaagaagcagcccacaggggcctcgctggtcctgcaggtgtcctacacaccgctgcctggagctgtgcccctgttcccgccccctactcctctggagccctccccgactctgcctgacctggatgtagtggcagacacaggaggagaggaagacacagaggaccagggactcactggagatgaggcggagccattcctggatcaaagcggaggcccgggggctcccaccaccccaaggaaactaccttcacgtcctccgccccactaccccgggatcaaaagaaagcgaagtgcgcctacatctagaaagctgctgtcagacaaaccgcaggatttccagatcagggtccaggtgatcgaggggcgccagctgccgggggtgaacatcaagcctgtggtcaaggttaccgctgcagggcagaccaagcggacgcggatccacaagggaaacagcccactcttcaatgagactcttttcttcaacttgtttgactctcctggggagctgtttgatgagcccatctttatcacggtggtagactctcgttctctcaggacagatgctctcctcggggagttccggatggacgtgggcaccatttacagagagccccggcacgcctatctcaggaagtggctgctgctctcagaccctgatgacttctctgctggggccagaggctacctgaaaacaagcctttgtgtgctggggcctggggacgaagcgcctctggagagaaaagacccctctgaagacaaggaggacattgaaagcaacctgctccggcccacaggcgtagccctgcgaggagcccacttctgcctgaaggtcttccgggccgaggacttgccgcagatggacgatgccgtgatggacaacgtgaaacagatctttggcttcgagagtaacaagaagaacttggtggacccctttgtggaggtcagctttgcggggaaaatgctgtgcagcaagatcttggagaagacggccaaccctcagtggaaccagaacatcacactgcctgccatgtttccctccatgtgcgaaaaaatgaggattcgtatcatagactgggaccgcctgactcacaatgacatcgtggctaccacctacctgagtatgtcgaaaatctctgcccctggaggagaaatagaagaggagcctgcaggtgctgtcaagccttcgaaagcctcagacttggatgactacctgggcttcctccccacttttgggccctgctacatcaacctctatggcagtcccagagagttcacaggcttcccagacccctacacagagctcaacacaggcaagggggaaggtgtggcttatcgtggccggcttctgctctccctggagaccaagctggtggagcacagtgaacagaaggtggaggaccttcctgcggatgacatcctccgggtggagaagtaccttaggaggcgcaagtactccctgtttgcggccttctactcagccaccatgctgcaggatgtggatgatgccatccagtttgaggtcagcatcgggaactacgggaacaagttcgacatgacctgcctgccgctggcctccaccactcagtacagccgtgcagtctttgacgggtgccactactactacctaccctggggtaacgtgaaacctgtggtggtgctgtcatcctactgggaggacatcagccatagaatcgagactcagaaccagctgcttgggattgctgaccggctggaagctggcctggagcaggtccacctggccctgaaggcgcagtgctccacggaggacgtggactcgctggtggctcagctgacggatgagctcatcgcaggctgcagccagcctctgggtgacatccatgagacaccctctgccacccacctggaccagtacctgtaccagctgcgcacccatcacctgagccaaatcactgaggctgccctggccctgaagctcggccacagtgagctccctgcagctctggagcaggcggaggactggctcctgcgtctgcgtgccctggcagaggagccccagaacagcctgccggacatcgtcatctggatgctgcagggagacaagcgtgtggcataccagcgggtgcccgcccaccaagtcctcttctcccggcggggtgccaactactgtggcaagaattgtgggaagctacagacaatctttctgaaatatccgatggagaaggtgcctggcgcccggatgccagtgcagatacgggtcaagctgtggtttgggctctcagtggatgagaaggagttcaaccagtttgctgaggggaagctgtctgtctttgctgaaacctatgagaacgagactaagttggcccttgttgggaactggggcacaacgggcctcacctaccccaagttttctgacgtcacgggcaagatcaagctacccaaggacagcttccgcccctcggccggctggacctgggctggagattggttcgtgtgtccggagaagactctgctccatgacatggacgccggtcacctgagcttcgtggaagaggtgtttgagaaccagacccggcttcccggaggccagtggatctacatgagtgacaactacaccgatgtgaacggggagaaggtgcttcccaaggatgacattgagtgcccactgggctggaagtgggaagatgaggaatggtccacagacctcaaccgggctgtcgatgagcaaggctgggagtatagcatcaccatccccccggagcggaagccgaagcactgggtccctgctgagaagatgtactacacacaccgacggcggcgctgggtgcgcctgcgcaggagggatctcagccaaatggaagcactgaaaaggcacaggcaggcggaggcggagggcgagggctgggagtacgcctctctttttggctggaagttccacctcgagtaccgcaagacagatgccttccgccgccgccgctggcgccgtcgcatggagccactggagaagacggggcctgcagctgtgtttgcccttgagggggccctgggcggcgtgatggatgacaagagtgaagattccatgtccgtctccaccttgagcttcggtgtgaacagacccacgatttcctgcatattcgactatgggaaccgctaccatctacgctgctacatgtaccaggcccgggacctggctgcgatggacaaggactctttttctgatccctatgccatcgtctccttcctgcaccagagccagaagacggtggtggtgaagaacacccttaaccccacctgggaccagacgctcatcttctacgagatcgagatctttggcgagccggccacagttgctgagcaaccgcccagcattgtggtggagctgtacgaccatgacacttatggtgcagacgagtttatgggtcgctgcatctgtcaaccgagtctggaacggatgccacggctggcctggttcccactgacgaggggcagccagccgtcgggggagctgctggcctcttttgagctcatccagagagagaagccggccatccaccatattcctggttttgaggtgcaggagacatcaaggatcctggatgagtctgaggacacagacctgccctacccaccaccccagagggaggccaacatctacatggttcctcagaacatcaagccagcgctccagcgtaccgccatcgagatcctggcatggggcctgcggaacatgaagagttaccagctggccaacatctcctcccccagcctcgtggtagagtgtgggggccagacggtgcagtcctgtgtcatcaggaacctccggaagaaccccaactttgacatctgcaccctcttcatggaagtgatgctgcccagggaggagctctactgcccccccatcaccgtcaaggtcatcgataaccgccagtttggccgccggcctgtggtgggccagtgtaccatccgctccctggagagcttcctgtgtgacccctactcggcggagagtccatccccacagggtggcccagacgatgtgagcctactcagtcctggggaagacgtgctcatcgacattgatgacaaggagcccctcatccccatccaggaggaagagttcatcgattggtggagcaaattctttgcctccataggggagagggaaaagtgcggctcctacctggagaaggattttgacaccctgaaggtctatgacacacagctggagaatgtggaggcctttgagggcctgtctgacttttgtaacaccttcaagctgtaccggggcaagacgcaggaggagacagaagatccatctgtgattggtgaatttaagggcctcttcaaaatttatcccctcccagaagacccagccatccccatgcccccaagacagttccaccagctggccgcccagggaccccaggagtgcttggtccgtatctacattgtccgagcatttggcctgcagcccaaggaccccaatggaaagtgtgatccttacatcaagatctccatagggaagaaatcagtgagtgaccaggataactacatcccctgcacgctggagcccgtatttggaaagatgttcgagctgacctgcactctgcctctggagaaggacctaaagatcactctctatgactatgacctcctctccaaggacgaaaagatcggtgagacggtcgtcgacctggagaacaggctgctgtccaagtttggggctcgctgtggactcccacagacctactgtgtctctggaccgaaccagtggcgggaccagctccgcccctcccagctcctccacctcttctgccagcagcatagagtcaaggcacctgtgtaccggacagaccgtgtaatgtttcaggataaagaatattccattgaagagatagaggctggcaggatcccaaacccacacctgggcccagtggaggagcgtctggctctgcatgtgcttcagcagcagggcctggtcccggagcacgtggagtcacggcccctctacagccccctgcagccagacatcgagcaggggaagctgcagatgtgggtcgacctatttccgaaggccctggggcggcctggacctcccttcaacatcaccccacggagagccagaaggtttttcctgcgttgtattatctggaataccagagatgtgatcctggatgacctgagcctcacgggggagaagatgagcgacatttatgtgaaaggttggatgattggctttgaagaacacaagcaaaagacagacgtgcattatcgttccctgggaggtgaaggcaacttcaactggaggttcattttccccttcgactacctgccagctgagcaagtctgtaccattgccaagaaggatgccttctggaggctggacaagactgagagcaaaatcccagcacgagtggtgttccagatctgggacaatgacaagttctcctttgatgattttctgggctccctgcagctcgatctcaaccgcatgcccaagccagccaagacagccaagaagtgctccttggaccagctggatgatgctttccacccagaatggtttgtgtccctttttgagcagaaaacagtgaagggctggtggccctgtgtagcagaagagggtgagaagaaaatactggcgggcaagctggaaatgaccttggagattgtagcagagagtgagcatgaggagcggcctgctggccagggccgggatgagcccaacatgaaccctaagcttgaggacccaaggcgccccgacacctccttcctgtggtttacctccccatacaagaccatgaagttcatcctgtggcggcgtttccggtgggccatcatcctcttcatcatcctcttcatcctgctgctgttcctggccatcttcatctacgccttcccgaactatgctgccatgaagctggtgaagcccttcagctgaggactctcctgccctgtagaaggggccgtggggtcccctccagcatgggactggcctgcctcctccgcccagctcggcgagctcctccagacctcctaggcctgattgtcctgccagggtgggcagacagacagatggaccggcccacactcccag

SEQ ID NO: 128676 - DNA, 6564 bp, Homo sapiens
  Payload ID: 5183
  Gene Symbol: DYSF
  Gene Name: dysferlin
  Uniprot ID: O75923
  ENST ID: ENST00000409744
  CDS Start-End: 142-6408
tctccgcggaggagcagcgaaggcgacagctctcttggcgcggctgcctgggagccgggcgcttgctgggtgggtgctcgggcccggtgctcccgctcccgccctgactgcgcgcctgtgtgccgccggggctgcccagccatgctgtgctgcctgctggtgagggccagcaacctccccagtgcgaagaaggaccggcgcagcgaccctgtcgcaagcctgactttccgaggggtgaagaagagaaccaaagtcatcaagaacagcgtgaaccctgtatggaatgagggatttgaatgggacctcaagggcatccccctggaccagggctctgagcttcatgtggtggtcaaagaccatgagacgatggggaggaacaggttcctgggggaagccaaggtcccactccgagaggtcctcgccacccctagtctgtccgccagcttcaatgcccccctgctggacaccaagaagcagcccacaggggcctcgctggtcctgcaggtgtcctacacaccgctgcctggagctgtgcccctgttcccgccccctactcctctggagccctccccgactctgcctgacctggatgtagtggcagacacaggaggagaggaagacacagaggaccagggactcactggagatgaggcggagccattcctggatcaaagcggaggcccgggggctcccaccaccccaaggaaactaccttcacgtcctccgccccactaccccgggatcaaaagaaagcgaagtgcgcctacatctagaaagctgctgtcagacaaaccgcaggatttccagatcagggtccaggtgatcgaggggcgccagctgccgggggtgaacatcaagcctgtggtcaaggttaccgctgcagggcagaccaagcggacgcggatccacaagggaaacagcccactcttcaatgagactcttttcttcaacttgtttgactctcctggggagctgtttgatgagcccatctttatcacggtggtagactctcgttctctcaggacagatgctctcctcggggagttccggatggacgtgggcaccatttacagagagccccggcacgcctatctcaggaagtggctgctgctctcagaccctgatgacttctctgctggggccagaggctacctgaaaacaagcctttgtgtgctggggcctggggacgaagcgcctctggagagaaaagacccctctgaagacaaggaggacattgaaagcaacctgctccggcccacaggcgtagccctgcgaggagcccacttctgcctgaaggtcttccgggccgaggacttgccgcagatggacgatgccgtgatggacaacgtgaaacagatctttggcttcgagagtaacaagaagaacttggtggacccctttgtggaggtcagctttgcggggaaaatgctgtgcagcaagatcttggagaagacggccaaccctcagtggaaccagaacatcacactgcctgccatgtttccctccatgtgcgaaaaaatgaggattcgtatcatagactgggaccgcctgactcacaatgacatcgtggctaccacctacctgagtatgtcgaaaatctctgcccctggaggagaaatagaagtggatgactacctgggcttcctccccacttttgggccctgctacatcaacctctatggcagtcccagagagttcacaggcttcccagacccctacacagagctcaacacaggcaagggggaaggtgtggcttatcgtggccggcttctgctctccctggagaccaagctggtggagcacagtgaacagaaggtggaggaccttcctgcggatgacatcctccgggtggagaagtaccttaggaggcgcaagtactccctgtttgcggccttctactcagccaccatgctgcaggatgtggatgatgccatccagtttgaggtcagcatcgggaactacgggaacaagttcgacatgacctgcctgccgctggcctccaccactcagtacagccgtgcagtctttgacgggtgccactactactacctaccctggggtaacgtgaaacctgtggtggtgctgtcatcctactgggaggacatcagccatagaatcgagactcagaaccagctgcttgggattgctgaccggctggaagctggcctggagcaggtccacctggccctgaaggcgcagtgctccacggaggacgtggactcgctggtggctcagctgacggatgagctcatcgcaggctgcagccagcctctgggtgacatccatgagacaccctctgccacccacctggaccagtacctgtaccagctgcgcacccatcacctgagccaaatcactgaggctgccctggccctgaagctcggccacagtgagctccctgcagctctggagcaggcggaggactggctcctgcgtctgcgtgccctggcagaggagccccagaacagcctgccggacatcgtcatctggatgctgcagggagacaagcgtgtggcataccagcgggtgcccgcccaccaagtcctcttctcccggcggggtgccaactactgtggcaagaattgtgggaagctacagacaatctttctgaaatatccgatggagaaggtgcctggcgcccggatgccagtgcagatacgggtcaagctgtggtttgggctctcagtggatgagaaggagttcaaccagtttgctgaggggaagctgtctgtctttgctgaaacctatgagaacgagactaagttggcccttgttgggaactggggcacaacgggcctcacctaccccaagttttctgacgtcacgggcaagatcaagctacccaaggacagcttccgcccctcggccggctggacctgggctggagattggttcgtgtgtccggagaagactctgctccatgacatggacgccggtcacctgagcttcgtggaagaggtgtttgagaaccagacccggcttcccggaggccagtggatctacatgagtgacaactacaccgatgtgaacggggagaaggtgcttcccaaggatgacattgagtgcccactgggctggaagtgggaagatgaggaatggtccacagacctcaaccgggctgtcgatgagcaaggctgggagtatagcatcaccatccccccggagcggaagccgaagcactgggtccctgctgagaagatgtactacacacaccgacggcggcgctgggtgcgcctgcgcaggagggatctcagccaaatggaagcactgaaaaggcacaggcaggcggaggcggagggcgagggctgggagtacgcctctctttttggctggaagttccacctcgagtaccgcaagacagatgccttccgccgccgccgctggcgccgtcgcatggagccactggagaagacggggcctgcagctgtgtttgcccttgagggggccctgggcggcgtgatggatgacaagagtgaagattccatgtccgtctccaccttgagcttcggtgtgaacagacccacgatttcctgcatattcgactatgggaaccgctaccatctacgctgctacatgtaccaggcccgggacctggctgcgatggacaaggactctttttctgatccctatgccatcgtctccttcctgcaccagagccagaagacggtggtggtgaagaacacccttaaccccacctgggaccagacgctcatcttctacgagatcgagatctttggcgagccggccacagttgctgagcaaccgcccagcattgtggtggagctgtacgaccatgacacttatggtgcagacgagtttatgggtcgctgcatctgtcaaccgagtctggaacggatgccacggctggcctggttcccactgacgaggggcagccagccgtcgggggagctgctggcctcttttgagctcatccagagagagaagccggccatccaccatattcctggttttgaggtgcaggagacatcaaggatcctggatgagtctgaggacacagacctgccctacccaccaccccagagggaggccaacatctacatggttcctcagaacatcaagccagcgctccagcgtaccgccatcgagatcctggcatggggcctgcggaacatgaagagttaccagctggccaacatctcctcccccagcctcgtggtagagtgtgggggccagacggtgcagtcctgtgtcatcaggaacctccggaagaaccccaactttgacatctgcaccctcttcatggaagtgatgctgcccagggaggagctctactgcccccccatcaccgtcaaggtcatcgataaccgccagtttggccgccggcctgtggtgggccagtgtaccatccgctccctggagagcttcctgtgtgacccctactcggcggagagtccatccccacagggtggcccagacgatgtgagcctactcagtcctggggaagacgtgctcatcgacattgatgacaaggagcccctcatccccatccagcttgcagacggtctgtcgagcttggcccccactaacacggcttctcctccatccagtcctcatgaggaagagttcatcgattggtggagcaaattctttgcctccataggggagagggaaaagtgcggctcctacctggagaaggattttgacaccctgaaggtctatgacacacagctggagaatgtggaggcctttgagggcctgtctgacttttgtaacaccttcaagctgtaccggggcaagacgcaggaggagacagaagatccatctgtgattggtgaatttaagggcctcttcaaaatttatcccctcccagaagacccagccatccccatgcccccaagacagttccaccagctggccgcccagggaccccaggagtgcttggtccgtatctacattgtccgagcatttggcctgcagcccaaggaccccaatggaaagtgtgatccttacatcaagatctccatagggaagaaatcagtgagtgaccaggataactacatcccctgcacgctggagcccgtatttggaaagatgttcgagctgacctgcactctgcctctggagaaggacctaaagatcactctctatgactatgacctcctctccaaggacgaaaagatcggtgagacggtcgtcgacctggagaacaggctgctgtccaagtttggggctcgctgtggactcccacagacctactgtgtctctggaccgaaccagtggcgggaccagctccgcccctcccagctcctccacctcttctgccagcagcatagagtcaaggcacctgtgtaccggacagaccgtgtaatgtttcaggataaagaatattccattgaagagatagaggctggcaggatcccaaacccacacctgggcccagtggaggagcgtctggctctgcatgtgcttcagcagcagggcctggtcccggagcacgtggagtcacggcccctctacagccccctgcagccagacatcgagcaggggaagctgcagatgtgggtcgacctatttccgaaggccctggggcggcctggacctcccttcaacatcaccccacggagagccagaaggtttttcctgcgttgtattatctggaataccagagatgtgatcctggatgacctgagcctcacgggggagaagatgagcgacatttatgtgaaaggttggatgattggctttgaagaacacaagcaaaagacagacgtgcattatcgttccctgggaggtgaaggcaacttcaactggaggttcattttccccttcgactacctgccagctgagcaagtctgtaccattgccaagaaggatgccttctggaggctggacaagactgagagcaaaatcccagcacgagtggtgttccagatctgggacaatgacaagttctcctttgatgattttctgggctccctgcagctcgatctcaaccgcatgcccaagccagccaagacagccaagaagtgctccttggaccagctggatgatgctttccacccagaatggtttgtgtccctttttgagcagaaaacagtgaagggctggtggccctgtgtagcagaagagggtgagaagaaaatactggcgggcaagctggaaatgaccttggagattgtagcagagagtgagcatgaggagcggcctgctggccagggccgggatgagcccaacatgaaccctaagcttgaggacccaaggcgccccgacacctccttcctgtggtttacctccccatacaagaccatgaagttcatcctgtggcggcgtttccggtgggccatcatcctcttcatcatcctcttcatcctgctgctgttcctggccatcttcatctacgccttcccgaactatgctgccatgaagctggtgaagcccttcagctgaggactctcctgccctgtagaaggggccgtggggtcccctccagcatgggactggcctgcctcctccgcccagctcggcgagctcctccagacctcctaggcctgattgtcctgccagggtgggcagacagacagatggaccggcccacactcccag

SEQ ID NO: 128677 - DNA, 6606 bp, Homo sapiens
  Payload ID: 5183
  Gene Symbol: DYSF
  Gene Name: dysferlin
  Uniprot ID: O75923
  ENST ID: ENST00000409366
  CDS Start-End: 142-6450
tctccgcggaggagcagcgaaggcgacagctctcttggcgcggctgcctgggagccgggcgcttgctgggtgggtgctcgggcccggtgctcccgctcccgccctgactgcgcgcctgtgtgccgccggggctgcccagccatgctgtgctgcctgctggtgagggccagcaacctccccagtgcgaagaaggaccggcgcagcgaccctgtcgcaagcctgactttccgaggggtgaagaagagaaccaaagtcatcaagaacagcgtgaaccctgtatggaatgagggatttgaatgggacctcaagggcatccccctggaccagggctctgagcttcatgtggtggtcaaagaccatgagacgatggggaggaacaggttcctgggggaagccaaggtcccactccgagaggtcctcgccacccctagtctgtccgccagcttcaatgcccccctgctggacaccaagaagcagcccacaggggcctcgctggtcctgcaggtgtcctacacaccgctgcctggagctgtgcccctgttcccgccccctactcctctggagccctccccgactctgcctgacctggatgtagtggcagacacaggaggagaggaagacacagaggaccagggactcactggagatgaggcggagccattcctggatcaaagcggaggcccgggggctcccaccaccccaaggaaactaccttcacgtcctccgccccactaccccgggatcaaaagaaagcgaagtgcgcctacatctagaaagctgctgtcagacaaaccgcaggatttccagatcagggtccaggtgatcgaggggcgccagctgccgggggtgaacatcaagcctgtggtcaaggttaccgctgcagggcagaccaagcggacgcggatccacaagggaaacagcccactcttcaatgagactcttttcttcaacttgtttgactctcctggggagctgtttgatgagcccatctttatcacggtggtagactctcgttctctcaggacagatgctctcctcggggagttccggatggacgtgggcaccatttacagagagccccggcacgcctatctcaggaagtggctgctgctctcagaccctgatgacttctctgctggggccagaggctacctgaaaacaagcctttgtgtgctggggcctggggacgaagcgcctctggagagaaaagacccctctgaagacaaggaggacattgaaagcaacctgctccggcccacaggcgtagccctgcgaggagcccacttctgcctgaaggtcttccgggccgaggacttgccgcagatggacgatgccgtgatggacaacgtgaaacagatctttggcttcgagagtaacaagaagaacttggtggacccctttgtggaggtcagctttgcggggaaaatgctgtgcagcaagatcttggagaagacggccaaccctcagtggaaccagaacatcacactgcctgccatgtttccctccatgtgcgaaaaaatgaggattcgtatcatagactgggaccgcctgactcacaatgacatcgtggctaccacctacctgagtatgtcgaaaatctctgcccctggaggagaaatagaagaggagcctgcaggtgctgtcaagccttcgaaagcctcagacttggatgactacctgggcttcctccccacttttgggccctgctacatcaacctctatggcagtcccagagagttcacaggcttcccagacccctacacagagctcaacacaggcaagggggaaggtgtggcttatcgtggccggcttctgctctccctggagaccaagctggtggagcacagtgaacagaaggtggaggaccttcctgcggatgacatcctccgggtggagaagtaccttaggaggcgcaagtactccctgtttgcggccttctactcagccaccatgctgcaggatgtggatgatgccatccagtttgaggtcagcatcgggaactacgggaacaagttcgacatgacctgcctgccgctggcctccaccactcagtacagccgtgcagtctttgacgggtgccactactactacctaccctggggtaacgtgaaacctgtggtggtgctgtcatcctactgggaggacatcagccatagaatcgagactcagaaccagctgcttgggattgctgaccggctggaagctggcctggagcaggtccacctggccctgaaggcgcagtgctccacggaggacgtggactcgctggtggctcagctgacggatgagctcatcgcaggctgcagccagcctctgggtgacatccatgagacaccctctgccacccacctggaccagtacctgtaccagctgcgcacccatcacctgagccaaatcactgaggctgccctggccctgaagctcggccacagtgagctccctgcagctctggagcaggcggaggactggctcctgcgtctgcgtgccctggcagaggagccccagaacagcctgccggacatcgtcatctggatgctgcagggagacaagcgtgtggcataccagcgggtgcccgcccaccaagtcctcttctcccggcggggtgccaactactgtggcaagaattgtgggaagctacagacaatctttctgaaatatccgatggagaaggtgcctggcgcccggatgccagtgcagatacgggtcaagctgtggtttgggctctcagtggatgagaaggagttcaaccagtttgctgaggggaagctgtctgtctttgctgaaacctatgagaacgagactaagttggcccttgttgggaactggggcacaacgggcctcacctaccccaagttttctgacgtcacgggcaagatcaagctacccaaggacagcttccgcccctcggccggctggacctgggctggagattggttcgtgtgtccggagaagactctgctccatgacatggacgccggtcacctgagcttcgtggaagaggtgtttgagaaccagacccggcttcccggaggccagtggatctacatgagtgacaactacaccgatgtgaacggggagaaggtgcttcccaaggatgacattgagtgcccactgggctggaagtgggaagatgaggaatggtccacagacctcaaccgggctgtcgatgagcaaggctgggagtatagcatcaccatccccccggagcggaagccgaagcactgggtccctgctgagaagatgtactacacacaccgacggcggcgctgggtgcgcctgcgcaggagggatctcagccaaatggaagcactgaaaaggcacaggcaggcggaggcggagggcgagggctgggagtacgcctctctttttggctggaagttccacctcgagtaccgcaagacagatgccttccgccgccgccgctggcgccgtcgcatggagccactggagaagacggggcctgcagctgtgtttgcccttgagggggccctgggcggcgtgatggatgacaagagtgaagattccatgtccgtctccaccttgagcttcggtgtgaacagacccacgatttcctgcatattcgactatgggaaccgctaccatctacgctgctacatgtaccaggcccgggacctggctgcgatggacaaggactctttttctgatccctatgccatcgtctccttcctgcaccagagccagaagacggtggtggtgaagaacacccttaaccccacctgggaccagacgctcatcttctacgagatcgagatctttggcgagccggccacagttgctgagcaaccgcccagcattgtggtggagctgtacgaccatgacacttatggtgcagacgagtttatgggtcgctgcatctgtcaaccgagtctggaacggatgccacggctggcctggttcccactgacgaggggcagccagccgtcgggggagctgctggcctcttttgagctcatccagagagagaagccggccatccaccatattcctggttttgaggtgcaggagacatcaaggatcctggatgagtctgaggacacagacctgccctacccaccaccccagagggaggccaacatctacatggttcctcagaacatcaagccagcgctccagcgtaccgccatcgagatcctggcatggggcctgcggaacatgaagagttaccagctggccaacatctcctcccccagcctcgtggtagagtgtgggggccagacggtgcagtcctgtgtcatcaggaacctccggaagaaccccaactttgacatctgcaccctcttcatggaagtgatgctgcccagggaggagctctactgcccccccatcaccgtcaaggtcatcgataaccgccagtttggccgccggcctgtggtgggccagtgtaccatccgctccctggagagcttcctgtgtgacccctactcggcggagagtccatccccacagggtggcccagacgatgtgagcctactcagtcctggggaagacgtgctcatcgacattgatgacaaggagcccctcatccccatccagcttgcagacggtctgtcgagcttggcccccactaacacggcttctcctccatccagtcctcatgaggaagagttcatcgattggtggagcaaattctttgcctccataggggagagggaaaagtgcggctcctacctggagaaggattttgacaccctgaaggtctatgacacacagctggagaatgtggaggcctttgagggcctgtctgacttttgtaacaccttcaagctgtaccggggcaagacgcaggaggagacagaagatccatctgtgattggtgaatttaagggcctcttcaaaatttatcccctcccagaagacccagccatccccatgcccccaagacagttccaccagctggccgcccagggaccccaggagtgcttggtccgtatctacattgtccgagcatttggcctgcagcccaaggaccccaatggaaagtgtgatccttacatcaagatctccatagggaagaaatcagtgagtgaccaggataactacatcccctgcacgctggagcccgtatttggaaagatgttcgagctgacctgcactctgcctctggagaaggacctaaagatcactctctatgactatgacctcctctccaaggacgaaaagatcggtgagacggtcgtcgacctggagaacaggctgctgtccaagtttggggctcgctgtggactcccacagacctactgtgtctctggaccgaaccagtggcgggaccagctccgcccctcccagctcctccacctcttctgccagcagcatagagtcaaggcacctgtgtaccggacagaccgtgtaatgtttcaggataaagaatattccattgaagagatagaggctggcaggatcccaaacccacacctgggcccagtggaggagcgtctggctctgcatgtgcttcagcagcagggcctggtcccggagcacgtggagtcacggcccctctacagccccctgcagccagacatcgagcaggggaagctgcagatgtgggtcgacctatttccgaaggccctggggcggcctggacctcccttcaacatcaccccacggagagccagaaggtttttcctgcgttgtattatctggaataccagagatgtgatcctggatgacctgagcctcacgggggagaagatgagcgacatttatgtgaaaggttggatgattggctttgaagaacacaagcaaaagacagacgtgcattatcgttccctgggaggtgaaggcaacttcaactggaggttcattttccccttcgactacctgccagctgagcaagtctgtaccattgccaagaaggatgccttctggaggctggacaagactgagagcaaaatcccagcacgagtggtgttccagatctgggacaatgacaagttctcctttgatgattttctgggctccctgcagctcgatctcaaccgcatgcccaagccagccaagacagccaagaagtgctccttggaccagctggatgatgctttccacccagaatggtttgtgtccctttttgagcagaaaacagtgaagggctggtggccctgtgtagcagaagagggtgagaagaaaatactggcgggcaagctggaaatgaccttggagattgtagcagagagtgagcatgaggagcggcctgctggccagggccgggatgagcccaacatgaaccctaagcttgaggacccaaggcgccccgacacctccttcctgtggtttacctccccatacaagaccatgaagttcatcctgtggcggcgtttccggtgggccatcatcctcttcatcatcctcttcatcctgctgctgttcctggccatcttcatctacgccttcccgaactatgctgccatgaagctggtgaagcccttcagctgaggactctcctgccctgtagaaggggccgtggggtcccctccagcatgggactggcctgcctcctccgcccagctcggcgagctcctccagacctcctaggcctgattgtcctgccagggtgggcagacagacagatggaccggcccacactcccag

SEQ ID NO: 128678 - DNA, 6790 bp, Homo sapiens
  Payload ID: 5183
  Gene Symbol: DYSF
  Gene Name: dysferlin
  Uniprot ID: O75923
  ENST ID: ENST00000409582
  CDS Start-End: 278-6634
gggtggaagatgagcagaagcccctgttctcggaacgccggctgacaagcggggtgagcgcagccggggcggggacccagcctagcccactggagcagccgggggtggcccgttcccctttaagagcaactgctctaagccaggagccagagattcgagccggcctcgcccagccagccctctccagcgaggggacccacaagcggcgcctcggccctcccgacctttccgagccctctttgcgccctgggcgcacggggccctacacgcgccaagcatgctgagggtcttcatcctctatgccgagaacgtccacacacccgacaccgacatcagcgatgcctactgctccgcggtgtttgcaggggtgaagaagagaaccaaagtcatcaagaacagcgtgaaccctgtatggaatgagggatttgaatgggacctcaagggcatccccctggaccagggctctgagcttcatgtggtggtcaaagaccatgagacgatggggaggaacaggttcctgggggaagccaaggtcccactccgagaggtcctcgccacccctagtctgtccgccagcttcaatgcccccctgctggacaccaagaagcagcccacaggggcctcgctggtcctgcaggtgtcctacacaccgctgcctggagctgtgcccctgttcccgccccctactcctctggagccctccccgactctgcctgacctggatgtagtggcaggcgggggacagagccgggccgagacttggtccctgctcagtgacagcaccatggacacgagatactctggaaagaagtggccggcccccacggacacaggaggagaggaagacacagaggaccagggactcactggagatgaggcggagccattcctggatcaaagcggaggcccgggggctcccaccaccccaaggaaactaccttcacgtcctccgccccactaccccgggatcaaaagaaagcgaagtgcgcctacatctagaaagctgctgtcagacaaaccgcaggatttccagatcagggtccaggtgatcgaggggcgccagctgccgggggtgaacatcaagcctgtggtcaaggttaccgctgcagggcagaccaagcggacgcggatccacaagggaaacagcccactcttcaatgagactcttttcttcaacttgtttgactctcctggggagctgtttgatgagcccatctttatcacggtggtagactctcgttctctcaggacagatgctctcctcggggagttccggatggacgtgggcaccatttacagagagccccggcacgcctatctcaggaagtggctgctgctctcagaccctgatgacttctctgctggggccagaggctacctgaaaacaagcctttgtgtgctggggcctggggacgaagcgcctctggagagaaaagacccctctgaagacaaggaggacattgaaagcaacctgctccggcccacaggcgtagccctgcgaggagcccacttctgcctgaaggtcttccgggccgaggacttgccgcagatggacgatgccgtgatggacaacgtgaaacagatctttggcttcgagagtaacaagaagaacttggtggacccctttgtggaggtcagctttgcggggaaaatgctgtgcagcaagatcttggagaagacggccaaccctcagtggaaccagaacatcacactgcctgccatgtttccctccatgtgcgaaaaaatgaggattcgtatcatagactgggaccgcctgactcacaatgacatcgtggctaccacctacctgagtatgtcgaaaatctctgcccctggaggagaaatagaagtggatgactacctgggcttcctccccacttttgggccctgctacatcaacctctatggcagtcccagagagttcacaggcttcccagacccctacacagagctcaacacaggcaagggggaaggtgtggcttatcgtggccggcttctgctctccctggagaccaagctggtggagcacagtgaacagaaggtggaggaccttcctgcggatgacatcctccgggtggagaagtaccttaggaggcgcaagtactccctgtttgcggccttctactcagccaccatgctgcaggatgtggatgatgccatccagtttgaggtcagcatcgggaactacgggaacaagttcgacatgacctgcctgccgctggcctccaccactcagtacagccgtgcagtctttgacgggtgccactactactacctaccctggggtaacgtgaaacctgtggtggtgctgtcatcctactgggaggacatcagccatagaatcgagactcagaaccagctgcttgggattgctgaccggctggaagctggcctggagcaggtccacctggccctgaaggcgcagtgctccacggaggacgtggactcgctggtggctcagctgacggatgagctcatcgcaggctgcagccagcctctgggtgacatccatgagacaccctctgccacccacctggaccagtacctgtaccagctgcgcacccatcacctgagccaaatcactgaggctgccctggccctgaagctcggccacagtgagctccctgcagctctggagcaggcggaggactggctcctgcgtctgcgtgccctggcagaggagccccagaacagcctgccggacatcgtcatctggatgctgcagggagacaagcgtgtggcataccagcgggtgcccgcccaccaagtcctcttctcccggcggggtgccaactactgtggcaagaattgtgggaagctacagacaatctttctgaaatatccgatggagaaggtgcctggcgcccggatgccagtgcagatacgggtcaagctgtggtttgggctctcagtggatgagaaggagttcaaccagtttgctgaggggaagctgtctgtctttgctgaaacctatgagaacgagactaagttggcccttgttgggaactggggcacaacgggcctcacctaccccaagttttctgacgtcacgggcaagatcaagctacccaaggacagcttccgcccctcggccggctggacctgggctggagattggttcgtgtgtccggagaagactctgctccatgacatggacgccggtcacctgagcttcgtggaagaggtgtttgagaaccagacccggcttcccggaggccagtggatctacatgagtgacaactacaccgatgtgaacggggagaaggtgcttcccaaggatgacattgagtgcccactgggctggaagtgggaagatgaggaatggtccacagacctcaaccgggctgtcgatgagcaaggctgggagtatagcatcaccatccccccggagcggaagccgaagcactgggtccctgctgagaagatgtactacacacaccgacggcggcgctgggtgcgcctgcgcaggagggatctcagccaaatggaagcactgaaaaggcacaggcaggcggaggcggagggcgagggctgggagtacgcctctctttttggctggaagttccacctcgagtaccgcaagacagatgccttccgccgccgccgctggcgccgtcgcatggagccactggagaagacggggcctgcagctgtgtttgcccttgagggggccctgggcggcgtgatggatgacaagagtgaagattccatgtccgtctccaccttgagcttcggtgtgaacagacccacgatttcctgcatattcgactatgggaaccgctaccatctacgctgctacatgtaccaggcccgggacctggctgcgatggacaaggactctttttctgatccctatgccatcgtctccttcctgcaccagagccagaagacggtggtggtgaagaacacccttaaccccacctgggaccagacgctcatcttctacgagatcgagatctttggcgagccggccacagttgctgagcaaccgcccagcattgtggtggagctgtacgaccatgacacttatggtgcagacgagtttatgggtcgctgcatctgtcaaccgagtctggaacggatgccacggctggcctggttcccactgacgaggggcagccagccgtcgggggagctgctggcctcttttgagctcatccagagagagaagccggccatccaccatattcctggttttgaggtgcaggagacatcaaggatcctggatgagtctgaggacacagacctgccctacccaccaccccagagggaggccaacatctacatggttcctcagaacatcaagccagcgctccagcgtaccgccatcgagatcctggcatggggcctgcggaacatgaagagttaccagctggccaacatctcctcccccagcctcgtggtagagtgtgggggccagacggtgcagtcctgtgtcatcaggaacctccggaagaaccccaactttgacatctgcaccctcttcatggaagtgatgctgcccagggaggagctctactgcccccccatcaccgtcaaggtcatcgataaccgccagtttggccgccggcctgtggtgggccagtgtaccatccgctccctggagagcttcctgtgtgacccctactcggcggagagtccatccccacagggtggcccagacgatgtgagcctactcagtcctggggaagacgtgctcatcgacattgatgacaaggagcccctcatccccatccagcttgcagacggtctgtcgagcttggcccccactaacacggcttctcctccatccagtcctcatgaggaagagttcatcgattggtggagcaaattctttgcctccataggggagagggaaaagtgcggctcctacctggagaaggattttgacaccctgaaggtctatgacacacagctggagaatgtggaggcctttgagggcctgtctgacttttgtaacaccttcaagctgtaccggggcaagacgcaggaggagacagaagatccatctgtgattggtgaatttaagggcctcttcaaaatttatcccctcccagaagacccagccatccccatgcccccaagacagttccaccagctggccgcccagggaccccaggagtgcttggtccgtatctacattgtccgagcatttggcctgcagcccaaggaccccaatggaaagtgtgatccttacatcaagatctccatagggaagaaatcagtgagtgaccaggataactacatcccctgcacgctggagcccgtatttggaaagatgttcgagctgacctgcactctgcctctggagaaggacctaaagatcactctctatgactatgacctcctctccaaggacgaaaagatcggtgagacggtcgtcgacctggagaacaggctgctgtccaagtttggggctcgctgtggactcccacagacctactgtgtctctggaccgaaccagtggcgggaccagctccgcccctcccagctcctccacctcttctgccagcagcatagagtcaaggcacctgtgtaccggacagaccgtgtaatgtttcaggataaagaatattccattgaagagatagaggctggcaggatcccaaacccacacctgggcccagtggaggagcgtctggctctgcatgtgcttcagcagcagggcctggtcccggagcacgtggagtcacggcccctctacagccccctgcagccagacatcgagcaggggaagctgcagatgtgggtcgacctatttccgaaggccctggggcggcctggacctcccttcaacatcaccccacggagagccagaaggtttttcctgcgttgtattatctggaataccagagatgtgatcctggatgacctgagcctcacgggggagaagatgagcgacatttatgtgaaaggttggatgattggctttgaagaacacaagcaaaagacagacgtgcattatcgttccctgggaggtgaaggcaacttcaactggaggttcattttccccttcgactacctgccagctgagcaagtctgtaccattgccaagaaggatgccttctggaggctggacaagactgagagcaaaatcccagcacgagtggtgttccagatctgggacaatgacaagttctcctttgatgattttctgggctccctgcagctcgatctcaaccgcatgcccaagccagccaagacagccaagaagtgctccttggaccagctggatgatgctttccacccagaatggtttgtgtccctttttgagcagaaaacagtgaagggctggtggccctgtgtagcagaagagggtgagaagaaaatactggcgggcaagctggaaatgaccttggagattgtagcagagagtgagcatgaggagcggcctgctggccagggccgggatgagcccaacatgaaccctaagcttgaggacccaaggcgccccgacacctccttcctgtggtttacctccccatacaagaccatgaagttcatcctgtggcggcgtttccggtgggccatcatcctcttcatcatcctcttcatcctgctgctgttcctggccatcttcatctacgccttcccgaactatgctgccatgaagctggtgaagcccttcagctgaggactctcctgccctgtagaaggggccgtggggtcccctccagcatgggactggcctgcctcctccgcccagctcggcgagctcctccagacctcctaggcctgattgtcctgccagggtgggcagacagacagatggaccggcccacactcccag

SEQ ID NO: 128679 - DNA, 6594 bp, Homo sapiens
  Payload ID: 5183
  Gene Symbol: DYSF
  Gene Name: dysferlin
  Uniprot ID: O75923
  ENST ID: ENST00000410041
  CDS Start-End: 142-6438
tctccgcggaggagcagcgaaggcgacagctctcttggcgcggctgcctgggagccgggcgcttgctgggtgggtgctcgggcccggtgctcccgctcccgccctgactgcgcgcctgtgtgccgccggggctgcccagccatgctgtgctgcctgctggtgagggccagcaacctccccagtgcgaagaaggaccggcgcagcgaccctgtcgcaagcctgactttccgaggggtgaagaagagaaccaaagtcatcaagaacagcgtgaaccctgtatggaatgagggatttgaatgggacctcaagggcatccccctggaccagggctctgagcttcatgtggtggtcaaagaccatgagacgatggggaggaacaggttcctgggggaagccaaggtcccactccgagaggtcctcgccacccctagtctgtccgccagcttcaatgcccccctgctggacaccaagaagcagcccacaggggcctcgctggtcctgcaggtgtcctacacaccgctgcctggagctgtgcccctgttcccgccccctactcctctggagccctccccgactctgcctgacctggatgtagtggcaggcgggggacagagccgggccgagacttggtccctgctcagtgacagcaccatggacacgagatactctggaaagaagtggccggcccccacggacacaggaggagaggaagacacagaggaccagggactcactggagatgaggcggagccattcctggatcaaagcggaggcccgggggctcccaccaccccaaggaaactaccttcacgtcctccgccccactaccccgggatcaaaagaaagcgaagtgcgcctacatctagaaagctgctgtcagacaaaccgcaggatttccagatcagggtccaggtgatcgaggggcgccagctgccgggggtgaacatcaagcctgtggtcaaggttaccgctgcagggcagaccaagcggacgcggatccacaagggaaacagcccactcttcaatgagactcttttcttcaacttgtttgactctcctggggagctgtttgatgagcccatctttatcacggtggtagactctcgttctctcaggacagatgctctcctcggggagttccggatggacgtgggcaccatttacagagagccccggcacgcctatctcaggaagtggctgctgctctcagaccctgatgacttctctgctggggccagaggctacctgaaaacaagcctttgtgtgctggggcctggggacgaagcgcctctggagagaaaagacccctctgaagacaaggaggacattgaaagcaacctgctccggcccacaggcgtagccctgcgaggagcccacttctgcctgaaggtcttccgggccgaggacttgccgcagatggacgatgccgtgatggacaacgtgaaacagatctttggcttcgagagtaacaagaagaacttggtggacccctttgtggaggtcagctttgcggggaaaatgctgtgcagcaagatcttggagaagacggccaaccctcagtggaaccagaacatcacactgcctgccatgtttccctccatgtgcgaaaaaatgaggattcgtatcatagactgggaccgcctgactcacaatgacatcgtggctaccacctacctgagtatgtcgaaaatctctgcccctggaggagaaatagaagtggatgactacctgggcttcctccccacttttgggccctgctacatcaacctctatggcagtcccagagagttcacaggcttcccagacccctacacagagctcaacacaggcaagggggaaggtgtggcttatcgtggccggcttctgctctccctggagaccaagctggtggagcacagtgaacagaaggtggaggaccttcctgcggatgacatcctccgggtggagaagtaccttaggaggcgcaagtactccctgtttgcggccttctactcagccaccatgctgcaggatgtggatgatgccatccagtttgaggtcagcatcgggaactacgggaacaagttcgacatgacctgcctgccgctggcctccaccactcagtacagccgtgcagtctttgacgggtgccactactactacctaccctggggtaacgtgaaacctgtggtggtgctgtcatcctactgggaggacatcagccatagaatcgagactcagaaccagctgcttgggattgctgaccggctggaagctggcctggagcaggtccacctggccctgaaggcgcagtgctccacggaggacgtggactcgctggtggctcagctgacggatgagctcatcgcaggctgcagccagcctctgggtgacatccatgagacaccctctgccacccacctggaccagtacctgtaccagctgcgcacccatcacctgagccaaatcactgaggctgccctggccctgaagctcggccacagtgagctccctgcagctctggagcaggcggaggactggctcctgcgtctgcgtgccctggcagaggagccccagaacagcctgccggacatcgtcatctggatgctgcagggagacaagcgtgtggcataccagcgggtgcccgcccaccaagtcctcttctcccggcggggtgccaactactgtggcaagaattgtgggaagctacagacaatctttctgaaatatccgatggagaaggtgcctggcgcccggatgccagtgcagatacgggtcaagctgtggtttgggctctcagtggatgagaaggagttcaaccagtttgctgaggggaagctgtctgtctttgctgaaacctatgagaacgagactaagttggcccttgttgggaactggggcacaacgggcctcacctaccccaagttttctgacgtcacgggcaagatcaagctacccaaggacagcttccgcccctcggccggctggacctgggctggagattggttcgtgtgtccggagaagactctgctccatgacatggacgccggtcacctgagcttcgtggaagaggtgtttgagaaccagacccggcttcccggaggccagtggatctacatgagtgacaactacaccgatgtgaacggggagaaggtgcttcccaaggatgacattgagtgcccactgggctggaagtgggaagatgaggaatggtccacagacctcaaccgggctgtcgatgagcaaggctgggagtatagcatcaccatccccccggagcggaagccgaagcactgggtccctgctgagaagatgtactacacacaccgacggcggcgctgggtgcgcctgcgcaggagggatctcagccaaatggaagcactgaaaaggcacaggcaggcggaggcggagggcgagggctgggagtacgcctctctttttggctggaagttccacctcgagtaccgcaagacagatgccttccgccgccgccgctggcgccgtcgcatggagccactggagaagacggggcctgcagctgtgtttgcccttgagggggccctgggcggcgtgatggatgacaagagtgaagattccatgtccgtctccaccttgagcttcggtgtgaacagacccacgatttcctgcatattcgactatgggaaccgctaccatctacgctgctacatgtaccaggcccgggacctggctgcgatggacaaggactctttttctgatccctatgccatcgtctccttcctgcaccagagccagaagacggtggtggtgaagaacacccttaaccccacctgggaccagacgctcatcttctacgagatcgagatctttggcgagccggccacagttgctgagcaaccgcccagcattgtggtggagctgtacgaccatgacacttatggtgcagacgagtttatgggtcgctgcatctgtcaaccgagtctggaacggatgccacggctggcctggttcccactgacgaggggcagccagccgtcgggggagctgctggcctcttttgagctcatccagagagagaagccggccatccaccatattcctggttttgaggtgcaggagacatcaaggatcctggatgagtctgaggacacagacctgccctacccaccaccccagagggaggccaacatctacatggttcctcagaacatcaagccagcgctccagcgtaccgccatcgagatcctggcatggggcctgcggaacatgaagagttaccagctggccaacatctcctcccccagcctcgtggtagagtgtgggggccagacggtgcagtcctgtgtcatcaggaacctccggaagaaccccaactttgacatctgcaccctcttcatggaagtgatgctgcccagggaggagctctactgcccccccatcaccgtcaaggtcatcgataaccgccagtttggccgccggcctgtggtgggccagtgtaccatccgctccctggagagcttcctgtgtgacccctactcggcggagagtccatccccacagggtggcccagacgatgtgagcctactcagtcctggggaagacgtgctcatcgacattgatgacaaggagcccctcatccccatccaggaggaagagttcatcgattggtggagcaaattctttgcctccataggggagagggaaaagtgcggctcctacctggagaaggattttgacaccctgaaggtctatgacacacagctggagaatgtggaggcctttgagggcctgtctgacttttgtaacaccttcaagctgtaccggggcaagacgcaggaggagacagaagatccatctgtgattggtgaatttaagggcctcttcaaaatttatcccctcccagaagacccagccatccccatgcccccaagacagttccaccagctggccgcccagggaccccaggagtgcttggtccgtatctacattgtccgagcatttggcctgcagcccaaggaccccaatggaaagtgtgatccttacatcaagatctccatagggaagaaatcagtgagtgaccaggataactacatcccctgcacgctggagcccgtatttggaaagatgttcgagctgacctgcactctgcctctggagaaggacctaaagatcactctctatgactatgacctcctctccaaggacgaaaagatcggtgagacggtcgtcgacctggagaacaggctgctgtccaagtttggggctcgctgtggactcccacagacctactgtgtctctggaccgaaccagtggcgggaccagctccgcccctcccagctcctccacctcttctgccagcagcatagagtcaaggcacctgtgtaccggacagaccgtgtaatgtttcaggataaagaatattccattgaagagatagaggctggcaggatcccaaacccacacctgggcccagtggaggagcgtctggctctgcatgtgcttcagcagcagggcctggtcccggagcacgtggagtcacggcccctctacagccccctgcagccagacatcgagcaggggaagctgcagatgtgggtcgacctatttccgaaggccctggggcggcctggacctcccttcaacatcaccccacggagagccagaaggtttttcctgcgttgtattatctggaataccagagatgtgatcctggatgacctgagcctcacgggggagaagatgagcgacatttatgtgaaaggttggatgattggctttgaagaacacaagcaaaagacagacgtgcattatcgttccctgggaggtgaaggcaacttcaactggaggttcattttccccttcgactacctgccagctgagcaagtctgtaccattgccaagaaggatgccttctggaggctggacaagactgagagcaaaatcccagcacgagtggtgttccagatctgggacaatgacaagttctcctttgatgattttctgggctccctgcagctcgatctcaaccgcatgcccaagccagccaagacagccaagaagtgctccttggaccagctggatgatgctttccacccagaatggtttgtgtccctttttgagcagaaaacagtgaagggctggtggccctgtgtagcagaagagggtgagaagaaaatactggcgggcaagctggaaatgaccttggagattgtagcagagagtgagcatgaggagcggcctgctggccagggccgggatgagcccaacatgaaccctaagcttgaggacccaaggcgccccgacacctccttcctgtggtttacctccccatacaagaccatgaagttcatcctgtggcggcgtttccggtgggccatcatcctcttcatcatcctcttcatcctgctgctgttcctggccatcttcatctacgccttcccgaactatgctgccatgaagctggtgaagcccttcagctgaggactctcctgccctgtagaaggggccgtggggtcccctccagcatgggactggcctgcctcctccgcccagctcggcgagctcctccagacctcctaggcctgattgtcctgccagggtgggcagacagacagatggaccggcccacactcccag

SEQ ID NO: 128680 - DNA, 6636 bp, Homo sapiens
  Payload ID: 5183
  Gene Symbol: DYSF
  Gene Name: dysferlin
  Uniprot ID: O75923
  ENST ID: ENST00000409651
  CDS Start-End: 142-6480
tctccgcggaggagcagcgaaggcgacagctctcttggcgcggctgcctgggagccgggcgcttgctgggtgggtgctcgggcccggtgctcccgctcccgccctgactgcgcgcctgtgtgccgccggggctgcccagccatgctgtgctgcctgctggtgagggccagcaacctccccagtgcgaagaaggaccggcgcagcgaccctgtcgcaagcctgactttccgaggggtgaagaagagaaccaaagtcatcaagaacagcgtgaaccctgtatggaatgagggatttgaatgggacctcaagggcatccccctggaccagggctctgagcttcatgtggtggtcaaagaccatgagacgatggggaggaacaggttcctgggggaagccaaggtcccactccgagaggtcctcgccacccctagtctgtccgccagcttcaatgcccccctgctggacaccaagaagcagcccacaggggcctcgctggtcctgcaggtgtcctacacaccgctgcctggagctgtgcccctgttcccgccccctactcctctggagccctccccgactctgcctgacctggatgtagtggcaggcgggggacagagccgggccgagacttggtccctgctcagtgacagcaccatggacacgagatactctggaaagaagtggccggcccccacggacacaggaggagaggaagacacagaggaccagggactcactggagatgaggcggagccattcctggatcaaagcggaggcccgggggctcccaccaccccaaggaaactaccttcacgtcctccgccccactaccccgggatcaaaagaaagcgaagtgcgcctacatctagaaagctgctgtcagacaaaccgcaggatttccagatcagggtccaggtgatcgaggggcgccagctgccgggggtgaacatcaagcctgtggtcaaggttaccgctgcagggcagaccaagcggacgcggatccacaagggaaacagcccactcttcaatgagactcttttcttcaacttgtttgactctcctggggagctgtttgatgagcccatctttatcacggtggtagactctcgttctctcaggacagatgctctcctcggggagttccggatggacgtgggcaccatttacagagagccccggcacgcctatctcaggaagtggctgctgctctcagaccctgatgacttctctgctggggccagaggctacctgaaaacaagcctttgtgtgctggggcctggggacgaagcgcctctggagagaaaagacccctctgaagacaaggaggacattgaaagcaacctgctccggcccacaggcgtagccctgcgaggagcccacttctgcctgaaggtcttccgggccgaggacttgccgcagatggacgatgccgtgatggacaacgtgaaacagatctttggcttcgagagtaacaagaagaacttggtggacccctttgtggaggtcagctttgcggggaaaatgctgtgcagcaagatcttggagaagacggccaaccctcagtggaaccagaacatcacactgcctgccatgtttccctccatgtgcgaaaaaatgaggattcgtatcatagactgggaccgcctgactcacaatgacatcgtggctaccacctacctgagtatgtcgaaaatctctgcccctggaggagaaatagaagaggagcctgcaggtgctgtcaagccttcgaaagcctcagacttggatgactacctgggcttcctccccacttttgggccctgctacatcaacctctatggcagtcccagagagttcacaggcttcccagacccctacacagagctcaacacaggcaagggggaaggtgtggcttatcgtggccggcttctgctctccctggagaccaagctggtggagcacagtgaacagaaggtggaggaccttcctgcggatgacatcctccgggtggagaagtaccttaggaggcgcaagtactccctgtttgcggccttctactcagccaccatgctgcaggatgtggatgatgccatccagtttgaggtcagcatcgggaactacgggaacaagttcgacatgacctgcctgccgctggcctccaccactcagtacagccgtgcagtctttgacgggtgccactactactacctaccctggggtaacgtgaaacctgtggtggtgctgtcatcctactgggaggacatcagccatagaatcgagactcagaaccagctgcttgggattgctgaccggctggaagctggcctggagcaggtccacctggccctgaaggcgcagtgctccacggaggacgtggactcgctggtggctcagctgacggatgagctcatcgcaggctgcagccagcctctgggtgacatccatgagacaccctctgccacccacctggaccagtacctgtaccagctgcgcacccatcacctgagccaaatcactgaggctgccctggccctgaagctcggccacagtgagctccctgcagctctggagcaggcggaggactggctcctgcgtctgcgtgccctggcagaggagccccagaacagcctgccggacatcgtcatctggatgctgcagggagacaagcgtgtggcataccagcgggtgcccgcccaccaagtcctcttctcccggcggggtgccaactactgtggcaagaattgtgggaagctacagacaatctttctgaaatatccgatggagaaggtgcctggcgcccggatgccagtgcagatacgggtcaagctgtggtttgggctctcagtggatgagaaggagttcaaccagtttgctgaggggaagctgtctgtctttgctgaaacctatgagaacgagactaagttggcccttgttgggaactggggcacaacgggcctcacctaccccaagttttctgacgtcacgggcaagatcaagctacccaaggacagcttccgcccctcggccggctggacctgggctggagattggttcgtgtgtccggagaagactctgctccatgacatggacgccggtcacctgagcttcgtggaagaggtgtttgagaaccagacccggcttcccggaggccagtggatctacatgagtgacaactacaccgatgtgaacggggagaaggtgcttcccaaggatgacattgagtgcccactgggctggaagtgggaagatgaggaatggtccacagacctcaaccgggctgtcgatgagcaaggctgggagtatagcatcaccatccccccggagcggaagccgaagcactgggtccctgctgagaagatgtactacacacaccgacggcggcgctgggtgcgcctgcgcaggagggatctcagccaaatggaagcactgaaaaggcacaggcaggcggaggcggagggcgagggctgggagtacgcctctctttttggctggaagttccacctcgagtaccgcaagacagatgccttccgccgccgccgctggcgccgtcgcatggagccactggagaagacggggcctgcagctgtgtttgcccttgagggggccctgggcggcgtgatggatgacaagagtgaagattccatgtccgtctccaccttgagcttcggtgtgaacagacccacgatttcctgcatattcgactatgggaaccgctaccatctacgctgctacatgtaccaggcccgggacctggctgcgatggacaaggactctttttctgatccctatgccatcgtctccttcctgcaccagagccagaagacggtggtggtgaagaacacccttaaccccacctgggaccagacgctcatcttctacgagatcgagatctttggcgagccggccacagttgctgagcaaccgcccagcattgtggtggagctgtacgaccatgacacttatggtgcagacgagtttatgggtcgctgcatctgtcaaccgagtctggaacggatgccacggctggcctggttcccactgacgaggggcagccagccgtcgggggagctgctggcctcttttgagctcatccagagagagaagccggccatccaccatattcctggttttgaggtgcaggagacatcaaggatcctggatgagtctgaggacacagacctgccctacccaccaccccagagggaggccaacatctacatggttcctcagaacatcaagccagcgctccagcgtaccgccatcgagatcctggcatggggcctgcggaacatgaagagttaccagctggccaacatctcctcccccagcctcgtggtagagtgtgggggccagacggtgcagtcctgtgtcatcaggaacctccggaagaaccccaactttgacatctgcaccctcttcatggaagtgatgctgcccagggaggagctctactgcccccccatcaccgtcaaggtcatcgataaccgccagtttggccgccggcctgtggtgggccagtgtaccatccgctccctggagagcttcctgtgtgacccctactcggcggagagtccatccccacagggtggcccagacgatgtgagcctactcagtcctggggaagacgtgctcatcgacattgatgacaaggagcccctcatccccatccaggaggaagagttcatcgattggtggagcaaattctttgcctccataggggagagggaaaagtgcggctcctacctggagaaggattttgacaccctgaaggtctatgacacacagctggagaatgtggaggcctttgagggcctgtctgacttttgtaacaccttcaagctgtaccggggcaagacgcaggaggagacagaagatccatctgtgattggtgaatttaagggcctcttcaaaatttatcccctcccagaagacccagccatccccatgcccccaagacagttccaccagctggccgcccagggaccccaggagtgcttggtccgtatctacattgtccgagcatttggcctgcagcccaaggaccccaatggaaagtgtgatccttacatcaagatctccatagggaagaaatcagtgagtgaccaggataactacatcccctgcacgctggagcccgtatttggaaagatgttcgagctgacctgcactctgcctctggagaaggacctaaagatcactctctatgactatgacctcctctccaaggacgaaaagatcggtgagacggtcgtcgacctggagaacaggctgctgtccaagtttggggctcgctgtggactcccacagacctactgtgtctctggaccgaaccagtggcgggaccagctccgcccctcccagctcctccacctcttctgccagcagcatagagtcaaggcacctgtgtaccggacagaccgtgtaatgtttcaggataaagaatattccattgaagagatagaggctggcaggatcccaaacccacacctgggcccagtggaggagcgtctggctctgcatgtgcttcagcagcagggcctggtcccggagcacgtggagtcacggcccctctacagccccctgcagccagacatcgagcaggggaagctgcagatgtgggtcgacctatttccgaaggccctggggcggcctggacctcccttcaacatcaccccacggagagccagaaggtttttcctgcgttgtattatctggaataccagagatgtgatcctggatgacctgagcctcacgggggagaagatgagcgacatttatgtgaaaggttggatgattggctttgaagaacacaagcaaaagacagacgtgcattatcgttccctgggaggtgaaggcaacttcaactggaggttcattttccccttcgactacctgccagctgagcaagtctgtaccattgccaagaaggatgccttctggaggctggacaagactgagagcaaaatcccagcacgagtggtgttccagatctgggacaatgacaagttctcctttgatgattttctgggctccctgcagctcgatctcaaccgcatgcccaagccagccaagacagccaagaagtgctccttggaccagctggatgatgctttccacccagaatggtttgtgtccctttttgagcagaaaacagtgaagggctggtggccctgtgtagcagaagagggtgagaagaaaatactggcgggcaagctggaaatgaccttggagattgtagcagagagtgagcatgaggagcggcctgctggccagggccgggatgagcccaacatgaaccctaagcttgaggacccaaggcgccccgacacctccttcctgtggtttacctccccatacaagaccatgaagttcatcctgtggcggcgtttccggtgggccatcatcctcttcatcatcctcttcatcctgctgctgttcctggccatcttcatctacgccttcccgaactatgctgccatgaagctggtgaagcccttcagctgaggactctcctgccctgtagaaggggccgtggggtcccctccagcatgggactggcctgcctcctccgcccagctcggcgagctcctccagacctcctaggcctgattgtcctgccagggtgggcagacagacagatggaccggcccacactcccag

SEQ ID NO: 128681 - DNA, 6657 bp, Homo sapiens
  Payload ID: 5183
  Gene Symbol: DYSF
  Gene Name: dysferlin
  Uniprot ID: O75923
  ENST ID: ENST00000410020
  CDS Start-End: 142-6501
tctccgcggaggagcagcgaaggcgacagctctcttggcgcggctgcctgggagccgggcgcttgctgggtgggtgctcgggcccggtgctcccgctcccgccctgactgcgcgcctgtgtgccgccggggctgcccagccatgctgtgctgcctgctggtgagggccagcaacctccccagtgcgaagaaggaccggcgcagcgaccctgtcgcaagcctgactttccgaggggtgaagaagagaaccaaagtcatcaagaacagcgtgaaccctgtatggaatgagggatttgaatgggacctcaagggcatccccctggaccagggctctgagcttcatgtggtggtcaaagaccatgagacgatggggaggaacaggttcctgggggaagccaaggtcccactccgagaggtcctcgccacccctagtctgtccgccagcttcaatgcccccctgctggacaccaagaagcagcccacaggggcctcgctggtcctgcaggtgtcctacacaccgctgcctggagctgtgcccctgttcccgccccctactcctctggagccctccccgactctgcctgacctggatgtagtggcaggcgggggacagagccgggccgagacttggtccctgctcagtgacagcaccatggacacgagatactctggaaagaagtggccggcccccacggacacaggaggagaggaagacacagaggaccagggactcactggagatgaggcggagccattcctggatcaaagcggaggcccgggggctcccaccaccccaaggaaactaccttcacgtcctccgccccactaccccgggatcaaaagaaagcgaagtgcgcctacatctagaaagctgctgtcagacaaaccgcaggatttccagatcagggtccaggtgatcgaggggcgccagctgccgggggtgaacatcaagcctgtggtcaaggttaccgctgcagggcagaccaagcggacgcggatccacaagggaaacagcccactcttcaatgagactcttttcttcaacttgtttgactctcctggggagctgtttgatgagcccatctttatcacggtggtagactctcgttctctcaggacagatgctctcctcggggagttccggatggacgtgggcaccatttacagagagccccggcacgcctatctcaggaagtggctgctgctctcagaccctgatgacttctctgctggggccagaggctacctgaaaacaagcctttgtgtgctggggcctggggacgaagcgcctctggagagaaaagacccctctgaagacaaggaggacattgaaagcaacctgctccggcccacaggcgtagccctgcgaggagcccacttctgcctgaaggtcttccgggccgaggacttgccgcagatggacgatgccgtgatggacaacgtgaaacagatctttggcttcgagagtaacaagaagaacttggtggacccctttgtggaggtcagctttgcggggaaaatgctgtgcagcaagatcttggagaagacggccaaccctcagtggaaccagaacatcacactgcctgccatgtttccctccatgtgcgaaaaaatgaggattcgtatcatagactgggaccgcctgactcacaatgacatcgtggctaccacctacctgagtatgtcgaaaatctctgcccctggaggagaaatagaagtggatgactacctgggcttcctccccacttttgggccctgctacatcaacctctatggcagtcccagagagttcacaggcttcccagacccctacacagagctcaacacaggcaagggggaaggtgtggcttatcgtggccggcttctgctctccctggagaccaagctggtggagcacagtgaacagaaggtggaggaccttcctgcggatgacatcctccgggtggagaagtaccttaggaggcgcaagtactccctgtttgcggccttctactcagccaccatgctgcaggatgtggatgatgccatccagtttgaggtcagcatcgggaactacgggaacaagttcgacatgacctgcctgccgctggcctccaccactcagtacagccgtgcagtctttgacgggtgccactactactacctaccctggggtaacgtgaaacctgtggtggtgctgtcatcctactgggaggacatcagccatagaatcgagactcagaaccagctgcttgggattgctgaccggctggaagctggcctggagcaggtccacctggccctgaaggcgcagtgctccacggaggacgtggactcgctggtggctcagctgacggatgagctcatcgcaggctgcagccagcctctgggtgacatccatgagacaccctctgccacccacctggaccagtacctgtaccagctgcgcacccatcacctgagccaaatcactgaggctgccctggccctgaagctcggccacagtgagctccctgcagctctggagcaggcggaggactggctcctgcgtctgcgtgccctggcagaggagccccagaacagcctgccggacatcgtcatctggatgctgcagggagacaagcgtgtggcataccagcgggtgcccgcccaccaagtcctcttctcccggcggggtgccaactactgtggcaagaattgtgggaagctacagacaatctttctgaaatatccgatggagaaggtgcctggcgcccggatgccagtgcagatacgggtcaagctgtggtttgggctctcagtggatgagaaggagttcaaccagtttgctgaggggaagctgtctgtctttgctgaaacctatgagaacgagactaagttggcccttgttgggaactggggcacaacgggcctcacctaccccaagttttctgacgtcacgggcaagatcaagctacccaaggacagcttccgcccctcggccggctggacctgggctggagattggttcgtgtgtccggagaagactctgctccatgacatggacgccggtcacctgagcttcgtggaagaggtgtttgagaaccagacccggcttcccggaggccagtggatctacatgagtgacaactacaccgatgtgaacggggagaaggtgcttcccaaggatgacattgagtgcccactgggctggaagtgggaagatgaggaatggtccacagacctcaaccgggctgtcgatgagcaaggctgggagtatagcatcaccatccccccggagcggaagccgaagcactgggtccctgctgagaagatgtactacacacaccgacggcggcgctgggtgcgcctgcgcaggagggatctcagccaaatggaagcactgaaaaggcacaggcaggcggaggcggagggcgagggctgggagtacgcctctctttttggctggaagttccacctcgagtaccgcaagacagatgccttccgccgccgccgctggcgccgtcgcatggagccactggagaagacggggcctgcagctgtgtttgcccttgagggggccctgggcggcgtgatggatgacaagagtgaagattccatgtccgtctccaccttgagcttcggtgtgaacagacccacgatttcctgcatattcgactatgggaaccgctaccatctacgctgctacatgtaccaggcccgggacctggctgcgatggacaaggactctttttctgatccctatgccatcgtctccttcctgcaccagagccagaagacggtggtggtgaagaacacccttaaccccacctgggaccagacgctcatcttctacgagatcgagatctttggcgagccggccacagttgctgagcaaccgcccagcattgtggtggagctgtacgaccatgacacttatggtgcagacgagtttatgggtcgctgcatctgtcaaccgagtctggaacggatgccacggctggcctggttcccactgacgaggggcagccagccgtcgggggagctgctggcctcttttgagctcatccagagagagaagccggccatccaccatattcctggttttgaggtgcaggagacatcaaggatcctggatgagtctgaggacacagacctgccctacccaccaccccagagggaggccaacatctacatggttcctcagaacatcaagccagcgctccagcgtaccgccatcgagatcctggcatggggcctgcggaacatgaagagttaccagctggccaacatctcctcccccagcctcgtggtagagtgtgggggccagacggtgcagtcctgtgtcatcaggaacctccggaagaaccccaactttgacatctgcaccctcttcatggaagtgatgctgcccagggaggagctctactgcccccccatcaccgtcaaggtcatcgataaccgccagtttggccgccggcctgtggtgggccagtgtaccatccgctccctggagagcttcctgtgtgacccctactcggcggagagtccatccccacagggtggcccagacgatgtgagcctactcagtcctggggaagacgtgctcatcgacattgatgacaaggagcccctcatccccatccagcttgcagacggtctgtcgagcttggcccccactaacacggcttctcctccatccagtcctcatgaggaagagttcatcgattggtggagcaaattctttgcctccataggggagagggaaaagtgcggctcctacctggagaaggattttgacaccctgaaggtctatgacacacagctggagaatgtggaggcctttgagggcctgtctgacttttgtaacaccttcaagctgtaccggggcaagacgcaggaggagacagaagatccatctgtgattggtgaatttaagggcctcttcaaaatttatcccctcccagaagacccagccatccccatgcccccaagacagttccaccagctggccgcccagggaccccaggagtgcttggtccgtatctacattgtccgagcatttggcctgcagcccaaggaccccaatggaaagtgtgatccttacatcaagatctccatagggaagaaatcagtgagtgaccaggataactacatcccctgcacgctggagcccgtatttggaaagatgttcgagctgacctgcactctgcctctggagaaggacctaaagatcactctctatgactatgacctcctctccaaggacgaaaagatcggtgagacggtcgtcgacctggagaacaggctgctgtccaagtttggggctcgctgtggactcccacagacctactgtgtctctggaccgaaccagtggcgggaccagctccgcccctcccagctcctccacctcttctgccagcagcatagagtcaaggcacctgtgtaccggacagaccgtgtaatgtttcaggataaagaatattccattgaagagatagaggctggcaggatcccaaacccacacctgggcccagtggaggagcgtctggctctgcatgtgcttcagcagcagggcctggtcccggagcacgtggagtcacggcccctctacagccccctgcagccagacatcgagcaggggaagctgcagatgtgggtcgacctatttccgaaggccctggggcggcctggacctcccttcaacatcaccccacggagagccagaaggtttttcctgcgttgtattatctggaataccagagatgtgatcctggatgacctgagcctcacgggggagaagatgagcgacatttatgtgaaaggttggatgattggctttgaagaacacaagcaaaagacagacgtgcattatcgttccctgggaggtgaaggcaacttcaactggaggttcattttccccttcgactacctgccagctgagcaagtctgtaccattgccaagaaggatgccttctggaggctggacaagactgagagcaaaatcccagcacgagtggtgttccagatctgggacaatgacaagttctcctttgatgattttctgggctccctgcagctcgatctcaaccgcatgcccaagccagccaagacagccaagaagtgctccttggaccagctggatgatgctttccacccagaatggtttgtgtccctttttgagcagaaaacagtgaagggctggtggccctgtgtagcagaagagggtgagaagaaaatactggcgggcaagctggaaatgaccttggagattgtagcagagagtgagcatgaggagcggcctgctggccagggccgggatgagcccaacatgaaccctaagcttgaggacccaaggcgccccgacacctccttcctgtggtttacctccccatacaagaccatgaagttcatcctgtggcggcgtttccggtgggccatcatcctcttcatcatcctcttcatcctgctgctgttcctggccatcttcatctacgccttcccgaactatgctgccatgaagctggtgaagcccttcagctgaggactctcctgccctgtagaaggggccgtggggtcccctccagcatgggactggcctgcctcctccgcccagctcggcgagctcctccagacctcctaggcctgattgtcctgccagggtgggcagacagacagatggaccggcccacactcccag

SEQ ID NO: 128682 - DNA, 6727 bp, Homo sapiens
  Payload ID: 5183
  Gene Symbol: DYSF
  Gene Name: dysferlin
  Uniprot ID: O75923
  ENST ID: ENST00000409762
  CDS Start-End: 278-6571
gggtggaagatgagcagaagcccctgttctcggaacgccggctgacaagcggggtgagcgcagccggggcggggacccagcctagcccactggagcagccgggggtggcccgttcccctttaagagcaactgctctaagccaggagccagagattcgagccggcctcgcccagccagccctctccagcgaggggacccacaagcggcgcctcggccctcccgacctttccgagccctctttgcgccctgggcgcacggggccctacacgcgccaagcatgctgagggtcttcatcctctatgccgagaacgtccacacacccgacaccgacatcagcgatgcctactgctccgcggtgtttgcaggggtgaagaagagaaccaaagtcatcaagaacagcgtgaaccctgtatggaatgagggatttgaatgggacctcaagggcatccccctggaccagggctctgagcttcatgtggtggtcaaagaccatgagacgatggggaggaacaggttcctgggggaagccaaggtcccactccgagaggtcctcgccacccctagtctgtccgccagcttcaatgcccccctgctggacaccaagaagcagcccacaggggcctcgctggtcctgcaggtgtcctacacaccgctgcctggagctgtgcccctgttcccgccccctactcctctggagccctccccgactctgcctgacctggatgtagtggcaggcgggggacagagccgggccgagacttggtccctgctcagtgacagcaccatggacacgagatactctggaaagaagtggccggcccccacggacacaggaggagaggaagacacagaggaccagggactcactggagatgaggcggagccattcctggatcaaagcggaggcccgggggctcccaccaccccaaggaaactaccttcacgtcctccgccccactaccccgggatcaaaagaaagcgaagtgcgcctacatctagaaagctgctgtcagacaaaccgcaggatttccagatcagggtccaggtgatcgaggggcgccagctgccgggggtgaacatcaagcctgtggtcaaggttaccgctgcagggcagaccaagcggacgcggatccacaagggaaacagcccactcttcaatgagactcttttcttcaacttgtttgactctcctggggagctgtttgatgagcccatctttatcacggtggtagactctcgttctctcaggacagatgctctcctcggggagttccggatggacgtgggcaccatttacagagagccccggcacgcctatctcaggaagtggctgctgctctcagaccctgatgacttctctgctggggccagaggctacctgaaaacaagcctttgtgtgctggggcctggggacgaagcgcctctggagagaaaagacccctctgaagacaaggaggacattgaaagcaacctgctccggcccacaggcgtagccctgcgaggagcccacttctgcctgaaggtcttccgggccgaggacttgccgcagatggacgatgccgtgatggacaacgtgaaacagatctttggcttcgagagtaacaagaagaacttggtggacccctttgtggaggtcagctttgcggggaaaatgctgtgcagcaagatcttggagaagacggccaaccctcagtggaaccagaacatcacactgcctgccatgtttccctccatgtgcgaaaaaatgaggattcgtatcatagactgggaccgcctgactcacaatgacatcgtggctaccacctacctgagtatgtcgaaaatctctgcccctggaggagaaatagaagtggatgactacctgggcttcctccccacttttgggccctgctacatcaacctctatggcagtcccagagagttcacaggcttcccagacccctacacagagctcaacacaggcaagggggaaggtgtggcttatcgtggccggcttctgctctccctggagaccaagctggtggagcacagtgaacagaaggtggaggaccttcctgcggatgacatcctccgggtggagaagtaccttaggaggcgcaagtactccctgtttgcggccttctactcagccaccatgctgcaggatgtggatgatgccatccagtttgaggtcagcatcgggaactacgggaacaagttcgacatgacctgcctgccgctggcctccaccactcagtacagccgtgcagtctttgacgggtgccactactactacctaccctggggtaacgtgaaacctgtggtggtgctgtcatcctactgggaggacatcagccatagaatcgagactcagaaccagctgcttgggattgctgaccggctggaagctggcctggagcaggtccacctggccctgaaggcgcagtgctccacggaggacgtggactcgctggtggctcagctgacggatgagctcatcgcaggctgcagccagcctctgggtgacatccatgagacaccctctgccacccacctggaccagtacctgtaccagctgcgcacccatcacctgagccaaatcactgaggctgccctggccctgaagctcggccacagtgagctccctgcagctctggagcaggcggaggactggctcctgcgtctgcgtgccctggcagaggagccccagaacagcctgccggacatcgtcatctggatgctgcagggagacaagcgtgtggcataccagcgggtgcccgcccaccaagtcctcttctcccggcggggtgccaactactgtggcaagaattgtgggaagctacagacaatctttctgaaatatccgatggagaaggtgcctggcgcccggatgccagtgcagatacgggtcaagctgtggtttgggctctcagtggatgagaaggagttcaaccagtttgctgaggggaagctgtctgtctttgctgaaacctatgagaacgagactaagttggcccttgttgggaactggggcacaacgggcctcacctaccccaagttttctgacgtcacgggcaagatcaagctacccaaggacagcttccgcccctcggccggctggacctgggctggagattggttcgtgtgtccggagaagactctgctccatgacatggacgccggtcacctgagcttcgtggaagaggtgtttgagaaccagacccggcttcccggaggccagtggatctacatgagtgacaactacaccgatgtgaacggggagaaggtgcttcccaaggatgacattgagtgcccactgggctggaagtgggaagatgaggaatggtccacagacctcaaccgggctgtcgatgagcaaggctgggagtatagcatcaccatccccccggagcggaagccgaagcactgggtccctgctgagaagatgtactacacacaccgacggcggcgctgggtgcgcctgcgcaggagggatctcagccaaatggaagcactgaaaaggcacaggcaggcggaggcggagggcgagggctgggagtacgcctctctttttggctggaagttccacctcgagtaccgcaagacagatgccttccgccgccgccgctggcgccgtcgcatggagccactggagaagacggggcctgcagctgtgtttgcccttgagggggccctgggcggcgtgatggatgacaagagtgaagattccatgtccgtctccaccttgagcttcggtgtgaacagacccacgatttcctgcatattcgactatgggaaccgctaccatctacgctgctacatgtaccaggcccgggacctggctgcgatggacaaggactctttttctgatccctatgccatcgtctccttcctgcaccagagccagaagacggtggtggtgaagaacacccttaaccccacctgggaccagacgctcatcttctacgagatcgagatctttggcgagccggccacagttgctgagcaaccgcccagcattgtggtggagctgtacgaccatgacacttatggtgcagacgagtttatgggtcgctgcatctgtcaaccgagtctggaacggatgccacggctggcctggttcccactgacgaggggcagccagccgtcgggggagctgctggcctcttttgagctcatccagagagagaagccggccatccaccatattcctggttttgaggtgcaggagacatcaaggatcctggatgagtctgaggacacagacctgccctacccaccaccccagagggaggccaacatctacatggttcctcagaacatcaagccagcgctccagcgtaccgccatcgagatcctggcatggggcctgcggaacatgaagagttaccagctggccaacatctcctcccccagcctcgtggtagagtgtgggggccagacggtgcagtcctgtgtcatcaggaacctccggaagaaccccaactttgacatctgcaccctcttcatggaagtgatgctgcccagggaggagctctactgcccccccatcaccgtcaaggtcatcgataaccgccagtttggccgccggcctgtggtgggccagtgtaccatccgctccctggagagcttcctgtgtgacccctactcggcggagagtccatccccacagggtggcccagacgatgtgagcctactcagtcctggggaagacgtgctcatcgacattgatgacaaggagcccctcatccccatccaggaggaagagttcatcgattggtggagcaaattctttgcctccataggggagagggaaaagtgcggctcctacctggagaaggattttgacaccctgaaggtctatgacacacagctggagaatgtggaggcctttgagggcctgtctgacttttgtaacaccttcaagctgtaccggggcaagacgcaggaggagacagaagatccatctgtgattggtgaatttaagggcctcttcaaaatttatcccctcccagaagacccagccatccccatgcccccaagacagttccaccagctggccgcccagggaccccaggagtgcttggtccgtatctacattgtccgagcatttggcctgcagcccaaggaccccaatggaaagtgtgatccttacatcaagatctccatagggaagaaatcagtgagtgaccaggataactacatcccctgcacgctggagcccgtatttggaaagatgttcgagctgacctgcactctgcctctggagaaggacctaaagatcactctctatgactatgacctcctctccaaggacgaaaagatcggtgagacggtcgtcgacctggagaacaggctgctgtccaagtttggggctcgctgtggactcccacagacctactgtgtctctggaccgaaccagtggcgggaccagctccgcccctcccagctcctccacctcttctgccagcagcatagagtcaaggcacctgtgtaccggacagaccgtgtaatgtttcaggataaagaatattccattgaagagatagaggctggcaggatcccaaacccacacctgggcccagtggaggagcgtctggctctgcatgtgcttcagcagcagggcctggtcccggagcacgtggagtcacggcccctctacagccccctgcagccagacatcgagcaggggaagctgcagatgtgggtcgacctatttccgaaggccctggggcggcctggacctcccttcaacatcaccccacggagagccagaaggtttttcctgcgttgtattatctggaataccagagatgtgatcctggatgacctgagcctcacgggggagaagatgagcgacatttatgtgaaaggttggatgattggctttgaagaacacaagcaaaagacagacgtgcattatcgttccctgggaggtgaaggcaacttcaactggaggttcattttccccttcgactacctgccagctgagcaagtctgtaccattgccaagaaggatgccttctggaggctggacaagactgagagcaaaatcccagcacgagtggtgttccagatctgggacaatgacaagttctcctttgatgattttctgggctccctgcagctcgatctcaaccgcatgcccaagccagccaagacagccaagaagtgctccttggaccagctggatgatgctttccacccagaatggtttgtgtccctttttgagcagaaaacagtgaagggctggtggccctgtgtagcagaagagggtgagaagaaaatactggcgggcaagctggaaatgaccttggagattgtagcagagagtgagcatgaggagcggcctgctggccagggccgggatgagcccaacatgaaccctaagcttgaggacccaaggcgccccgacacctccttcctgtggtttacctccccatacaagaccatgaagttcatcctgtggcggcgtttccggtgggccatcatcctcttcatcatcctcttcatcctgctgctgttcctggccatcttcatctacgccttcccgaactatgctgccatgaagctggtgaagcccttcagctgaggactctcctgccctgtagaaggggccgtggggtcccctccagcatgggactggcctgcctcctccgcccagctcggcgagctcctccagacctcctaggcctgattgtcctgccagggtgggcagacagacagatggaccggcccacactcccag

SEQ ID NO: 128683 - DNA, 6739 bp, Homo sapiens
  Payload ID: 5183
  Gene Symbol: DYSF
  Gene Name: dysferlin
  Uniprot ID: O75923
  ENST ID: ENST00000429174
  CDS Start-End: 278-6583
gggtggaagatgagcagaagcccctgttctcggaacgccggctgacaagcggggtgagcgcagccggggcggggacccagcctagcccactggagcagccgggggtggcccgttcccctttaagagcaactgctctaagccaggagccagagattcgagccggcctcgcccagccagccctctccagcgaggggacccacaagcggcgcctcggccctcccgacctttccgagccctctttgcgccctgggcgcacggggccctacacgcgccaagcatgctgagggtcttcatcctctatgccgagaacgtccacacacccgacaccgacatcagcgatgcctactgctccgcggtgtttgcaggggtgaagaagagaaccaaagtcatcaagaacagcgtgaaccctgtatggaatgagggatttgaatgggacctcaagggcatccccctggaccagggctctgagcttcatgtggtggtcaaagaccatgagacgatggggaggaacaggttcctgggggaagccaaggtcccactccgagaggtcctcgccacccctagtctgtccgccagcttcaatgcccccctgctggacaccaagaagcagcccacaggggcctcgctggtcctgcaggtgtcctacacaccgctgcctggagctgtgcccctgttcccgccccctactcctctggagccctccccgactctgcctgacctggatgtagtggcagacacaggaggagaggaagacacagaggaccagggactcactggagatgaggcggagccattcctggatcaaagcggaggcccgggggctcccaccaccccaaggaaactaccttcacgtcctccgccccactaccccgggatcaaaagaaagcgaagtgcgcctacatctagaaagctgctgtcagacaaaccgcaggatttccagatcagggtccaggtgatcgaggggcgccagctgccgggggtgaacatcaagcctgtggtcaaggttaccgctgcagggcagaccaagcggacgcggatccacaagggaaacagcccactcttcaatgagactcttttcttcaacttgtttgactctcctggggagctgtttgatgagcccatctttatcacggtggtagactctcgttctctcaggacagatgctctcctcggggagttccggatggacgtgggcaccatttacagagagccccggcacgcctatctcaggaagtggctgctgctctcagaccctgatgacttctctgctggggccagaggctacctgaaaacaagcctttgtgtgctggggcctggggacgaagcgcctctggagagaaaagacccctctgaagacaaggaggacattgaaagcaacctgctccggcccacaggcgtagccctgcgaggagcccacttctgcctgaaggtcttccgggccgaggacttgccgcagatggacgatgccgtgatggacaacgtgaaacagatctttggcttcgagagtaacaagaagaacttggtggacccctttgtggaggtcagctttgcggggaaaatgctgtgcagcaagatcttggagaagacggccaaccctcagtggaaccagaacatcacactgcctgccatgtttccctccatgtgcgaaaaaatgaggattcgtatcatagactgggaccgcctgactcacaatgacatcgtggctaccacctacctgagtatgtcgaaaatctctgcccctggaggagaaatagaagaggagcctgcaggtgctgtcaagccttcgaaagcctcagacttggatgactacctgggcttcctccccacttttgggccctgctacatcaacctctatggcagtcccagagagttcacaggcttcccagacccctacacagagctcaacacaggcaagggggaaggtgtggcttatcgtggccggcttctgctctccctggagaccaagctggtggagcacagtgaacagaaggtggaggaccttcctgcggatgacatcctccgggtggagaagtaccttaggaggcgcaagtactccctgtttgcggccttctactcagccaccatgctgcaggatgtggatgatgccatccagtttgaggtcagcatcgggaactacgggaacaagttcgacatgacctgcctgccgctggcctccaccactcagtacagccgtgcagtctttgacgggtgccactactactacctaccctggggtaacgtgaaacctgtggtggtgctgtcatcctactgggaggacatcagccatagaatcgagactcagaaccagctgcttgggattgctgaccggctggaagctggcctggagcaggtccacctggccctgaaggcgcagtgctccacggaggacgtggactcgctggtggctcagctgacggatgagctcatcgcaggctgcagccagcctctgggtgacatccatgagacaccctctgccacccacctggaccagtacctgtaccagctgcgcacccatcacctgagccaaatcactgaggctgccctggccctgaagctcggccacagtgagctccctgcagctctggagcaggcggaggactggctcctgcgtctgcgtgccctggcagaggagccccagaacagcctgccggacatcgtcatctggatgctgcagggagacaagcgtgtggcataccagcgggtgcccgcccaccaagtcctcttctcccggcggggtgccaactactgtggcaagaattgtgggaagctacagacaatctttctgaaatatccgatggagaaggtgcctggcgcccggatgccagtgcagatacgggtcaagctgtggtttgggctctcagtggatgagaaggagttcaaccagtttgctgaggggaagctgtctgtctttgctgaaacctatgagaacgagactaagttggcccttgttgggaactggggcacaacgggcctcacctaccccaagttttctgacgtcacgggcaagatcaagctacccaaggacagcttccgcccctcggccggctggacctgggctggagattggttcgtgtgtccggagaagactctgctccatgacatggacgccggtcacctgagcttcgtggaagaggtgtttgagaaccagacccggcttcccggaggccagtggatctacatgagtgacaactacaccgatgtgaacggggagaaggtgcttcccaaggatgacattgagtgcccactgggctggaagtgggaagatgaggaatggtccacagacctcaaccgggctgtcgatgagcaaggctgggagtatagcatcaccatccccccggagcggaagccgaagcactgggtccctgctgagaagatgtactacacacaccgacggcggcgctgggtgcgcctgcgcaggagggatctcagccaaatggaagcactgaaaaggcacaggcaggcggaggcggagggcgagggctgggagtacgcctctctttttggctggaagttccacctcgagtaccgcaagacagatgccttccgccgccgccgctggcgccgtcgcatggagccactggagaagacggggcctgcagctgtgtttgcccttgagggggccctgggcggcgtgatggatgacaagagtgaagattccatgtccgtctccaccttgagcttcggtgtgaacagacccacgatttcctgcatattcgactatgggaaccgctaccatctacgctgctacatgtaccaggcccgggacctggctgcgatggacaaggactctttttctgatccctatgccatcgtctccttcctgcaccagagccagaagacggtggtggtgaagaacacccttaaccccacctgggaccagacgctcatcttctacgagatcgagatctttggcgagccggccacagttgctgagcaaccgcccagcattgtggtggagctgtacgaccatgacacttatggtgcagacgagtttatgggtcgctgcatctgtcaaccgagtctggaacggatgccacggctggcctggttcccactgacgaggggcagccagccgtcgggggagctgctggcctcttttgagctcatccagagagagaagccggccatccaccatattcctggttttgaggtgcaggagacatcaaggatcctggatgagtctgaggacacagacctgccctacccaccaccccagagggaggccaacatctacatggttcctcagaacatcaagccagcgctccagcgtaccgccatcgagatcctggcatggggcctgcggaacatgaagagttaccagctggccaacatctcctcccccagcctcgtggtagagtgtgggggccagacggtgcagtcctgtgtcatcaggaacctccggaagaaccccaactttgacatctgcaccctcttcatggaagtgatgctgcccagggaggagctctactgcccccccatcaccgtcaaggtcatcgataaccgccagtttggccgccggcctgtggtgggccagtgtaccatccgctccctggagagcttcctgtgtgacccctactcggcggagagtccatccccacagggtggcccagacgatgtgagcctactcagtcctggggaagacgtgctcatcgacattgatgacaaggagcccctcatccccatccagcttgcagacggtctgtcgagcttggcccccactaacacggcttctcctccatccagtcctcatgaggaagagttcatcgattggtggagcaaattctttgcctccataggggagagggaaaagtgcggctcctacctggagaaggattttgacaccctgaaggtctatgacacacagctggagaatgtggaggcctttgagggcctgtctgacttttgtaacaccttcaagctgtaccggggcaagacgcaggaggagacagaagatccatctgtgattggtgaatttaagggcctcttcaaaatttatcccctcccagaagacccagccatccccatgcccccaagacagttccaccagctggccgcccagggaccccaggagtgcttggtccgtatctacattgtccgagcatttggcctgcagcccaaggaccccaatggaaagtgtgatccttacatcaagatctccatagggaagaaatcagtgagtgaccaggataactacatcccctgcacgctggagcccgtatttggaaagatgttcgagctgacctgcactctgcctctggagaaggacctaaagatcactctctatgactatgacctcctctccaaggacgaaaagatcggtgagacggtcgtcgacctggagaacaggctgctgtccaagtttggggctcgctgtggactcccacagacctactgtgtctctggaccgaaccagtggcgggaccagctccgcccctcccagctcctccacctcttctgccagcagcatagagtcaaggcacctgtgtaccggacagaccgtgtaatgtttcaggataaagaatattccattgaagagatagaggctggcaggatcccaaacccacacctgggcccagtggaggagcgtctggctctgcatgtgcttcagcagcagggcctggtcccggagcacgtggagtcacggcccctctacagccccctgcagccagacatcgagcaggggaagctgcagatgtgggtcgacctatttccgaaggccctggggcggcctggacctcccttcaacatcaccccacggagagccagaaggtttttcctgcgttgtattatctggaataccagagatgtgatcctggatgacctgagcctcacgggggagaagatgagcgacatttatgtgaaaggttggatgattggctttgaagaacacaagcaaaagacagacgtgcattatcgttccctgggaggtgaaggcaacttcaactggaggttcattttccccttcgactacctgccagctgagcaagtctgtaccattgccaagaaggatgccttctggaggctggacaagactgagagcaaaatcccagcacgagtggtgttccagatctgggacaatgacaagttctcctttgatgattttctgggctccctgcagctcgatctcaaccgcatgcccaagccagccaagacagccaagaagtgctccttggaccagctggatgatgctttccacccagaatggtttgtgtccctttttgagcagaaaacagtgaagggctggtggccctgtgtagcagaagagggtgagaagaaaatactggcgggcaagctggaaatgaccttggagattgtagcagagagtgagcatgaggagcggcctgctggccagggccgggatgagcccaacatgaaccctaagcttgaggacccaaggcgccccgacacctccttcctgtggtttacctccccatacaagaccatgaagttcatcctgtggcggcgtttccggtgggccatcatcctcttcatcatcctcttcatcctgctgctgttcctggccatcttcatctacgccttcccgaactatgctgccatgaagctggtgaagcccttcagctgaggactctcctgccctgtagaaggggccgtggggtcccctccagcatgggactggcctgcctcctccgcccagctcggcgagctcctccagacctcctaggcctgattgtcctgccagggtgggcagacagacagatggaccggcccacactcccag

SEQ ID NO: 128684 - DNA, 6769 bp, Homo sapiens
  Payload ID: 5183
  Gene Symbol: DYSF
  Gene Name: dysferlin
  Uniprot ID: O75923
  ENST ID: ENST00000413539
  CDS Start-End: 278-6613
gggtggaagatgagcagaagcccctgttctcggaacgccggctgacaagcggggtgagcgcagccggggcggggacccagcctagcccactggagcagccgggggtggcccgttcccctttaagagcaactgctctaagccaggagccagagattcgagccggcctcgcccagccagccctctccagcgaggggacccacaagcggcgcctcggccctcccgacctttccgagccctctttgcgccctgggcgcacggggccctacacgcgccaagcatgctgagggtcttcatcctctatgccgagaacgtccacacacccgacaccgacatcagcgatgcctactgctccgcggtgtttgcaggggtgaagaagagaaccaaagtcatcaagaacagcgtgaaccctgtatggaatgagggatttgaatgggacctcaagggcatccccctggaccagggctctgagcttcatgtggtggtcaaagaccatgagacgatggggaggaacaggttcctgggggaagccaaggtcccactccgagaggtcctcgccacccctagtctgtccgccagcttcaatgcccccctgctggacaccaagaagcagcccacaggggcctcgctggtcctgcaggtgtcctacacaccgctgcctggagctgtgcccctgttcccgccccctactcctctggagccctccccgactctgcctgacctggatgtagtggcaggcgggggacagagccgggccgagacttggtccctgctcagtgacagcaccatggacacgagatactctggaaagaagtggccggcccccacggacacaggaggagaggaagacacagaggaccagggactcactggagatgaggcggagccattcctggatcaaagcggaggcccgggggctcccaccaccccaaggaaactaccttcacgtcctccgccccactaccccgggatcaaaagaaagcgaagtgcgcctacatctagaaagctgctgtcagacaaaccgcaggatttccagatcagggtccaggtgatcgaggggcgccagctgccgggggtgaacatcaagcctgtggtcaaggttaccgctgcagggcagaccaagcggacgcggatccacaagggaaacagcccactcttcaatgagactcttttcttcaacttgtttgactctcctggggagctgtttgatgagcccatctttatcacggtggtagactctcgttctctcaggacagatgctctcctcggggagttccggatggacgtgggcaccatttacagagagccccggcacgcctatctcaggaagtggctgctgctctcagaccctgatgacttctctgctggggccagaggctacctgaaaacaagcctttgtgtgctggggcctggggacgaagcgcctctggagagaaaagacccctctgaagacaaggaggacattgaaagcaacctgctccggcccacaggcgtagccctgcgaggagcccacttctgcctgaaggtcttccgggccgaggacttgccgcagatggacgatgccgtgatggacaacgtgaaacagatctttggcttcgagagtaacaagaagaacttggtggacccctttgtggaggtcagctttgcggggaaaatgctgtgcagcaagatcttggagaagacggccaaccctcagtggaaccagaacatcacactgcctgccatgtttccctccatgtgcgaaaaaatgaggattcgtatcatagactgggaccgcctgactcacaatgacatcgtggctaccacctacctgagtatgtcgaaaatctctgcccctggaggagaaatagaagaggagcctgcaggtgctgtcaagccttcgaaagcctcagacttggatgactacctgggcttcctccccacttttgggccctgctacatcaacctctatggcagtcccagagagttcacaggcttcccagacccctacacagagctcaacacaggcaagggggaaggtgtggcttatcgtggccggcttctgctctccctggagaccaagctggtggagcacagtgaacagaaggtggaggaccttcctgcggatgacatcctccgggtggagaagtaccttaggaggcgcaagtactccctgtttgcggccttctactcagccaccatgctgcaggatgtggatgatgccatccagtttgaggtcagcatcgggaactacgggaacaagttcgacatgacctgcctgccgctggcctccaccactcagtacagccgtgcagtctttgacgggtgccactactactacctaccctggggtaacgtgaaacctgtggtggtgctgtcatcctactgggaggacatcagccatagaatcgagactcagaaccagctgcttgggattgctgaccggctggaagctggcctggagcaggtccacctggccctgaaggcgcagtgctccacggaggacgtggactcgctggtggctcagctgacggatgagctcatcgcaggctgcagccagcctctgggtgacatccatgagacaccctctgccacccacctggaccagtacctgtaccagctgcgcacccatcacctgagccaaatcactgaggctgccctggccctgaagctcggccacagtgagctccctgcagctctggagcaggcggaggactggctcctgcgtctgcgtgccctggcagaggagccccagaacagcctgccggacatcgtcatctggatgctgcagggagacaagcgtgtggcataccagcgggtgcccgcccaccaagtcctcttctcccggcggggtgccaactactgtggcaagaattgtgggaagctacagacaatctttctgaaatatccgatggagaaggtgcctggcgcccggatgccagtgcagatacgggtcaagctgtggtttgggctctcagtggatgagaaggagttcaaccagtttgctgaggggaagctgtctgtctttgctgaaacctatgagaacgagactaagttggcccttgttgggaactggggcacaacgggcctcacctaccccaagttttctgacgtcacgggcaagatcaagctacccaaggacagcttccgcccctcggccggctggacctgggctggagattggttcgtgtgtccggagaagactctgctccatgacatggacgccggtcacctgagcttcgtggaagaggtgtttgagaaccagacccggcttcccggaggccagtggatctacatgagtgacaactacaccgatgtgaacggggagaaggtgcttcccaaggatgacattgagtgcccactgggctggaagtgggaagatgaggaatggtccacagacctcaaccgggctgtcgatgagcaaggctgggagtatagcatcaccatccccccggagcggaagccgaagcactgggtccctgctgagaagatgtactacacacaccgacggcggcgctgggtgcgcctgcgcaggagggatctcagccaaatggaagcactgaaaaggcacaggcaggcggaggcggagggcgagggctgggagtacgcctctctttttggctggaagttccacctcgagtaccgcaagacagatgccttccgccgccgccgctggcgccgtcgcatggagccactggagaagacggggcctgcagctgtgtttgcccttgagggggccctgggcggcgtgatggatgacaagagtgaagattccatgtccgtctccaccttgagcttcggtgtgaacagacccacgatttcctgcatattcgactatgggaaccgctaccatctacgctgctacatgtaccaggcccgggacctggctgcgatggacaaggactctttttctgatccctatgccatcgtctccttcctgcaccagagccagaagacggtggtggtgaagaacacccttaaccccacctgggaccagacgctcatcttctacgagatcgagatctttggcgagccggccacagttgctgagcaaccgcccagcattgtggtggagctgtacgaccatgacacttatggtgcagacgagtttatgggtcgctgcatctgtcaaccgagtctggaacggatgccacggctggcctggttcccactgacgaggggcagccagccgtcgggggagctgctggcctcttttgagctcatccagagagagaagccggccatccaccatattcctggttttgaggtgcaggagacatcaaggatcctggatgagtctgaggacacagacctgccctacccaccaccccagagggaggccaacatctacatggttcctcagaacatcaagccagcgctccagcgtaccgccatcgagatcctggcatggggcctgcggaacatgaagagttaccagctggccaacatctcctcccccagcctcgtggtagagtgtgggggccagacggtgcagtcctgtgtcatcaggaacctccggaagaaccccaactttgacatctgcaccctcttcatggaagtgatgctgcccagggaggagctctactgcccccccatcaccgtcaaggtcatcgataaccgccagtttggccgccggcctgtggtgggccagtgtaccatccgctccctggagagcttcctgtgtgacccctactcggcggagagtccatccccacagggtggcccagacgatgtgagcctactcagtcctggggaagacgtgctcatcgacattgatgacaaggagcccctcatccccatccaggaggaagagttcatcgattggtggagcaaattctttgcctccataggggagagggaaaagtgcggctcctacctggagaaggattttgacaccctgaaggtctatgacacacagctggagaatgtggaggcctttgagggcctgtctgacttttgtaacaccttcaagctgtaccggggcaagacgcaggaggagacagaagatccatctgtgattggtgaatttaagggcctcttcaaaatttatcccctcccagaagacccagccatccccatgcccccaagacagttccaccagctggccgcccagggaccccaggagtgcttggtccgtatctacattgtccgagcatttggcctgcagcccaaggaccccaatggaaagtgtgatccttacatcaagatctccatagggaagaaatcagtgagtgaccaggataactacatcccctgcacgctggagcccgtatttggaaagatgttcgagctgacctgcactctgcctctggagaaggacctaaagatcactctctatgactatgacctcctctccaaggacgaaaagatcggtgagacggtcgtcgacctggagaacaggctgctgtccaagtttggggctcgctgtggactcccacagacctactgtgtctctggaccgaaccagtggcgggaccagctccgcccctcccagctcctccacctcttctgccagcagcatagagtcaaggcacctgtgtaccggacagaccgtgtaatgtttcaggataaagaatattccattgaagagatagaggctggcaggatcccaaacccacacctgggcccagtggaggagcgtctggctctgcatgtgcttcagcagcagggcctggtcccggagcacgtggagtcacggcccctctacagccccctgcagccagacatcgagcaggggaagctgcagatgtgggtcgacctatttccgaaggccctggggcggcctggacctcccttcaacatcaccccacggagagccagaaggtttttcctgcgttgtattatctggaataccagagatgtgatcctggatgacctgagcctcacgggggagaagatgagcgacatttatgtgaaaggttggatgattggctttgaagaacacaagcaaaagacagacgtgcattatcgttccctgggaggtgaaggcaacttcaactggaggttcattttccccttcgactacctgccagctgagcaagtctgtaccattgccaagaaggatgccttctggaggctggacaagactgagagcaaaatcccagcacgagtggtgttccagatctgggacaatgacaagttctcctttgatgattttctgggctccctgcagctcgatctcaaccgcatgcccaagccagccaagacagccaagaagtgctccttggaccagctggatgatgctttccacccagaatggtttgtgtccctttttgagcagaaaacagtgaagggctggtggccctgtgtagcagaagagggtgagaagaaaatactggcgggcaagctggaaatgaccttggagattgtagcagagagtgagcatgaggagcggcctgctggccagggccgggatgagcccaacatgaaccctaagcttgaggacccaaggcgccccgacacctccttcctgtggtttacctccccatacaagaccatgaagttcatcctgtggcggcgtttccggtgggccatcatcctcttcatcatcctcttcatcctgctgctgttcctggccatcttcatctacgccttcccgaactatgctgccatgaagctggtgaagcccttcagctgaggactctcctgccctgtagaaggggccgtggggtcccctccagcatgggactggcctgcctcctccgcccagctcggcgagctcctccagacctcctaggcctgattgtcctgccagggtgggcagacagacagatggaccggcccacactcccag

SEQ ID NO: 128685 - DNA, 2577 bp, Homo sapiens
  Payload ID: 5184
  Gene Symbol: DKC1
  Gene Name: dyskeratosis congenita 1, dyskerin
  Uniprot ID: O60832
  ENST ID: ENST00000369550
  CDS Start-End: 211-1755
agcaaatcgcattgcgcagacgaccagcgggcgcctcggattccgcccccgggatggccccgcctcctcccgccccgcggcaaggcacgcacagggcagtgcgcgggtgggtgggtcctagcagcgcggcctgacgggaccaaggcggcgggagtctgcggtcgttccctcggctgtggaccgggcggcacgcacgcggtgcagggtaacatggcggatgcggaagtaattattttgccaaagaaacataagaagaaaaaggagcggaagtcattgccagaagaagatgtagccgaaatacaacacgctgaagaatttcttatcaaacctgaatccaaagttgctaagttggacacgtctcagtggccccttttgctaaagaattttgataagctgaatgtaaggacaacacactatacacctcttgcatgtggttcaaatcctctgaagagagagattggggactatatcaggacaggtttcattaatcttgacaagccctctaacccctcttcccatgaggtggtagcctggattcgacggatacttcgggtggagaagacagggcacagtggtacgctggatcccaaggtgactggttgtttaatcgtgtgcatagaacgagccactcgcttggtgaagtcacaacagagtgcaggcaaagagtatgtggggattgtccggctgcacaatgctattgaaggggggacccagctttctagggccctagaaactctgacaggtgccttattccagcgacccccacttattgctgcagtaaagaggcagctccgagtgaggaccatctacgagagcaaaatgattgaatacgatcctgaaagaagattaggaatcttttgggtgagttgtgaggctggcacctacattcggacattatgtgtgcaccttggtttgttattgggagttggtggtcagatgcaggagcttcggagggttcgttctggagtcatgagtgaaaaggaccacatggtgacaatgcatgatgtgcttgatgctcagtggctgtatgataaccacaaggatgagagttacctgcggcgagttgtttaccctttggaaaagctgttgacatctcataaacggctggttatgaaagacagtgcagtaaatgccatctgctatggggccaagattatgcttccaggtgttcttcgatatgaggacggcattgaggtcaatcaggagattgtggttatcaccaccaaaggagaagcaatctgcatggctattgcattaatgaccacagcggtcatctctacctgcgaccatggtatagtagccaagatcaagagagtgatcatggagagagacacttaccctcggaagtggggtttaggtccaaaggcaagtcagaagaagctgatgatcaagcagggccttctggacaagcatgggaagcccacagacagcacacctgccacctggaagcaggagtatgttgactacagtgagtctgccaaaaaagaggtggttgctgaagtggtaaaagccccgcaggtagttgccgaagcagcaaaaactgcgaagcggaagcgagagagtgagagtgaaagtgacgagactcctccagcagctcctcagttgatcaagaaggaaaagaagaagagtaagaaggacaagaaggccaaagctggtctggagagcggggccgagcctggagatggggacagtgataccaccaagaagaagaagaagaagaagaaagcaaaagaggtagaattggtttctgagtagtgaaggccacttgaagctggaggagaaactaaagccttattgagaaaacatgttatagatccttttgttgctgagagagtggaacataggtcctagacagggtgaagagttctggcacattttagctgctactttgagacctcggtgatgttacctggtgtggtcatcccatcttgtcctgttttaaggatatgggtggtgaaagatgaaagaggcagagtttatcccaatgacttctctgtttgagttgggaagcctcaccttcagacccagtaactgtccgcagctgtctgctagtggttgtcttaacatcgtagtcctagtttgcattttttaaatcccctctgtttaaaaggtttgtaaaacaaaaacaaaaaactaagtctgctcagtgaaatgctgtagaaccctaaataagtggtagaagagtgtcactgaattttgtctctgaattcagtataactgagttttgtccatgctggtgtctgggttataggcctgatgggcctggtagttttccatcttgttctggcctagaggtcagtcctttgcacttcctcaaagcttgtgtacagtgctcacctaaatccatctgactacttgttcctgtgccctcttgttttaggcctcgtttacttttaaaaaatgaaattgttcattgctgggagaagaatgttgtaatttttacttattaaagtcaacttgttaagttttttatgtattcctgttgggttttcttgttgatctcatgctagcagagcaaaaattgtaaaatattttgattaaaaatctagggacctttatgtcctatttgaaatgtga

SEQ ID NO: 128686 - DNA, 670 bp, Homo sapiens
  Payload ID: 5184
  Gene Symbol: DKC1
  Gene Name: dyskeratosis congenita 1, dyskerin
  ENST ID: ENST00000412124
  CDS Start-End: 1-229
tgtccggctgcacaatgctattgaaggggggacccagctttctagggccctagaaactctgacaggtgccttattccagcgacccccacttattgctgcagtaaagaggcagctccgagtgaggaccatctacgagagcaaaatgattgaatacgatcctgaaagaagattaggtaaatgccatctgctatggggccaagattatgcttccaggtgttcttcgatatgaggacggcattgaggtcaatcaggagattgtggttatcaccaccaaaggagaagcaatctgcatggctattgcattaatgaccacagcggtcatctctacctgcgaccatggtatagtagccaagatcaagagagtgatcatggagagagacacttaccctcggaagtggggtttaggtccaaaggcaagtcagaagaagctgatgatcaagcagggccttctggacaagcatgggaagcccacagacagcacacctgccacctggaagcaggagtatgttgactacagtgagtctgccaaaaaagaggtggttgctgaagtggtaaaagccccgcaggtagttgccgaagcagcaaaaactgcgaagcggaagcgagagagtgagagtgaaagtgacgagactcctccagcagctcctcagttgatcaagaaggaaaagaa

SEQ ID NO: 128687 - DNA, 686 bp, Homo sapiens
  Payload ID: 5184
  Gene Symbol: DKC1
  Gene Name: dyskeratosis congenita 1, dyskerin
  ENST ID: ENST00000437719
  CDS Start-End: 1-686
gaaaaaggagcggaagtcattgccagaagaagatgtagccgaaatacaacacgctgaagaatttcttatcaaacctgaatccaaagttgctaagttggacacgtctcagtggccccttttgctaaagaattttgataagctgaatgtaaggacaacacactatacacctcttgcatgtggttcaaatcctctgaagagagagattggggactatatcaggacaggtttcattaatcttgacaagccctctaacccctcttcccatgaggtggtagcctggattcgacggatacttcgggtggagaagacagggcacagtggtacgctggatcccaaggtgactggttgtttaatcgtgtgcatagaacgagccactcgcttggtgaagtcacaacagagtgcaggcaaagagtatgtggggattgtccggctgcacaatgctattgaaggggggacccagctttctagggccctagaaactctgacaggtgccttattccagcgacccccacttattgctgcagtaaagaggcagctccgagtgaggaccatctacgagagcaaaatgattgaatacgatcctgaaagaagattaggtgctgcttttcttttgtgtgtgtgtatcttaggaatcttttgggtgagttgtgaggctggcacctacattcggacattatgtgtgcacc

SEQ ID NO: 128688 - DNA, 851 bp, Homo sapiens
  Payload ID: 5184
  Gene Symbol: DKC1
  Gene Name: dyskeratosis congenita 1, dyskerin
  ENST ID: ENST00000413910
  CDS Start-End: 76-851
gggaccaaggcggcgggagtctgcggtcgttccctcggctgtggaccgggcggcacgcacgcggtgcagggtaacatggcggatgcggaagtaattattttgccaaagaaacataagaagaaaaaggagcggaagtcattgccagaagaagatgtagccgaaatacaacacgctgaagaatttcttatcaaacctgaatccaaagttgctaagttggacacgtctcagtggccccttttgctaaagaattttgataagctgaatgtaaggacaacacactatacacctcttgcatgtggttcaaatcctctgaagagagagattggggactatatcaggacaggtttcattaatcttgacaagccctctaacccctcttcccatgaggtggtagcctggattcgacggatacttcgggtggagaagacagggcacagtggtacgctggatcccaaggtgactggttgtttaatcgtgtgcatagaacgagccactcgcttggtgaagtcacaacagagtgcaggcaaagagtatgtggggattgtccggctgcacaatgctattgaaggggggacccagctttctagggccctagaaactctgacaggtgccttattccagcgacccccacttattgctgcagtaaagaggcagctccgagtgaggaccatctacgagagcaaaatgattgaatacgatcctgaaagaagattaggaatcttttgggaccacatggtgacaatgcatgatgtgcttgatgctcagtggctgtatgataaccacaaggatgagagttacctgcggcgagttgtttaccctttggaaaagctgttgacatctcataaacggct

SEQ ID NO: 128689 - DNA, 843 bp, Homo sapiens
  Payload ID: 5184
  Gene Symbol: DKC1
  Gene Name: dyskeratosis congenita 1, dyskerin
  ENST ID: ENST00000426673
  CDS Start-End: 1-623
gaatcttttgggtgagttgtgaggctggcacctacattcggacattatgtgtgcaccttggtttgttattgggagttggtggtcagatgcaggagcttcggagggttcgttctggagtcatgagtgaaaaggaccacatggtgacaatgcatgatgtgcttgatgctcagtggctgtatgataaccacaaggatgagagttacctgcggcgagttgtttaccctttggaaaagctgttgacatctcataaacggctggttatgaaagacagtgcagtaaatgccatctgctatggggccaagattatgcttccaggtgttcttcgatatgaggacggcattgaggtcaatcaggagattgtggttatcaccaccaaaggagaagcaatctgcatggctattgcattaatgaccacagcggtcatctctacctgcgaccatggtatagtagccaagatcaagagagtgatcatggagagagacacttaccctcggaagtggggtttaggtccaaaggcaagtcagaagaagctgatgatcaagcagggccttctggacaagcatgggaagcccacagacagcacacctgccacctggaagcaggagtatgttgactacaggtgaggatgggaaggtagagcccacttgccatctggacgcaggagtacatggacaacagtgagtctgccaaaaaagaggtggttgctgaagtggtaaaagccccgcaggtagttgccgaagcagcaaaaactgcgaagcggaagcgagagagtgagagtgaaagtgacgagactcctccagcagctcctcagttgatcaagaaggaaaagaagaagagtaagaa

SEQ ID NO: 128690 - DNA, 708 bp, Homo sapiens
  Payload ID: 5184
  Gene Symbol: DKC1
  Gene Name: dyskeratosis congenita 1, dyskerin
  ENST ID: ENST00000452771
  CDS Start-End: 1-510
aagaaaaaggagcggaagtcattgccagaagaagatgtagccgaaatacaacacgctgaagaatttcttatcaaacctgaatccaaagttgctaagttggacacgtctcagtggccccttttgctaaagaattttgataagctgaatgtaaggacaacacactatacacctcttgcatgtggttcaaatcctctgaagagagagattggggactatatcaggacaggtttcattaatcttgacaagccctctaacccctcttcccatgaggtggtagcctggattcgacggatacttcgggtggagaagacagggcacagtggtacgctggatcccaaggtgactggttgtttaatcgtgtgcatagaacgagccactcgcttggtgaagtcacaacagagtgcaggccctagaaactctgacaggtgccttattccagcgacccccacttattgctgcagtaaagaggcagctccgagtgaggaccatctacgagagcaaaatgattgaatacgatcctgaaagaagattaggaatcttttgggtgagttgtgaggctggcacctacattcggacattatgtgtgcaccttggtttgttattgggagttggtggtcagatgcaggagcttcggagggttcgttctggagtcatgagtgaaaaggaccacatggtgacaatgcatgatgtgcttgatgctcagtggct

SEQ ID NO: 128691 - DNA, 3079 bp, Homo sapiens
  Payload ID: 5184
  Gene Symbol: DKC1
  Gene Name: dyskeratosis congenita 1, dyskerin
  Uniprot ID: O60832
  ENST ID: ENST00000620277
  CDS Start-End: 225-1487
gtactggccgagccagcaaatcgcattgcgcagacgaccagcgggcgcctcggattccgcccccgggatggccccgcctcctcccgccccgcggcaaggcacgcacagggcagtgcgcgggtgggtgggtcctagcagcgcggcctgacgggaccaaggcggcgggagtctgcggtcgttccctcggctgtggaccgggcggcacgcacgcggtgcagggtaacatggcggatgcggaagtaattattttgccaaagaaacataagaagaaaaaggagcggaagtcattgccagaagaagatgtagccgaaatacaacacgctgaagaatttcttatcaaacctgaatccaaagttgctaagttggacacgtctcagtggccccttttgctaaagaattttgataagctgaatgtaaggacaacacactatacacctcttgcatgtggttcaaatcctctgaagagagagattggggactatatcaggacaggtttcattaatcttgacaagccctctaacccctcttcccatgaggtggtagcctggattcgacggatacttcgggtggagaagacagggcacagtggtacgctggatcccaaggtgactggttgtttaatcgtgtgcatagaacgagccactcgcttggtgaagtcacaacagagtgcaggcaaagagtatgtggggattgtccggctgcacaatgctattgaaggggggacccagctttctagggccctagaaactctgacaggtgccttattccagcgacccccacttattgctgcagtaaagaggcagctccgagtgaggaccatctacgagagcaaaatgattgaatacgatcctgaaagaagattaggaatcttttgggtgagttgtgaggctggcacctacattcggacattatgtgtgcaccttggtttgttattgggagttggtggtcagatgcaggagcttcggagggttcgttctggagtcatgagtgaaaaggaccacatggtgacaatgcatgatgtgcttgatgctcagtggctgtatgataaccacaaggatgagagttacctgcggcgagttgtttaccctttggaaaagctgttgacatctcataaacggctggttatgaaagacagtgcagtaaatgccatctgctatggggccaagattatgcttccaggtgttcttcgatatgaggacggcattgaggtcaatcaggagattgtggttatcaccaccaaaggagaagcaatctgcatggctattgcattaatgaccacagcggtcatctctacctgcgaccatggtatagtagccaagatcaagagagtgatcatggagagagacacttaccctcggaagtggggtttaggtccaaaggcaagtcagaagaagctgatgatcaagcagggccttctggacaagcatgggaagcccacagacagcacacctgccacctggaagcaggagtatgttgactacaggtgagggcaggatgtttcagagccggggtgggtagagacggcacacttgctgccttgatgcaggagtatgtcaacaacaggtgaggatgggaaggtagagcccacttgccatctggacgcaggagtacatggacaacaggtgaggaacaggtgagcatggaggttgtagagcccaggggagggggagtcacttggtttggggcaaacttgctaaatgcaggaccacaggaaccagctcttcagctcccgtgagattttggctgcccaggccagttaggggtgtgggcctgcacggcagacagttatccctttctagtctggctcgtgggactctagagggagtcagtctgcaacagtaagtggtgagttcttctgtccagcgtcagtattttgatggtggctttagacttgccagataacactacataacatcagtactgccctggaaagccattcagtgaatttgacctattgctacctctttttcagtgagtctgccaaaaaagaggtggttgctgaagtggtaaaagccccgcaggtagttgccgaagcagcaaaaactgcgaagcggaagcgagagagtgagagtgaaagtgacgagactcctccagcagctcctcagttgatcaagaaggaaaagaagaagagtaagaaggacaagaaggccaaagctggtctggagagcggggccgagcctggagatggggacagtgataccaccaagaagaagaagaagaagaagaaagcaaaagaggtagaattggtttctgagtagtgaaggccacttgaagctggaggagaaactaaagccttattgagaaaacatgttatagatccttttgttgctgagagagtggaacataggtcctagacagggtgaagagttctggcacattttagctgctactttgagacctcggtgatgttacctggtgtggtcatcccatcttgtcctgttttaaggatatgggtggtgaaagatgaaagaggcagagtttatcccaatgacttctctgtttgagttgggaagcctcaccttcagacccagtaactgtccgcagctgtctgctagtggttgtcttaacatcgtagtcctagtttgcattttttaaatcccctctgtttaaaaggtttgtaaaacaaaaacaaaaaactaagtctgctcagtgaaatgctgtagaaccctaaataagtggtagaagagtgtcactgaattttgtctctgaattcagtataactgagttttgtccatgctggtgtctgggttataggcctgatgggcctggtagttttccatcttgttctggcctagaggtcagtcctttgcacttcctcaaagcttgtgtacagtgctcacctaaatccatctgactacttgttcctgtgccctcttgttttaggcctcgtttacttttaaaaaatgaaattgttcattgctgggagaagaatgttgtaatttttacttattaaagtcaacttgttaagttttttatgtattcctgttgggttttcttgttgatctcatgctagcagagcaaaaattgtaaaatattttgattaaaaatctagggacctttatgtcctatttgaaatgtg

SEQ ID NO: 128692 - DNA, 1897 bp, Homo sapiens
  Payload ID: 5185
  Gene Symbol: DYX1C1
  Gene Name: dyslexia susceptibility 1 candidate 1
  Uniprot ID: Q8WXU2
  ENST ID: ENST00000348518
  CDS Start-End: 273-1535
ttttttttctcaagcagagggtatgggtctacttctttgaacattcgctcagatcgtaaggtaaccccaagaatcggcatcactctctggtctgggcgcctggatagtcacgcatggagtccgcgaggtgctggcgccggagcacgctgggaacgccgggctcccggccggcctgacccggaagggctggcgcatggtaaccccagcttccctagcaaccaagcaggcgcaagaagcaaccagccgcgctatccgctcccgttgctaccggaatgcctcttcaggttagcgattacagctggcagcagacgaagactgcggtctttctgtctctgcccctcaaaggcgtgtgcgtcagagacacggacgtgttctgcacggaaaactatctgaaggtcaactttcctccatttttatttgaggcatttctttatgctcccatagacgatgagagcagcaaagcaaagattgggaatgacaccattgtcttcaccttgtataaaaaagaagcggccatgtgggagaccctttctgtgacgggtgttgacaaagagatgatgcaaagaattagagaaaaatctattttacaagcacaagagagagcaaaagaagctacagaagcaaaagctgcagcaaagcgggaagatcaaaaatacgcactaagtgtcatgatgaagattgaagaagaagagaggaaaaaaatagaagatatgaaagaaaatgaacggataaaagccactaaagcattggaagcctggaaagaatatcaaagaaaagctgaggagcaaaaaaaaattcagagagaagagaaattatgtcaaaaagaaaagcaaattaaagaagaaagaaaaaaaataaaatataagagtcttactagaaatttggcatctagaaatcttgctccaaaagggagaaattcagaaaatatatttactgagaagttaaaggaagacagtattcctgctcctcgctctgttggcagtattaaaatcaactttacccctcgagtattcccaacagctcttcgtgaatcacaagtagcagaagaggaggagtggctacacaaacaagctgaggcacgaagagcaatgaatactgacatagctgaactttgcgatttaaaagaagaagaaaagaacccagaatggttgaaggataaaggaaacaaattgtttgcaacggaaaactatttggcagctatcaatgcatataatttagccataagactaaataataagatgccactattgtatttgaaccgggctgcttgccacctaaaactaaaaaacttacacaaggctattgaagattcttctaaggcactggaattattgatgccacctgttacagacaatgctaatgcaagaatgaaggcacatgtacgacgtggaacagcattctgtcaactagaattgtatgtagaaggcctacaggattatgaagcggcacttaagattgatccatccaacaaaattgtacaaattgatgctgagaagattcggaatgtaattcaaggaacagaactaaaatcttaatgactattagaagtaactaagtattgttataagttttttaaaaacaactggaggcatctttgtacatattatggccagttgtacagaatcgctttctgtttagtactttagttctgttgagggcaaaatattataaatctatagaaaataaactgtttgacttgaatcatttctgaataagtaaatctaaataagaatctattttaattccttatttcttcatattaatacatatgtatacttttttgtgttactgaattaagcttgcccttgtaacaaaatatgttttggtatagttaccaggacacttactgattaatttttaacaaggtagaattttaaaataaaagatttataaataa

SEQ ID NO: 128693 - DNA, 1993 bp, Homo sapiens
  Payload ID: 5185
  Gene Symbol: DYX1C1
  Gene Name: dyslexia susceptibility 1 candidate 1
  Uniprot ID: Q8WXU2
  ENST ID: ENST00000321149
  CDS Start-End: 369-1631
tcctctcctattatgcaaacccacaccatggatccagcagactactctggccccagcatgctgctccttgggatgatgggagaagggggaaacctgtgttttctcttggttttagggtatgggtctacttctttgaacattcgctcagatcgtaaggtaaccccaagaatcggcatcactctctggtctgggcgcctggatagtcacgcatggagtccgcgaggtgctggcgccggagcacgctgggaacgccgggctcccggccggcctgacccggaagggctggcgcatggtaaccccagcttccctagcaaccaagcaggcgcaagaagcaaccagccgcgctatccgctcccgttgctaccggaatgcctcttcaggttagcgattacagctggcagcagacgaagactgcggtctttctgtctctgcccctcaaaggcgtgtgcgtcagagacacggacgtgttctgcacggaaaactatctgaaggtcaactttcctccatttttatttgaggcatttctttatgctcccatagacgatgagagcagcaaagcaaagattgggaatgacaccattgtcttcaccttgtataaaaaagaagcggccatgtgggagaccctttctgtgacgggtgttgacaaagagatgatgcaaagaattagagaaaaatctattttacaagcacaagagagagcaaaagaagctacagaagcaaaagctgcagcaaagcgggaagatcaaaaatacgcactaagtgtcatgatgaagattgaagaagaagagaggaaaaaaatagaagatatgaaagaaaatgaacggataaaagccactaaagcattggaagcctggaaagaatatcaaagaaaagctgaggagcaaaaaaaaattcagagagaagagaaattatgtcaaaaagaaaagcaaattaaagaagaaagaaaaaaaataaaatataagagtcttactagaaatttggcatctagaaatcttgctccaaaagggagaaattcagaaaatatatttactgagaagttaaaggaagacagtattcctgctcctcgctctgttggcagtattaaaatcaactttacccctcgagtattcccaacagctcttcgtgaatcacaagtagcagaagaggaggagtggctacacaaacaagctgaggcacgaagagcaatgaatactgacatagctgaactttgcgatttaaaagaagaagaaaagaacccagaatggttgaaggataaaggaaacaaattgtttgcaacggaaaactatttggcagctatcaatgcatataatttagccataagactaaataataagatgccactattgtatttgaaccgggctgcttgccacctaaaactaaaaaacttacacaaggctattgaagattcttctaaggcactggaattattgatgccacctgttacagacaatgctaatgcaagaatgaaggcacatgtacgacgtggaacagcattctgtcaactagaattgtatgtagaaggcctacaggattatgaagcggcacttaagattgatccatccaacaaaattgtacaaattgatgctgagaagattcggaatgtaattcaaggaacagaactaaaatcttaatgactattagaagtaactaagtattgttataagttttttaaaaacaactggaggcatctttgtacatattatggccagttgtacagaatcgctttctgtttagtactttagttctgttgagggcaaaatattataaatctatagaaaataaactgtttgacttgaatcatttctgaataagtaaatctaaataagaatctattttaattccttatttcttcatattaatacatatgtatacttttttgtgttactgaattaagcttgcccttgtaacaaaatatgttttggtatagttaccaggacacttactgattaatttttaacaaggtagaattttaaaataaaagatttataaataa

SEQ ID NO: 128694 - DNA, 1567 bp, Homo sapiens
  Payload ID: 5185
  Gene Symbol: DYX1C1
  Gene Name: dyslexia susceptibility 1 candidate 1
  Uniprot ID: Q8WXU2
  ENST ID: ENST00000457155
  CDS Start-End: 49-1179
aggcgcaagaagcaaccagccgcgctatccgctcccgttgctaccggaatgcctcttcaggttagcgattacagctggcagcagacgaagactgcggtctttctgtctctgcccctcaaaggcgtgtgcgtcagagacacggacgtgttctgcacggaaaactatctgaaggtcaactttcctccatttttatttgaggcatttctttatgctcccatagacgatgagagcagcaaagcaaagattgggaatgacaccattgtcttcaccttgtataaaaaagaagcggccatgtgggagaccctttctgtgacgggtgttgacaaagagatgatgcaaagaattagagaaaaatctattttacaagcacaagagagagcaaaagaagctacagaagcaaaagctgcagcaaagcgggaagatcaaaaatacgcactaagtgtcatgatgaagattgaagaagaagagaggaaaaaaatagaagatatgaaagaaaatgaacggataaaagccactaaagcattggaagcctggaaagaatatcaaagaaaagctgaggagcaaaaaaaaattcagagagaagagaaattatgtcaaaaagaaaagcaaattaaagaagaaagaaaaaaaataaaatataagagtcttactagaaatttggcatctagaaatcttgctccaaaagggagaaattcagaaaatatatttactgagaagttaaaggaagacagtattcctgctcctcgctctgttggcagtattaaaatcaactttacccctcgagtattcccaacagctcttcgtgaatcacaagtagcagaagaggaggagtggctacacaaacaagctgaggcacgaagagcaatgaatactgacatagctgaactttgcgatttaaaagaagaagaaaagaacccagaatggttgaaggataaaggaaacaaattgtttgcaacggaaaactatttggcagctatcaatgcatataatttagccataagactaaataataagatgccactattgtatttgaaccgggctgcttgccacctaaaactaaaaaacttacacaaggctattgaagattcttctaaggcctacaggattatgaagcggcacttaagattgatccatccaacaaaattgtacaaattgatgctgagaagattcggaatgtaattcaaggaacagaactaaaatcttaatgactattagaagtaactaagtattgttataagttttttaaaaacaactggaggcatctttgtacatattatggccagttgtacagaatcgctttctgtttagtactttagttctgttgagggcaaaatattataaatctatagaaaataaactgtttgacttgaatcatttctgaataagtaaatctaaataagaatctattttaattccttatttcttcatattaatacatatgtatacttttttgtgttactgaattaagcttgcccttgtaacaaaatatgttttggtatagttaccaggacacttactgattaatttttaacaaggtagaattttaaaataaaagatttataaataa

SEQ ID NO: 128695 - DNA, 1445 bp, Homo sapiens
  Payload ID: 5185
  Gene Symbol: DYX1C1
  Gene Name: dyslexia susceptibility 1 candidate 1
  Uniprot ID: Q8WXU2
  ENST ID: ENST00000448430
  CDS Start-End: 20-1165
cgctcccgttgctaccggaatgcctcttcaggttagcgattacagctggcagcagacgaagactgcggtctttctgtctctgcccctcaaaggcgtgtgcgtcagagacacggacgtgttctgcacggaaaactatctgaaggtcaactttcctccatttttatttgaggcatttctttatgctcccatagacgatgagagcagcaaagcaaagattgggaatgacaccattgtcttcaccttgtataaaaaagaagcggccatgtgggagaccctttctgtgacgggtgttgacaaagagatgatgcaaagaattagagaaaaatctattttacaagcacaagagagagcaaaagaagctacagaagcaaaagctgcagcaaagcgggaagatcaaaaatacgcactaagtgtcatgatgaagattgaagaagaagagaggaaaaaaatagaagatatgaaagaaaatgaacggataaaagccactaaagcattggaagcctggaaagaatatcaaagaaaagctgaggagcaaaaaaaaattcagagagaagagaaattatgtcaaaaagaaaagcaaattaaagaagaaagaaaaaaaataaaatataagagtcttactagaaatttggcatctagaaatcttgctccaaaagggagaaattcagaaaatatatttactgagaagttaaaggaagacagtattcctgctcctcgctctgttggcagtattaaaatcaactttacccctcgagtattcccaacagctcttcgtgaatcacaagtagcagaagaggaggagtggctacacaaacaagctgaggcacgaagagcaatgaatactgacatagctgaactttgcgatttaaaagaagaagaaaagaacccagaatggttgaaggataaaggaaacaaattgtttgcaacggaaaactatttggcagctatcaatgcatataatttagccataagactaaataataagatgccactattgtatttgaaccgggctgcttgccacctaaaactaaaaaacttacacaaggctattgaagattcttctaaggaattctgttctcttgagggcattgaatgtcaggcctctgagcccaagctaagccatcatatccctagtgacctgcacgtatacatccagatggcctgaagcaagtgaagaatcacaaaagaagtgaaaatggccggttcctgccttaactgatgacattaccttgtgaaattccttctcctggctcagaacctcccccactgagcaccttgtgacccctgcccctgcccgccacagaataaccccctttgactgtaattttccattacctacccaaatcctataaaacggccccacccctatctcccttcgctgactgtcttttcggactcagcccgcctccacccaggtgattaaaaagctttattgctcacacaaa

SEQ ID NO: 128696 - DNA, 1299 bp, Homo sapiens
  Payload ID: 5185
  Gene Symbol: DYX1C1
  Gene Name: dyslexia susceptibility 1 candidate 1
  ENST ID: ENST00000524160
  CDS Start-End: 13-453
gttgctaccggaatgcctcttcaggttagcgattacagctggcagcagacgaagactgcggtctttctgtctctgcccctcaaaggcgtgtgcgtcagagacacggacgtgttctgcacggaaaactatctgaaggtcaactttcctccatttttatttgaggcatttctttatgctcccatagacgatgagagcagcaaagcaaagattgggaatgacaccattgtcttcaccttgtataaaaaagaagcggccatgtgggagaccctttctgtgacgggtgttgacaaagagatgatgcaaagaattagagaaaaatctattttacaagcacaagagagagcaaaagaagctacagaagcaaaagctgcagcaaagcgggaagatcaaaaatacgcactaagtgtcatgatgaagggagaaattcagaaaatatatttactgagaagttaaaggaagacagtattcctgctcctcgctctgttggcagtattaaaatcaactttacccctcgagtattcccaacagctcttcgtgaatcacaagtagcagaagaggaggagtggctacacaaacaagctgaggcacgaagagcaatgaatactgacatagctgaactttgcgatttaaaagaagaagaaaagaacccagaatggttgaaggataaaggaaacaaattgtttgcaacggaaaactatttggcagctatcaatgcatataatttagccataagactaaataataagatgccactattgtatttgaaccgggctgcttgccacctaaaactaaaaaacttacacaaggctattgaagattcttctaaggcactggaattattgatgccacctgttacagacaatgctaatgcaagaatgaaggcacatgtacgacgtggaacagcattctgtcaactagaattgtatgtagaaggtttacctcaatgtatgatcttccagaaacagttctgaaacctacaggtttcctcagcacaggggaaagctttataggtggaaggtggaggccctgtgacttgcgcagaaaagtaccactgtaatttacttttatgggcacctaagcaggttgcccagggcaacttgtagattttgttgttgttgttgttaatactatctccttcagtcactgagaactcttttttatttttttattttttgagatggagttttgctcttgttgcctaggctggagtgcagtggcgtgatcttggctcactgcaacctccgcctcccggattcaagcgattctcttgcctcagccacccgagtagctgggattata

SEQ ID NO: 128697 - DNA, 672 bp, Homo sapiens
  Payload ID: 5185
  Gene Symbol: DYX1C1
  Gene Name: dyslexia susceptibility 1 candidate 1
  ENST ID: ENST00000522437
  CDS Start-End: 41-256
gaagcaaccagccgcgctatccgctcccgttgctaccggaatgcctcttcaggttagcgattacagctggcagcagacgaagactgcggtctttctgtctctgcccctcaaaggcgtgtgcgtcagagacacggacgtgttctgcacggaaaactatctgaagacgatgagagcagcaaagcaaagattgggaatgacaccattgtcttcaccttgtataaaaaagaagcggccatgtgggagaccctttctgtgacgggtgtgagccccagactacctaaagagttttaaagaatcaggttcctgttttttgacctcttacttcctctgtgactcattgacaaagagatgatgcaaagaattagagaaaaatctattttacaagcacaagagagagcaaaagaagctacagaagcaaaagctgcagcaaagcgggaagatcaaaaatacgcactaagtgtcatgatgaagattgaagaagaagagaggaaaaaaatagaagatatgaaagaaaatgaacggataaaagccactaaagcattggaagcctggaaagaatatcaaagaaaagctgaggagcaaaaaaaaattcagagagaagagaaattatgtcaaaaagaaaagcaaattaaagaagaaagaaaaaaaataaaatataagagtcttactaga

SEQ ID NO: 128698 - DNA, 16742 bp, Homo sapiens
  Payload ID: 5186
  Gene Symbol: DST
  Gene Name: dystonin
  Uniprot ID: Q03001
  ENST ID: ENST00000244364
  CDS Start-End: 209-15724
atggctttaggctagattcttttgaatagttatcagcatattatttgctgtgtgttgcatatgcatgttgaagcatatttaaggagccactaaaagctgtaatattcagctgccacttttcaccgttagaagtagagctttttccagacctcctaccttttagtctactttgaaaggtgaaagaaagaacatcgtttcaggaataaaaatgcacagtagtagttatagttaccgtagcagtgattctgtgtttagtaacactaccagcactcgaaccagtcttgattcaaatgaaaatcttctcttggttcattgtggtccaacactgatcaactcttgcattagcttcggcagtgaatcctttgatggacacaggttagaaatgttgcaacagattgccaacagagttcagagggacagtgtcatctgtgaagacaaactgattcttgctggaaatgctcttcagtctgattctaaaagattagaatcaggagtgcagtttcagaatgaagcagaaattgctgggtatatacttgaatgtgagaaccttttacgccagcatgtaattgatgtacagattcttattgatggaaaatactaccaggcagatcaattggtacagagggttgcaaaactgcgtgacgaaattatggccttaaggaacgaatgttcttctgtgtacagcaaaggacgcatactgacaacagaacagacaaagctcatgatatcaggaatcactcaaagtttaaactcaggatttgcacagaccttacaccctagtctgacctcagggctgacccagagtttaacaccttccctaacctcttctagtatgacttctggcctgtcatcagggatgacttcccgcctgactccatctgtcactccagcttatacacctggtttcccatcaggattagttccaaatttcagttcaggagtagagccaaattcattgcaaactttgaagttgatgcagatccgaaaaccccttctaaagtcttctttgctggatcaaaatttaacagaagaagaaatcaatatgaaatttgttcaggatcttttgaattgggttgatgagatgcaggtacaactggaccgcactgagtggggctcagatttgccaagtgttgaaagccatttagaaaatcataaaaatgttcatagagctattgaagaatttgaatctagtctcaaagaagctaaaatcagtgagattcaaatgacagcacctcttaaactgacttatgcagaaaagttgcacagattagagagtcagtatgcaaaactcttgaatacatccaggaatcaagaacggcaccttgatacactccataattttgtaagtcgtgcgactaatgaacttatttggttgaatgaaaaagaagaggaggaagttgcttatgactggagtgagagaaacaccaacatagctaggaaaaaagattatcatgctgaattaatgagagaacttgatcaaaaggaagaaaatattaaatcagttcaggagatagcagagcagctacttctagaaaatcatccagcccggttaactattgaggcctacagagcggcaatgcagacgcagtggagctggatcttacagctctgccagtgtgtggagcagcacataaaggagaacacagcgtatttcgagtttttcaatgatgccaaagaagctactgattacttaaggaatctaaaagatgccattcagcggaagtacagctgtgatagatcaagcagcattcacaagctagaagaccttgttcaggaatcaatggaagagaaagaagaacttctgcagtacaaaagcactatagcaaacctaatgggaaaagcaaaaacaataattcaactgaagccaaggaattctgactgtccactcaaaacttctattccgatcaaagctatctgtgactacagacaaattgagataaccatttacaaagacgatgaatgtgttttggcgaataactctcatcgtgctaaatggaaggtcattagtcctactgggaatgaggctatggtcccatctgtgtgcttcaccgttcctccaccaaacaaagaagcggtggaccttgccaacagaattgagcaacagtatcagaatgtcctgactctttggcatgagtctcacataaacatgaagagtgtagtatcctggcattatctcatcaatgaaattgatagaattcgagctagcaatgtggcttcaataaagacaatgctacctggtgaacatcagcaagttctaagtaatctacaatctcgttttgaagattttctggaagatagccaggaatcccaagtcttttcaggctcagatataacacaactggaaaaggaggttaatgtatgtaagcagtattatcaagaacttcttaaatctgcagaaagagaggagcaagaggaatcagtttataatctctacatctctgaagttcgaaacattagacttcggttagagaactgtgaagatcggctgattagacagattcgaactcccctggaaagagatgatttgcatgaaagtgtgttcagaatcacagaacaggagaaactaaagaaagagctggaacgacttaaagatgatttgggaacaatcacaaataagtgtgaggagtttttcagtcaagcagcagcctcttcatcagtccctaccctacgatcagagcttaatgtggtccttcagaacatgaaccaagtctattctatgtcttccacttacatagataagttgaaaactgttaacttggtgttaaaaaacactcaagctgcagaagccctcgtaaaactctatgaaactaaactgtgtgaagaagaagcagttatagctgacaagaataatattgagaatctaataagtactttaaagcaatggagatctgaagtagatgaaaagagacaggtattccatgccttagaggatgagttgcagaaagctaaagccatcagtgatgaaatgtttaaaacgtataaagaacgggaccttgattttgactggcacaaagaaaaagcagatcaattagttgaaaggtggcaaaatgttcatgtgcagattgacaacaggttacgggacttagagggcattggcaaatcactgaagtactacagagacacttaccatcctttagatgattggatccagcaggttgaaactactcagagaaagattcaggaaaatcagcctgaaaatagtaaaaccctagccacacagttgaatcaacagaagatgctggtgtccgaaatagaaatgaaacagagcaaaatggacgagtgtcaaaaatatgcagaacagtactcagctacagtgaaggactatgaattacaaacaatgacctaccgggccatggtagattcacaacaaaaatctccagtgaaacgccgaagaatgcagagttcagcagatctcattattcaagagttcatggacctaaggactcgatatactgccctggtcactctcatgacacaatatattaaatttgctggtgattcattgaagaggctggaagaggaggagaagtcactggaagaagaaaagaaagaacatgttgaaaaagccaaagaattgcaaaaatgggtatcaaatatcagcaagacattgaaagatgcagagaaggctggaaaacctcccttctctaagcaaaagatttccagtgaggaaatatcaaccaagaaggaacaattatcggaagcacttcaaactatacagctttttttggcaaaacatggagacaaaatgacagatgaagaaagaaatgaattggaaaaacaagtgaaaactcttcaggaaagttataatttattattcagtgaatctctgaaacagctacaagaatcacaaacctcaggagatgtaaaggtagaggagaagattgtagcagagcgtcagcaggagtataaagagaaactccaagggatatgtgatcttcttacccaaactgaaaaccgcctaattggtcaccaagaagccttcatgattggagatggcacagttgagttaaagaaatatcagtccaagcaagaggaattacagaaagatatgcaaggaagtgcacaggcattggctgaagtagtgaaaaacacagagaacttcttaaaagagaatggtgaaaagctgtcacaggaagataaggctttgattgaacagaaacttaatgaagctaagataaagtgtgaacagcttaatttaaaagcagaacagtctaaaaaggagctggataaagttgtgacaacagcaatcaaggaagaaactgaaaaggtagcagcagtgaagcagctggaagagagcaaaaccaaaatagaaaaccttttggactggttgtcaaatgttgacaaagactcagaaagggcagggacaaaacacaaacaggtaatcgaacagaacgggacccattttcaagaaggtgatggcaagtcagcaattggagaagaggatgaagttaatggtaacctgttggagactgatgttgatgggcaagttggaaccactcaggagaatctgaatcagcaatatcagaaagttaaggcccaacacgagaagatcatctctcagcaccaagcagtgatcatagccactcagtctgcacaagtgttgcttgagaaacagggtcagtatctctctcctgaagaaaaagagaaactgcaaaagaacatgaaggaactgaaagtgcattatgaaactgcactggctgagtcagagaagaaaatgaagttaactcactctctgcaggaagaattagaaaagtttgatgctgactataccgagtttgagcactggctacagcagtcagaacaagaacttgaaaacctggaggcaggtgcagatgacatcaatggtttaatgaccaaattgaagaggcagaagagtttctcagaagacgttatttctcacaaaggtgacttgagatacatcacaatttctggaaacagagtgttggaagctgccaaatcttgcagcaagagagacggtggcaaggttgatacttctgcaacccacagagaagtgcagcgcaagttggatcatgctactgatcggttcaggtctctctactctaagtgcaatgttcttggaaataatcttaaagatctggtggataaatatcaacactatgaagatgcttcatgtggacttcttgctggactccaggcctgtgaggccacagcgagcaaacacttatctgaacctattgcggtggaccccaaaaatcttcaaaggcaattagaagagaccaaggctttgcaaggacagatatcaagtcagcaggttgctgtagagaaactgaagaaaacggctgaagtgcttttagatgccaggggatctttacttccagccaagaatgatatccagaaaacacttgatgacattgttgggagatatgaggatctgtccaagtctgttaatgaacgaaatgaaaaactccagataaccttgacccgttcactgagtgtgcaggatggcttggatgaaatgctggactggatgggaaatgtggaaagttctctgaaagaacaaggtcaagtgcctttaaactctactgctcttcaggatattatcagtaaaaacattatgttggaacaggatattgcaggtcgtcagagcagtataaatgccatgaatgaaaaagtgaagaaatttatggaaacaacagatccatccactgcatcctcactgcaagccaaaatgaaagacttgtctgctcggttttcagaagcaagtcataaacacaaagaaactcttgccaaaatggaggagctaaaaaccaaagtagaactgtttgagaacctctcagaaaagctccagacatttttagaaacaaaaactcaggctcttactgaagtagatgtgccaggaaaagatgttactgaattgtctcagtatatgcaggaatcaacttctgaatttttagaacacaagaaacatcttgaagttttgcatagtctcttgaaggagatatccagccatggcttaccaagtgataaggctttggtccttgaaaaaacaaataatttgtcaaagaaattcaaggaaatggaggataccatcaaagaaaaaaaagaagctgtaacttcttgtcaagaacagttggatgctttccaagttcttgttaaatcattgaagtcatggataaaagaaacaacaaaaaaagttcccattgtacagccttcttttggtgcagaggatttaggaaaatctttggaagacactaagaaattacaagaaaagtggagtttaaaaacaccagagattcagaaagtaaacaacagtgggatctcactatgtaacttaataagtgctgtgaccacccctgcaaaggcaatagcagcagttaaatcaggtggagcagtattaaatggtgaaggaacagccacaaatactgaggaattttgggcaaataaaggtttaacatccattaaaaaggacatgactgacataagtcatggttatgaagatcttggcctcttactcaaggacaaaatagcggaactgaacactaaactctccaaattgcaaaaggctcaggaagaatcaagtgcaatgatgcagtggttacagaaaatgaacaaaactgcaacaaaatggcagcagacacctgcacctacagatactgaagctgtgaagactcaagttgagcagaataagtcgtttgaggcagaactgaagcagaatgtaaacaaagtacaggagttgaaagacaaattgacagagctgttggaggagaacccagatactcctgaggcccccagatggaaacagatgttgacagaaatagattctaagtggcaagaactcaatcaattaacaattgatagacaacaaaaactggaagaatcctccaataatctaacccagttccagactgtagaggcccaattgaaacagtggcttgtggaaaaagaacttatggtcagtgttcttgggcccttgtcaattgacccaaatatgctaaacacacaaaggcagcaggtgcagattttgctgcaagaattcgccactcggaaacctcaatatgaacagctgacagcagctggtcagggcattctgagcaggcctggagaagacccttctttacgtgggattgtgaaagagcaactggcagctgtgacccaaaaatgggatagcctaacagggcaattgagtgacagatgtgactggattgaccaagccattgttaaaagcacacagtatcaaagcctgctgagaagcctttctgataaactgagtgacttggataataaactcagcagcagtctggctgtgagcacgcaccctgatgctatgaaccaacagttggaaacagcccaaaaaatgaagcaggagatacagcaggaaaagaagcagataaaagtggcccaggcactctgtgaggatttgtcagcactggttaaagaagagtacttgaaagcagaacttagtaggcaactagaaggcatcttaaaatcatttaaggatgttgaacagaaagcagagaatcatgtccagcaccttcagtcggcctgtgcaagctctcatcaatttcagcaaatgtctagagattttcaggcttggctggatacaaagaaagaagagcaaaacaaatctcatccaatatctgccaaactcgatgtcttggagtcattaattaaagatcataaagactttagtaaaactttgaccgctcagtctcatatgtatgaaaaaaccattgcagaaggtgaaaatctgttattaaaaacacaagggtctgagaaggcagccttacagttacagcttaatacaattaaaaccaattgggatacatttaataagcaggtgaaagaaagagaaaacaagttaaaagagtcattggaaaaagcccttaagtataaagagcaagtagagactctctggccatggatagacaaatgccaaaacaacctggaggaaataaaattttgcttggatcctgctgaaggagagaattctattgccaagttaaagtctctgcagaaggaaatggaccaacactttggtatggtagaattactgaacaacacagccaatagcttgctcagtgtctgtgagatagataaagaagttgttacagatgagaataagtcactgatccagaaggtggacatggtcactgaacaacttcacagtaagaaattctgtctggagaacatgactcagaagtttaaagaatttcaagaagtttccaaagaatctaaaaggcagcttcagtgtgcaaaggagcagctagatatccatgattcgctgggatcccaggcttacagtaacaaatacctgaccatgttgcaaactcagcagaaatcacttcaggccttgaagcatcaggtagatttggctaaaagacttgcacaggaccttgtggtagaggcctcagactcaaagggaacctctgatgttttattacaagtggaaaccatagctcaagagcatagtacactaagtcagcaggttgatgaaaagtgttctttcttagaaaccaagcttcagggcattgggcatttccagaataccattcgagaaatgttttctcagttcgcagagtttgatgatgaactggatagcatggctccagtggggagagatgcagaaacattgcaaaagcaaaaggaaactataaaagcctttctaaagaaactagaagccctcatggcaagcaatgacaatgccaataaaacctgcaagatgatgttagccacagaagaaacctctcctgaccttgttggaatcaaaagggacttggaggccttaagcaaacaatgcaacaagttactggaccgagcccaagccagagaagagcaggttgaagggacaattaagcgccttgaagaattttacagcaaattgaaagaattttctattctgctccagaaagccgaagaacatgaagagtcacaaggtcctgttggtatggaaacggagacaattaatcagcagcttaacatgttcaaggtattccagaaagaagagattgaacccttgcaaggtaaacagcaagatgtaaactggttaggtcaaggccttattcagagtgctgccaaaagcactagcactcagggcttggagcatgacctggatgatgtcaatgcacggtggaagactctcaataagaaggtggctcagcgagcagcccagctgcaggaggccttgctgcactgtgggaggttccaggatgccctggagtccctgctcagctggatggtggacactgaggagcttgtggccaatcagaagcccccgtcggctgagttcaaagtggtaaaggcccagatacaagaacaaaagcttctccagagattgttggatgaccgaaaatctacggtggaggtaatcaaacgagaaggagaaaaaattgctacaacagcagagcccgcagataaagtgaagattttgaaacagctcagtctcttggatagcagatgggaggcattgcttaataaagctgaaacaaggaatcgtcagttggaaggtatctcggtggtagcacagcaatttcatgaaaccttagaaccactgaacgagtggcttacaaccatagaaaagaggctggtgaattgtgaacccataggaacccaagcatctaaacttgaggaacaaattgcacagcacaaagccttagaagatgacatcatcaatcacaataaacatttacaccaggctgttagcattggccagtccttaaaggttttgagctccagggaggataaagatatggtgcagagtaaattagacttctctcaagtatggtacattgagattcaagagaaaagtcacagcaggtctgagctcctccagcaggccttatgtaatgctaagatttttggggaagatgaagttgaactgatgaactggctgaatgaagtgcatgacaaactgagcaagctctcagtccaggattacagcactgaggggctatggaagcagcagtctgaacttcgggttctgcaagaggacatcttactcaggaaacaaaatgtagatcaggctttactaaatggtttagaactacttaaacaaaccacaggtgatgaagttttaataattcaagataaattggaagccattaaagcaaggtacaaagacattactaaactgagcactgatgtggccaagactctggaacaggcgctgcagcttgcaaggcggctgcactccacacacgaagagctgtgtacctggctggacaaagtggaggtggaattactttcatatgaaactcaggttctgaaaggagaagaagcaagtcaagcacaaatgagaccaaaggaactgaaaaaggaagctaagaacaacaaagccttactggactcccttaatgaagtgagcagtgctttgctggaactggtaccatggagggcaagagaaggacttgagaaaatggtagctgaggacaatgagcgctaccgattagtgagcgacaccatcactcagaaggtggaggagatcgatgcagccattctgcgatcacagcagtttgaccaagcagctgatgctgagttatcctggattactgaaacagaaaaaaaattgatgtctctgggtgacatcaggcttgagcaagaccagacttctgctcagcttcaagttcaaaagacattcaccatggagattttgagacacaaggatattattgatgaccttgttaaatctgggcataaaatcatgaccgcatgcagtgaagaggaaaagcaatcaatgaagaaaaaactggacaaggtactgaagaactatgataccatctgccagattaattcagaaaggtatctgcagctggaacgggcacagtccctggttaaccaattctgggaaacatatgaagaactttggccatggctgacagaaacacaatcaatcatctctcagcttcccgccccagcccttgaatatgaaactctaaggcagcagcaggaagaacatcggcaactgcgtgagttgatagctgaacacaagcctcatatagataagatgaacaaaactgggccacagttactggaattgagccctggggaaggcttttctatccaagagaagtatgtggcagccgacaccctttacagtcaaattaaagaagatgtcaaaaagcgtgctgtggcactggatgaagccatttctcaatcaactcagttccatgacaagatagatcagatccttgagagcctggaacgcatcgtggaacgtctgaggcagccaccctctatctctgcagaggttgagaagatcaaggaacagatcagtgaaaataagaatgtgtcagtagacatggaaaagctacagccgttgtatgaaactcttaaacagaggggagaggaaatgattgctagatctggggggactgataaagacatatctgccaaagctgttcaggataagcttgaccaaatggttttcatttgggagaacatacacacactggtggaagagagggaagccaaactactggatgtgatggagctagcagaaaagttctggtgtgatcacatgtcattgatagttaccattaaagatactcaagatttcatccgggacctggaagatcctggaattgatccttcagtagtaaaacaacagcaagaagcagcagagaccataagggaagaaatagatggactacaggaggagctggatatagttattaacctaggttctgaactcattgcggcatgtggggagcctgataaacccattgtcaagaagagtatagatgagttaaattcagcatgggattctctaaataaagcttggaaagaccggattgacaaacttgaggaggcaatgcaggctgccgttcagtaccaggatggactgcaggcggtatttgactgggtagatattgcaggtggtaaattagcttcaatgtctccaattggaacagatctcgaaactgtcaagcagcagattgaagagctaaagcaatttaagtctgaggcctatcaacagcagatagaaatggaaagactgaatcatcaagcagagcttttgctaaagaaagtaacagaagagagtgacaaacacactgttcaagacccattaatggaactgaaattgatatgggatagcctggaggagagaatcatcaacagacagcataaactggagggtgctctattagccttgggtcagttccaacatgccctggatgagctcctggcatggctgacacacaccgagggcttgctaagtgagcagaaacctgttggaggagaccctaaagccattgaaattgaacttgccaagcatcatgtgctccaaaatgatgtattagcccatcagtccacagtggaagccgttaataaagcaggaaatgatctaattgaatcaagtgcaggagaagaagcaagcaaccttcagaacaagctagaggttttaaatcaacgctggcaaaatgttttggaaaaaacagaacaaaggaagcagcagctggatggtgccttgcgccaggccaaagggttccatggcgaaattgaggatttgcagcagtggctgactgacacggagcgtcatctgttggcatctaaaccgctgggaggtttaccggaaacagccaaggagcagcttaatgtccatatggaagtctgtgctgcctttgaagctaaagaagaaacatataagagtctgatgcagaaaggccagcagatgcttgcaagatgcccaaaatctgcagagacaaatattgaccaagacataaataacttgaaagaaaaatgggaatcggtggaaaccaaactcaatgaaaggaaaactaaactggaagaggctctcaacttggcaatggagttccacaattctctccaagacttcatcaactggcttactcaggctgaacagaccctaaatgtagcttctcggccaagtctcatcttggacacagtcttatttcaaattgacgaacacaaggtttttgccaatgaagtaaattctcatcgtgagcagataatagagctggacaaaactggaacccacctaaaatattttagtcagaaacaagatgttgttctaatcaagaatctacttatcagtgtacaaagtcgatgggaaaaagtggttcaacggttggtagagagaggaagatctttggatgatgcaaggaagagagccaagcagttccatgaagcttggagtaaacttatggagtggctagaagagtcagaaaagtctttggattctgaactggaaatcgcaaatgatccagacaaaataaaaacacaacttgcacaacataaggagtttcagaaatcactcggagccaagcattctgtctacgacaccaccaacaggactggacgttctctgaaggagaaaacctccctggctgatgacaacctgaaactggatgacatgctgagtgaactcagagacaaatgggataccatatgtggaaaatctgtggaaagacaaaacaaattggaggaagccctgttattttctggacaattcacagatgccctacaggctctcattgattggttatatagagttgaaccccagctggcagaagaccagcctgttcatggagacattgatttggtgatgaatctgatcgataatcacaaggccttccaaaaagagttggggaagaggaccagcagtgtgcaggccctgaagcgctcagcccgagaactcatagaaggcagtcgggatgactcctcctgggtcaaggtccagatgcaggaattaagcacacgctgggagaccgtgtgtgcactttctatatcaaagcaaacacggttagaagcagccctgcgtcaggcagaggaattccactcggtggtacatgccctcttggagtggctggctgaggcggagcaaaccctgcgtttccatggtgtcctcccagatgatgaggatgctctccggactctcattgatcagcataaagaattcatgaagaaactggaagaaaagagagctgaactaaataaagccaccactatgggcgacaccgttttggctatctgccaccccgactccatcactaccattaagcactggataacaatcatccgggcgaggtttgaggaggtgctggcctgggcaaagcaacatcagcagagattagcaagtgctctggctgggcttattgccaaacaggaattgttggaagctttgctggcttggttgcaatgggctgaaactacacttactgataaggataaagaagtcatcccccaggagatcgaagaggtgaaagcactcattgcagaacaccagaccttcatggaggaaatgaccagaaaacagcctgatgttgataaagtaacgaagacctataagaggagagctgctgatccttcctcattacaatcccatattccagtcttggataagggacgagcaggaagaaaacgctttccagcatcaagcttgtatccctctgggtcacagacacaaattgaaaccaaaaatcctagggtaaacttactggtgagcaaatggcagcaagtctggctcctggcgttggaaagaaggaggaaactcaatgatgccttggacagactagaggagctgagggaatttgctaactttgattttgatatctggcgcaaaaaatacatgcgatggatgaatcacaagaaatctcgagtgatggacttcttcaggagaattgataaagaccaggatgggaaaataacgcggcaggaatttattgatggaattctttcctcaaagtttccaaccagtcgcttggagatgagcgcagttgcagacatctttgacagagatggcgatggatatattgactactatgaatttgtagcagcccttcacccaaataaagatgcatataaacctatcacagatgccgacaaaatcgaagatgaggtgacaaggcaggtagctaagtgtaaatgtgcaaagcgatttcaagttgagcagattggtgataataaatacaggttcttcctgggaaatcagtttggagactcccagcaactgcgactggtccggatcctgcggagtactgtgatggttcgtgttggaggtggatggatggcacttgatgagttcttagtgaaaaatgatccttgcagggccaaaggaaggacaaacatggaactgcgtgagaagttcattttagcagatggtgccagccagggtatggctgctttccgaccccgaggccgaagatcccggccatcatcacgaggcgcttcacccaacagatccacttctgtgtccagtcaggctgcgcaggcggcctccccacaggtccctgccaccaccacacccaagattctccatcctttaacacgcaattatggtaaaccatggttgacaaacagcaaaatgtcaactccttgtaaagcagcagagtgctcagactttcccgtgccatctgcagagggaacgccaatacaaggaagcaagcttcgacttccaggatatttatcagggaaaggcttccactctggggaggacagtggcttgataacaactgcagctgccagagtccgaacacagtttgctgattccaagaagactcccagccgaccaggaagtcgagctggaagcaaagctggcagcagggccagcagccgccgaggcagtgatgcatcagactttgacatttcagaaatccagtccgtgtgctcagatgtggaaactgtcccccagacacacagacctacaccccgagcaggttctcggccatccacagcgaagccttcaaaaatccccacgccccagaggaaatcacctgccagcaaattggacaagtcctcaaagagatagtgcaattggttctaccaaggcccttccttgagcatttattatttaagtttgaacgatgtaaaatatggtgtagaaattcttgtgaaatattgcaagaggcgagtttaaaattctgcagatggccttatttgtgtatttgtctttttattttatctgtataattttttttgtcagatattctggggttaaagtcacatcatatgtgaggaggaaaagtttaacatgaactaacatttctgcactgtaacgtgccgggcacacactaaactcagttactgtacctacaggtaagtctacatcctctctgacagccacagcactacatcaatccctgacgttagggatacctcatgacattttcctgtttttatggaaactctgagaagctgaatgatacatgcaggggatattttttgagatgatttaaatgtaaaccaaaagatggaagacaaaaagacaaacacacccacacgcagtctttgcagtatctgacagagaactcacaggaagttacttcaagcacttgccagtactatgatattcaagtaccttgcagcatttctctgccattgctttcaatgaggccagaggcatcctggatattagacctattatactgtaagaatataagtataaagtgcgttcatatacatgtgaggttttcttttgcttgagtggacagtagcacctgtatcattgaactcattttgtatcagagcaattttgcttgcagaaagctatgaaataaaacacgtcccttaactgcattgctatggaattaattttttttccccagggaaaactagtgtatttttttatgagcaatatcaatttggagtgaccaaaagatacttaaaaatgggtttattttgatttctcatctgaaataatcatgttctggtattatatctatctatatttaataaatatatacattttaatttattatgtgtactcacatactatagaaagatattagtatgcatttaataaaacatattcacttgaatatatggaa

SEQ ID NO: 128699 - DNA, 17756 bp, Homo sapiens
  Payload ID: 5186
  Gene Symbol: DST
  Gene Name: dystonin
  ENST ID: ENST00000312431
  CDS Start-End: 127-16740
attgttgggccagtcatttgtgagctggtggccggaccacaggccacacacttcttccgtgcaaatcttcatgtattgaaactgcctgtgtattgtttttacgattggagacttggccaagaaaagatgagttccgggaacgcgtcctatcgctgctctatgtcttcctctgcggatttttccgatgaggatgatttcagccagaaatctggctccgcatccccagctccgggagacaccttaccctggaatttgcctaaacatgagagatcgaaaagaaagattcaagggggctcagtgctggaccctgccgagagggcagtgcttcggatagcagatgaacgggacaaagttcagaagaaaacatttacaaaatggataaatcagcatctcatgaaggttcgaaaacatgtgaatgatctctatgaagacttaagggatggacacaatttgatttctcttttagaggttctttcaggagataccttgcccagagaaaaaggtcggatgcgttttcacagactacagaatgtacaaattgcacttgactatttgaaaagacgccaggtgaaattagtgaatattagaaatgatgacataacagatggaaatcccaaattgactttgggattaatctggacaataattttgcactttcagatatctgatatccatgttactggagagtcagaggatatgtctgcaaaagagagattgctactctggacgcagcaggcaacagagggttatgctggaattcggtgtgaaaatttcactacctgctggagagatggaaaattatttaatgccatcattcataaatacaggccggacctgatagatatgaatactgttgctgttcaaagcaaccttgcaaatttagagcatgctttttacgtagcagaaaaaattggtgttataagacttctggaccctgaagatgtcgatgtctcctcacctgatgaaaaatcagtaataacttacgtgtcatctctctatgatgcatttcctaaagtccctgaaggtggggaaggcattggtgcaaatgatgttgaagtcaaatggattgaataccagaatatggtgaactacctcatccaatggattagacaccatgtgaccacaatgtctgagagaacatttcctaataatcctgtagaactgaaggcactttataatcagtatttacagtttaaagaaacagaaattccaccaaaggagacagaaaaatcaaaaattaaacgtctatataaattattagagatttggatagaatttggacgcatcaagctccttcaaggttatcatccaaatgacatagaaaaagagtgggggaaactcattattgccatgctagagagagagaaggcccttcgtccagaagtagaaaggttagaaatgttgcaacagattgccaacagagttcagagggacagtgtcatctgtgaagacaaactgattcttgctggaaatgctcttcagtctgattctaaaagattagaatcaggagtgcagtttcagaatgaagcagaaattgctgggtatatacttgaatgtgagaaccttttacgccagcatgtaattgatgtacagattcttattgatggaaaatactaccaggcagatcaattggtacagagggttgcaaaactgcgtgacgaaattatggccttaaggaacgaatgttcttctgtgtacagcaaaggacgcatactgacaacagaacagacaaagctcatgatatcaggaatcactcaaagtttaaactcaggatttgcacagaccttacaccctagtctgacctcagggctgacccagagtttaacaccttccctaacctcttctagtatgacttctggcctgtcatcagggatgacttcccgcctgactccatctgtcactccagcttatacacctggtttcccatcaggattagttccaaatttcagttcaggagtagagccaaattcattgcaaactttgaagttgatgcagatccgaaaaccccttctaaagtcttctttgctggatcaaaatttaacagaagaagaaatcaatatgaaatttgttcaggatcttttgaattgggttgatgagatgcaggtacaactggaccgcactgagtggggctcagatttgccaagtgttgaaagccatttagaaaatcataaaaatgttcatagagctattgaagaatttgaatctagtctcaaagaagctaaaatcagtgagattcaaatgacagcacctcttaaactgacttatgcagaaaagttgcacagattagagagtcagtatgcaaaactcttgaatacatccaggaatcaagaacggcaccttgatacactccataattttgtaagtcgtgcgactaatgaacttatttggttgaatgaaaaagaagaggaggaagttgcttatgactggagtgagagaaacaccaacatagctaggaaaaaagattatcatgctgaattaatgagagaacttgatcaaaaggaagaaaatattaaatcagttcaggagatagcagagcagctacttctagaaaatcatccagcccggttaactattgaggcctacagagcggcaatgcagacgcagtggagctggatcttacagctctgccagtgtgtggagcagcacataaaggagaacacagcgtatttcgagtttttcaatgatgccaaagaagctactgattacttaaggaatctaaaagatgccattcagcggaagtacagctgtgatagatcaagcagcattcacaagctagaagaccttgttcaggaatcaatggaagagaaagaagaacttctgcagtacaaaagcactatagcaaacctaatgggaaaagcaaaaacaataattcaactgaagccaaggaattctgactgtccactcaaaacttctattccgatcaaagctatctgtgactacagacaaattgagataaccatttacaaagacgatgaatgtgttttggcgaataactctcatcgtgctaaatggaaggtcattagtcctactgggaatgaggctatggtcccatctgtgtgcttcaccgttcctccaccaaacaaagaagcggtggaccttgccaacagaattgagcaacagtatcagaatgtcctgactctttggcatgagtctcacataaacatgaagagtgtagtatcctggcattatctcatcaatgaaattgatagaattcgagctagcaatgtggcttcaataaagacaatgctacctggtgaacatcagcaagttctaagtaatctacaatctcgttttgaagattttctggaagatagccaggaatcccaagtcttttcaggctcagatataacacaactggaaaaggaggttaatgtatgtaagcagtattatcaagaacttcttaaatctgcagaaagagaggagcaagaggaatcagtttataatctctacatctctgaagttcgaaacattagacttcggttagagaactgtgaagatcggctgattagacagattcgaactcccctggaaagagatgatttgcatgaaagtgtgttcagaatcacagaacaggagaaactaaagaaagagctggaacgacttaaagatgatttgggaacaatcacaaataagtgtgaggagtttttcagtcaagcagcagcctcttcatcagtccctaccctacgatcagagcttaatgtggtccttcagaacatgaaccaagtctattctatgtcttccacttacatagataagttgaaaactgttaacttggtgttaaaaaacactcaagctgcagaagccctcgtaaaactctatgaaactaaactgtgtgaagaagaagcagttatagctgacaagaataatattgagaatctaataagtactttaaagcaatggagatctgaagtagatgaaaagagacaggtattccatgccttagaggatgagttgcagaaagctaaagccatcagtgatgaaatgtttaaaacgtataaagaacgggaccttgattttgactggcacaaagaaaaagcagatcaattagttgaaaggtggcaaaatgttcatgtgcagattgacaacaggttacgggacttagagggcattggcaaatcactgaagtactacagagacacttaccatcctttagatgattggatccagcaggttgaaactactcagagaaagattcaggaaaatcagcctgaaaatagtaaaaccctagccacacagttgaatcaacagaagatgctggtgtccgaaatagaaatgaaacagagcaaaatggacgagtgtcaaaaatatgcagaacagtactcagctacagtgaaggactatgaattacaaacaatgacctaccgggccatggtagattcacaacaaaaatctccagtgaaacgccgaagaatgcagagttcagcagatctcattattcaagagttcatggacctaaggactcgatatactgccctggtcactctcatgacacaatatattaaatttgctggtgattcattgaagaggctggaagaggaggagaagtcactggaagaagaaaagaaagaacatgttgaaaaagccaaagaattgcaaaaatgggtatcaaatatcagcaagacattgaaagatgcagagaaggctggaaaacctcccttctctaagcaaaagatttccagtgaggaaatatcaaccaagaaggaacaattatcggaagcacttcaaactatacagctttttttggcaaaacatggagacaaaatgacagatgaagaaagaaatgaattggaaaaacaagtgaaaactcttcaggaaagttataatttattattcagtgaatctctgaaacagctacaagaatcacaaacctcaggagatgtaaaggtagaggagaagattgtagcagagcgtcagcaggagtataaagagaaactccaagggatatgtgatcttcttacccaaactgaaaaccgcctaattggtcaccaagaagccttcatgattggagatggcacagttgagttaaagaaatatcagtccaagcaagaggaattacagaaagatatgcaaggaagtgcacaggcattggctgaagtagtgaaaaacacagagaacttcttaaaagagaatggtgaaaagctgtcacaggaagataaggctttgattgaacagaaacttaatgaagctaagataaagtgtgaacagcttaatttaaaagcagaacagtctaaaaaggagctggataaagttgtgacaacagcaatcaaggaagaaactgaaaaggtagcagcagtgaagcagctggaagagagcaaaaccaaaatagaaaaccttttggactggttgtcaaatgttgacaaagactcagaaagggcagggacaaaacacaaacaggtaatcgaacagaacgggacccattttcaagaaggtgatggcaagtcagcaattggagaagaggatgaagttaatggtaacctgttggagactgatgttgatgggcaagttggaaccactcaggagaatctgaatcagcaatatcagaaagttaaggcccaacacgagaagatcatctctcagcaccaagcagtgatcatagccactcagtctgcacaagtgttgcttgagaaacagggtcagtatctctctcctgaagaaaaagagaaactgcaaaagaacatgaaggaactgaaagtgcattatgaaactgcactggctgagtcagagaagaaaatgaagttaactcactctctgcaggaagaattagaaaagtttgatgctgactataccgagtttgagcactggctacagcagtcagaacaagaacttgaaaacctggaggcaggtgcagatgacatcaatggtttaatgaccaaattgaagaggcagaagagtttctcagaagacgttatttctcacaaaggtgacttgagatacatcacaatttctggaaacagagtgttggaagctgccaaatcttgcagcaagagagacggtggcaaggttgatacttctgcaacccacagagaagtgcagcgcaagttggatcatgctactgatcggttcaggtctctctactctaagtgcaatgttcttggaaataatcttaaagatctggtggataaatatcaacactatgaagatgcttcatgtggacttcttgctggactccaggcctgtgaggccacagcgagcaaacacttatctgaacctattgcggtggaccccaaaaatcttcaaaggcaattagaagagaccaaggctttgcaaggacagatatcaagtcagcaggttgctgtagagaaactgaagaaaacggctgaagtgcttttagatgccaggggatctttacttccagccaagaatgatatccagaaaacacttgatgacattgttgggagatatgaggatctgtccaagtctgttaatgaacgaaatgaaaaactccagataaccttgacccgttcactgagtgtgcaggatggcttggatgaaatgctggactggatgggaaatgtggaaagttctctgaaagaacaaggtcaagtgcctttaaactctactgctcttcaggatattatcagtaaaaacattatgttggaacaggatattgcaggtcgtcagagcagtataaatgccatgaatgaaaaagtgaagaaatttatggaaacaacagatccatccactgcatcctcactgcaagccaaaatgaaagacttgtctgctcggttttcagaagcaagtcataaacacaaagaaactcttgccaaaatggaggagctaaaaaccaaagtagaactgtttgagaacctctcagaaaagctccagacatttttagaaacaaaaactcaggctcttactgaagtagatgtgccaggaaaagatgttactgaattgtctcagtatatgcaggaatcaacttctgaatttttagaacacaagaaacatcttgaagttttgcatagtctcttgaaggagatatccagccatggcttaccaagtgataaggctttggtccttgaaaaaacaaataatttgtcaaagaaattcaaggaaatggaggataccatcaaagaaaaaaaagaagctgtaacttcttgtcaagaacagttggatgctttccaagttcttgttaaatcattgaagtcatggataaaagaaacaacaaaaaaagttcccattgtacagccttcttttggtgcagaggatttaggaaaatctttggaagacactaagaaattacaagaaaagtggagtttaaaaacaccagagattcagaaagtaaacaacagtgggatctcactatgtaacttaataagtgctgtgaccacccctgcaaaggcaatagcagcagttaaatcaggtggagcagtattaaatggtgaaggaacagccacaaatactgaggaattttgggcaaataaaggtttaacatccattaaaaaggacatgactgacataagtcatggttatgaagatcttggcctcttactcaaggacaaaatagcggaactgaacactaaactctccaaattgcaaaaggctcaggaagaatcaagtgcaatgatgcagtggttacagaaaatgaacaaaactgcaacaaaatggcagcagacacctgcacctacagatactgaagctgtgaagactcaagttgagcagaataagtcgtttgaggcagaactgaagcagaatgtaaacaaagtacaggagttgaaagacaaattgacagagctgttggaggagaacccagatactcctgaggcccccagatggaaacagatgttgacagaaatagattctaagtggcaagaactcaatcaattaacaattgatagacaacaaaaactggaagaatcctccaataatctaacccagttccagactgtagaggcccaattgaaacagtggcttgtggaaaaagaacttatggtcagtgttcttgggcccttgtcaattgacccaaatatgctaaacacacaaaggcagcaggtgcagattttgctgcaagaattcgccactcggaaacctcaatatgaacagctgacagcagctggtcagggcattctgagcaggcctggagaagacccttctttacgtgggattgtgaaagagcaactggcagctgtgacccaaaaatgggatagcctaacagggcaattgagtgacagatgtgactggattgaccaagccattgttaaaagcacacagtatcaaagcctgctgagaagcctttctgataaactgagtgacttggataataaactcagcagcagtctggctgtgagcacgcaccctgatgctatgaaccaacagttggaaacagcccaaaaaatgaagcaggagatacagcaggaaaagaagcagataaaagtggcccaggcactctgtgaggatttgtcagcactggttaaagaagagtacttgaaagcagaacttagtaggcaactagaaggcatcttaaaatcatttaaggatgttgaacagaaagcagagaatcatgtccagcaccttcagtcggcctgtgcaagctctcatcaatttcagcaaatgtctagagattttcaggcttggctggatacaaagaaagaagagcaaaacaaatctcatccaatatctgccaaactcgatgtcttggagtcattaattaaagatcataaagactttagtaaaactttgaccgctcagtctcatatgtatgaaaaaaccattgcagaaggtgaaaatctgttattaaaaacacaagggtctgagaaggcagccttacagttacagcttaatacaattaaaaccaattgggatacatttaataagcaggtgaaagaaagagaaaacaagttaaaagagtcattggaaaaagcccttaagtataaagagcaagtagagactctctggccatggatagacaaatgccaaaacaacctggaggaaataaaattttgcttggatcctgctgaaggagagaattctattgccaagttaaagtctctgcagaaggaaatggaccaacactttggtatggtagaattactgaacaacacagccaatagcttgctcagtgtctgtgagatagataaagaagttgttacagatgagaataagtcactgatccagaaggtggacatggtcactgaacaacttcacagtaagaaattctgtctggagaacatgactcagaagtttaaagaatttcaagaagtttccaaagaatctaaaaggcagcttcagtgtgcaaaggagcagctagatatccatgattcgctgggatcccaggcttacagtaacaaatacctgaccatgttgcaaactcagcagaaatcacttcaggccttgaagcatcaggtagatttggctaaaagacttgcacaggaccttgtggtagaggcctcagactcaaagggaacctctgatgttttattacaagtggaaaccatagctcaagagcatagtacactaagtcagcaggttgatgaaaagtgttctttcttagaaaccaagcttcagggcattgggcatttccagaataccattcgagaaatgttttctcagttcgcagagtttgatgatgaactggatagcatggctccagtggggagagatgcagaaacattgcaaaagcaaaaggaaactataaaagcctttctaaagaaactagaagccctcatggcaagcaatgacaatgccaataaaacctgcaagatgatgttagccacagaagaaacctctcctgaccttgttggaatcaaaagggacttggaggccttaagcaaacaatgcaacaagttactggaccgagcccaagccagagaagagcaggttgaagggacaattaagcgccttgaagaattttacagcaaattgaaagaattttctattctgctccagaaagccgaagaacatgaagagtcacaaggtcctgttggtatggaaacggagacaattaatcagcagcttaacatgttcaaggtattccagaaagaagagattgaacccttgcaaggtaaacagcaagatgtaaactggttaggtcaaggccttattcagagtgctgccaaaagcactagcactcagggcttggagcatgacctggatgatgtcaatgcacggtggaagactctcaataagaaggtggctcagcgagcagcccagctgcaggaggccttgctgcactgtgggaggttccaggatgccctggagtccctgctcagctggatggtggacactgaggagcttgtggccaatcagaagcccccgtcggctgagttcaaagtggtaaaggcccagatacaagaacaaaagcttctccagagattgttggatgaccgaaaatctacggtggaggtaatcaaacgagaaggagaaaaaattgctacaacagcagagcccgcagataaagtgaagattttgaaacagctcagtctcttggatagcagatgggaggcattgcttaataaagctgaaacaaggaatcgtcagttggaaggtatctcggtggtagcacagcaatttcatgaaaccttagaaccactgaacgagtggcttacaaccatagaaaagaggctggtgaattgtgaacccataggaacccaagcatctaaacttgaggaacaaattgcacagcacaaagccttagaagatgacatcatcaatcacaataaacatttacaccaggctgttagcattggccagtccttaaaggttttgagctccagggaggataaagatatggtgcagagtaaattagacttctctcaagtatggtacattgagattcaagagaaaagtcacagcaggtctgagctcctccagcaggccttatgtaatgctaagatttttggggaagatgaagttgaactgatgaactggctgaatgaagtgcatgacaaactgagcaagctctcagtccaggattacagcactgaggggctatggaagcagcagtctgaacttcgggttctgcaagaggacatcttactcaggaaacaaaatgtagatcaggctttactaaatggtttagaactacttaaacaaaccacaggtgatgaagttttaataattcaagataaattggaagccattaaagcaaggtacaaagacattactaaactgagcactgatgtggccaagactctggaacaggcgctgcagcttgcaaggcggctgcactccacacacgaagagctgtgtacctggctggacaaagtggaggtggaattactttcatatgaaactcaggttctgaaaggagaagaagcaagtcaagcacaaatgagaccaaaggaactgaaaaaggaagctaagaacaacaaagccttactggactcccttaatgaagtgagcagtgctttgctggaactggtaccatggagggcaagagaaggacttgagaaaatggtagctgaggacaatgagcgctaccgattagtgagcgacaccatcactcagaaggtggaggagatcgatgcagccattctgcgatcacagcagtttgaccaagcagctgatgctgagttatcctggattactgaaacagaaaaaaaattgatgtctctgggtgacatcaggcttgagcaagaccagacttctgctcagcttcaagttcaaaagacattcaccatggagattttgagacacaaggatattattgatgaccttgttaaatctgggcataaaatcatgaccgcatgcagtgaagaggaaaagcaatcaatgaagaaaaaactggacaaggtactgaagaactatgataccatctgccagattaattcagaaaggtatctgcagctggaacgggcacagtccctggttaaccaattctgggaaacatatgaagaactttggccatggctgacagaaacacaatcaatcatctctcagcttcccgccccagcccttgaatatgaaactctaaggcagcagcaggaagaacatcggcaactgcgtgagttgatagctgaacacaagcctcatatagataagatgaacaaaactgggccacagttactggaattgagccctggggaaggcttttctatccaagagaagtatgtggcagccgacaccctttacagtcaaattaaagaagatgtcaaaaagcgtgctgtggcactggatgaagccatttctcaatcaactcagttccatgacaagatagatcagatccttgagagcctggaacgcatcgtggaacgtctgaggcagccaccctctatctctgcagaggttgagaagatcaaggaacagatcagtgaaaataagaatgtgtcagtagacatggaaaagctacagccgttgtatgaaactcttaaacagaggggagaggaaatgattgctagatctggggggactgataaagacatatctgccaaagctgttcaggataagcttgaccaaatggttttcatttgggagaacatacacacactggtggaagagagggaagccaaactactggatgtgatggagctagcagaaaagttctggtgtgatcacatgtcattgatagttaccattaaagatactcaagatttcatccgggacctggaagatcctggaattgatccttcagtagtaaaacaacagcaagaagcagcagagaccataagggaagaaatagatggactacaggaggagctggatatagttattaacctaggttctgaactcattgcggcatgtggggagcctgataaacccattgtcaagaagagtatagatgagttaaattcagcatgggattctctaaataaagcttggaaagaccggattgacaaacttgaggaggcaatgcaggctgccgttcagtaccaggatggactgcaggcggtatttgactgggtagatattgcaggtggtaaattagcttcaatgtctccaattggaacagatctcgaaactgtcaagcagcagattgaagagctaaagcaatttaagtctgaggcctatcaacagcagatagaaatggaaagactgaatcatcaagcagagcttttgctaaagaaagtaacagaagagagtgacaaacacactgttcaagacccattaatggaactgaaattgatatgggatagcctggaggagagaatcatcaacagacagcataaactggagggtgctctattagccttgggtcagttccaacatgccctggatgagctcctggcatggctgacacacaccgagggcttgctaagtgagcagaaacctgttggaggagaccctaaagccattgaaattgaacttgccaagcatcatgtgctccaaaatgatgtattagcccatcagtccacagtggaagccgttaataaagcaggaaatgatctaattgaatcaagtgcaggagaagaagcaagcaaccttcagaacaagctagaggttttaaatcaacgctggcaaaatgttttggaaaaaacagaacaaaggaagcagcagctggatggtgccttgcgccaggccaaagggttccatggcgaaattgaggatttgcagcagtggctgactgacacggagcgtcatctgttggcatctaaaccgctgggaggtttaccggaaacagccaaggagcagcttaatgtccatatggaagtctgtgctgcctttgaagctaaagaagaaacatataagagtctgatgcagaaaggccagcagatgcttgcaagatgcccaaaatctgcagagacaaatattgaccaagacataaataacttgaaagaaaaatgggaatcggtggaaaccaaactcaatgaaaggaaaactaaactggaagaggctctcaacttggcaatggagttccacaattctctccaagacttcatcaactggcttactcaggctgaacagaccctaaatgtagcttctcggccaagtctcatcttggacacagtcttatttcaaattgacgaacacaaggtttttgccaatgaagtaaattctcatcgtgagcagataatagagctggacaaaactggaacccacctaaaatattttagtcagaaacaagatgttgttctaatcaagaatctacttatcagtgtacaaagtcgatgggaaaaagtggttcaacggttggtagagagaggaagatctttggatgatgcaaggaagagagccaagcagttccatgaagcttggagtaaacttatggagtggctagaagagtcagaaaagtctttggattctgaactggaaatcgcaaatgatccagacaaaataaaaacacaacttgcacaacataaggagtttcagaaatcactcggagccaagcattctgtctacgacaccaccaacaggactggacgttctctgaaggagaaaacctccctggctgatgacaacctgaaactggatgacatgctgagtgaactcagagacaaatgggataccatatgtggaaaatctgtggaaagacaaaacaaattggaggaagccctgttattttctggacaattcacagatgccctacaggctctcattgattggttatatagagttgaaccccagctggcagaagaccagcctgttcatggagacattgatttggtgatgaatctgatcgataatcacaaggccttccaaaaagagttggggaagaggaccagcagtgtgcaggccctgaagcgctcagcccgagaactcatagaaggcagtcgggatgactcctcctgggtcaaggtccagatgcaggaattaagcacacgctgggagaccgtgtgtgcactttctatatcaaagcaaacacggttagaagcagccctgcgtcaggcagaggaattccactcggtggtacatgccctcttggagtggctggctgaggcggagcaaaccctgcgtttccatggtgtcctcccagatgatgaggatgctctccggactctcattgatcagcataaagaattcatgaagaaactggaagaaaagagagctgaactaaataaagccaccactatgggcgacaccgttttggctatctgccaccccgactccatcactaccattaagcactggataacaatcatccgggcgaggtttgaggaggtgctggcctgggcaaagcaacatcagcagagattagcaagtgctctggctgggcttattgccaaacaggaattgttggaagctttgctggcttggttgcaatgggctgaaactacacttactgataaggataaagaagtcatcccccaggagatcgaagaggtgaaagcactcattgcagaacaccagaccttcatggaggaaatgaccagaaaacagcctgatgttgataaagtaacgaagacctataagaggagagctgctgatccttcctcattacaatcccatattccagtcttggataagggacgagcaggaagaaaacgctttccagcatcaagcttgtatccctctgggtcacagacacaaattgaaaccaaaaatcctagggtaaacttactggtgagcaaatggcagcaagtctggctcctggcgttggaaagaaggaggaaactcaatgatgccttggacagactagaggagctgagggaatttgctaactttgattttgatatctggcgcaaaaaatacatgcgatggatgaatcacaagaaatctcgagtgatggacttcttcaggagaattgataaagaccaggatgggaaaataacgcggcaggaatttattgatggaattctttcctcaaagtttccaaccagtcgcttggagatgagcgcagttgcagacatctttgacagagatggcgatggatatattgactactatgaatttgtagcagcccttcacccaaataaagatgcatataaacctatcacagatgccgacaaaatcgaagatgaggtgacaaggcaggtagctaagtgtaaatgtgcaaagcgatttcaagttgagcagattggtgataataaatacaggttcttcctgggaaatcagtttggagactcccagcaactgcgactggtccggatcctgcggagtactgtgatggttcgtgttggaggtggatggatggcacttgatgagttcttagtgaaaaatgatccttgcagggccaaaggaaggacaaacatggaactgcgtgagaagttcattttagcagatggtgccagccagggtatggctgctttccgaccccgaggccgaagatcccggccatcatcacgaggcgcttcacccaacagatccacttctgtgtccagtcaggctgcgcaggcggcctccccacaggtccctgccaccaccacacccaagattctccatcctttaacacgcaattatggtaaaccatggttgacaaacagcaaaatgtcaactccttgtaaagcagcagagtgctcagactttcccgtgccatctgcagagggaacgccaatacaaggaagcaagcttcgacttccaggatatttatcagggaaaggcttccactctggggaggacagtggcttgataacaactgcagctgccagagtccgaacacagtttgctgattccaagaagactcccagccgaccaggaagtcgagctggaagcaaagctggcagcagggccagcagccgccgaggcagtgatgcatcagactttgacatttcagaaatccagtccgtgtgctcagatgtggaaactgtcccccagacacacagacctacaccccgagcaggttctcggccatccacagcgaagccttcaaaaatccccacgccccagaggaaatcacctgccagcaaattggacaagtcctcaaagagatagtgcaattggttctaccaaggcccttccttgagcatttattatttaagtttgaacgatgtaaaatatggtgtagaaattcttgtgaaatattgcaagaggcgagtttaaaattctgcagatggccttatttgtgtatttgtctttttattttatctgtataattttttttgtcagatattctggggttaaagtcacatcatatgtgaggaggaaaagtttaacatgaactaacatttctgcactgtaacgtgccgggcacacactaaactcagttactgtacctacaggtaagtctacatcctctctgacagccacagcactacatcaatccctgacgttagggatacctcatgacattttcctgtttttatggaaactctgagaagctgaatgatacatgcaggggatattttttgagatgatttaaatgtaaaccaaaagatggaagacaaaaagacaaacacacccacacgcagtctttgcagtatctgacagagaactcacaggaagttacttcaagcacttgccagtactatgatattcaagtaccttgcagcatttctctgccattgctttcaatgaggccagaggcatcctggatattagacctattatactgtaagaatataagtataaagtgcgttcatatacatgtgaggttttcttttgcttgagtggacagtagcacctgtatcattgaactcattttgtatcagagcaattttgcttgcagaaagctatgaaataaaacacgtcccttaactgcattgctatggaattaattttttttccccagggaaaactagtgtatttttttatgagcaatatcaatttggagtgaccaaaagatacttaaaaatgggtttattttgatttctcatctgaaataatcatgttctggtattatatctatctatatttaataaatatatacattttaatttattatgtgtactcacatactatagaaagatattagtatgcatttaataaaacatattcacttgaatatatgg

SEQ ID NO: 128700 - DNA, 22431 bp, Homo sapiens
  Payload ID: 5186
  Gene Symbol: DST
  Gene Name: dystonin
  ENST ID: ENST00000361203
  CDS Start-End: 9-22394
acttcggcatggcgggttacctctcccctgctgcttacctgtacgtggaggagcaggagtatctccaggcctacgaggatgtcctggagaggtacaaagatgaacgggacaaagttcagaagaaaacatttacaaaatggataaatcagcatctcatgaaggttcgaaaacatgtgaatgatctctatgaagacttaagggatggacacaatttgatttctcttttagaggttctttcaggagataccttgcccagagaaaaaggtcggatgcgttttcacagactacagaatgtacaaattgcacttgactatttgaaaagacgccaggtgaaattagtgaatattagaaatgatgacataacagatggaaatcccaaattgactttgggattaatctggacaataattttgcactttcagatatctgatatccatgttactggagagtcagaggatatgtctgcaaaagagagattgctactctggacgcagcaggcaacagagggttatgctggaattcggtgtgaaaatttcactacctgctggagagatggaaaattatttaatgccatcattcataaatacaggccggacctgatagatatgaatactgttgctgttcaaagcaaccttgcaaatttagagcatgctttttacgtagcagaaaaaattggtgttataagacttctggaccctgaagatgtcgatgtctcctcacctgatgaaaaatcagtaataacttacgtgtcatctctctatgatgcatttcctaaagtccctgaaggtggggaaggcattggtgcaaatgatgttgaagtcaaatggattgaataccagaatatggtgaactacctcatccaatggattagacaccatgtgaccacaatgtctgagagaacatttcctaataatcctgtagaactgaaggcactttataatcagtatttacagtttaaagaaacagaaattccaccaaaggagacagaaaaatcaaaaattaaacgtctatataaattattagagatttggatagaatttggacgcatcaagctccttcaaggttatcatccaaatgacatagaaaaagagtgggggaaactcattattgccatgctagagagagagaaggcccttcgtccagaagtagaaaggttagaaatgttgcaacagattgccaacagagttcagagggacagtgtcatctgtgaagacaaactgattcttgctggaaatgctcttcagtctgattctaaaagattagaatcaggagtgcagtttcagaatgaagcagaaattgctgggtatatacttgaatgtgagaaccttttacgccagcatgtaattgatgtacagattcttattgatggaaaatactaccaggcagatcaattggtacagagggttgcaaaactgcgtgacgaaattatggccttaaggaacgaatgttcttctgtgtacagcaaaggacgcatactgacaacagaacagacaaagctcatgatatcaggaatcactcaaagtttaaactcaggatttgcacagaccttacaccctagtctgacctcagggctgacccagagtttaacaccttccctaacctcttctagtatgacttctggcctgtcatcagggatgacttcccgcctgactccatctgtcactccagcttatacacctggtttcccatcaggattagttccaaatttcagttcaggagtagagccaaattcattgcaaactttgaagttgatgcagatccgaaaaccccttctaaagtcttctttgctggatcaaaatttaacagaagaagaaatcaatatgaaatttgttcaggatcttttgaattgggttgatgagatgcaggtacaactggaccgcactgagtggggctcagatttgccaagtgttgaaagccatttagaaaatcataaaaatgttcatagagctattgaagaatttgaatctagtctcaaagaagctaaaatcagtgagattcaaatgacagcacctcttaaactgacttatgcagaaaagttgcacagattagagagtcagtatgcaaaactcttgaatacatccaggaatcaagaacggcaccttgatacactccataattttgtaagtcgtgcgactaatgaacttatttggttgaatgaaaaagaagaggaggaagttgcttatgactggagtgagagaaacaccaacatagctaggaaaaaagattatcatgctgaattaatgagagaacttgatcaaaaggaagaaaatattaaatcagttcaggagatagcagagcagctacttctagaaaatcatccagcccggttaactattgaggcctacagagcggcaatgcagacgcagtggagctggatcttacagctctgccagtgtgtggagcagcacataaaggagaacacagcgtatttcgagtttttcaatgatgccaaagaagctactgattacttaaggaatctaaaagatgccattcagcggaagtacagctgtgatagatcaagcagcattcacaagctagaagaccttgttcaggaatcaatggaagagaaagaagaacttctgcagtacaaaagcactatagcaaacctaatgggaaaagcaaaaacaataattcaactgaagccaaggaattctgactgtccactcaaaacttctattccgatcaaagctatctgtgactacagacaaattgagataaccatttacaaagacgatgaatgtgttttggcgaataactctcatcgtgctaaatggaaggtcattagtcctactgggaatgaggctatggtcccatctgtgtgcttcaccgttcctccaccaaacaaagaagcggtggaccttgccaacagaattgagcaacagtatcagaatgtcctgactctttggcatgagtctcacataaacatgaagagtgtagtatcctggcattatctcatcaatgaaattgatagaattcgagctagcaatgtggcttcaataaagacaatgctacctggtgaacatcagcaagttctaagtaatctacaatctcgttttgaagattttctggaagatagccaggaatcccaagtcttttcaggctcagatataacacaactggaaaaggaggttaatgtatgtaagcagtattatcaagaacttcttaaatctgcagaaagagaggagcaagaggaatcagtttataatctctacatctctgaagttcgaaacattagacttcggttagagaactgtgaagatcggctgattagacagattcgaactcccctggaaagagatgatttgcatgaaagtgtgttcagaatcacagaacaggagaaactaaagaaagagctggaacgacttaaagatgatttgggaacaatcacaaataagtgtgaggagtttttcagtcaagcagcagcctcttcatcagtccctaccctacgatcagagcttaatgtggtccttcagaacatgaaccaagtctattctatgtcttccacttacatagataagttgaaaactgttaacttggtgttaaaaaacactcaagctgcagaagccctcgtaaaactctatgaaactaaactgtgtgaagaagaagcagttatagctgacaagaataatattgagaatctaataagtactttaaagcaatggagatctgaagtagatgaaaagagacaggtattccatgccttagaggatgagttgcagaaagctaaagccatcagtgatgaaatgtttaaaacgtataaagaacgggaccttgattttgactggcacaaagaaaaagcagatcaattagttgaaaggtggcaaaatgttcatgtgcagattgacaacaggttacgggacttagagggcattggcaaatcactgaagtactacagagacacttaccatcctttagatgattggatccagcaggttgaaactactcagagaaagattcaggaaaatcagcctgaaaatagtaaaaccctagccacacagttgaatcaacagaagatgctggtgtccgaaatagaaatgaaacagagcaaaatggacgagtgtcaaaaatatgcagaacagtactcagctacagtgaaggactatgaattacaaacaatgacctaccgggccatggtagattcacaacaaaaatctccagtgaaacgccgaagaatgcagagttcagcagatctcattattcaagagttcatggacctaaggactcgatatactgccctggtcactctcatgacacaatatattaaatttgctggtgattcattgaagaggctggaagaggaggagaagtcactggaagaagaaaagaaagaacatgttgaaaaagccaaagaattgcaaaaatgggtatcaaatatcagcaagacattgaaagatgcagagaaggctggaaaacctcccttctctaagcaaaagatttccagtgaggaaatatcaaccaagaaggaacaattatcggaagcacttcaaactatacagctttttttggcaaaacatggagacaaaatgacagatgaagaaagaaatgaattggaaaaacaagtgaaaactcttcaggaaagttataatttattattcagtgaatctctgaaacagctacaagaatcacaaacctcaggagatgtaaaggtagaggagaagctggataaagtgattgcaggcaccattgatcagacaactggagaagtcctttcagtctttcaagcagttttaagaggcctcattgactatgacacaggaattaggttgcttgagacacagctaatgatttctggtctaatttcaccagaattaagaaagtgctttgaccttaaagatgccaaaagtcatggccttattgatgaacaaattctgtgccaactcaaagaactaagtaaagctaaggagattatttctgctgcgtcacctaccacaattccagtactggatgctctagctcaaagcatgataacagaatccatggccatcaaagttcttgagatactgctttctacaggctctctggttattccagccacaggagaacagttgaccctacagaaggctttccaacagaacttggtttcctcagcattattttctaaagttctggaaaggcaaaatatgtgcaaagatcttattgacccctgcacctctgagaaggtttctttaatagatatggtacaaagaagtactttacaggaaaacacagggatgtggcttctacctgtgagaccacaagaaggaggtagaataacattaaaatgtggaagaaacataagcattttaagagcagctcatgaaggtctcatagaccgtgaaaccatgtttaggttgttaagtgcacagcttctttctggaggtctgatcaattccaactctggccaaagaatgactgttgaagaagctgtcagagaaggggtgattgacagggacactgctagcagtatcctcacatatcaggttcaaactggtggaatcatccagtcaaaccctgccaagcgtttaactgtagacgaagcagtacagtgtgatttaataacttccagcagtgctcttctggtcctggaagctcagcgaggctatgttggactcatttggccccattctggtgaaatatttcccacatcatcttccttgcagcaagaattgattacaaatgaattggcctacaaaatcctgaatggcagacaaaaaatagctgctctttatattccagaaagttctcaagtcattggtttggatgctgctaaacagctaggaattatagacaacaacacagcatcaattttaaaaaatataacactgcctgataaaatgccagatttaggagatttagaagcttgtaaaaatgccagaagatggctctctttttgtaaatttcaaccctccacagttcatgattacagacaagaagaggatgtttttgatggagaagaacctgtcactactcagacctcagaagaaactaaaaaattatttctatcttatttaatgataaatagctatatggatgcaaacacagggcaaaggcttttgctgtacgatggagacttggatgaggctgttggcatgctactggaaggctgtcatgcagaatttgatggaaacacagccataaaagaatgtctcgatgtcttaagctcatctggtgtatttcttaataatgcttcaggtagagaaaaggatgaatgtacagctacaccaagtagtttcaataaatgtcactgtggagaacctgaacatgaagagactcctgaaaatagaaagtgtgctatagatgaagaatttaatgaaatgagaaatactgttatcaatagtgaattttctcagtcaggaaaactggcaagtacaatatcaattgatcctaaagttaacagttcacccagtgtgtgtgttcccagtctcatatcatatttaacacagactgaacttgcagacattagcatgcttagaagtgactctgaaaacatacttacaaactatgaaaatcaaagccgagtggaaacaaatgaacgtgcaaatgaatgtagtcattctaaaaacattcaaaactttccaagtgatttaatagaaaatcctattatgaaatcaaaaatgagtaaattctgtggtgtgaatgaaacagagaatgaagataatacaaacagggattcacctatctttgactattcccccaggctaagtgccttgttaagtcatgataaattgatgcacagtcagggaagttttaatgatacacacaccccagagagcaatggaaataagtgtgaagccccagccttatcattcagtgacaaaaccatgttgtcaggtcaaagaataggagaaaaatttcaagaccagtttctgggaattgcagctattaacatcagtttaccaggagagcagtatggacagaaatctttaaatatgatttctagtaatcctcaagtacaatatcacaatgataaatacatttcaaatacttctggtgaggatgaaaaaacacatccaggttttcagcagatgcctgaagacaaggaagatgagtctgaaatagaagagtattcctgtgctgtgactccagggggtgatactgataatgccattgtgtctcttacttgtgctacaccattgcttgatgaaaccatcagtgctagtgactatgaaacgtcactgctgaatgatcagcagaataacacaggaacagacactgatagtgatgatgatttttatgatactcccttgtttgaagatgatgaccatgattctttgcttcttgatggtgatgatcgtgattgcctgcaccctgaggactacgacacactgcaagaggaaaatgatgagacggcttctcctgctgatgttttttatgatgtctcaaaagagaatgaaaattccatggttccccagggggcaccagttggtagcttaagtgtgaagaacaaagcacattgtcttcaggatttccttatggatgttgagaaagatgaattagattctggtgaaaaaatacatttaaatcctgttggctcagataaggtgaatggacagtcactggaaactggatcagaaagggaatgcacaaatatccttgaaggtgatgaatctgactcattgactgattatgatattgtaggaggaaaagagagcttcactgcatcattaaaatttgatgacagtggcagttggagaggaagaaaggaagagtatgtaactggacaggaatttcactccgatactgatcatttagattctatgcaaagtgaagaaagttatggggattatatatatgacagtaatgatcaggatgacgatgatgatgatggcattgatgaagaaggaggaggtataagagatgagaatggaaagcccaggtgccaaaatgtggctgaagatatggatatccagttgtgtgcctctattttaaatgaaaacagtgatgaaaatgaaaatattaatacaatgattcttctggataaaatgcacagttgtagctctttagaaaaacagcaaagggtaaatgttgtacagctagcatcacctagtgaaaataacttagttactgaaaaaagcaaccttccagaatatacaactgagattgctggaaaaagcaaagaaaatctgttgaaccatgagatggtacttaaggatgtattgccgcctatcattaaagacactgaatctgaaaaaacttttggccctgcaagtatttcacatgataataataatatcagttcaacttctgaattaggtactgatctagcaaacacaaaggttaagttgattcaagggtcagaattgccagaattgactgattctgtgaaaggtaaagatgaatattttaagaatatgacaccaaaagttgactcatctcttgatcacatcatttgtactgagcctgatttaataggaaaacctgctgaggaaagccatttgtcattgatagcctctgtaactgacaaagatcctcaaggaaatggaagcgatctcattaaagggagagatggcaaaagtgatattctaatagaagatgaaacatcaattcagaaaatgtacttgggtgaaggagaagtgcttgtagaaggtctagtagaagaagaaaataggcatctcaaacttttgcctggtaaaaatacaagggatagtttcaagttaattaatagtcagtttccatttccacaaatcacaaacaatgaagaacttaatcagaaaggaagccttaaaaaagcaactgtaactcttaaagatgaaccaaataatctacaaataatagttagtaaaagtcctgttcagtttgagaatcttgaagaaatttttgacacatcagtttccaaagagattagtgatgacattacttcagacattacatcgtgggaagggaatacacattttgaggagtcattcactgatggacctgagaaagagcttgatctgtttacttacttaaaacattgtgctaaaaatataaaagcaaaagatgtagccaaaccaaatgaagatgtcccaagccatgttttaataactgcccctcccatgaaagaacatttacaattaggagttaataatacaaaagagaagtccactagtacccaaaaagactcacctcttaatgacatgatccaaagcaatgatctttgtagtaaagaaagcatctcaggaggaggaacagaaatttctcagttcacaccagaaagtattgaagccacactttcaatattatctcgtaaacatgtagaagatgttgggaaaaatgattttctgcagtcggagcggtgtgcaaatggattaggaaatgataactccagtaacactttaaatactgactattcattcttagaaattaataataagaaagaaagaattgagcaacagctaccaaaagaacaagccttgtctccaagatcccaagaaaaggaggttcagattcctgaattgtctcaggtatttgtggaggatgtaaaggatatcttaaaaagcaggttgaaagaaggtcatatgaaccctcaagaggttgaagaaccttcagcctgtgcagacactaaaattttaattcaaaatttaattaaaaggattaccacatcacagttggtaaatgaggcatctactgtgcccagcgactctcaaatgagtgactcttctggagtttcccccatgactaactcatcagaactaaagccagaaagtagagatgatcctttctgtattggaaatcttaagtctgagcttctccttaatatattgaagcaagatcaacatagccaaaaaattacaggagtatttgaattgatgagagaattaactcatatggagtatgacctagagaaaagaggcattacgtctaaagtacttccactgcagcttgaaaatattttctacaaactgcttgctgatggatattcagagaaaatagaacatgttggagactttaatcaaaaagcatgttctacatctgagatgatggaagaaaagccacatattcttggtgatattaaaagcaaagaaggaaactactattctcctaatttagaaactgtaaaagaaattggactagaaagctctactgtgtgggcatcaacattgccaagagatgagaagctcaaggatctgtgtaatgatttcccaagccatttggaatgtacttcagggtctaaagagatggcttctggagatagctcaaccgaacaattttccagtgaattacagcagtgtttacagcacactgaaaaaatgcatgagtatttgacattgcttcaagatatgaaaccccccttagacaaccaggaatctctggataacaacttggaagctttgaagaatcaacttagacagttggagacatttgaattgggattagctccaattgctgttattttaagaaaagatatgaagttggcagaagagtttttaaagtctcttcccagtgactttcccagaggccatgttgaagaattgagtattagccaccagagtttgaagaccgccttctcttccctcagcaacgtgtcttcagaaagaacgaaacagatcatgcttgcgatcgactctgaaatgtctaaactagcagtttcccatgaagaatttctgcataaacttaagtcattctcagattgggtatcagagaagagcaaatctgtgaaggatattgagattgtgaatgttcaagattctgagtatgtaaagaaacgtttggagtttctcaagaatgtattaaaagaccttggacataccaaaatgcagctggagactactgcctttgatgtgcagttcttcatttctgaatatgcacaggatctgtctcccaaccaaagcaaacaactgctgaggctcttaaatacaactcagaagtgttttcttgatgtacaggagtcagtaactacccaggtggaacgtttagagactcagttacatctagaacaagatcttgatgatcagaagattgtagcagagcgtcagcaggagtataaagagaaactccaagggatatgtgatcttcttacccaaactgaaaaccgcctaattggtcaccaagaagccttcatgattggagatggcacagttgagttaaagaaatatcagtccaagcaagaggaattacagaaagatatgcaaggaagtgcacaggcattggctgaagtagtgaaaaacacagagaacttcttaaaagagaatggtgaaaagctgtcacaggaagataaggctttgattgaacagaaacttaatgaagctaagataaagtgtgaacagcttaatttaaaagcagaacagtctaaaaaggagctggataaagttgtgacaacagcaatcaaggaagaaactgaaaaggtagcagcagtgaagcagctggaagagagcaaaaccaaaatagaaaaccttttggactggttgtcaaatgttgacaaagactcagaaagggcagggacaaaacacaaacaggtaatcgaacagaacgggacccattttcaagaaggtgatggcaagtcagcaattggagaagaggatgaagttaatggtaacctgttggagactgatgttgatgggcaagttggaaccactcaggagaatctgaatcagcaatatcagaaagttaaggcccaacacgagaagatcatctctcagcaccaagcagtgatcatagccactcagtctgcacaagtgttgcttgagaaacagggtcagtatctctctcctgaagaaaaagagaaactgcaaaagaacatgaaggaactgaaagtgcattatgaaactgcactggctgagtcagagaagaaaatgaagttaactcactctctgcaggaagaattagaaaagtttgatgctgactataccgagtttgagcactggctacagcagtcagaacaagaacttgaaaacctggaggcaggtgcagatgacatcaatggtttaatgaccaaattgaagaggcagaagagtttctcagaagacgttatttctcacaaaggtgacttgagatacatcacaatttctggaaacagagtgttggaagctgccaaatcttgcagcaagagagacggtggcaaggttgatacttctgcaacccacagagaagtgcagcgcaagttggatcatgctactgatcggttcaggtctctctactctaagtgcaatgttcttggaaataatcttaaagatctggtggataaatatcaacactatgaagatgcttcatgtggacttcttgctggactccaggcctgtgaggccacagcgagcaaacacttatctgaacctattgcggtggaccccaaaaatcttcaaaggcaattagaagagaccaaggctttgcaaggacagatatcaagtcagcaggttgctgtagagaaactgaagaaaacggctgaagtgcttttagatgccaggggatctttacttccagccaagaatgatatccagaaaacacttgatgacattgttgggagatatgaggatctgtccaagtctgttaatgaacgaaatgaaaaactccagataaccttgacccgttcactgagtgtgcaggatggcttggatgaaatgctggactggatgggaaatgtggaaagttctctgaaagaacaaggtcaagtgcctttaaactctactgctcttcaggatattatcagtaaaaacattatgttggaacaggatattgcaggtcgtcagagcagtataaatgccatgaatgaaaaagtgaagaaatttatggaaacaacagatccatccactgcatcctcactgcaagccaaaatgaaagacttgtctgctcggttttcagaagcaagtcataaacacaaagaaactcttgccaaaatggaggagctaaaaaccaaagtagaactgtttgagaacctctcagaaaagctccagacatttttagaaacaaaaactcaggctcttactgaagtagatgtgccaggaaaagatgttactgaattgtctcagtatatgcaggaatcaacttctgaatttttagaacacaagaaacatcttgaagttttgcatagtctcttgaaggagatatccagccatggcttaccaagtgataaggctttggtccttgaaaaaacaaataatttgtcaaagaaattcaaggaaatggaggataccatcaaagaaaaaaaagaagctgtaacttcttgtcaagaacagttggatgctttccaagttcttgttaaatcattgaagtcatggataaaagaaacaacaaaaaaagttcccattgtacagccttcttttggtgcagaggatttaggaaaatctttggaagacactaagaaattacaagaaaagtggagtttaaaaacaccagagattcagaaagtaaacaacagtgggatctcactatgtaacttaataagtgctgtgaccacccctgcaaaggcaatagcagcagttaaatcaggtggagcagtattaaatggtgaaggaacagccacaaatactgaggaattttgggcaaataaaggtttaacatccattaaaaaggacatgactgacataagtcatggttatgaagatcttggcctcttactcaaggacaaaatagcggaactgaacactaaactctccaaattgcaaaaggctcaggaagaatcaagtgcaatgatgcagtggttacagaaaatgaacaaaactgcaacaaaatggcagcagacacctgcacctacagatactgaagctgtgaagactcaagttgagcagaataagtcgtttgaggcagaactgaagcagaatgtaaacaaagtacaggagttgaaagacaaattgacagagctgttggaggagaacccagatactcctgaggcccccagatggaaacagatgttgacagaaatagattctaagtggcaagaactcaatcaattaacaattgatagacaacaaaaactggaagaatcctccaataatctaacccagttccagactgtagaggcccaattgaaacagtggcttgtggaaaaagaacttatggtcagtgttcttgggcccttgtcaattgacccaaatatgctaaacacacaaaggcagcaggtgcagattttgctgcaagaattcgccactcggaaacctcaatatgaacagctgacagcagctggtcagggcattctgagcaggcctggagaagacccttctttacgtgggattgtgaaagagcaactggcagctgtgacccaaaaatgggatagcctaacagggcaattgagtgacagatgtgactggattgaccaagccattgttaaaagcacacagtatcaaagcctgctgagaagcctttctgataaactgagtgacttggataataaactcagcagcagtctggctgtgagcacgcaccctgatgctatgaaccaacagttggaaacagcccaaaaaatgaagcaggagatacagcaggaaaagaagcagataaaagtggcccaggcactctgtgaggatttgtcagcactggttaaagaagagtacttgaaagcagaacttagtaggcaactagaaggcatcttaaaatcatttaaggatgttgaacagaaagcagagaatcatgtccagcaccttcagtcggcctgtgcaagctctcatcaatttcagcaaatgtctagagattttcaggcttggctggatacaaagaaagaagagcaaaacaaatctcatccaatatctgccaaactcgatgtcttggagtcattaattaaagatcataaagactttagtaaaactttgaccgctcagtctcatatgtatgaaaaaaccattgcagaaggtgaaaatctgttattaaaaacacaagggtctgagaaggcagccttacagttacagcttaatacaattaaaaccaattgggatacatttaataagcaggtgaaagaaagagaaaacaagttaaaagagtcattggaaaaagcccttaagtataaagagcaagtagagactctctggccatggatagacaaatgccaaaacaacctggaggaaataaaattttgcttggatcctgctgaaggagagaattctattgccaagttaaagtctctgcagaaggaaatggaccaacactttggtatggtagaattactgaacaacacagccaatagcttgctcagtgtctgtgagatagataaagaagttgttacagatgagaataagtcactgatccagaaggtggacatggtcactgaacaacttcacagtaagaaattctgtctggagaacatgactcagaagtttaaagaatttcaagaagtttccaaagaatctaaaaggcagcttcagtgtgcaaaggagcagctagatatccatgattcgctgggatcccaggcttacagtaacaaatacctgaccatgttgcaaactcagcagaaatcacttcaggccttgaagcatcaggtagatttggctaaaagacttgcacaggaccttgtggtagaggcctcagactcaaagggaacctctgatgttttattacaagtggaaaccatagctcaagagcatagtacactaagtcagcaggttgatgaaaagtgttctttcttagaaaccaagcttcagggcattgggcatttccagaataccattcgagaaatgttttctcagttcgcagagtttgatgatgaactggatagcatggctccagtggggagagatgcagaaacattgcaaaagcaaaaggaaactataaaagcctttctaaagaaactagaagccctcatggcaagcaatgacaatgccaataaaacctgcaagatgatgttagccacagaagaaacctctcctgaccttgttggaatcaaaagggacttggaggccttaagcaaacaatgcaacaagttactggaccgagcccaagccagagaagagcaggttgaagggacaattaagcgccttgaagaattttacagcaaattgaaagaattttctattctgctccagaaagccgaagaacatgaagagtcacaaggtcctgttggtatggaaacggagacaattaatcagcagcttaacatgttcaaggtattccagaaagaagagattgaacccttgcaaggtaaacagcaagatgtaaactggttaggtcaaggccttattcagagtgctgccaaaagcactagcactcagggcttggagcatgacctggatgatgtcaatgcacggtggaagactctcaataagaaggtggctcagcgagcagcccagctgcaggaggccttgctgcactgtgggaggttccaggatgccctggagtccctgctcagctggatggtggacactgaggagcttgtggccaatcagaagcccccgtcggctgagttcaaagtggtaaaggcccagatacaagaacaaaagcttctccagagattgttggatgaccgaaaatctacggtggaggtaatcaaacgagaaggagaaaaaattgctacaacagcagagcccgcagataaagtgaagattttgaaacagctcagtctcttggatagcagatgggaggcattgcttaataaagctgaaacaaggaatcgtcagttggaaggtatctcggtggtagcacagcaatttcatgaaaccttagaaccactgaacgagtggcttacaaccatagaaaagaggctggtgaattgtgaacccataggaacccaagcatctaaacttgaggaacaaattgcacagcacaaagttctgcaagaggacatcttactcaggaaacaaaatgtagatcaggctttactaaatggtttagaactacttaaacaaaccacaggtgatgaagttttaataattcaagataaattggaagccattaaagcaaggtacaaagacattactaaactgagcactgatgtggccaagactctggaacaggcgctgcagcttgcaaggcggctgcactccacacacgaagagctgtgtacctggctggacaaagtggaggtggaattactttcatatgaaactcaggttctgaaaggagaagaagcaagtcaagcacaaatgagaccaaaggaactgaaaaaggaagctaagaacaacaaagccttactggactcccttaatgaagtgagcagtgctttgctggaactggtaccatggagggcaagagaaggacttgagaaaatggtagctgaggacaatgagcgctaccgattagtgagcgacaccatcactcagaaggtggaggagatcgatgcagccattctgcgatcacagcagtttgaccaagcagctgatgctgagttatcctggattactgaaacagaaaaaaaattgatgtctctgggtgacatcaggcttgagcaagaccagacttctgctcagcttcaagttcaaaagacattcaccatggagattttgagacacaaggatattattgatgaccttgttaaatctgggcataaaatcatgaccgcatgcagtgaagaggaaaagcaatcaatgaagaaaaaactggacaaggtactgaagaactatgataccatctgccagattaattcagaaaggtatctgcagctggaacgggcacagtccctggttaaccaattctgggaaacatatgaagaactttggccatggctgacagaaacacaatcaatcatctctcagcttcccgccccagcccttgaatatgaaactctaaggcagcagcaggaagaacatcggcaactgcgtgagttgatagctgaacacaagcctcatatagataagatgaacaaaactgggccacagttactggaattgagccctggggaaggcttttctatccaagagaagtatgtggcagccgacaccctttacagtcaaattaaagaagatgtcaaaaagcgtgctgtggcactggatgaagccatttctcaatcaactcagttccatgacaagatagatcagatccttgagagcctggaacgcatcgtggaacgtctgaggcagccaccctctatctctgcagaggttgagaagatcaaggaacagatcagtgaaaataagaatgtgtcagtagacatggaaaagctacagccgttgtatgaaactcttaaacagaggggagaggaaatgattgctagatctggggggactgataaagacatatctgccaaagctgttcaggataagcttgaccaaatggttttcatttgggagaacatacacacactggtggaagagagggaagccaaactactggatgtgatggagctagcagaaaagttctggtgtgatcacatgtcattgatagttaccattaaagatactcaagatttcatccgggacctggaagatcctggaattgatccttcagtagtaaaacaacagcaagaagcagcagagaccataagggaagaaatagatggactacaggaggagctggatatagttattaacctaggttctgaactcattgcggcatgtggggagcctgataaacccattgtcaagaagagtatagatgagttaaattcagcatgggattctctaaataaagcttggaaagaccggattgacaaacttgaggaggcaatgcaggctgccgttcagtaccaggatggactgcaggcggtatttgactgggtagatattgcaggtggtaaattagcttcaatgtctccaattggaacagatctcgaaactgtcaagcagcagattgaagagctaaagcaatttaagtctgaggcctatcaacagcagatagaaatggaaagactgaatcatcaagcagagcttttgctaaagaaagtaacagaagagagtgacaaacacactgttcaagacccattaatggaactgaaattgatatgggatagcctggaggagagaatcatcaacagacagcataaactggagggtgctctattagccttgggtcagttccaacatgccctggatgagctcctggcatggctgacacacaccgagggcttgctaagtgagcagaaacctgttggaggagaccctaaagccattgaaattgaacttgccaagcatcatgtgctccaaaatgatgtattagcccatcagtccacagtggaagccgttaataaagcaggaaatgatctaattgaatcaagtgcaggagaagaagcaagcaaccttcagaacaagctagaggttttaaatcaacgctggcaaaatgttttggaaaaaacagaacaaaggaagcagcagctggatggtgccttgcgccaggccaaagggttccatggcgaaattgaggatttgcagcagtggctgactgacacggagcgtcatctgttggcatctaaaccgctgggaggtttaccggaaacagccaaggagcagcttaatgtccatatggaagtctgtgctgcctttgaagctaaagaagaaacatataagagtctgatgcagaaaggccagcagatgcttgcaagatgcccaaaatctgcagagacaaatattgaccaagacataaataacttgaaagaaaaatgggaatcggtggaaaccaaactcaatgaaaggaaaactaaactggaagaggctctcaacttggcaatggagttccacaattctctccaagacttcatcaactggcttactcaggctgaacagaccctaaatgtagcttctcggccaagtctcatcttggacacagtcttatttcaaattgacgaacacaaggtttttgccaatgaagtaaattctcatcgtgagcagataatagagctggacaaaactggaacccacctaaaatattttagtcagaaacaagatgttgttctaatcaagaatctacttatcagtgtacaaagtcgatgggaaaaagtggttcaacggttggtagagagaggaagatctttggatgatgcaaggaagagagccaagcagttccatgaagcttggagtaaacttatggagtggctagaagagtcagaaaagtctttggattctgaactggaaatcgcaaatgatccagacaaaataaaaacacaacttgcacaacataaggagtttcagaaatcactcggagccaagcattctgtctacgacaccaccaacaggactggacgttctctgaaggagaaaacctccctggctgatgacaacctgaaactggatgacatgctgagtgaactcagagacaaatgggataccatatgtggaaaatctgtggaaagacaaaacaaattggaggaagccctgttattttctggacaattcacagatgccctacaggctctcattgattggttatatagagttgaaccccagctggcagaagaccagcctgttcatggagacattgatttggtgatgaatctgatcgataatcacaaggccttccaaaaagagttggggaagaggaccagcagtgtgcaggccctgaagcgctcagcccgagaactcatagaaggcagtcgggatgactcctcctgggtcaaggtccagatgcaggaattaagcacacgctgggagaccgtgtgtgcactttctatatcaaagcaaacacggttagaagcagccctgcgtcaggcagaggaattccactcggtggtacatgccctcttggagtggctggctgaggcggagcaaaccctgcgtttccatggtgtcctcccagatgatgaggatgctctccggactctcattgatcagcataaagaattcatgaagaaactggaagaaaagagagctgaactaaataaagccaccactatgggcgacaccgttttggctatctgccaccccgactccatcactaccattaagcactggataacaatcatccgggcgaggtttgaggaggtgctggcctgggcaaagcaacatcagcagagattagcaagtgctctggctgggcttattgccaaacaggaattgttggaagctttgctggcttggttgcaatgggctgaaactacacttactgataaggataaagaagtcatcccccaggagatcgaagaggtgaaagcactcattgcagaacaccagaccttcatggaggaaatgaccagaaaacagcctgatgttgataaagtaacgaagacctataagaggagagctgctgatccttcctcattacaatcccatattccagtcttggataagggacgagcaggaagaaaacgctttccagcatcaagcttgtatccctctgggtcacagacacaaattgaaaccaaaaatcctagggtaaacttactggtgagcaaatggcagcaagtctggctcctggcgttggaaagaaggaggaaactcaatgatgccttggacagactagaggagctgagggaatttgctaactttgattttgatatctggcgcaaaaaatacatgcgatggatgaatcacaagaaatctcgagtgatggacttcttcaggagaattgataaagaccaggatgggaaaataacgcggcaggaatttattgatggaattctttcctcaaagtttccaaccagtcgcttggagatgagcgcagttgcagacatctttgacagagatggcgatggatatattgactactatgaatttgtagcagcccttcacccaaataaagatgcatataaacctatcacagatgccgacaaaatcgaagatgaggtgacaaggcaggtagctaagtgtaaatgtgcaaagcgatttcaagttgagcagattggtgataataaatacaggttcttcctgggaaatcagtttggagactcccagcaactgcgactggtccggatcctgcggagtactgtgatggttcgtgttggaggtggatggatggcacttgatgagttcttagtgaaaaatgatccttgcagggttcatcatcatgggagtaaaatgttacgttcggaatcaaactcttcaattactactactcagcctactatagccaaaggaaggacaaacatggaactgcgtgagaagttcattttagcagatggtgccagccagggtatggctgctttccgaccccgaggccgaagatcccggccatcatcacgaggcgcttcacccaacagatccacttctgtgtccagtcaggctgcgcaggcggcctccccacaggtccctgccaccaccacacccaagggaacgccaatacaaggaagcaagcttcgacttccaggatatttatcagggaaaggcttccactctggggaggacagtggcttgataacaactgcagctgccagagtccgaacacagtttgctgattccaagaagactcccagccgaccaggaagtcgagctggaagcaaagctggcagcagggccagcagccgccgaggcagtgatgcatcagactttgacatttcagaaatccagtccgtgtgctcagatgtggaaactgtcccccagacacacagacctacaccccgagcaggttctcggccatccacagcgaagccttcaaaaatccccacgccccagaggaaatcacctgccagcaaattggacaagtcctcaaagagatagtgcaattggttctaccaaggcccttccttgagcattt

SEQ ID NO: 128701 - DNA, 18085 bp, Homo sapiens
  Payload ID: 5186
  Gene Symbol: DST
  Gene Name: dystonin
  ENST ID: ENST00000370754
  CDS Start-End: 42-17069
ctccagccccgccgtcgagtcgccctcgcctcgcccgcaccatgatcgccgcggctttcctcgtcttgctgagaccctacagcatccaatgtgccctcttcctcttgttgcttctgctgggcaccatcgccaccatcgtcttcttctgctgctggcaccgcaagctccagaaagggaggcatccgatgaaatcggtcttctcgggtcgttcaagaagccgagatgctgttttgagatcgcaccactttcgttctgagggattcagagcaagccctcggcatcttagaagacgagttgcagcggccgcagctgcccgtctggaagaagtgaagcccgtggtggaagttcaccatcagagtgagcaagaaacttcagtgaggaaacgaagaatcaagaagagcagccgagtccagccagaattttatcactctgttcaaggtgcttcaatcaggaggcctagttccgggaacgcgtcctatcgctgctctatgtcttcctctgcggatttttccgatgaggatgatttcagccagaaatctggctccgcatccccagctccgggagacaccttaccctggaatttgcctaaacatgagagatcgaaaagaaagattcaagggggctcagtgctggaccctgccgagagggcagtgcttcggatagcagatgaacgggacaaagttcagaagaaaacatttacaaaatggataaatcagcatctcatgaaggttcgaaaacatgtgaatgatctctatgaagacttaagggatggacacaatttgatttctcttttagaggttctttcaggagataccttgcccagagaaaaaggtcggatgcgttttcacagactacagaatgtacaaattgcacttgactatttgaaaagacgccaggtgaaattagtgaatattagaaatgatgacataacagatggaaatcccaaattgactttgggattaatctggacaataattttgcactttcagatatctgatatccatgttactggagagtcagaggatatgtctgcaaaagagagattgctactctggacgcagcaggcaacagagggttatgctggaattcggtgtgaaaatttcactacctgctggagagatggaaaattatttaatgccatcattcataaatacaggccggacctgatagatatgaatactgttgctgttcaaagcaaccttgcaaatttagagcatgctttttacgtagcagaaaaaattggtgttataagacttctggaccctgaagatgtcgatgtctcctcacctgatgaaaaatcagtaataacttacgtgtcatctctctatgatgcatttcctaaagtccctgaaggtggggaaggcattggtgcaaatgatgttgaagtcaaatggattgaataccagaatatggtgaactacctcatccaatggattagacaccatgtgaccacaatgtctgagagaacatttcctaataatcctgtagaactgaaggcactttataatcagtatttacagtttaaagaaacagaaattccaccaaaggagacagaaaaatcaaaaattaaacgtctatataaattattagagatttggatagaatttggacgcatcaagctccttcaaggttatcatccaaatgacatagaaaaagagtgggggaaactcattattgccatgctagagagagagaaggcccttcgtccagaagtagaaaggttagaaatgttgcaacagattgccaacagagttcagagggacagtgtcatctgtgaagacaaactgattcttgctggaaatgctcttcagtctgattctaaaagattagaatcaggagtgcagtttcagaatgaagcagaaattgctgggtatatacttgaatgtgagaaccttttacgccagcatgtaattgatgtacagattcttattgatggaaaatactaccaggcagatcaattggtacagagggttgcaaaactgcgtgacgaaattatggccttaaggaacgaatgttcttctgtgtacagcaaaggacgcatactgacaacagaacagacaaagctcatgatatcaggaatcactcaaagtttaaactcaggatttgcacagaccttacaccctagtctgacctcagggctgacccagagtttaacaccttccctaacctcttctagtatgacttctggcctgtcatcagggatgacttcccgcctgactccatctgtcactccagcttatacacctggtttcccatcaggattagttccaaatttcagttcaggagtagagccaaattcattgcaaactttgaagttgatgcagatccgaaaaccccttctaaagtcttctttgctggatcaaaatttaacagaagaagaaatcaatatgaaatttgttcaggatcttttgaattgggttgatgagatgcaggtacaactggaccgcactgagtggggctcagatttgccaagtgttgaaagccatttagaaaatcataaaaatgttcatagagctattgaagaatttgaatctagtctcaaagaagctaaaatcagtgagattcaaatgacagcacctcttaaactgacttatgcagaaaagttgcacagattagagagtcagtatgcaaaactcttgaatacatccaggaatcaagaacggcaccttgatacactccataattttgtaagtcgtgcgactaatgaacttatttggttgaatgaaaaagaagaggaggaagttgcttatgactggagtgagagaaacaccaacatagctaggaaaaaagattatcatgctgaattaatgagagaacttgatcaaaaggaagaaaatattaaatcagttcaggagatagcagagcagctacttctagaaaatcatccagcccggttaactattgaggcctacagagcggcaatgcagacgcagtggagctggatcttacagctctgccagtgtgtggagcagcacataaaggagaacacagcgtatttcgagtttttcaatgatgccaaagaagctactgattacttaaggaatctaaaagatgccattcagcggaagtacagctgtgatagatcaagcagcattcacaagctagaagaccttgttcaggaatcaatggaagagaaagaagaacttctgcagtacaaaagcactatagcaaacctaatgggaaaagcaaaaacaataattcaactgaagccaaggaattctgactgtccactcaaaacttctattccgatcaaagctatctgtgactacagacaaattgagataaccatttacaaagacgatgaatgtgttttggcgaataactctcatcgtgctaaatggaaggtcattagtcctactgggaatgaggctatggtcccatctgtgtgcttcaccgttcctccaccaaacaaagaagcggtggaccttgccaacagaattgagcaacagtatcagaatgtcctgactctttggcatgagtctcacataaacatgaagagtgtagtatcctggcattatctcatcaatgaaattgatagaattcgagctagcaatgtggcttcaataaagacaatgctacctggtgaacatcagcaagttctaagtaatctacaatctcgttttgaagattttctggaagatagccaggaatcccaagtcttttcaggctcagatataacacaactggaaaaggaggttaatgtatgtaagcagtattatcaagaacttcttaaatctgcagaaagagaggagcaagaggaatcagtttataatctctacatctctgaagttcgaaacattagacttcggttagagaactgtgaagatcggctgattagacagattcgaactcccctggaaagagatgatttgcatgaaagtgtgttcagaatcacagaacaggagaaactaaagaaagagctggaacgacttaaagatgatttgggaacaatcacaaataagtgtgaggagtttttcagtcaagcagcagcctcttcatcagtccctaccctacgatcagagcttaatgtggtccttcagaacatgaaccaagtctattctatgtcttccacttacatagataagttgaaaactgttaacttggtgttaaaaaacactcaagctgcagaagccctcgtaaaactctatgaaactaaactgtgtgaagaagaagcagttatagctgacaagaataatattgagaatctaataagtactttaaagcaatggagatctgaagtagatgaaaagagacaggtattccatgccttagaggatgagttgcagaaagctaaagccatcagtgatgaaatgtttaaaacgtataaagaacgggaccttgattttgactggcacaaagaaaaagcagatcaattagttgaaaggtggcaaaatgttcatgtgcagattgacaacaggttacgggacttagagggcattggcaaatcactgaagtactacagagacacttaccatcctttagatgattggatccagcaggttgaaactactcagagaaagattcaggaaaatcagcctgaaaatagtaaaaccctagccacacagttgaatcaacagaagatgctggtgtccgaaatagaaatgaaacagagcaaaatggacgagtgtcaaaaatatgcagaacagtactcagctacagtgaaggactatgaattacaaacaatgacctaccgggccatggtagattcacaacaaaaatctccagtgaaacgccgaagaatgcagagttcagcagatctcattattcaagagttcatggacctaaggactcgatatactgccctggtcactctcatgacacaatatattaaatttgctggtgattcattgaagaggctggaagaggaggagaagtcactggaagaagaaaagaaagaacatgttgaaaaagccaaagaattgcaaaaatgggtatcaaatatcagcaagacattgaaagatgcagagaaggctggaaaacctcccttctctaagcaaaagatttccagtgaggaaatatcaaccaagaaggaacaattatcggaagcacttcaaactatacagctttttttggcaaaacatggagacaaaatgacagatgaagaaagaaatgaattggaaaaacaagtgaaaactcttcaggaaagttataatttattattcagtgaatctctgaaacagctacaagaatcacaaacctcaggagatgtaaaggtagaggagaagattgtagcagagcgtcagcaggagtataaagagaaactccaagggatatgtgatcttcttacccaaactgaaaaccgcctaattggtcaccaagaagccttcatgattggagatggcacagttgagttaaagaaatatcagtccaagcaagaggaattacagaaagatatgcaaggaagtgcacaggcattggctgaagtagtgaaaaacacagagaacttcttaaaagagaatggtgaaaagctgtcacaggaagataaggctttgattgaacagaaacttaatgaagctaagataaagtgtgaacagcttaatttaaaagcagaacagtctaaaaaggagctggataaagttgtgacaacagcaatcaaggaagaaactgaaaaggtagcagcagtgaagcagctggaagagagcaaaaccaaaatagaaaaccttttggactggttgtcaaatgttgacaaagactcagaaagggcagggacaaaacacaaacaggtaatcgaacagaacgggacccattttcaagaaggtgatggcaagtcagcaattggagaagaggatgaagttaatggtaacctgttggagactgatgttgatgggcaagttggaaccactcaggagaatctgaatcagcaatatcagaaagttaaggcccaacacgagaagatcatctctcagcaccaagcagtgatcatagccactcagtctgcacaagtgttgcttgagaaacagggtcagtatctctctcctgaagaaaaagagaaactgcaaaagaacatgaaggaactgaaagtgcattatgaaactgcactggctgagtcagagaagaaaatgaagttaactcactctctgcaggaagaattagaaaagtttgatgctgactataccgagtttgagcactggctacagcagtcagaacaagaacttgaaaacctggaggcaggtgcagatgacatcaatggtttaatgaccaaattgaagaggcagaagagtttctcagaagacgttatttctcacaaaggtgacttgagatacatcacaatttctggaaacagagtgttggaagctgccaaatcttgcagcaagagagacggtggcaaggttgatacttctgcaacccacagagaagtgcagcgcaagttggatcatgctactgatcggttcaggtctctctactctaagtgcaatgttcttggaaataatcttaaagatctggtggataaatatcaacactatgaagatgcttcatgtggacttcttgctggactccaggcctgtgaggccacagcgagcaaacacttatctgaacctattgcggtggaccccaaaaatcttcaaaggcaattagaagagaccaaggctttgcaaggacagatatcaagtcagcaggttgctgtagagaaactgaagaaaacggctgaagtgcttttagatgccaggggatctttacttccagccaagaatgatatccagaaaacacttgatgacattgttgggagatatgaggatctgtccaagtctgttaatgaacgaaatgaaaaactccagataaccttgacccgttcactgagtgtgcaggatggcttggatgaaatgctggactggatgggaaatgtggaaagttctctgaaagaacaaggtcaagtgcctttaaactctactgctcttcaggatattatcagtaaaaacattatgttggaacaggatattgcaggtcgtcagagcagtataaatgccatgaatgaaaaagtgaagaaatttatggaaacaacagatccatccactgcatcctcactgcaagccaaaatgaaagacttgtctgctcggttttcagaagcaagtcataaacacaaagaaactcttgccaaaatggaggagctaaaaaccaaagtagaactgtttgagaacctctcagaaaagctccagacatttttagaaacaaaaactcaggctcttactgaagtagatgtgccaggaaaagatgttactgaattgtctcagtatatgcaggaatcaacttctgaatttttagaacacaagaaacatcttgaagttttgcatagtctcttgaaggagatatccagccatggcttaccaagtgataaggctttggtccttgaaaaaacaaataatttgtcaaagaaattcaaggaaatggaggataccatcaaagaaaaaaaagaagctgtaacttcttgtcaagaacagttggatgctttccaagttcttgttaaatcattgaagtcatggataaaagaaacaacaaaaaaagttcccattgtacagccttcttttggtgcagaggatttaggaaaatctttggaagacactaagaaattacaagaaaagtggagtttaaaaacaccagagattcagaaagtaaacaacagtgggatctcactatgtaacttaataagtgctgtgaccacccctgcaaaggcaatagcagcagttaaatcaggtggagcagtattaaatggtgaaggaacagccacaaatactgaggaattttgggcaaataaaggtttaacatccattaaaaaggacatgactgacataagtcatggttatgaagatcttggcctcttactcaaggacaaaatagcggaactgaacactaaactctccaaattgcaaaaggctcaggaagaatcaagtgcaatgatgcagtggttacagaaaatgaacaaaactgcaacaaaatggcagcagacacctgcacctacagatactgaagctgtgaagactcaagttgagcagaataagtcgtttgaggcagaactgaagcagaatgtaaacaaagtacaggagttgaaagacaaattgacagagctgttggaggagaacccagatactcctgaggcccccagatggaaacagatgttgacagaaatagattctaagtggcaagaactcaatcaattaacaattgatagacaacaaaaactggaagaatcctccaataatctaacccagttccagactgtagaggcccaattgaaacagtggcttgtggaaaaagaacttatggtcagtgttcttgggcccttgtcaattgacccaaatatgctaaacacacaaaggcagcaggtgcagattttgctgcaagaattcgccactcggaaacctcaatatgaacagctgacagcagctggtcagggcattctgagcaggcctggagaagacccttctttacgtgggattgtgaaagagcaactggcagctgtgacccaaaaatgggatagcctaacagggcaattgagtgacagatgtgactggattgaccaagccattgttaaaagcacacagtatcaaagcctgctgagaagcctttctgataaactgagtgacttggataataaactcagcagcagtctggctgtgagcacgcaccctgatgctatgaaccaacagttggaaacagcccaaaaaatgaagcaggagatacagcaggaaaagaagcagataaaagtggcccaggcactctgtgaggatttgtcagcactggttaaagaagagtacttgaaagcagaacttagtaggcaactagaaggcatcttaaaatcatttaaggatgttgaacagaaagcagagaatcatgtccagcaccttcagtcggcctgtgcaagctctcatcaatttcagcaaatgtctagagattttcaggcttggctggatacaaagaaagaagagcaaaacaaatctcatccaatatctgccaaactcgatgtcttggagtcattaattaaagatcataaagactttagtaaaactttgaccgctcagtctcatatgtatgaaaaaaccattgcagaaggtgaaaatctgttattaaaaacacaagggtctgagaaggcagccttacagttacagcttaatacaattaaaaccaattgggatacatttaataagcaggtgaaagaaagagaaaacaagttaaaagagtcattggaaaaagcccttaagtataaagagcaagtagagactctctggccatggatagacaaatgccaaaacaacctggaggaaataaaattttgcttggatcctgctgaaggagagaattctattgccaagttaaagtctctgcagaaggaaatggaccaacactttggtatggtagaattactgaacaacacagccaatagcttgctcagtgtctgtgagatagataaagaagttgttacagatgagaataagtcactgatccagaaggtggacatggtcactgaacaacttcacagtaagaaattctgtctggagaacatgactcagaagtttaaagaatttcaagaagtttccaaagaatctaaaaggcagcttcagtgtgcaaaggagcagctagatatccatgattcgctgggatcccaggcttacagtaacaaatacctgaccatgttgcaaactcagcagaaatcacttcaggccttgaagcatcaggtagatttggctaaaagacttgcacaggaccttgtggtagaggcctcagactcaaagggaacctctgatgttttattacaagtggaaaccatagctcaagagcatagtacactaagtcagcaggttgatgaaaagtgttctttcttagaaaccaagcttcagggcattgggcatttccagaataccattcgagaaatgttttctcagttcgcagagtttgatgatgaactggatagcatggctccagtggggagagatgcagaaacattgcaaaagcaaaaggaaactataaaagcctttctaaagaaactagaagccctcatggcaagcaatgacaatgccaataaaacctgcaagatgatgttagccacagaagaaacctctcctgaccttgttggaatcaaaagggacttggaggccttaagcaaacaatgcaacaagttactggaccgagcccaagccagagaagagcaggttgaagggacaattaagcgccttgaagaattttacagcaaattgaaagaattttctattctgctccagaaagccgaagaacatgaagagtcacaaggtcctgttggtatggaaacggagacaattaatcagcagcttaacatgttcaaggtattccagaaagaagagattgaacccttgcaaggtaaacagcaagatgtaaactggttaggtcaaggccttattcagagtgctgccaaaagcactagcactcagggcttggagcatgacctggatgatgtcaatgcacggtggaagactctcaataagaaggtggctcagcgagcagcccagctgcaggaggccttgctgcactgtgggaggttccaggatgccctggagtccctgctcagctggatggtggacactgaggagcttgtggccaatcagaagcccccgtcggctgagttcaaagtggtaaaggcccagatacaagaacaaaagcttctccagagattgttggatgaccgaaaatctacggtggaggtaatcaaacgagaaggagaaaaaattgctacaacagcagagcccgcagataaagtgaagattttgaaacagctcagtctcttggatagcagatgggaggcattgcttaataaagctgaaacaaggaatcgtcagttggaaggtatctcggtggtagcacagcaatttcatgaaaccttagaaccactgaacgagtggcttacaaccatagaaaagaggctggtgaattgtgaacccataggaacccaagcatctaaacttgaggaacaaattgcacagcacaaagccttagaagatgacatcatcaatcacaataaacatttacaccaggctgttagcattggccagtccttaaaggttttgagctccagggaggataaagatatggtgcagagtaaattagacttctctcaagtatggtacattgagattcaagagaaaagtcacagcaggtctgagctcctccagcaggccttatgtaatgctaagatttttggggaagatgaagttgaactgatgaactggctgaatgaagtgcatgacaaactgagcaagctctcagtccaggattacagcactgaggggctatggaagcagcagtctgaacttcgggttctgcaagaggacatcttactcaggaaacaaaatgtagatcaggctttactaaatggtttagaactacttaaacaaaccacaggtgatgaagttttaataattcaagataaattggaagccattaaagcaaggtacaaagacattactaaactgagcactgatgtggccaagactctggaacaggcgctgcagcttgcaaggcggctgcactccacacacgaagagctgtgtacctggctggacaaagtggaggtggaattactttcatatgaaactcaggttctgaaaggagaagaagcaagtcaagcacaaatgagaccaaaggaactgaaaaaggaagctaagaacaacaaagccttactggactcccttaatgaagtgagcagtgctttgctggaactggtaccatggagggcaagagaaggacttgagaaaatggtagctgaggacaatgagcgctaccgattagtgagcgacaccatcactcagaaggtggaggagatcgatgcagccattctgcgatcacagcagtttgaccaagcagctgatgctgagttatcctggattactgaaacagaaaaaaaattgatgtctctgggtgacatcaggcttgagcaagaccagacttctgctcagcttcaagttcaaaagacattcaccatggagattttgagacacaaggatattattgatgaccttgttaaatctgggcataaaatcatgaccgcatgcagtgaagaggaaaagcaatcaatgaagaaaaaactggacaaggtactgaagaactatgataccatctgccagattaattcagaaaggtatctgcagctggaacgggcacagtccctggttaaccaattctgggaaacatatgaagaactttggccatggctgacagaaacacaatcaatcatctctcagcttcccgccccagcccttgaatatgaaactctaaggcagcagcaggaagaacatcggcaactgcgtgagttgatagctgaacacaagcctcatatagataagatgaacaaaactgggccacagttactggaattgagccctggggaaggcttttctatccaagagaagtatgtggcagccgacaccctttacagtcaaattaaagaagatgtcaaaaagcgtgctgtggcactggatgaagccatttctcaatcaactcagttccatgacaagatagatcagatccttgagagcctggaacgcatcgtggaacgtctgaggcagccaccctctatctctgcagaggttgagaagatcaaggaacagatcagtgaaaataagaatgtgtcagtagacatggaaaagctacagccgttgtatgaaactcttaaacagaggggagaggaaatgattgctagatctggggggactgataaagacatatctgccaaagctgttcaggataagcttgaccaaatggttttcatttgggagaacatacacacactggtggaagagagggaagccaaactactggatgtgatggagctagcagaaaagttctggtgtgatcacatgtcattgatagttaccattaaagatactcaagatttcatccgggacctggaagatcctggaattgatccttcagtagtaaaacaacagcaagaagcagcagagaccataagggaagaaatagatggactacaggaggagctggatatagttattaacctaggttctgaactcattgcggcatgtggggagcctgataaacccattgtcaagaagagtatagatgagttaaattcagcatgggattctctaaataaagcttggaaagaccggattgacaaacttgaggaggcaatgcaggctgccgttcagtaccaggatggactgcaggcggtatttgactgggtagatattgcaggtggtaaattagcttcaatgtctccaattggaacagatctcgaaactgtcaagcagcagattgaagagctaaagcaatttaagtctgaggcctatcaacagcagatagaaatggaaagactgaatcatcaagcagagcttttgctaaagaaagtaacagaagagagtgacaaacacactgttcaagacccattaatggaactgaaattgatatgggatagcctggaggagagaatcatcaacagacagcataaactggagggtgctctattagccttgggtcagttccaacatgccctggatgagctcctggcatggctgacacacaccgagggcttgctaagtgagcagaaacctgttggaggagaccctaaagccattgaaattgaacttgccaagcatcatgtgctccaaaatgatgtattagcccatcagtccacagtggaagccgttaataaagcaggaaatgatctaattgaatcaagtgcaggagaagaagcaagcaaccttcagaacaagctagaggttttaaatcaacgctggcaaaatgttttggaaaaaacagaacaaaggaagcagcagctggatggtgccttgcgccaggccaaagggttccatggcgaaattgaggatttgcagcagtggctgactgacacggagcgtcatctgttggcatctaaaccgctgggaggtttaccggaaacagccaaggagcagcttaatgtccatatggaagtctgtgctgcctttgaagctaaagaagaaacatataagagtctgatgcagaaaggccagcagatgcttgcaagatgcccaaaatctgcagagacaaatattgaccaagacataaataacttgaaagaaaaatgggaatcggtggaaaccaaactcaatgaaaggaaaactaaactggaagaggctctcaacttggcaatggagttccacaattctctccaagacttcatcaactggcttactcaggctgaacagaccctaaatgtagcttctcggccaagtctcatcttggacacagtcttatttcaaattgacgaacacaaggtttttgccaatgaagtaaattctcatcgtgagcagataatagagctggacaaaactggaacccacctaaaatattttagtcagaaacaagatgttgttctaatcaagaatctacttatcagtgtacaaagtcgatgggaaaaagtggttcaacggttggtagagagaggaagatctttggatgatgcaaggaagagagccaagcagttccatgaagcttggagtaaacttatggagtggctagaagagtcagaaaagtctttggattctgaactggaaatcgcaaatgatccagacaaaataaaaacacaacttgcacaacataaggagtttcagaaatcactcggagccaagcattctgtctacgacaccaccaacaggactggacgttctctgaaggagaaaacctccctggctgatgacaacctgaaactggatgacatgctgagtgaactcagagacaaatgggataccatatgtggaaaatctgtggaaagacaaaacaaattggaggaagccctgttattttctggacaattcacagatgccctacaggctctcattgattggttatatagagttgaaccccagctggcagaagaccagcctgttcatggagacattgatttggtgatgaatctgatcgataatcacaaggccttccaaaaagagttggggaagaggaccagcagtgtgcaggccctgaagcgctcagcccgagaactcatagaaggcagtcgggatgactcctcctgggtcaaggtccagatgcaggaattaagcacacgctgggagaccgtgtgtgcactttctatatcaaagcaaacacggttagaagcagccctgcgtcaggcagaggaattccactcggtggtacatgccctcttggagtggctggctgaggcggagcaaaccctgcgtttccatggtgtcctcccagatgatgaggatgctctccggactctcattgatcagcataaagaattcatgaagaaactggaagaaaagagagctgaactaaataaagccaccactatgggcgacaccgttttggctatctgccaccccgactccatcactaccattaagcactggataacaatcatccgggcgaggtttgaggaggtgctggcctgggcaaagcaacatcagcagagattagcaagtgctctggctgggcttattgccaaacaggaattgttggaagctttgctggcttggttgcaatgggctgaaactacacttactgataaggataaagaagtcatcccccaggagatcgaagaggtgaaagcactcattgcagaacaccagaccttcatggaggaaatgaccagaaaacagcctgatgttgataaagtaacgaagacctataagaggagagctgctgatccttcctcattacaatcccatattccagtcttggataagggacgagcaggaagaaaacgctttccagcatcaagcttgtatccctctgggtcacagacacaaattgaaaccaaaaatcctagggtaaacttactggtgagcaaatggcagcaagtctggctcctggcgttggaaagaaggaggaaactcaatgatgccttggacagactagaggagctgagggaatttgctaactttgattttgatatctggcgcaaaaaatacatgcgatggatgaatcacaagaaatctcgagtgatggacttcttcaggagaattgataaagaccaggatgggaaaataacgcggcaggaatttattgatggaattctttcctcaaagtttccaaccagtcgcttggagatgagcgcagttgcagacatctttgacagagatggcgatggatatattgactactatgaatttgtagcagcccttcacccaaataaagatgcatataaacctatcacagatgccgacaaaatcgaagatgaggtgacaaggcaggtagctaagtgtaaatgtgcaaagcgatttcaagttgagcagattggtgataataaatacaggttcttcctgggaaatcagtttggagactcccagcaactgcgactggtccggatcctgcggagtactgtgatggttcgtgttggaggtggatggatggcacttgatgagttcttagtgaaaaatgatccttgcagggccaaaggaaggacaaacatggaactgcgtgagaagttcattttagcagatggtgccagccagggtatggctgctttccgaccccgaggccgaagatcccggccatcatcacgaggcgcttcacccaacagatccacttctgtgtccagtcaggctgcgcaggcggcctccccacaggtccctgccaccaccacacccaagattctccatcctttaacacgcaattatggtaaaccatggttgacaaacagcaaaatgtcaactccttgtaaagcagcagagtgctcagactttcccgtgccatctgcagagggaacgccaatacaaggaagcaagcttcgacttccaggatatttatcagggaaaggcttccactctggggaggacagtggcttgataacaactgcagctgccagagtccgaacacagtttgctgattccaagaagactcccagccgaccaggaagtcgagctggaagcaaagctggcagcagggccagcagccgccgaggcagtgatgcatcagactttgacatttcagaaatccagtccgtgtgctcagatgtggaaactgtcccccagacacacagacctacaccccgagcaggttctcggccatccacagcgaagccttcaaaaatccccacgccccagaggaaatcacctgccagcaaattggacaagtcctcaaagagatagtgcaattggttctaccaaggcccttccttgagcatttattatttaagtttgaacgatgtaaaatatggtgtagaaattcttgtgaaatattgcaagaggcgagtttaaaattctgcagatggccttatttgtgtatttgtctttttattttatctgtataattttttttgtcagatattctggggttaaagtcacatcatatgtgaggaggaaaagtttaacatgaactaacatttctgcactgtaacgtgccgggcacacactaaactcagttactgtacctacaggtaagtctacatcctctctgacagccacagcactacatcaatccctgacgttagggatacctcatgacattttcctgtttttatggaaactctgagaagctgaatgatacatgcaggggatattttttgagatgatttaaatgtaaaccaaaagatggaagacaaaaagacaaacacacccacacgcagtctttgcagtatctgacagagaactcacaggaagttacttcaagcacttgccagtactatgatattcaagtaccttgcagcatttctctgccattgctttcaatgaggccagaggcatcctggatattagacctattatactgtaagaatataagtataaagtgcgttcatatacatgtgaggttttcttttgcttgagtggacagtagcacctgtatcattgaactcattttgtatcagagcaattttgcttgcagaaagctatgaaataaaacacgtcccttaactgcattgctatggaattaattttttttccccagggaaaactagtgtatttttttatgagcaatatcaatttggagtgaccaaaagatacttaaaaatgggtttattttgatttctcatctgaaataatcatgttctggtattatatctatctatatttaataaatatatacattttaatttattatgtgtactcacatactatagaaagatattagtatgcatttaataaaacatattcacttgaatatatgg

SEQ ID NO: 128702 - DNA, 8999 bp, Homo sapiens
  Payload ID: 5186
  Gene Symbol: DST
  Gene Name: dystonin
  Uniprot ID: Q03001
  ENST ID: ENST00000370765
  CDS Start-End: 109-8058
aatattcagctgccacttttcaccgttagaagtagagctttttccagacctcctaccttttagtctactttgaaaggtgaaagaaagaacatcgtttcaggaataaaaatgcacagtagtagttatagttaccgtagcagtgattctgtgtttagtaacactaccagcactcgaaccagtcttgattcaaatgaaaatcttctcttggttcattgtggtccaacactgatcaactcttgcattagcttcggcagtgaatcctttgatggacacaggttagaaatgttgcaacagattgccaacagagttcagagggacagtgtcatctgtgaagacaaactgattcttgctggaaatgctcttcagtctgattctaaaagattagaatcaggagtgcagtttcagaatgaagcagaaattgctgggtatatacttgaatgtgagaaccttttacgccagcatgtaattgatgtacagattcttattgatggaaaatactaccaggcagatcaattggtacagagggttgcaaaactgcgtgacgaaattatggccttaaggaacgaatgttcttctgtgtacagcaaaggacgcatactgacaacagaacagacaaagctcatgatatcaggaatcactcaaagtttaaactcaggatttgcacagaccttacaccctagtctgacctcagggctgacccagagtttaacaccttccctaacctcttctagtatgacttctggcctgtcatcagggatgacttcccgcctgactccatctgtcactccagcttatacacctggtttcccatcaggattagttccaaatttcagttcaggagtagagccaaattcattgcaaactttgaagttgatgcagatccgaaaaccccttctaaagtcttctttgctggatcaaaatttaacagaagaagaaatcaatatgaaatttgttcaggatcttttgaattgggttgatgagatgcaggtacaactggaccgcactgagtggggctcagatttgccaagtgttgaaagccatttagaaaatcataaaaatgttcatagagctattgaagaatttgaatctagtctcaaagaagctaaaatcagtgagattcaaatgacagcacctcttaaactgacttatgcagaaaagttgcacagattagagagtcagtatgcaaaactcttgaatacatccaggaatcaagaacggcaccttgatacactccataattttgtaagtcgtgcgactaatgaacttatttggttgaatgaaaaagaagaggaggaagttgcttatgactggagtgagagaaacaccaacatagctaggaaaaaagattatcatgctgaattaatgagagaacttgatcaaaaggaagaaaatattaaatcagttcaggagatagcagagcagctacttctagaaaatcatccagcccggttaactattgaggcctacagagcggcaatgcagacgcagtggagctggatcttacagctctgccagtgtgtggagcagcacataaaggagaacacagcgtatttcgagtttttcaatgatgccaaagaagctactgattacttaaggaatctaaaagatgccattcagcggaagtacagctgtgatagatcaagcagcattcacaagctagaagaccttgttcaggaatcaatggaagagaaagaagaacttctgcagtacaaaagcactatagcaaacctaatgggaaaagcaaaaacaataattcaactgaagccaaggaattctgactgtccactcaaaacttctattccgatcaaagctatctgtgactacagacaaattgagataaccatttacaaagacgatgaatgtgttttggcgaataactctcatcgtgctaaatggaaggtcattagtcctactgggaatgaggctatggtcccatctgtgtgcttcaccgttcctccaccaaacaaagaagcggtggaccttgccaacagaattgagcaacagtatcagaatgtcctgactctttggcatgagtctcacataaacatgaagagtgtagtatcctggcattatctcatcaatgaaattgatagaattcgagctagcaatgtggcttcaataaagacaatgctacctggtgaacatcagcaagttctaagtaatctacaatctcgttttgaagattttctggaagatagccaggaatcccaagtcttttcaggctcagatataacacaactggaaaaggaggttaatgtatgtaagcagtattatcaagaacttcttaaatctgcagaaagagaggagcaagaggaatcagtttataatctctacatctctgaagttcgaaacattagacttcggttagagaactgtgaagatcggctgattagacagattcgaactcccctggaaagagatgatttgcatgaaagtgtgttcagaatcacagaacaggagaaactaaagaaagagctggaacgacttaaagatgatttgggaacaatcacaaataagtgtgaggagtttttcagtcaagcagcagcctcttcatcagtccctaccctacgatcagagcttaatgtggtccttcagaacatgaaccaagtctattctatgtcttccacttacatagataagttgaaaactgttaacttggtgttaaaaaacactcaagctgcagaagccctcgtaaaactctatgaaactaaactgtgtgaagaagaagcagttatagctgacaagaataatattgagaatctaataagtactttaaagcaatggagatctgaagtagatgaaaagagacaggtattccatgccttagaggatgagttgcagaaagctaaagccatcagtgatgaaatgtttaaaacgtataaagaacgggaccttgattttgactggcacaaagaaaaagcagatcaattagttgaaaggtggcaaaatgttcatgtgcagattgacaacaggttacgggacttagagggcattggcaaatcactgaagtactacagagacacttaccatcctttagatgattggatccagcaggttgaaactactcagagaaagattcaggaaaatcagcctgaaaatagtaaaaccctagccacacagttgaatcaacagaagatgctggtgtccgaaatagaaatgaaacagagcaaaatggacgagtgtcaaaaatatgcagaacagtactcagctacagtgaaggactatgaattacaaacaatgacctaccgggccatggtagattcacaacaaaaatctccagtgaaacgccgaagaatgcagagttcagcagatctcattattcaagagttcatggacctaaggactcgatatactgccctggtcactctcatgacacaatatattaaatttgctggtgattcattgaagaggctggaagaggaggagattaaaaggtgtaaggagacttctgaacatggggcatattcagatctgcttcagcgtcagaaggcaacagtgcttgagaatagcaaacttacaggaaagataagtgagttggaaagaatggtagctgaactaaagaaacaaaagtcccgagtagaggaagaacttccgaaggtcagggaggctgcagaaaatgaattgagaaagcagcagagaaatgtagaagatatctctctgcagaagataagggctgaaagtgaagccaagcagtaccgcagggaacttgaaaccattgtgagagagaaggaagccgctgaaagagaactggagcgggtgaggcagctcaccatagaggccgaggctaaaagagctgccgtggaagagaacctcctgaattttcgcaatcagttggaggaaaacacctttaccagacgaacactggaagatcatcttaaaagaaaagatttaagtctcaatgatttggagcaacaaaaaaataaattaatggaagaattaagaagaaagagagacaatgaggaagaactcttgaagctgataaagcagatggaaaaagaccttgcatttcagaaacaggtagcagagaaacagttgaaagaaaagcagaaaattgaattggaagcaagaagaaaaataactgaaattcagtatacatgtagagaaaatgcattgccagtgtgtccgatcacacaggctacatcatgcagggcagtaacgggtctccagcaagaacatgacaagcagaaagcagaagaactcaaacagcaggtagatgaactaacagctgccaatagaaaggctgaacaagacatgagagagctgacatatgaacttaatgccctccagcttgaaaaaacgtcatctgaggaaaaggctcgtttgctaaaagataaactagatgaaacaaataatacactcagatgccttaagttggagctggaaaggaaggatcaggcggagaaagggtattctcaacaactcagagagcttggtaggcaattgaatcaaaccacaggtaaagctgaagaagccatgcaagaagctagtgatctcaagaaaataaagcgcaattatcagttagaattagaatctcttaatcatgaaaaagggaaactacaaagagaagtagacagaatcacaagggcacatgctgtagctgagaagaatattcagcatttaaattcacaaattcattcttttcgagatgagaaagaattagaaagactacaaatctgccagagaaaatcagatcatctaaaagaacaatttgagaaaagccatgagcagttgcttcaaaatatcaaagctgaaaaagaaaataatgataaaatccaaaggctcaatgaagaattggagaaaagtaatgagtgtgcagagatgctaaaacaaaaagtagaggagcttactaggcagaataatgaaaccaaattaatgatgcagagaattcaggcagaatcagagaatatagttttagagaaacaaactatccagcaaagatgtgaagcactgaaaattcaggcagatggttttaaagatcagctacgcagcacaaatgaacacttgcataaacagacaaaaacagagcaggattttcaaagaaaaattaaatgcctagaagaagacctggcgaaaagtcaaaatttggtaagtgaatttaagcaaaagtgtgaccaacagaacattatcatccagaataccaagaaagaagttagaaatctgaatgcggaactgaatgcttccaaagaagagaagcgacgcggggagcagaaagttcagctacaacaagctcaggtgcaagagttaaataacaggttgaaaaaagtacaagacgaattacacttaaagaccatagaggagcagatgacccacagaaagatggttctgtttcaggaagaatctggtaaattcaaacaatcagcagaggagtttcggaagaagatggaaaaattaatggagtccaaagtcatcactgaaaatgatatttcaggcattaggcttgactttgtgtctcttcaacaagaaaactctagagcccaagaaaatgctaagctttgtgaaacaaacattaaagaacttgaaagacagcttcaacagtatcgtgaacaaatgcagcaagggcagcacatggaagcaaatcattaccaaaaatgtcagaaacttgaggatgagctgatagcccagaagcgtgaggttgaaaacctgaagcaaaaaatggaccaacagatcaaagagcatgaacatcaattagttttgctccagtgtgaaattcaaaaaaagagcacagccaaagactgtaccttcaaaccagattttgagatgacagtgaaggagtgccagcactctggagagctgtcctctagaaacactggacaccttcacccaacacccagatcccctctgttgagatggactcaagaaccacagccattggaagagaagtggcagcatcgggttgttgaacagatacccaaagaagtccaattccagccaccaggggctccactcgagaaagagaaaagccagcagtgttactctgagtacttttctcagacaagcaccgagttacagataacttttgatgagacaaaccccattacaagactgtctgaaattgagaagataagagaccaagccctgaacaattctagaccacctgttaggtatcaagataacgcatgtgaaatggaactggtgaaggttttgacacccttagagatagctaagaacaagcagtatgatatgcatacagaagtcacaacattaaaacaagaaaagaacccagttcccagtgctgaagaatggatgcttgaagggtgcagagcatctggtggactcaagaaaggggatttccttaagaagggcttagaaccagagaccttccagaactttgatggtgatcatgcatgttcagtcagggatgatgaatttaaattccaagggcttaggcacactgtgactgccaggcagttggtggaagctaagcttctggacatgagaacaattgagcagctgcgactcggtcttaagactgttgaagaagttcagaaaactcttaacaagtttctgacgaaagccacctcaattgcagggctttacctagaatctacaaaagaaaagatttcatttgcctcagcggccgagagaatcataatagacaaaatggtggctttggcatttttagaagctcaggctgcaacaggttttataattgatcccatttcaggtcagacatattctgttgaagatgcagttcttaaaggagttgttgaccccgaattcagaattaggcttcttgaggcagagaaggcagctgtgggatattcttattcttctaagacattgtcagtgtttcaagctatggaaaatagaatgcttgacagacaaaaaggtaaacatatcttggaagcccagattgccagtgggggtgtcattgaccctgtgagaggcattcgtgttcctccagaaattgctctgcagcaggggttgttgaataatgccatcttacagtttttacatgagccatccagcaacacaagagttttccctaatcccaataacaagcaagctctgtattactcagaattactgcgaatgtgtgtatttgatgtagagtcccaatgctttctgtttccatttggggagaggaacatttccaatctcaatgtcaagaaaacacatagaatttctgtagtagatactaaaacaggatcagaattgaccgtgtatgaggctttccagagaaacctgattgagaaaagtatatatcttgaactttcagggcagcaatatcagtggaaggaagctatgttttttgaatcctatgggcattcttctcatatgctgactgatactaaaacaggattacacttcaatattaatgaggctatagagcagggaacaattgacaaagccttggtcaaaaagtatcaggaaggcctcatcacacttacagaacttgctgattctttgctgagccggttagtccccaagaaagatttgcacagtcctgttgcagggtattggctgactgctagtggggaaaggatctctgtactaaaagcctcccgtagaaatttggttgatcggattactgccctccgatgccttgaagcccaagtcagtacagggggcataattgatcctcttactggcaaaaagtaccgggtggccgaagctttgcatagaggcctggttgatgaggggtttgcccagcagctgcgacagtgtgaattagtaatcacagggattggccatcccatcactaacaaaatgatgtcagtggtggaagctgtgaatgcaaatattataaataaggaaatgggaatccgatgtttggaatttcagtacttgacaggagggttgatagagccacaggttcactctcggttatcaatagaagaggctctccaagtaggtattatagatgtcctcattgccacaaaactcaaagatcaaaagtcatatgtcagaaatataatatgccctcagacaaaaagaaagttgacatataaagaagccttagaaaaagctgattttgatttccacacaggacttaaactgttagaagtatctgagcccctgatgacaggaatttctagcctctactattcttcctaatgggacatgtttaaataactgtgcaaggggtgatgcaggctggttcatgccactttttcagagtatgatgatatcggctacatatgcagtctgtgaattatgtaacatactctatttcttgagggctgcaaattgctaagtgctcaaaatagagtaagttttaaattgaaaattacataagatttaatgcccttcaaatggtttcatttagccttgagaatggttttttgaaacttggccacactaaaatgtttttttttttacgtagaatgtgggataaacttgatgaactccaagttcacagtgtcatttcttcagaactccccttcattgaatagtgatcatttattaaatgataaattgcactcgctgaaagagcacgtcatgaagcaccatggaatcaaagagaaagatataaattcgttcccacagccttcaagctgcagtgttttagattgcttcaaaaaatgaaaaagttttgcctttttctgtatatagtgaccttctttgcatattaaaatgtttaccacaatgtcccatttctagttaagtcttcgcacttgaaagctaacattatgaatattatgtgttggaggaggggaaggattttcttcattctgtgtattttccttacatgtacagtagacgttctctattctatcagccttctatggtacctttttgtcaggacaattaggattgtaatgctaatgcaaaggcagcaattcaaagatcttctagtgcctcatgaataaagttgagatttaaaatttgtaacattgatggaacagctgggaggttagaccaatcattaaggaatgtatgccatagctttctttgctaccataaacattttggaggtgcatctgctatgtgacatggtaaatatggttaagtgaatgaataaaatgttttagtaacctgtgtgtgatgaaaaaaaa

SEQ ID NO: 128703 - DNA, 17657 bp, Homo sapiens
  Payload ID: 5186
  Gene Symbol: DST
  Gene Name: dystonin
  ENST ID: ENST00000370788
  CDS Start-End: 521-16648
cggcggccaggaaatgccgcagatgcgccgcgcagcatccccggtgaaggcagcgcgccggtcctcccgcaccgctgccgcggcctcggcccggcccgaagcacgcgcctcgtgcagggccagcagagcggtcagcgcggccgcagagggtccgggcgcccgccggcccccgcccgccctcgccgcacgccccgctcctccgcttggcgtggcgctgctcgtcgccgcccctgggctcgctgagatttgccgctgctgaaacccgagagggactcgggctcccggagccgggcggcccaccatcggcctgcccggaggcctgggcgtttcctttgccggccctggcgccggcagccccctgcgcccccgctctgcgtcttcggcttccgtgcttctccccagcgtgctgctccttcctcttttccagttcccaaggctgtgtcttgctgactgcgatactgtccgggggttacgagggggagaggggaatttgtcagtcatcgcttagataaacttcggcatggcgggttacctctcccctgctgcttacctgtacgtggaggagcaggagtatctccaggcctacgaggatgtcctggagaggtacaaagatgaacgggacaaagttcagaagaaaacatttacaaaatggataaatcagcatctcatgaaggttcgaaaacatgtgaatgatctctatgaagacttaagggatggacacaatttgatttctcttttagaggttctttcaggagataccttgcccagagaaaaaggtcggatgcgttttcacagactacagaatgtacaaattgcacttgactatttgaaaagacgccaggtgaaattagtgaatattagaaatgatgacataacagatggaaatcccaaattgactttgggattaatctggacaataattttgcactttcagatatctgatatccatgttactggagagtcagaggatatgtctgcaaaagagagattgctactctggacgcagcaggcaacagagggttatgctggaattcggtgtgaaaatttcactacctgctggagagatggaaaattatttaatgccatcattcataaatacaggccggacctgatagatatgaatactgttgctgttcaaagcaaccttgcaaatttagagcatgctttttacgtagcagaaaaaattggtgttataagacttctggaccctgaagatgtcgatgtctcctcacctgatgaaaaatcagtaataacttacgtgtcatctctctatgatgcatttcctaaagtccctgaaggtggggaaggcattggtgcaaatgatgttgaagtcaaatggattgaataccagaatatggtgaactacctcatccaatggattagacaccatgtgaccacaatgtctgagagaacatttcctaataatcctgtagaactgaaggcactttataatcagtatttacagtttaaagaaacagaaattccaccaaaggagacagaaaaatcaaaaattaaacgtctatataaattattagagatttggatagaatttggacgcatcaagctccttcaaggttatcatccaaatgacatagaaaaagagtgggggaaactcattattgccatgctagagagagagaaggcccttcgtccagaagtagaaaggttagaaatgttgcaacagattgccaacagagttcagagggacagtgtcatctgtgaagacaaactgattcttgctggaaatgctcttcagtctgattctaaaagattagaatcaggagtgcagtttcagaatgaagcagaaattgctgggtatatacttgaatgtgagaaccttttacgccagcatgtaattgatgtacagattcttattgatggaaaatactaccaggcagatcaattggtacagagggttgcaaaactgcgtgacgaaattatggccttaaggaacgaatgttcttctgtgtacagcaaaggacgcatactgacaacagaacagacaaagctcatgatatcaggaatcactcaaagtttaaactcaggatttgcacagaccttacaccctagtctgacctcagggctgacccagagtttaacaccttccctaacctcttctagtatgacttctggcctgtcatcagggatgacttcccgcctgactccatctgtcactccagcttatacacctggtttcccatcaggattagttccaaatttcagttcaggagtagagccaaattcattgcaaactttgaagttgatgcagatccgaaaaccccttctaaagtcttctttgctggatcaaaatttaacagaagaagaaatcaatatgaaatttgttcaggatcttttgaattgggttgatgagatgcaggtacaactggaccgcactgagtggggctcagatttgccaagtgttgaaagccatttagaaaatcataaaaatgttcatagagctattgaagaatttgaatctagtctcaaagaagctaaaatcagtgagattcaaatgacagcacctcttaaactgacttatgcagaaaagttgcacagattagagagtcagtatgcaaaactcttgaatacatccaggaatcaagaacggcaccttgatacactccataattttgtaagtcgtgcgactaatgaacttatttggttgaatgaaaaagaagaggaggaagttgcttatgactggagtgagagaaacaccaacatagctaggaaaaaagattatcatgctgaattaatgagagaacttgatcaaaaggaagaaaatattaaatcagttcaggagatagcagagcagctacttctagaaaatcatccagcccggttaactattgaggcctacagagcggcaatgcagacgcagtggagctggatcttacagctctgccagtgtgtggagcagcacataaaggagaacacagcgtatttcgagtttttcaatgatgccaaagaagctactgattacttaaggaatctaaaagatgccattcagcggaagtacagctgtgatagatcaagcagcattcacaagctagaagaccttgttcaggaatcaatggaagagaaagaagaacttctgcagtacaaaagcactatagcaaacctaatgggaaaagcaaaaacaataattcaactgaagccaaggaattctgactgtccactcaaaacttctattccgatcaaagctatctgtgactacagacaaattgagataaccatttacaaagacgatgaatgtgttttggcgaataactctcatcgtgctaaatggaaggtcattagtcctactgggaatgaggctatggtcccatctgtgtgcttcaccgttcctccaccaaacaaagaagcggtggaccttgccaacagaattgagcaacagtatcagaatgtcctgactctttggcatgagtctcacataaacatgaagagtgtagtatcctggcattatctcatcaatgaaattgatagaattcgagctagcaatgtggcttcaataaagacaatgctacctggtgaacatcagcaagttctaagtaatctacaatctcgttttgaagattttctggaagatagccaggaatcccaagtcttttcaggctcagatataacacaactggaaaaggaggttaatgtatgtaagcagtattatcaagaacttcttaaatctgcagaaagagaggagcaagaggaatcagtttataatctctacatctctgaagttcgaaacattagacttcggttagagaactgtgaagatcggctgattagacagattcgaactcccctggaaagagatgatttgcatgaaagtgtgttcagaatcacagaacaggagaaactaaagaaagagctggaacgacttaaagatgatttgggaacaatcacaaataagtgtgaggagtttttcagtcaagcagcagcctcttcatcagtccctaccctacgatcagagcttaatgtggtccttcagaacatgaaccaagtctattctatgtcttccacttacatagataagttgaaaactgttaacttggtgttaaaaaacactcaagctgcagaagccctcgtaaaactctatgaaactaaactgtgtgaagaagaagcagttatagctgacaagaataatattgagaatctaataagtactttaaagcaatggagatctgaagtagatgaaaagagacaggtattccatgccttagaggatgagttgcagaaagctaaagccatcagtgatgaaatgtttaaaacgtataaagaacgggaccttgattttgactggcacaaagaaaaagcagatcaattagttgaaaggtggcaaaatgttcatgtgcagattgacaacaggttacgggacttagagggcattggcaaatcactgaagtactacagagacacttaccatcctttagatgattggatccagcaggttgaaactactcagagaaagattcaggaaaatcagcctgaaaatagtaaaaccctagccacacagttgaatcaacagaagatgctggtgtccgaaatagaaatgaaacagagcaaaatggacgagtgtcaaaaatatgcagaacagtactcagctacagtgaaggactatgaattacaaacaatgacctaccgggccatggtagattcacaacaaaaatctccagtgaaacgccgaagaatgcagagttcagcagatctcattattcaagagttcatggacctaaggactcgatatactgccctggtcactctcatgacacaatatattaaatttgctggtgattcattgaagaggctggaagaggaggagaagtcactggaagaagaaaagaaagaacatgttgaaaaagccaaagaattgcaaaaatgggtatcaaatatcagcaagacattgaaagatgcagagaaggctggaaaacctcccttctctaagcaaaagatttccagtgaggaaatatcaaccaagaaggaacaattatcggaagcacttcaaactatacagctttttttggcaaaacatggagacaaaatgacagatgaagaaagaaatgaattggaaaaacaagtgaaaactcttcaggaaagttataatttattattcagtgaatctctgaaacagctacaagaatcacaaacctcaggagatgtaaaggtagaggagaagattgtagcagagcgtcagcaggagtataaagagaaactccaagggatatgtgatcttcttacccaaactgaaaaccgcctaattggtcaccaagaagccttcatgattggagatggcacagttgagttaaagaaatatcagtccaagcaagaggaattacagaaagatatgcaaggaagtgcacaggcattggctgaagtagtgaaaaacacagagaacttcttaaaagagaatggtgaaaagctgtcacaggaagataaggctttgattgaacagaaacttaatgaagctaagataaagtgtgaacagcttaatttaaaagcagaacagtctaaaaaggagctggataaagttgtgacaacagcaatcaaggaagaaactgaaaaggtagcagcagtgaagcagctggaagagagcaaaaccaaaatagaaaaccttttggactggttgtcaaatgttgacaaagactcagaaagggcagggacaaaacacaaacaggtaatcgaacagaacgggacccattttcaagaaggtgatggcaagtcagcaattggagaagaggatgaagttaatggtaacctgttggagactgatgttgatgggcaagttggaaccactcaggagaatctgaatcagcaatatcagaaagttaaggcccaacacgagaagatcatctctcagcaccaagcagtgatcatagccactcagtctgcacaagtgttgcttgagaaacagggtcagtatctctctcctgaagaaaaagagaaactgcaaaagaacatgaaggaactgaaagtgcattatgaaactgcactggctgagtcagagaagaaaatgaagttaactcactctctgcaggaagaattagaaaagtttgatgctgactataccgagtttgagcactggctacagcagtcagaacaagaacttgaaaacctggaggcaggtgcagatgacatcaatggtttaatgaccaaattgaagaggcagaagagtttctcagaagacgttatttctcacaaaggtgacttgagatacatcacaatttctggaaacagagtgttggaagctgccaaatcttgcagcaagagagacggtggcaaggttgatacttctgcaacccacagagaagtgcagcgcaagttggatcatgctactgatcggttcaggtctctctactctaagtgcaatgttcttggaaataatcttaaagatctggtggataaatatcaacactatgaagatgcttcatgtggacttcttgctggactccaggcctgtgaggccacagcgagcaaacacttatctgaacctattgcggtggaccccaaaaatcttcaaaggcaattagaagagaccaaggctttgcaaggacagatatcaagtcagcaggttgctgtagagaaactgaagaaaacggctgaagtgcttttagatgccaggggatctttacttccagccaagaatgatatccagaaaacacttgatgacattgttgggagatatgaggatctgtccaagtctgttaatgaacgaaatgaaaaactccagataaccttgacccgttcactgagtgtgcaggatggcttggatgaaatgctggactggatgggaaatgtggaaagttctctgaaagaacaaggtcaagtgcctttaaactctactgctcttcaggatattatcagtaaaaacattatgttggaacaggatattgcaggtcgtcagagcagtataaatgccatgaatgaaaaagtgaagaaatttatggaaacaacagatccatccactgcatcctcactgcaagccaaaatgaaagacttgtctgctcggttttcagaagcaagtcataaacacaaagaaactcttgccaaaatggaggagctaaaaaccaaagtagaactgtttgagaacctctcagaaaagctccagacatttttagaaacaaaaactcaggctcttactgaagtagatgtgccaggaaaagatgttactgaattgtctcagtatatgcaggaatcaacttctgaatttttagaacacaagaaacatcttgaagttttgcatagtctcttgaaggagatatccagccatggcttaccaagtgataaggctttggtccttgaaaaaacaaataatttgtcaaagaaattcaaggaaatggaggataccatcaaagaaaaaaaagaagctgtaacttcttgtcaagaacagttggatgctttccaagttcttgttaaatcattgaagtcatggataaaagaaacaacaaaaaaagttcccattgtacagccttcttttggtgcagaggatttaggaaaatctttggaagacactaagaaattacaagaaaagtggagtttaaaaacaccagagattcagaaagtaaacaacagtgggatctcactatgtaacttaataagtgctgtgaccacccctgcaaaggcaatagcagcagttaaatcaggtggagcagtattaaatggtgaaggaacagccacaaatactgaggaattttgggcaaataaaggtttaacatccattaaaaaggacatgactgacataagtcatggttatgaagatcttggcctcttactcaaggacaaaatagcggaactgaacactaaactctccaaattgcaaaaggctcaggaagaatcaagtgcaatgatgcagtggttacagaaaatgaacaaaactgcaacaaaatggcagcagacacctgcacctacagatactgaagctgtgaagactcaagttgagcagaataagtcgtttgaggcagaactgaagcagaatgtaaacaaagtacaggagttgaaagacaaattgacagagctgttggaggagaacccagatactcctgaggcccccagatggaaacagatgttgacagaaatagattctaagtggcaagaactcaatcaattaacaattgatagacaacaaaaactggaagaatcctccaataatctaacccagttccagactgtagaggcccaattgaaacagtggcttgtggaaaaagaacttatggtcagtgttcttgggcccttgtcaattgacccaaatatgctaaacacacaaaggcagcaggtgcagattttgctgcaagaattcgccactcggaaacctcaatatgaacagctgacagcagctggtcagggcattctgagcaggcctggagaagacccttctttacgtgggattgtgaaagagcaactggcagctgtgacccaaaaatgggatagcctaacagggcaattgagtgacagatgtgactggattgaccaagccattgttaaaagcacacagtatcaaagcctgctgagaagcctttctgataaactgagtgacttggataataaactcagcagcagtctggctgtgagcacgcaccctgatgctatgaaccaacagttggaaacagcccaaaaaatgaagcaggagatacagcaggaaaagaagcagataaaagtggcccaggcactctgtgaggatttgtcagcactggttaaagaagagtacttgaaagcagaacttagtaggcaactagaaggcatcttaaaatcatttaaggatgttgaacagaaagcagagaatcatgtccagcaccttcagtcggcctgtgcaagctctcatcaatttcagcaaatgtctagagattttcaggcttggctggatacaaagaaagaagagcaaaacaaatctcatccaatatctgccaaactcgatgtcttggagtcattaattaaagatcataaagactttagtaaaactttgaccgctcagtctcatatgtatgaaaaaaccattgcagaaggtgaaaatctgttattaaaaacacaagggtctgagaaggcagccttacagttacagcttaatacaattaaaaccaattgggatacatttaataagcaggtgaaagaaagagaaaacaagttaaaagagtcattggaaaaagcccttaagtataaagagcaagtagagactctctggccatggatagacaaatgccaaaacaacctggaggaaataaaattttgcttggatcctgctgaaggagagaattctattgccaagttaaagtctctgcagaaggaaatggaccaacactttggtatggtagaattactgaacaacacagccaatagcttgctcagtgtctgtgagatagataaagaagttgttacagatgagaataagtcactgatccagaaggtggacatggtcactgaacaacttcacagtaagaaattctgtctggagaacatgactcagaagtttaaagaatttcaagaagtttccaaagaatctaaaaggcagcttcagtgtgcaaaggagcagctagatatccatgattcgctgggatcccaggcttacagtaacaaatacctgaccatgttgcaaactcagcagaaatcacttcaggccttgaagcatcaggtagatttggctaaaagacttgcacaggaccttgtggtagaggcctcagactcaaagggaacctctgatgttttattacaagtggaaaccatagctcaagagcatagtacactaagtcagcaggttgatgaaaagtgttctttcttagaaaccaagcttcagggcattgggcatttccagaataccattcgagaaatgttttctcagttcgcagagtttgatgatgaactggatagcatggctccagtggggagagatgcagaaacattgcaaaagcaaaaggaaactataaaagcctttctaaagaaactagaagccctcatggcaagcaatgacaatgccaataaaacctgcaagatgatgttagccacagaagaaacctctcctgaccttgttggaatcaaaagggacttggaggccttaagcaaacaatgcaacaagttactggaccgagcccaagccagagaagagcaggttgaagggacaattaagcgccttgaagaattttacagcaaattgaaagaattttctattctgctccagaaagccgaagaacatgaagagtcacaaggtcctgttggtatggaaacggagacaattaatcagcagcttaacatgttcaaggtattccagaaagaagagattgaacccttgcaaggtaaacagcaagatgtaaactggttaggtcaaggccttattcagagtgctgccaaaagcactagcactcagggcttggagcatgacctggatgatgtcaatgcacggtggaagactctcaataagaaggtggctcagcgagcagcccagctgcaggaggccttgctgcactgtgggaggttccaggatgccctggagtccctgctcagctggatggtggacactgaggagcttgtggccaatcagaagcccccgtcggctgagttcaaagtggtaaaggcccagatacaagaacaaaagcttctccagagattgttggatgaccgaaaatctacggtggaggtaatcaaacgagaaggagaaaaaattgctacaacagcagagcccgcagataaagtgaagattttgaaacagctcagtctcttggatagcagatgggaggcattgcttaataaagctgaaacaaggaatcgtcagttggaaggtatctcggtggtagcacagcaatttcatgaaaccttagaaccactgaacgagtggcttacaaccatagaaaagaggctggtgaattgtgaacccataggaacccaagcatctaaacttgaggaacaaattgcacagcacaaagttctgcaagaggacatcttactcaggaaacaaaatgtagatcaggctttactaaatggtttagaactacttaaacaaaccacaggtgatgaagttttaataattcaagataaattggaagccattaaagcaaggtacaaagacattactaaactgagcactgatgtggccaagactctggaacaggcgctgcagcttgcaaggcggctgcactccacacacgaagagctgtgtacctggctggacaaagtggaggtggaattactttcatatgaaactcaggttctgaaaggagaagaagcaagtcaagcacaaatgagaccaaaggaactgaaaaaggaagctaagaacaacaaagccttactggactcccttaatgaagtgagcagtgctttgctggaactggtaccatggagggcaagagaaggacttgagaaaatggtagctgaggacaatgagcgctaccgattagtgagcgacaccatcactcagaaggtggaggagatcgatgcagccattctgcgatcacagcagtttgaccaagcagctgatgctgagttatcctggattactgaaacagaaaaaaaattgatgtctctgggtgacatcaggcttgagcaagaccagacttctgctcagcttcaagttcaaaagacattcaccatggagattttgagacacaaggatattattgatgaccttgttaaatctgggcataaaatcatgaccgcatgcagtgaagaggaaaagcaatcaatgaagaaaaaactggacaaggtactgaagaactatgataccatctgccagattaattcagaaaggtatctgcagctggaacgggcacagtccctggttaaccaattctgggaaacatatgaagaactttggccatggctgacagaaacacaatcaatcatctctcagcttcccgccccagcccttgaatatgaaactctaaggcagcagcaggaagaacatcggcaactgcgtgagttgatagctgaacacaagcctcatatagataagatgaacaaaactgggccacagttactggaattgagccctggggaaggcttttctatccaagagaagtatgtggcagccgacaccctttacagtcaaattaaagaagatgtcaaaaagcgtgctgtggcactggatgaagccatttctcaatcaactcagttccatgacaagatagatcagatccttgagagcctggaacgcatcgtggaacgtctgaggcagccaccctctatctctgcagaggttgagaagatcaaggaacagatcagtgaaaataagaatgtgtcagtagacatggaaaagctacagccgttgtatgaaactcttaaacagaggggagaggaaatgattgctagatctggggggactgataaagacatatctgccaaagctgttcaggataagcttgaccaaatggttttcatttgggagaacatacacacactggtggaagagagggaagccaaactactggatgtgatggagctagcagaaaagttctggtgtgatcacatgtcattgatagttaccattaaagatactcaagatttcatccgggacctggaagatcctggaattgatccttcagtagtaaaacaacagcaagaagcagcagagaccataagggaagaaatagatggactacaggaggagctggatatagttattaacctaggttctgaactcattgcggcatgtggggagcctgataaacccattgtcaagaagagtatagatgagttaaattcagcatgggattctctaaataaagcttggaaagaccggattgacaaacttgaggaggcaatgcaggctgccgttcagtaccaggatggactgcaggcggtatttgactgggtagatattgcaggtggtaaattagcttcaatgtctccaattggaacagatctcgaaactgtcaagcagcagattgaagagctaaagcaatttaagtctgaggcctatcaacagcagatagaaatggaaagactgaatcatcaagcagagcttttgctaaagaaagtaacagaagagagtgacaaacacactgttcaagacccattaatggaactgaaattgatatgggatagcctggaggagagaatcatcaacagacagcataaactggagggtgctctattagccttgggtcagttccaacatgccctggatgagctcctggcatggctgacacacaccgagggcttgctaagtgagcagaaacctgttggaggagaccctaaagccattgaaattgaacttgccaagcatcatgtgctccaaaatgatgtattagcccatcagtccacagtggaagccgttaataaagcaggaaatgatctaattgaatcaagtgcaggagaagaagcaagcaaccttcagaacaagctagaggttttaaatcaacgctggcaaaatgttttggaaaaaacagaacaaaggaagcagcagctggatggtgccttgcgccaggccaaagggttccatggcgaaattgaggatttgcagcagtggctgactgacacggagcgtcatctgttggcatctaaaccgctgggaggtttaccggaaacagccaaggagcagcttaatgtccatatggaagtctgtgctgcctttgaagctaaagaagaaacatataagagtctgatgcagaaaggccagcagatgcttgcaagatgcccaaaatctgcagagacaaatattgaccaagacataaataacttgaaagaaaaatgggaatcggtggaaaccaaactcaatgaaaggaaaactaaactggaagaggctctcaacttggcaatggagttccacaattctctccaagacttcatcaactggcttactcaggctgaacagaccctaaatgtagcttctcggccaagtctcatcttggacacagtcttatttcaaattgacgaacacaaggtttttgccaatgaagtaaattctcatcgtgagcagataatagagctggacaaaactggaacccacctaaaatattttagtcagaaacaagatgttgttctaatcaagaatctacttatcagtgtacaaagtcgatgggaaaaagtggttcaacggttggtagagagaggaagatctttggatgatgcaaggaagagagccaagcagttccatgaagcttggagtaaacttatggagtggctagaagagtcagaaaagtctttggattctgaactggaaatcgcaaatgatccagacaaaataaaaacacaacttgcacaacataaggagtttcagaaatcactcggagccaagcattctgtctacgacaccaccaacaggactggacgttctctgaaggagaaaacctccctggctgatgacaacctgaaactggatgacatgctgagtgaactcagagacaaatgggataccatatgtggaaaatctgtggaaagacaaaacaaattggaggaagccctgttattttctggacaattcacagatgccctacaggctctcattgattggttatatagagttgaaccccagctggcagaagaccagcctgttcatggagacattgatttggtgatgaatctgatcgataatcacaaggccttccaaaaagagttggggaagaggaccagcagtgtgcaggccctgaagcgctcagcccgagaactcatagaaggcagtcgggatgactcctcctgggtcaaggtccagatgcaggaattaagcacacgctgggagaccgtgtgtgcactttctatatcaaagcaaacacggttagaagcagccctgcgtcaggcagaggaattccactcggtggtacatgccctcttggagtggctggctgaggcggagcaaaccctgcgtttccatggtgtcctcccagatgatgaggatgctctccggactctcattgatcagcataaagaattcatgaagaaactggaagaaaagagagctgaactaaataaagccaccactatgggcgacaccgttttggctatctgccaccccgactccatcactaccattaagcactggataacaatcatccgggcgaggtttgaggaggtgctggcctgggcaaagcaacatcagcagagattagcaagtgctctggctgggcttattgccaaacaggaattgttggaagctttgctggcttggttgcaatgggctgaaactacacttactgataaggataaagaagtcatcccccaggagatcgaagaggtgaaagcactcattgcagaacaccagaccttcatggaggaaatgaccagaaaacagcctgatgttgataaagtaacgaagacctataagaggagagctgctgatccttcctcattacaatcccatattccagtcttggataagggacgagcaggaagaaaacgctttccagcatcaagcttgtatccctctgggtcacagacacaaattgaaaccaaaaatcctagggtaaacttactggtgagcaaatggcagcaagtctggctcctggcgttggaaagaaggaggaaactcaatgatgccttggacagactagaggagctgagggaatttgctaactttgattttgatatctggcgcaaaaaatacatgcgatggatgaatcacaagaaatctcgagtgatggacttcttcaggagaattgataaagaccaggatgggaaaataacgcggcaggaatttattgatggaattctttcctcaaagtttccaaccagtcgcttggagatgagcgcagttgcagacatctttgacagagatggcgatggatatattgactactatgaatttgtagcagcccttcacccaaataaagatgcatataaacctatcacagatgccgacaaaatcgaagatgaggtgacaaggcaggtagctaagtgtaaatgtgcaaagcgatttcaagttgagcagattggtgataataaatacaggttcttcctgggaaatcagtttggagactcccagcaactgcgactggtccggatcctgcggagtactgtgatggttcgtgttggaggtggatggatggcacttgatgagttcttagtgaaaaatgatccttgcagggttcatcatcatgggagtaaaatgttacgttcggaatcaaactcttcaattactactactcagcctactatagccaaaggaaggacaaacatggaactgcgtgagaagttcattttagcagatggtgccagccagggtatggctgctttccgaccccgaggccgaagatcccggccatcatcacgaggcgcttcacccaacagatccacttctgtgtccagtcaggctgcgcaggcggcctccccacaggtccctgccaccaccacacccaagggaacgccaatacaaggaagcaagcttcgacttccaggatatttatcagggaaaggcttccactctggggaggacagtggcttgataacaactgcagctgccagagtccgaacacagtttgctgattccaagaagactcccagccgaccaggaagtcgagctggaagcaaagctggcagcagggccagcagccgccgaggcagtgatgcatcagactttgacatttcagaaatccagtccgtgtgctcagatgtggaaactgtcccccagacacacagacctacaccccgagcaggttctcggccatccacagcgaagccttcaaaaatccccacgccccagaggaaatcacctgccagcaaattggacaagtcctcaaagagatagtgcaattggttctaccaaggcccttccttgagcatttattatttaagtttgaacgatgtaaaatatggtgtagaaattcttgtgaaatattgcaagaggcgagtttaaaattctgcagatggccttatttgtgtatttgtctttttattttatctgtataattttttttgtcagatattctggggttaaagtcacatcatatgtgaggaggaaaagtttaacatgaactaacatttctgcactgtaacgtgccgggcacacactaaactcagttactgtacctacaggtaagtctacatcctctctgacagccacagcactacatcaatccctgacgttagggatacctcatgacattttcctgtttttatggaaactctgagaagctgaatgatacatgcaggggatattttttgagatgatttaaatgtaaaccaaaagatggaagacaaaaagacaaacacacccacacgcagtctttgcagtatctgacagagaactcacaggaagttacttcaagcacttgccagtactatgatattcaagtaccttgcagcatttctctgccattgctttcaatgaggccagaggcatcctggatattagacctattatactgtaagaatataagtataaagtgcgttcatatacatgtgaggttttcttttgcttgagtggacagtagcacctgtatcattgaactcattttgtatcagagcaattttgcttgcagaaagctatgaaataaaacacgtcccttaactgcattgctatggaattaattttttttccccagggaaaactagtgtatttttttatgagcaatatcaatttggagtgaccaaaagatacttaaaaatgggtttattttgatttctcatctgaaataatcatgttctggtattatatctatctatatttaataaatatatacattttaatttattatgtgtactcacatactatagaaagatattagtatgcatttaataaaacatattcacttgaa

SEQ ID NO: 128704 - DNA, 2108 bp, Homo sapiens
  Payload ID: 5186
  Gene Symbol: DST
  Gene Name: dystonin
  ENST ID: ENST00000449297
  CDS Start-End: 42-2108
ctccagccccgccgtcgagtcgccctcgcctcgcccgcaccatgatcgccgcggctttcctcgtcttgctgagaccctacagcatccaatgtgccctcttcctcttgttgcttctgctgggcaccatcgccaccatcgtcttcttctgctgctggcaccgcaagctccagaaagggaggcatccgatgaaatcggtcttctcgggtcgttcaagaagccgagatgctgttttgagatcgcaccactttcgttctgagggattcagagcaagccctcggcatcttagaagacgagttgcagcggccgcagctgcccgtctggaagaagtgaagcccgtggtggaagttcaccatcagagtgagcaagaaacttcagtgaggaaacgaagaatcaagaagagcagccgagtccagccagaattttatcactctgttcaaggtgcttcaatcaggaggcctagttccgggaacgcgtcctatcgctgctctatgtcttcctctgcggatttttccgatgaggatgatttcagccagaaatctggctccgcatccccagctccgggagacaccttaccctggaatttgcctaaacatgagagatcgaaaagaaagattcaagggggctcagtgctggaccctgccgagagggcagtgcttcggatagcagatgaacgggacaaagttcagaagaaaacatttacaaaatggataaatcagcatctcatgaaggttcgaaaacatgtgaatgatctctatgaagacttaagggatggacacaatttgatttctcttttagaggttctttcaggagataccttgcccagagaaaaaggtcggatgcgttttcacagactacagaatgtacaaattgcacttgactatttgaaaagacgccaggtgaaattagtgaatattagaaatgatgacataacagatggaaatcccaaattgactttgggattaatctggacaataattttgcactttcagatatctgatatccatgttactggagagtcagaggatatgtctgcaaaagagagattgctactctggacgcagcaggcaacagagggttatgctggaattcggtgtgaaaatttcactacctgctggagagatggaaaattatttaatgccatcattcataaatacaggccggacctgatagatatgaatactgttgctgttcaaagcaaccttgcaaatttagagcatgctttttacgtagcagaaaaaattggtgttataagacttctggaccctgaagatgtcgatgtctcctcacctgatgaaaaatcagtaataacttacgtgtcatctctctatgatgcatttcctaaagtccctgaaggtggggaaggcattggtgcaaatgatgttgaagtcaaatggattgaataccagaatatggtgaactacctcatccaatggattagacaccatgtgaccacaatgtctgagagaacatttcctaataatcctgtagaactgaaggcactttataatcagtatttacagtttaaagaaacagaaattccaccaaaggagacagaaaaatcaaaaattaaacgtctatataaattattagagatttggatagaatttggacgcatcaagctccttcaaggttatcatccaaatgacatagaaaaagagtgggggaaactcattattgccatgctagagagagagaaggcccttcgtccagaagtagaaaggttagaaatgttgcaacagattgccaacagagttcagagggacagtgtcatctgtgaagacaaactgattcttgctggaaatgctcttcagtctgattctaaaagattagaatcaggagtgcagtttcagaatgaagcagaaattgctgggtatatacttgaatgtgagaaccttttacgccagcatgtaattgatgtacagattcttattgatggaaaatactaccaggcagatcaattggtacagagggttgcaaaactgcgtgacgaaattatggccttaaggaacgaatgttcttctgtgtacagcaaaggacgcatactgacaacagaacagacaaagctcatgatatcaggaatcactcaaagtttaaactcaggatttgca

SEQ ID NO: 128705 - DNA, 18030 bp, Homo sapiens
  Payload ID: 5186
  Gene Symbol: DST
  Gene Name: dystonin
  ENST ID: ENST00000421834
  CDS Start-End: 521-17014
cggcggccaggaaatgccgcagatgcgccgcgcagcatccccggtgaaggcagcgcgccggtcctcccgcaccgctgccgcggcctcggcccggcccgaagcacgcgcctcgtgcagggccagcagagcggtcagcgcggccgcagagggtccgggcgcccgccggcccccgcccgccctcgccgcacgccccgctcctccgcttggcgtggcgctgctcgtcgccgcccctgggctcgctgagatttgccgctgctgaaacccgagagggactcgggctcccggagccgggcggcccaccatcggcctgcccggaggcctgggcgtttcctttgccggccctggcgccggcagccccctgcgcccccgctctgcgtcttcggcttccgtgcttctccccagcgtgctgctccttcctcttttccagttcccaaggctgtgtcttgctgactgcgatactgtccgggggttacgagggggagaggggaatttgtcagtcatcgcttagataaacttcggcatggcgggttacctctcccctgctgcttacctgtacgtggaggagcaggagtatctccaggcctacgaggatgtcctggagaggtacaaagatgaacgggacaaagttcagaagaaaacatttacaaaatggataaatcagcatctcatgaaggttcgaaaacatgtgaatgatctctatgaagacttaagggatggacacaatttgatttctcttttagaggttctttcaggagataccttgcccagagaaaaaggtcggatgcgttttcacagactacagaatgtacaaattgcacttgactatttgaaaagacgccaggtgaaattagtgaatattagaaatgatgacataacagatggaaatcccaaattgactttgggattaatctggacaataattttgcactttcagatatctgatatccatgttactggagagtcagaggatatgtctgcaaaagagagattgctactctggacgcagcaggcaacagagggttatgctggaattcggtgtgaaaatttcactacctgctggagagatggaaaattatttaatgccatcattcataaatacaggccggacctgatagatatgaatactgttgctgttcaaagcaaccttgcaaatttagagcatgctttttacgtagcagaaaaaattggtgttataagacttctggaccctgaagatgtcgatgtctcctcacctgatgaaaaatcagtaataacttacgtgtcatctctctatgatgcatttcctaaagtccctgaaggtggggaaggcattggtgcaaatgatgttgaagtcaaatggattgaataccagaatatggtgaactacctcatccaatggattagacaccatgtgaccacaatgtctgagagaacatttcctaataatcctgtagaactgaaggcactttataatcagtatttacagtttaaagaaacagaaattccaccaaaggagacagaaaaatcaaaaattaaacgtctatataaattattagagatttggatagaatttggacgcatcaagctccttcaaggttatcatccaaatgacatagaaaaagagtgggggaaactcattattgccatgctagagagagagaaggcccttcgtccagaagtagaaaggttagaaatgttgcaacagattgccaacagagttcagagggacagtgtcatctgtgaagacaaactgattcttgctggaaatgctcttcagtctgattctaaaagattagaatcaggagtgcagtttcagaatgaagcagaaattgctgggtatatacttgaatgtgagaaccttttacgccagcatgtaattgatgtacagattcttattgatggaaaatactaccaggcagatcaattggtacagagggttgcaaaactgcgtgacgaaattatggccttaaggaacgaatgttcttctgtgtacagcaaaggacgcatactgacaacagaacagacaaagctcatgatatcaggaatcactcaaagtttaaactcaggatttgcacagaccttacaccctagtctgacctcagggctgacccagagtttaacaccttccctaacctcttctagtatgacttctggcctgtcatcagggatgacttcccgcctgactccatctgtcactccagcttatacacctggtttcccatcaggattagttccaaatttcagttcaggagtagagccaaattcattgcaaactttgaagttgatgcagatccgaaaaccccttctaaagtcttctttgctggatcaaaatttaacagaagaagaaatcaatatgaaatttgttcaggatcttttgaattgggttgatgagatgcaggtacaactggaccgcactgagtggggctcagatttgccaagtgttgaaagccatttagaaaatcataaaaatgttcatagagctattgaagaatttgaatctagtctcaaagaagctaaaatcagtgagattcaaatgacagcacctcttaaactgacttatgcagaaaagttgcacagattagagagtcagtatgcaaaactcttgaatacatccaggaatcaagaacggcaccttgatacactccataattttgtaagtcgtgcgactaatgaacttatttggttgaatgaaaaagaagaggaggaagttgcttatgactggagtgagagaaacaccaacatagctaggaaaaaagattatcatgctgaattaatgagagaacttgatcaaaaggaagaaaatattaaatcagttcaggagatagcagagcagctacttctagaaaatcatccagcccggttaactattgaggcctacagagcggcaatgcagacgcagtggagctggatcttacagctctgccagtgtgtggagcagcacataaaggagaacacagcgtatttcgagtttttcaatgatgccaaagaagctactgattacttaaggaatctaaaagatgccattcagcggaagtacagctgtgatagatcaagcagcattcacaagctagaagaccttgttcaggaatcaatggaagagaaagaagaacttctgcagtacaaaagcactatagcaaacctaatgggaaaagcaaaaacaataattcaactgaagccaaggaattctgactgtccactcaaaacttctattccgatcaaagctatctgtgactacagacaaattgagataaccatttacaaagacgatgaatgtgttttggcgaataactctcatcgtgctaaatggaaggtcattagtcctactgggaatgaggctatggtcccatctgtgtgcttcaccgttcctccaccaaacaaagaagcggtggaccttgccaacagaattgagcaacagtatcagaatgtcctgactctttggcatgagtctcacataaacatgaagagtgtagtatcctggcattatctcatcaatgaaattgatagaattcgagctagcaatgtggcttcaataaagacaatgctacctggtgaacatcagcaagttctaagtaatctacaatctcgttttgaagattttctggaagatagccaggaatcccaagtcttttcaggctcagatataacacaactggaaaaggaggttaatgtatgtaagcagtattatcaagaacttcttaaatctgcagaaagagaggagcaagaggaatcagtttataatctctacatctctgaagttcgaaacattagacttcggttagagaactgtgaagatcggctgattagacagattcgaactcccctggaaagagatgatttgcatgaaagtgtgttcagaatcacagaacaggagaaactaaagaaagagctggaacgacttaaagatgatttgggaacaatcacaaataagtgtgaggagtttttcagtcaagcagcagcctcttcatcagtccctaccctacgatcagagcttaatgtggtccttcagaacatgaaccaagtctattctatgtcttccacttacatagataagttgaaaactgttaacttggtgttaaaaaacactcaagctgcagaagccctcgtaaaactctatgaaactaaactgtgtgaagaagaagcagttatagctgacaagaataatattgagaatctaataagtactttaaagcaatggagatctgaagtagatgaaaagagacaggtattccatgccttagaggatgagttgcagaaagctaaagccatcagtgatgaaatgtttaaaacgtataaagaacgggaccttgattttgactggcacaaagaaaaagcagatcaattagttgaaaggtggcaaaatgttcatgtgcagattgacaacaggttacgggacttagagggcattggcaaatcactgaagtactacagagacacttaccatcctttagatgattggatccagcaggttgaaactactcagagaaagattcaggaaaatcagcctgaaaatagtaaaaccctagccacacagttgaatcaacagaagatgctggtgtccgaaatagaaatgaaacagagcaaaatggacgagtgtcaaaaatatgcagaacagtactcagctacagtgaaggactatgaattacaaacaatgacctaccgggccatggtagattcacaacaaaaatctccagtgaaacgccgaagaatgcagagttcagcagatctcattattcaagagttcatggacctaaggactcgatatactgccctggtcactctcatgacacaatatattaaatttgctggtgattcattgaagaggctggaagaggaggagaagtcactggaagaagaaaagaaagaacatgttgaaaaagccaaagaattgcaaaaatgggtatcaaatatcagcaagacattgaaagatgcagagaaggctggaaaacctcccttctctaagcaaaagatttccagtgaggaaatatcaaccaagaaggaacaattatcggaagcacttcaaactatacagctttttttggcaaaacatggagacaaaatgacagatgaagaaagaaatgaattggaaaaacaagtgaaaactcttcaggaaagttataatttattattcagtgaatctctgaaacagctacaagaatcacaaacctcaggagatgtaaaggtagaggagaagattgtagcagagcgtcagcaggagtataaagagaaactccaagggatatgtgatcttcttacccaaactgaaaaccgcctaattggtcaccaagaagccttcatgattggagatggcacagttgagttaaagaaatatcagtccaagcaagaggaattacagaaagatatgcaaggaagtgcacaggcattggctgaagtagtgaaaaacacagagaacttcttaaaagagaatggtgaaaagctgtcacaggaagataaggctttgattgaacagaaacttaatgaagctaagataaagtgtgaacagcttaatttaaaagcagaacagtctaaaaaggagctggataaagttgtgacaacagcaatcaaggaagaaactgaaaaggtagcagcagtgaagcagctggaagagagcaaaaccaaaatagaaaaccttttggactggttgtcaaatgttgacaaagactcagaaagggcagggacaaaacacaaacaggtaatcgaacagaacgggacccattttcaagaaggtgatggcaagtcagcaattggagaagaggatgaagttaatggtaacctgttggagactgatgttgatgggcaagttggaaccactcaggagaatctgaatcagcaatatcagaaagttaaggcccaacacgagaagatcatctctcagcaccaagcagtgatcatagccactcagtctgcacaagtgttgcttgagaaacagggtcagtatctctctcctgaagaaaaagagaaactgcaaaagaacatgaaggaactgaaagtgcattatgaaactgcactggctgagtcagagaagaaaatgaagttaactcactctctgcaggaagaattagaaaagtttgatgctgactataccgagtttgagcactggctacagcagtcagaacaagaacttgaaaacctggaggcaggtgcagatgacatcaatggtttaatgaccaaattgaagaggcagaagagtttctcagaagacgttatttctcacaaaggtgacttgagatacatcacaatttctggaaacagagtgttggaagctgccaaatcttgcagcaagagagacggtggcaaggttgatacttctgcaacccacagagaagtgcagcgcaagttggatcatgctactgatcggttcaggtctctctactctaagtgcaatgttcttggaaataatcttaaagatctggtggataaatatcaacactatgaagatgcttcatgtggacttcttgctggactccaggcctgtgaggccacagcgagcaaacacttatctgaacctattgcggtggaccccaaaaatcttcaaaggcaattagaagagaccaaggctttgcaaggacagatatcaagtcagcaggttgctgtagagaaactgaagaaaacggctgaagtgcttttagatgccaggggatctttacttccagccaagaatgatatccagaaaacacttgatgacattgttgggagatatgaggatctgtccaagtctgttaatgaacgaaatgaaaaactccagataaccttgacccgttcactgagtgtgcaggatggcttggatgaaatgctggactggatgggaaatgtggaaagttctctgaaagaacaaggtcaagtgcctttaaactctactgctcttcaggatattatcagtaaaaacattatgttggaacaggatattgcaggtcgtcagagcagtataaatgccatgaatgaaaaagtgaagaaatttatggaaacaacagatccatccactgcatcctcactgcaagccaaaatgaaagacttgtctgctcggttttcagaagcaagtcataaacacaaagaaactcttgccaaaatggaggagctaaaaaccaaagtagaactgtttgagaacctctcagaaaagctccagacatttttagaaacaaaaactcaggctcttactgaagtagatgtgccaggaaaagatgttactgaattgtctcagtatatgcaggaatcaacttctgaatttttagaacacaagaaacatcttgaagttttgcatagtctcttgaaggagatatccagccatggcttaccaagtgataaggctttggtccttgaaaaaacaaataatttgtcaaagaaattcaaggaaatggaggataccatcaaagaaaaaaaagaagctgtaacttcttgtcaagaacagttggatgctttccaagttcttgttaaatcattgaagtcatggataaaagaaacaacaaaaaaagttcccattgtacagccttcttttggtgcagaggatttaggaaaatctttggaagacactaagaaattacaagaaaagtggagtttaaaaacaccagagattcagaaagtaaacaacagtgggatctcactatgtaacttaataagtgctgtgaccacccctgcaaaggcaatagcagcagttaaatcaggtggagcagtattaaatggtgaaggaacagccacaaatactgaggaattttgggcaaataaaggtttaacatccattaaaaaggacatgactgacataagtcatggttatgaagatcttggcctcttactcaaggacaaaatagcggaactgaacactaaactctccaaattgcaaaaggctcaggaagaatcaagtgcaatgatgcagtggttacagaaaatgaacaaaactgcaacaaaatggcagcagacacctgcacctacagatactgaagctgtgaagactcaagttgagcagaataagtcgtttgaggcagaactgaagcagaatgtaaacaaagtacaggagttgaaagacaaattgacagagctgttggaggagaacccagatactcctgaggcccccagatggaaacagatgttgacagaaatagattctaagtggcaagaactcaatcaattaacaattgatagacaacaaaaactggaagaatcctccaataatctaacccagttccagactgtagaggcccaattgaaacagtggcttgtggaaaaagaacttatggtcagtgttcttgggcccttgtcaattgacccaaatatgctaaacacacaaaggcagcaggtgcagattttgctgcaagaattcgccactcggaaacctcaatatgaacagctgacagcagctggtcagggcattctgagcaggcctggagaagacccttctttacgtgggattgtgaaagagcaactggcagctgtgacccaaaaatgggatagcctaacagggcaattgagtgacagatgtgactggattgaccaagccattgttaaaagcacacagtatcaaagcctgctgagaagcctttctgataaactgagtgacttggataataaactcagcagcagtctggctgtgagcacgcaccctgatgctatgaaccaacagttggaaacagcccaaaaaatgaagcaggagatacagcaggaaaagaagcagataaaagtggcccaggcactctgtgaggatttgtcagcactggttaaagaagagtacttgaaagcagaacttagtaggcaactagaaggcatcttaaaatcatttaaggatgttgaacagaaagcagagaatcatgtccagcaccttcagtcggcctgtgcaagctctcatcaatttcagcaaatgtctagagattttcaggcttggctggatacaaagaaagaagagcaaaacaaatctcatccaatatctgccaaactcgatgtcttggagtcattaattaaagatcataaagactttagtaaaactttgaccgctcagtctcatatgtatgaaaaaaccattgcagaaggtgaaaatctgttattaaaaacacaagggtctgagaaggcagccttacagttacagcttaatacaattaaaaccaattgggatacatttaataagcaggtgaaagaaagagaaaacaagttaaaagagtcattggaaaaagcccttaagtataaagagcaagtagagactctctggccatggatagacaaatgccaaaacaacctggaggaaataaaattttgcttggatcctgctgaaggagagaattctattgccaagttaaagtctctgcagaaggaaatggaccaacactttggtatggtagaattactgaacaacacagccaatagcttgctcagtgtctgtgagatagataaagaagttgttacagatgagaataagtcactgatccagaaggtggacatggtcactgaacaacttcacagtaagaaattctgtctggagaacatgactcagaagtttaaagaatttcaagaagtttccaaagaatctaaaaggcagcttcagtgtgcaaaggagcagctagatatccatgattcgctgggatcccaggcttacagtaacaaatacctgaccatgttgcaaactcagcagaaatcacttcaggccttgaagcatcaggtagatttggctaaaagacttgcacaggaccttgtggtagaggcctcagactcaaagggaacctctgatgttttattacaagtggaaaccatagctcaagagcatagtacactaagtcagcaggttgatgaaaagtgttctttcttagaaaccaagcttcagggcattgggcatttccagaataccattcgagaaatgttttctcagttcgcagagtttgatgatgaactggatagcatggctccagtggggagagatgcagaaacattgcaaaagcaaaaggaaactataaaagcctttctaaagaaactagaagccctcatggcaagcaatgacaatgccaataaaacctgcaagatgatgttagccacagaagaaacctctcctgaccttgttggaatcaaaagggacttggaggccttaagcaaacaatgcaacaagttactggaccgagcccaagccagagaagagcaggttgaagggacaattaagcgccttgaagaattttacagcaaattgaaagaattttctattctgctccagaaagccgaagaacatgaagagtcacaaggtcctgttggtatggaaacggagacaattaatcagcagcttaacatgttcaaggtattccagaaagaagagattgaacccttgcaaggtaaacagcaagatgtaaactggttaggtcaaggccttattcagagtgctgccaaaagcactagcactcagggcttggagcatgacctggatgatgtcaatgcacggtggaagactctcaataagaaggtggctcagcgagcagcccagctgcaggaggccttgctgcactgtgggaggttccaggatgccctggagtccctgctcagctggatggtggacactgaggagcttgtggccaatcagaagcccccgtcggctgagttcaaagtggtaaaggcccagatacaagaacaaaagcttctccagagattgttggatgaccgaaaatctacggtggaggtaatcaaacgagaaggagaaaaaattgctacaacagcagagcccgcagataaagtgaagattttgaaacagctcagtctcttggatagcagatgggaggcattgcttaataaagctgaaacaaggaatcgtcagttggaaggtatctcggtggtagcacagcaatttcatgaaaccttagaaccactgaacgagtggcttacaaccatagaaaagaggctggtgaattgtgaacccataggaacccaagcatctaaacttgaggaacaaattgcacagcacaaagccttagaagatgacatcatcaatcacaataaacatttacaccaggctgttagcattggccagtccttaaaggttttgagctccagggaggataaagatatggtgcagagtaaattagacttctctcaagtatggtacattgagattcaagagaaaagtcacagcaggtctgagctcctccagcaggccttatgtaatgctaagatttttggggaagatgaagttgaactgatgaactggctgaatgaagtgcatgacaaactgagcaagctctcagtccaggattacagcactgaggggctatggaagcagcagtctgaacttcgggttctgcaagaggacatcttactcaggaaacaaaatgtagatcaggctttactaaatggtttagaactacttaaacaaaccacaggtgatgaagttttaataattcaagataaattggaagccattaaagcaaggtacaaagacattactaaactgagcactgatgtggccaagactctggaacaggcgctgcagcttgcaaggcggctgcactccacacacgaagagctgtgtacctggctggacaaagtggaggtggaattactttcatatgaaactcaggttctgaaaggagaagaagcaagtcaagcacaaatgagaccaaaggaactgaaaaaggaagctaagaacaacaaagccttactggactcccttaatgaagtgagcagtgctttgctggaactggtaccatggagggcaagagaaggacttgagaaaatggtagctgaggacaatgagcgctaccgattagtgagcgacaccatcactcagaaggtggaggagatcgatgcagccattctgcgatcacagcagtttgaccaagcagctgatgctgagttatcctggattactgaaacagaaaaaaaattgatgtctctgggtgacatcaggcttgagcaagaccagacttctgctcagcttcaagttcaaaagacattcaccatggagattttgagacacaaggatattattgatgaccttgttaaatctgggcataaaatcatgaccgcatgcagtgaagaggaaaagcaatcaatgaagaaaaaactggacaaggtactgaagaactatgataccatctgccagattaattcagaaaggtatctgcagctggaacgggcacagtccctggttaaccaattctgggaaacatatgaagaactttggccatggctgacagaaacacaatcaatcatctctcagcttcccgccccagcccttgaatatgaaactctaaggcagcagcaggaagaacatcggcaactgcgtgagttgatagctgaacacaagcctcatatagataagatgaacaaaactgggccacagttactggaattgagccctggggaaggcttttctatccaagagaagtatgtggcagccgacaccctttacagtcaaattaaagaagatgtcaaaaagcgtgctgtggcactggatgaagccatttctcaatcaactcagttccatgacaagatagatcagatccttgagagcctggaacgcatcgtggaacgtctgaggcagccaccctctatctctgcagaggttgagaagatcaaggaacagatcagtgaaaataagaatgtgtcagtagacatggaaaagctacagccgttgtatgaaactcttaaacagaggggagaggaaatgattgctagatctggggggactgataaagacatatctgccaaagctgttcaggataagcttgaccaaatggttttcatttgggagaacatacacacactggtggaagagagggaagccaaactactggatgtgatggagctagcagaaaagttctggtgtgatcacatgtcattgatagttaccattaaagatactcaagatttcatccgggacctggaagatcctggaattgatccttcagtagtaaaacaacagcaagaagcagcagagaccataagggaagaaatagatggactacaggaggagctggatatagttattaacctaggttctgaactcattgcggcatgtggggagcctgataaacccattgtcaagaagagtatagatgagttaaattcagcatgggattctctaaataaagcttggaaagaccggattgacaaacttgaggaggcaatgcaggctgccgttcagtaccaggatggactgcaggcggtatttgactgggtagatattgcaggtggtaaattagcttcaatgtctccaattggaacagatctcgaaactgtcaagcagcagattgaagagctaaagcaatttaagtctgaggcctatcaacagcagatagaaatggaaagactgaatcatcaagcagagcttttgctaaagaaagtaacagaagagagtgacaaacacactgttcaagacccattaatggaactgaaattgatatgggatagcctggaggagagaatcatcaacagacagcataaactggagggtgctctattagccttgggtcagttccaacatgccctggatgagctcctggcatggctgacacacaccgagggcttgctaagtgagcagaaacctgttggaggagaccctaaagccattgaaattgaacttgccaagcatcatgtgctccaaaatgatgtattagcccatcagtccacagtggaagccgttaataaagcaggaaatgatctaattgaatcaagtgcaggagaagaagcaagcaaccttcagaacaagctagaggttttaaatcaacgctggcaaaatgttttggaaaaaacagaacaaaggaagcagcagctggatggtgccttgcgccaggccaaagggttccatggcgaaattgaggatttgcagcagtggctgactgacacggagcgtcatctgttggcatctaaaccgctgggaggtttaccggaaacagccaaggagcagcttaatgtccatatggaagtctgtgctgcctttgaagctaaagaagaaacatataagagtctgatgcagaaaggccagcagatgcttgcaagatgcccaaaatctgcagagacaaatattgaccaagacataaataacttgaaagaaaaatgggaatcggtggaaaccaaactcaatgaaaggaaaactaaactggaagaggctctcaacttggcaatggagttccacaattctctccaagacttcatcaactggcttactcaggctgaacagaccctaaatgtagcttctcggccaagtctcatcttggacacagtcttatttcaaattgacgaacacaaggtttttgccaatgaagtaaattctcatcgtgagcagataatagagctggacaaaactggaacccacctaaaatattttagtcagaaacaagatgttgttctaatcaagaatctacttatcagtgtacaaagtcgatgggaaaaagtggttcaacggttggtagagagaggaagatctttggatgatgcaaggaagagagccaagcagttccatgaagcttggagtaaacttatggagtggctagaagagtcagaaaagtctttggattctgaactggaaatcgcaaatgatccagacaaaataaaaacacaacttgcacaacataaggagtttcagaaatcactcggagccaagcattctgtctacgacaccaccaacaggactggacgttctctgaaggagaaaacctccctggctgatgacaacctgaaactggatgacatgctgagtgaactcagagacaaatgggataccatatgtggaaaatctgtggaaagacaaaacaaattggaggaagccctgttattttctggacaattcacagatgccctacaggctctcattgattggttatatagagttgaaccccagctggcagaagaccagcctgttcatggagacattgatttggtgatgaatctgatcgataatcacaaggccttccaaaaagagttggggaagaggaccagcagtgtgcaggccctgaagcgctcagcccgagaactcatagaaggcagtcgggatgactcctcctgggtcaaggtccagatgcaggaattaagcacacgctgggagaccgtgtgtgcactttctatatcaaagcaaacacggttagaagcagccctgcgtcaggcagaggaattccactcggtggtacatgccctcttggagtggctggctgaggcggagcaaaccctgcgtttccatggtgtcctcccagatgatgaggatgctctccggactctcattgatcagcataaagaattcatgaagaaactggaagaaaagagagctgaactaaataaagccaccactatgggcgacaccgttttggctatctgccaccccgactccatcactaccattaagcactggataacaatcatccgggcgaggtttgaggaggtgctggcctgggcaaagcaacatcagcagagattagcaagtgctctggctgggcttattgccaaacaggaattgttggaagctttgctggcttggttgcaatgggctgaaactacacttactgataaggataaagaagtcatcccccaggagatcgaagaggtgaaagcactcattgcagaacaccagaccttcatggaggaaatgaccagaaaacagcctgatgttgataaagtaacgaagacctataagaggagagctgctgatccttcctcattacaatcccatattccagtcttggataagggacgagcaggaagaaaacgctttccagcatcaagcttgtatccctctgggtcacagacacaaattgaaaccaaaaatcctagggtaaacttactggtgagcaaatggcagcaagtctggctcctggcgttggaaagaaggaggaaactcaatgatgccttggacagactagaggagctgagggaatttgctaactttgattttgatatctggcgcaaaaaatacatgcgatggatgaatcacaagaaatctcgagtgatggacttcttcaggagaattgataaagaccaggatgggaaaataacgcggcaggaatttattgatggaattctttcctcaaagtttccaaccagtcgcttggagatgagcgcagttgcagacatctttgacagagatggcgatggatatattgactactatgaatttgtagcagcccttcacccaaataaagatgcatataaacctatcacagatgccgacaaaatcgaagatgaggtgacaaggcaggtagctaagtgtaaatgtgcaaagcgatttcaagttgagcagattggtgataataaatacaggttcttcctgggaaatcagtttggagactcccagcaactgcgactggtccggatcctgcggagtactgtgatggttcgtgttggaggtggatggatggcacttgatgagttcttagtgaaaaatgatccttgcagggccaaaggaaggacaaacatggaactgcgtgagaagttcattttagcagatggtgccagccagggtatggctgctttccgaccccgaggccgaagatcccggccatcatcacgaggcgcttcacccaacagatccacttctgtgtccagtcaggctgcgcaggcggcctccccacaggtccctgccaccaccacacccaagattctccatcctttaacacgcaattatggtaaaccatggttgacaaacagcaaaatgtcaactccttgtaaagcagcagagtgctcagactttcccgtgccatctgcagagggaacgccaatacaaggaagcaagcttcgacttccaggatatttatcagggaaaggcttccactctggggaggacagtggcttgataacaactgcagctgccagagtccgaacacagtttgctgattccaagaagactcccagccgaccaggaagtcgagctggaagcaaagctggcagcagggccagcagccgccgaggcagtgatgcatcagactttgacatttcagaaatccagtccgtgtgctcagatgtggaaactgtcccccagacacacagacctacaccccgagcaggttctcggccatccacagcgaagccttcaaaaatccccacgccccagaggaaatcacctgccagcaaattggacaagtcctcaaagagatagtgcaattggttctaccaaggcccttccttgagcatttattatttaagtttgaacgatgtaaaatatggtgtagaaattcttgtgaaatattgcaagaggcgagtttaaaattctgcagatggccttatttgtgtatttgtctttttattttatctgtataattttttttgtcagatattctggggttaaagtcacatcatatgtgaggaggaaaagtttaacatgaactaacatttctgcactgtaacgtgccgggcacacactaaactcagttactgtacctacaggtaagtctacatcctctctgacagccacagcactacatcaatccctgacgttagggatacctcatgacattttcctgtttttatggaaactctgagaagctgaatgatacatgcaggggatattttttgagatgatttaaatgtaaaccaaaagatggaagacaaaaagacaaacacacccacacgcagtctttgcagtatctgacagagaactcacaggaagttacttcaagcacttgccagtactatgatattcaagtaccttgcagcatttctctgccattgctttcaatgaggccagaggcatcctggatattagacctattatactgtaagaatataagtataaagtgcgttcatatacatgtgaggttttcttttgcttgagtggacagtagcacctgtatcattgaactcattttgtatcagagcaattttgcttgcagaaagctatgaaataaaacacgtcccttaactgcattgctatggaattaattttttttccccagggaaaactagtgtatttttttatgagcaatatcaatttggagtgaccaaaagatacttaaaaatgggtttattttgatttctcatctgaaataatcatgttctggtattatatctatctatatttaataaatatatacattttaatttattatgtgtactcacatactatagaaagatattagtatgcatttaataaaacatattcacttgaatatatgg

SEQ ID NO: 128706 - DNA, 9180 bp, Homo sapiens
  Payload ID: 5186
  Gene Symbol: DST
  Gene Name: dystonin
  Uniprot ID: Q03001
  ENST ID: ENST00000439203
  CDS Start-End: 1-9180
atgcacagtagtagttatagttaccgtagcagtgattctgtgtttagtaacactaccagcactcgaaccagtcttgattcaaatgaaaatcttctcttggttcattgtggtccaacactgatcaactcttgcattagcttcggcagtgaatcctttgatggacacaggttagaaatgttgcaacagattgccaacagagttcagagggacagtgtcatctgtgaagacaaactgattcttgctggaaatgctcttcagtctgattctaaaagattagaatcaggagtgcagtttcagaatgaagcagaaattgctgggtatatacttgaatgtgagaaccttttacgccagcatgtaattgatgtacagattcttattgatggaaaatactaccaggcagatcaattggtacagagggttgcaaaactgcgtgacgaaattatggccttaaggaacgaatgttcttctgtgtacagcaaaggacgcatactgacaacagaacagacaaagctcatgatatcaggaatcactcaaagtttaaactcaggatttgcacagaccttacaccctagtctgacctcagggctgacccagagtttaacaccttccctaacctcttctagtatgacttctggcctgtcatcagggatgacttcccgcctgactccatctgtcactccagcttatacacctggtttcccatcaggattagttccaaatttcagttcaggagtagagccaaattcattgcaaactttgaagttgatgcagatccgaaaaccccttctaaagtcttctttgctggatcaaaatttaacagaagaagaaatcaatatgaaatttgttcaggatcttttgaattgggttgatgagatgcaggtacaactggaccgcactgagtggggctcagatttgccaagtgttgaaagccatttagaaaatcataaaaatgttcatagagctattgaagaatttgaatctagtctcaaagaagctaaaatcagtgagattcaaatgacagcacctcttaaactgacttatgcagaaaagttgcacagattagagagtcagtatgcaaaactcttgaatacatccaggaatcaagaacggcaccttgatacactccataattttgtaagtcgtgcgactaatgaacttatttggttgaatgaaaaagaagaggaggaagttgcttatgactggagtgagagaaacaccaacatagctaggaaaaaagattatcatgctgaattaatgagagaacttgatcaaaaggaagaaaatattaaatcagttcaggagatagcagagcagctacttctagaaaatcatccagcccggttaactattgaggcctacagagcggcaatgcagacgcagtggagctggatcttacagctctgccagtgtgtggagcagcacataaaggagaacacagcgtatttcgagtttttcaatgatgccaaagaagctactgattacttaaggaatctaaaagatgccattcagcggaagtacagctgtgatagatcaagcagcattcacaagctagaagaccttgttcaggaatcaatggaagagaaagaagaacttctgcagtacaaaagcactatagcaaacctaatgggaaaagcaaaaacaataattcaactgaagccaaggaattctgactgtccactcaaaacttctattccgatcaaagctatctgtgactacagacaaattgagataaccatttacaaagacgatgaatgtgttttggcgaataactctcatcgtgctaaatggaaggtcattagtcctactgggaatgaggctatggtcccatctgtgtgcttcaccgttcctccaccaaacaaagaagcggtggaccttgccaacagaattgagcaacagtatcagaatgtcctgactctttggcatgagtctcacataaacatgaagagtgtagtatcctggcattatctcatcaatgaaattgatagaattcgagctagcaatgtggcttcaataaagacaatgctacctggtgaacatcagcaagttctaagtaatctacaatctcgttttgaagattttctggaagatagccaggaatcccaagtcttttcaggctcagatataacacaactggaaaaggaggttaatgtatgtaagcagtattatcaagaacttcttaaatctgcagaaagagaggagcaagaggaatcagtttataatctctacatctctgaagttcgaaacattagacttcggttagagaactgtgaagatcggctgattagacagattcgaactcccctggaaagagatgatttgcatgaaagtgtgttcagaatcacagaacaggagaaactaaagaaagagctggaacgacttaaagatgatttgggaacaatcacaaataagtgtgaggagtttttcagtcaagcagcagcctcttcatcagtccctaccctacgatcagagcttaatgtggtccttcagaacatgaaccaagtctattctatgtcttccacttacatagataagttgaaaactgttaacttggtgttaaaaaacactcaagctgcagaagccctcgtaaaactctatgaaactaaactgtgtgaagaagaagcagttatagctgacaagaataatattgagaatctaataagtactttaaagcaatggagatctgaagtagatgaaaagagacaggtattccatgccttagaggatgagttgcagaaagctaaagccatcagtgatgaaatgtttaaaacgtataaagaacgggaccttgattttgactggcacaaagaaaaagcagatcaattagttgaaaggtggcaaaatgttcatgtgcagattgacaacaggttacgggacttagagggcattggcaaatcactgaagtactacagagacacttaccatcctttagatgattggatccagcaggttgaaactactcagagaaagattcaggaaaatcagcctgaaaatagtaaaaccctagccacacagttgaatcaacagaagatgctggtgtccgaaatagaaatgaaacagagcaaaatggacgagtgtcaaaaatatgcagaacagtactcagctacagtgaaggactatgaattacaaacaatgacctaccgggccatggtagattcacaacaaaaatctccagtgaaacgccgaagaatgcagagttcagcagatctcattattcaagagttcatggacctaaggactcgatatactgccctggtcactctcatgacacaatatattaaatttgctggtgattcattgaagaggctggaagaggaggagaagtcactggaagaagaaaagaaagaacatgttgaaaaagccaaagaattgcaaaaatgggtatcaaatatcagcaagacattgaaagatgcagagaaggctggaaaacctcccttctctaagcaaaagatttccagtgaggaaatatcaaccaagaaggaacaattatcggaagcacttcaaactatacagctttttttggcaaaacatggagacaaaatgacagatgaagaaagaaatgaattggaaaaacaagtgaaaactcttcaggaaagttataatttattattcagtgaatctctgaaacagctacaagaatcacaaacctcaggagatgtaaaggtagaggagaagctggataaagtgattgcaggcaccattgatcagacaactggagaagtcctttcagtctttcaagcagttttaagaggcctcattgactatgacacaggaattaggttgcttgagacacagctaatgatttctggtctaatttcaccagaattaagaaagtgctttgaccttaaagatgccaaaagtcatggccttattgatgaacaaattctgtgccaactcaaagaactaagtaaagctaaggagattatttctgctgcgtcacctaccacaattccagtactggatgctctagctcaaagcatgataacagaatccatggccatcaaagttcttgagatactgctttctacaggctctctggttattccagccacaggagaacagttgaccctacagaaggctttccaacagaacttggtttcctcagcattattttctaaagttctggaaaggcaaaatatgtgcaaagatcttattgacccctgcacctctgagaaggtttctttaatagatatggtacaaagaagtactttacaggaaaacacagggatgtggcttctacctgtgagaccacaagaaggaggtagaataacattaaaatgtggaagaaacataagcattttaagagcagctcatgaaggtctcatagaccgtgaaaccatgtttaggttgttaagtgcacagcttctttctggaggtctgatcaattccaactctggccaaagaatgactgttgaagaagctgtcagagaaggggtgattgacagggacactgctagcagtatcctcacatatcaggttcaaactggtggaatcatccagtcaaaccctgccaagcgtttaactgtagacgaagcagtacagtgtgatttaataacttccagcagtgctcttctggtcctggaagctcagcgaggctatgttggactcatttggccccattctggtgaaatatttcccacatcatcttccttgcagcaagaattgattacaaatgaattggcctacaaaatcctgaatggcagacaaaaaatagctgctctttatattccagaaagttctcaagtcattggtttggatgctgctaaacagctaggaattatagacaacaacacagcatcaattttaaaaaatataacactgcctgataaaatgccagatttaggagatttagaagcttgtaaaaatgccagaagatggctctctttttgtaaatttcaaccctccacagttcatgattacagacaagaagaggatgtttttgatggagaagaacctgtcactactcagacctcagaagaaactaaaaaattatttctatcttatttaatgataaatagctatatggatgcaaacacagggcaaaggcttttgctgtacgatggagacttggatgaggctgttggcatgctactggaaggctgtcatgcagaatttgatggaaacacagccataaaagaatgtctcgatgtcttaagctcatctggtgtatttcttaataatgcttcaggtagagaaaaggatgaatgtacagctacaccaagtagtttcaataaatgtcactgtggagaacctgaacatgaagagactcctgaaaatagaaagtgtgctatagatgaagaatttaatgaaatgagaaatactgttatcaatagtgaattttctcagtcaggaaaactggcaagtacaatatcaattgatcctaaagttaacagttcacccagtgtgtgtgttcccagtctcatatcatatttaacacagactgaacttgcagacattagcatgcttagaagtgactctgaaaacatacttacaaactatgaaaatcaaagccgagtggaaacaaatgaacgtgcaaatgaatgtagtcattctaaaaacattcaaaactttccaagtgatttaatagaaaatcctattatgaaatcaaaaatgagtaaattctgtggtgtgaatgaaacagagaatgaagataatacaaacagggattcacctatctttgactattcccccaggctaagtgccttgttaagtcatgataaattgatgcacagtcagggaagttttaatgatacacacaccccagagagcaatggaaataagtgtgaagccccagccttatcattcagtgacaaaaccatgttgtcaggtcaaagaataggagaaaaatttcaagaccagtttctgggaattgcagctattaacatcagtttaccaggagagcagtatggacagaaatctttaaatatgatttctagtaatcctcaagtacaatatcacaatgataaatacatttcaaatacttctggtgaggatgaaaaaacacatccaggttttcagcagatgcctgaagacaaggaagatgagtctgaaatagaagagtattcctgtgctgtgactccagggggtgatactgataatgccattgtgtctcttacttgtgctacaccattgcttgatgaaaccatcagtgctagtgactatgaaacgtcactgctgaatgatcagcagaataacacaggaacagacactgatagtgatgatgatttttatgatactcccttgtttgaagatgatgaccatgattctttgcttcttgatggtgatgatcgtgattgcctgcaccctgaggactacgacacactgcaagaggaaaatgatgagacggcttctcctgctgatgttttttatgatgtctcaaaagagaatgaaaattccatggttccccagggggcaccagttggtagcttaagtgtgaagaacaaagcacattgtcttcaggatttccttatggatgttgagaaagatgaattagattctggtgaaaaaatacatttaaatcctgttggctcagataaggtgaatggacagtcactggaaactggatcagaaagggaatgcacaaatatccttgaaggtgatgaatctgactcattgactgattatgatattgtaggaggaaaagagagcttcactgcatcattaaaatttgatgacagtggcagttggagaggaagaaaggaagagtatgtaactggacaggaatttcactccgatactgatcatttagattctatgcaaagtgaagaaagttatggggattatatatatgacagtaatgatcaggatgacgatgatgatgatggcattgatgaagaaggaggaggtataagagatgagaatggaaagcccaggtgccaaaatgtggctgaagatatggatatccagttgtgtgcctctattttaaatgaaaacagtgatgaaaatgaaaatattaatacaatgattcttctggataaaatgcacagttgtagctctttagaaaaacagcaaagggtaaatgttgtacagctagcatcacctagtgaaaataacttagttactgaaaaaagcaaccttccagaatatacaactgagattgctggaaaaagcaaagaaaatctgttgaaccatgagatggtacttaaggatgtattgccgcctatcattaaagacactgaatctgaaaaaacttttggccctgcaagtatttcacatgataataataatatcagttcaacttctgaattaggtactgatctagcaaacacaaaggttaagttgattcaagggtcagaattgccagaattgactgattctgtgaaaggtaaagatgaatattttaagaatatgacaccaaaagttgactcatctcttgatcacatcatttgtactgagcctgatttaataggaaaacctgctgaggaaagccatttgtcattgatagcctctgtaactgacaaagatcctcaaggaaatggaagcgatctcattaaagggagagatggcaaaagtgatattctaatagaagatgaaacatcaattcagaaaatgtacttgggtgaaggagaagtgcttgtagaaggtctagtagaagaagaaaataggcatctcaaacttttgcctggtaaaaatacaagggatagtttcaagttaattaatagtcagtttccatttccacaaatcacaaacaatgaagaacttaatcagaaaggaagccttaaaaaagcaactgtaactcttaaagatgaaccaaataatctacaaataatagttagtaaaagtcctgttcagtttgagaatcttgaagaaatttttgacacatcagtttccaaagagattagtgatgacattacttcagacattacatcgtgggaagggaatacacattttgaggagtcattcactgatggacctgagaaagagcttgatctgtttacttacttaaaacattgtgctaaaaatataaaagcaaaagatgtagccaaaccaaatgaagatgtcccaagccatgttttaataactgcccctcccatgaaagaacatttacaattaggagttaataatacaaaagagaagtccactagtacccaaaaagactcacctcttaatgacatgatccaaagcaatgatctttgtagtaaagaaagcatctcaggaggaggaacagaaatttctcagttcacaccagaaagtattgaagccacactttcaatattatctcgtaaacatgtagaagatgttgggaaaaatgattttctgcagtcggagcggtgtgcaaatggattaggaaatgataactccagtaacactttaaatactgactattcattcttagaaattaataataagaaagaaagaattgagcaacagctaccaaaagaacaagccttgtctccaagatcccaagaaaaggaggttcagattcctgaattgtctcaggtatttgtggaggatgtaaaggatatcttaaaaagcaggttgaaagaaggtcatatgaaccctcaagaggttgaagaaccttcagcctgtgcagacactaaaattttaattcaaaatttaattaaaaggattaccacatcacagttggtaaatgaggcatctactgtgcccagcgactctcaaatgagtgactcttctggagtttcccccatgactaactcatcagaactaaagccagaaagtagagatgatcctttctgtattggaaatcttaagtctgagcttctccttaatatattgaagcaagatcaacatagccaaaaaattacaggagtatttgaattgatgagagaattaactcatatggagtatgacctagagaaaagaggcattacgtctaaagtacttccactgcagcttgaaaatattttctacaaactgcttgctgatggatattcagagaaaatagaacatgttggagactttaatcaaaaagcatgttctacatctgagatgatggaagaaaagccacatattcttggtgatattaaaagcaaagaaggaaactactattctcctaatttagaaactgtaaaagaaattggactagaaagctctactgtgtgggcatcaacattgccaagagatgagaagctcaaggatctgtgtaatgatttcccaagccatttggaatgtacttcagggtctaaagagatggcttctggagatagctcaaccgaacaa

SEQ ID NO: 128707 - DNA, 530 bp, Homo sapiens
  Payload ID: 5186
  Gene Symbol: DST
  Gene Name: dystonin
  ENST ID: ENST00000522360
  CDS Start-End: 1-530
cacagttgaatcaacagaagatgctggtgtccgaaatagaaatgaaacagagcaaaatggacgagtgtcaaaaatatgcagaacagtactcagctacagtgaaggactatgaattacaaacaatgacctaccgggccatggtagattcacaacaaaaatctccagtgaaacgccgaagaatgcagagttcagcagatctcattattcaagagttcatggacctaaggactcgatatactgccctggtcactctcatgacacaatatattaaatttgctggtgattcattgaagaggctggaagaggaggagatagctaagaacaagcagtatgatatgcatacagaagtcacaacattaaaacaagaaaagaacccagttcccagtgctgaagaatggatgcttgaagggtgcagagcatctggtggactcaagaaaggggatttccttaagaagggcttagaaccagagaccttccagaactttgatggtgatcatgcatgttcagtcagggatgatgaatttaaattc

SEQ ID NO: 128708 - DNA, 565 bp, Homo sapiens
  Payload ID: 5186
  Gene Symbol: DST
  Gene Name: dystonin
  ENST ID: ENST00000522538
  CDS Start-End: 166-565
aataaggaagagggggaggagccaagatggccgaataggaacagctccggtctgcatctcccagcgtgagcgacgcagaagacgggtgatttctgcatttccatttgagatgaacgggacaaagttcagaagaaaacatttacaaaatggataaatcagcatctcatgaaggttcgaaaacatgtgaatgatctctatgaagacttaagggatggacacaatttgatttctcttttagaggttctttcaggagataccttgcccagagaaaaaggtcggatgcgttttcacagactacagaatgtacaaattgcacttgactatttgaaaagacgccaggtgaaattagtgaatattagaaatgatgacataacagatggaaatcccaaattgactttgggattaatctggacaataattttgcactttcagatatctgatatccatgttactggagagtcagaggatatgtctgcaaaagagagattgctactctggacgcagcaggcaacagagggttatgctggaattcggtgtgaaaatttcactacctgctggagagatg

SEQ ID NO: 128709 - DNA, 545 bp, Homo sapiens
  Payload ID: 5186
  Gene Symbol: DST
  Gene Name: dystonin
  ENST ID: ENST00000523817
  CDS Start-End: 84-545
ctgcgatactgtccgggggactctgacacatcagagtttgtacggagagagtttagggaactgctgcacagatttcctgcagaatgatggggcagctcatgaaaaatgatcaagattggaacgcaaagctggtgggactgatgtgctgtatggatgaacgggacaaagttcagaagaaaacatttacaaaatggataaatcagcatctcatgaaggttcgaaaacatgtgaatgatctctatgaagacttaagggatggacacaatttgatttctcttttagaggttctttcaggagataccttgcccagagaaaaaggtcggatgcgttttcacagactacagaatgtacaaattgcacttgactatttgaaaagacgccaggtgaaattagtgaatattagaaatgatgacataacagatggaaatcccaaattgactttgggattaatctggacaataattttgcactttcagatatctgatatccatgttactggagagtcagaggatatgtctgcaaaagagagattgctactctggacg

SEQ ID NO: 128710 - DNA, 490 bp, Homo sapiens
  Payload ID: 5186
  Gene Symbol: DST
  Gene Name: dystonin
  ENST ID: ENST00000523943
  CDS Start-End: 1-372
gaaatgaccagaaaacagcctgatgttgataaagtaacgaagacctataagaggagagctgctgatccttcctcattacaatcccatattccagtcttggataagggacgagcaggaagaaaacgctttccagcatcaagcttgtatccctctgggtcacagacacaaattgaaaccaaaaatcctagggtaaacttactggtgagcaaatggcagcaagtctggctcctggcgttggaaagaaggaggaaactcaatgatgccttggacagactagaggaggtttggaaattcataccctcaacaccacattgtcatttgccctcattcctcataacacattgccattgccaaaatcttggtattttttaacttttctgataataagcaaactcttgctatttgagtacatttttaaatttccaaaataaataccacaagtatgtgtgattttgtgaaatattgatatatgggatttggatttagggaa

SEQ ID NO: 128711 - DNA, 3547 bp, Homo sapiens
  Payload ID: 5186
  Gene Symbol: DST
  Gene Name: dystonin
  ENST ID: ENST00000518935
  CDS Start-End: 73-3504
gctttttccagacctcctaccttttagtctactttgaaaggtgaaagaaagaacatcgtttcaggaataaaaatgcacagtagtagttatagttaccgtagcagtgattctgtgtttagtaacactaccagcactcgaaccagtcttgattcaaatgaaaatcttctcttggttcattgtggtccaacactgatcaactcttgcattagcttcggcagtgaatcctttgatggacacaggttagaaatgttgcaacagattgccaacagagttcagagggacagtgtcatctgtgaagacaaactgattcttgctggaaatgctcttcagtctgattctaaaagattagaatcaggagtgcagtttcagaatgaagcagaaattgctgggtatatacttgaatgtgagaaccttttacgccagcatgtaattgatgtacagattcttattgatggaaaatactaccaggcagatcaattggtacagagggttgcaaaactgcgtgacgaaattatggccttaaggaacgaatgttcttctgtgtacagcaaaggacgcatactgacaacagaacagacaaagctcatgatatcaggaatcactcaaagtttaaactcaggatttgcacagaccttacaccctagtctgacctcagggctgacccagagtttaacaccttccctaacctcttctagtatgacttctggcctgtcatcagggatgacttcccgcctgactccatctgtcactccagcttatacacctggtttcccatcaggattagttccaaatttcagttcaggagtagagccaaattcattgcaaactttgaagttgatgcagatccgaaaaccccttctaaagtcttctttgctggatcaaaatttaacagaagaagaaatcaatatgaaatttgttcaggatcttttgaattgggttgatgagatgcaggtacaactggaccgcactgagtggggctcagatttgccaagtgttgaaagccatttagaaaatcataaaaatgttcatagagctattgaagaatttgaatctagtctcaaagaagctaaaatcagtgagattcaaatgacagcacctcttaaactgacttatgcagaaaagttgcacagattagagagtcagtatgcaaaactcttgaatacatccaggaatcaagaacggcaccttgatacactccataattttgtaagtcgtgcgactaatgaacttatttggttgaatgaaaaagaagaggaggaagttgcttatgactggagtgagagaaacaccaacatagctaggaaaaaagattatcatgctgaattaatgagagaacttgatcaaaaggaagaaaatattaaatcagttcaggagatagcagagcagctacttctagaaaatcatccagcccggttaactattgaggcctacagagcggcaatgcagacgcagtggagctggatcttacagctctgccagtgtgtggagcagcacataaaggagaacacagcgtatttcgagtttttcaatgatgccaaagaagctactgattacttaaggaatctaaaagatgccattcagcggaagtacagctgtgatagatcaagcagcattcacaagctagaagaccttgttcaggaatcaatggaagagaaagaagaacttctgcagtacaaaagcactatagcaaacctaatgggaaaagcaaaaacaataattcaactgaagccaaggaattctgactgtccactcaaaacttctattccgatcaaagctatctgtgactacagacaaattgagataaccatttacaaagacgatgaatgtgttttggcgaataactctcatcgtgctaaatggaaggtcattagtcctactgggaatgaggctatggtcccatctgtgtgcttcaccgttcctccaccaaacaaagaagcggtggaccttgccaacagaattgagcaacagtatcagaatgtcctgactctttggcatgagtctcacataaacatgaagagtgtagtatcctggcattatctcatcaatgaaattgatagaattcgagctagcaatgtggcttcaataaagacaatgctacctggtgaacatcagcaagttctaagtaatctacaatctcgttttgaagattttctggaagatagccaggaatcccaagtcttttcaggctcagatataacacaactggaaaaggaggttaatgtatgtaagcagtattatcaagaacttcttaaatctgcagaaagagaggagcaagaggaatcagtttataatctctacatctctgaagttcgaaacattagacttcggttagagaactgtgaagatcggctgattagacagattcgaactcccctggaaagagatgatttgcatgaaagtgtgttcagaatcacagaacaggagaaactaaagaaagagctggaacgacttaaagatgatttgggaacaatcacaaataagtgtgaggagtttttcagtcaagcagcagcctcttcatcagtccctaccctacgatcagagcttaatgtggtccttcagaacatgaaccaagtctattctatgtcttccacttacatagataagttgaaaactgttaacttggtgttaaaaaacactcaagctgcagaagccctcgtaaaactctatgaaactaaactgtgtgaagaagaagcagttatagctgacaagaataatattgagaatctaataagtactttaaagcaatggagatctgaagtagatgaaaagagacaggtattccatgccttagaggatgagttgcagaaagctaaagccatcagtgatgaaatgtttaaaacgtataaagaacgggaccttgattttgactggcacaaagaaaaagcagatcaattagttgaaaggtggcaaaatgttcatgtgcagattgacaacaggttacgggacttagagggcattggcaaatcactgaagtactacagagacacttaccatcctttagatgattggatccagcaggttgaaactactcagagaaagattcaggaaaatcagcctgaaaatagtaaaaccctagccacacagttgaatcaacagaagatgctggtgtccgaaatagaaatgaaacagagcaaaatggacgagtgtcaaaaatatgcagaacagtactcagctacagtgaaggactatgaattacaaacaatgacctaccgggccatggtagattcacaacaaaaatctccagtgaaacgccgaagaatgcagagttcagcagatctcattattcaagagttcatggacctaaggactcgatatactgccctggtcactctcatgacacaatatattaaatttgctggtgattcattgaagaggctggaagaggaggaggtaatcattaacagtgagcaccctgtaaatataaaggagctagagatgagcagtaactacagtgtagtttgggaaagcaaaacatgtttcatgataaatttatgtggccggtagcagatgtacaaataaatattgaattataaaattacaatgaaaa

SEQ ID NO: 128712 - DNA, 1724 bp, Homo sapiens
  Payload ID: 5186
  Gene Symbol: DST
  Gene Name: dystonin
  ENST ID: ENST00000523292
  CDS Start-End: 1-779
tgacaaggcaggtagctaagtgtaaatgtgcaaagcgatttcaagttgagcagattggtgataataaatacaggtttggagactcccagcaactgcgactggtccggatcctgcggagtactgtgatggttcgtgttggaggtggatggatggcacttgatgagttcttagtgaaaaatgatccttgcagggccaaaggaaggacaaacatggaactgcgtgagaagttcattttagcagatggtgccagccagggtatggctgctttccgaccccgaggccgaagatcccggccatcatcacgaggcgcttcacccaacagatccacttctgtgtccagtcaggctgcgcaggcggcctccccacaggtccctgccaccaccacacccaagggaacgccaatacaaggaagcaagcttcgacttccaggatatttatcagggaaaggcttccactctggggaggacagtggcttgataacaactgcagctgccagagtccgaacacagtttgctgattccaagaagactcccagccgaccaggaagtcgagctggaagcaaagctggcagcagggccagcagccgccgaggcagtgatgcatcagactttgacatttcagaaatccagtccgtgtgctcagatgtggaaactgtcccccagacacacagacctacaccccgagcaggttctcggccatccacagcgaagccttcaaaaatccccacgccccagaggaaatcacctgccagcaaattggacaagtcctcaaagagatagtgcaattggttctaccaaggcccttccttgagcatttattatttaagtttgaacgatgtaaaatatggtgtagaaattcttgtgaaatattgcaagaggcgagtttaaaattctgcagatggccttatttgtgtatttgtctttttattttatctgtataattttttttgtcagatattctggggttaaagtcacatcatatgtgaggaggaaaagtttaacatgaactaacatttctgcactgtaacgtgccgggcacacactaaactcagttactgtacctacaggtaagtctacatcctctctgacagccacagcactacatcaatccctgacgttagggatacctcatgacattttcctgtttttatggaaactctgagaagctgaatgatacatgcaggggatattttttgagatgatttaaatgtaaaccaaaagatggaagacaaaaagacaaacacacccacacgcagtctttgcagtatctgacagagaactcacaggaagttacttcaagcacttgccagtactatgatattcaagtaccttgcagcatttctctgccattgctttcaatgaggccagaggcatcctggatattagacctattatactgtaagaatataagtataaagtgcgttcatatacatgtgaggttttcttttgcttgagtggacagtagcacctgtatcattgaactcattttgtatcagagcaattttgcttgcagaaagctatgaaataaaacacgtcccttaactgcattgctatggaattaattttttttccccagggaaaactagtgtatttttttatgagcaatatcaatttggagtgaccaaaagatacttaaaaatgggtttattttgatttctcatctgaaataatcatgttctggtattatatctatctatatttaataaatatatacattttaattta

SEQ ID NO: 128713 - DNA, 4598 bp, Homo sapiens
  Payload ID: 5186
  Gene Symbol: DST
  Gene Name: dystonin
  ENST ID: ENST00000520645
  CDS Start-End: 162-4598
aggtttgtaacaggaaggctgttgattctggcttcattgttgggccagtcatttgtgagctggtggccggaccacaggccacacacttcttccgtgcaaatcttcatgtattgaaactgcctgtgtattgtttttacgattggagacttggccaagaaaagatgagttccgggaacgcgtcctatcgctgctctatgtcttcctctgcggatttttccgatgaggatgatttcagccagaaatctggctccgcatccccagctccgggagacaccttaccctggaatttgcctaaacatgagagatcgaaaagaaagattcaagggggctcagtgctggaccctgccgagagggcagtgcttcggatagcagatgaacgggacaaagttcagaagaaaacatttacaaaatggataaatcagcatctcatgaaggttcgaaaacatgtgaatgatctctatgaagacttaagggatggacacaatttgatttctcttttagaggttctttcaggagataccttgcccagagaaaaaggtcggatgcgttttcacagactacagaatgtacaaattgcacttgactatttgaaaagacgccaggtgaaattagtgaatattagaaatgatgacataacagatggaaatcccaaattgactttgggattaatctggacaataattttgcactttcagatatctgatatccatgttactggagagtcagaggatatgtctgcaaaagagagattgctactctggacgcagcaggcaacagagggttatgctggaattcggtgtgaaaatttcactacctgctggagagatggaaaattatttaatgccatcattcataaatacaggccggacctgatagatatgaatactgttgctgttcaaagcaaccttgcaaatttagagcatgctttttacgtagcagaaaaaattggtgttataagacttctggaccctgaagatgtcgatgtctcctcacctgatgaaaaatcagtaataacttacgtgtcatctctctatgatgcatttcctaaagtccctgaaggtggggaaggcattggtgcaaatgatgttgaagtcaaatggattgaataccagaatatggtgaactacctcatccaatggattagacaccatgtgaccacaatgtctgagagaacatttcctaataatcctgtagaactgaaggcactttataatcagtatttacagtttaaagaaacagaaattccaccaaaggagacagaaaaatcaaaaattaaacgtctatataaattattagagatttggatagaatttggacgcatcaagctccttcaaggttatcatccaaatgacatagaaaaagagtgggggaaactcattattgccatgctagagagagagaaggcccttcgtccagaagtagaaaggttagaaatgttgcaacagattgccaacagagttcagagggacagtgtcatctgtgaagacaaactgattcttgctggaaatgctcttcagtctgattctaaaagattagaatcaggagtgcagtttcagaatgaagcagaaattgctgggtatatacttgaatgtgagaaccttttacgccagcatgtaattgatgtacagattcttattgatggaaaatactaccaggcagatcaattggtacagagggttgcaaaactgcgtgacgaaattatggccttaaggaacgaatgttcttctgtgtacagcaaaggacgcatactgacaacagaacagacaaagctcatgatatcaggaatcactcaaagtttaaactcaggatttgcacagaccttacaccctagtctgacctcagggctgacccagagtttaacaccttccctaacctcttctagtatgacttctggcctgtcatcagggatgacttcccgcctgactccatctgtcactccagcttatacacctggtttcccatcaggattagttccaaatttcagttcaggagtagagccaaattcattgcaaactttgaagttgatgcagatccgaaaaccccttctaaagtcttctttgctggatcaaaatttaacagaagaagaaatcaatatgaaatttgttcaggatcttttgaattgggttgatgagatgcaggtacaactggaccgcactgagtggggctcagatttgccaagtgttgaaagccatttagaaaatcataaaaatgttcatagagctattgaagaatttgaatctagtctcaaagaagctaaaatcagtgagattcaaatgacagcacctcttaaactgacttatgcagaaaagttgcacagattagagagtcagtatgcaaaactcttgaatacatccaggaatcaagaacggcaccttgatacactccataattttgtaagtcgtgcgactaatgaacttatttggttgaatgaaaaagaagaggaggaagttgcttatgactggagtgagagaaacaccaacatagctaggaaaaaagattatcatgctgaattaatgagagaacttgatcaaaaggaagaaaatattaaatcagttcaggagatagcagagcagctacttctagaaaatcatccagcccggttaactattgaggcctacagagcggcaatgcagacgcagtggagctggatcttacagctctgccagtgtgtggagcagcacataaaggagaacacagcgtatttcgagtttttcaatgatgccaaagaagctactgattacttaaggaatctaaaagatgccattcagcggaagtacagctgtgatagatcaagcagcattcacaagctagaagaccttgttcaggaatcaatggaagagaaagaagaacttctgcagtacaaaagcactatagcaaacctaatgggaaaagcaaaaacaataattcaactgaagccaaggaattctgactgtccactcaaaacttctattccgatcaaagctatctgtgactacagacaaattgagataaccatttacaaagacgatgaatgtgttttggcgaataactctcatcgtgctaaatggaaggtcattagtcctactgggaatgaggctatggtcccatctgtgtgcttcaccgttcctccaccaaacaaagaagcggtggaccttgccaacagaattgagcaacagtatcagaatgtcctgactctttggcatgagtctcacataaacatgaagagtgtagtatcctggcattatctcatcaatgaaattgatagaattcgagctagcaatgtggcttcaataaagacaatgctacctggtgaacatcagcaagttctaagtaatctacaatctcgttttgaagattttctggaagatagccaggaatcccaagtcttttcaggctcagatataacacaactggaaaaggaggttaatgtatgtaagcagtattatcaagaacttcttaaatctgcagaaagagaggagcaagaggaatcagtttataatctctacatctctgaagttcgaaacattagacttcggttagagaactgtgaagatcggctgattagacagattcgaactcccctggaaagagatgatttgcatgaaagtgtgttcagaatcacagaacaggagaaactaaagaaagagctggaacgacttaaagatgatttgggaacaatcacaaataagtgtgaggagtttttcagtcaagcagcagcctcttcatcagtccctaccctacgatcagagcttaatgtggtccttcagaacatgaaccaagtctattctatgtcttccacttacatagataagttgaaaactgttaacttggtgttaaaaaacactcaagctgcagaagccctcgtaaaactctatgaaactaaactgtgtgaagaagaagcagttatagctgacaagaataatattgagaatctaataagtactttaaagcaatggagatctgaagtagatgaaaagagacaggtattccatgccttagaggatgagttgcagaaagctaaagccatcagtgatgaaatgtttaaaacgtataaagaacgggaccttgattttgactggcacaaagaaaaagcagatcaattagttgaaaggtggcaaaatgttcatgtgcagattgacaacaggttacgggacttagagggcattggcaaatcactgaagtactacagagacacttaccatcctttagatgattggatccagcaggttgaaactactcagagaaagattcaggaaaatcagcctgaaaatagtaaaaccctagccacacagttgaatcaacagaagatgctggtgtccgaaatagaaatgaaacagagcaaaatggacgagtgtcaaaaatatgcagaacagtactcagctacagtgaaggactatgaattacaaacaatgacctaccgggccatggtagattcacaacaaaaatctccagtgaaacgccgaagaatgcagagttcagcagatctcattattcaagagttcatggacctaaggactcgatatactgccctggtcactctcatgacacaatatattaaatttgctggtgattcattgaagaggctggaagaggaggagaagtcactggaagaagaaaag

SEQ ID NO: 128714 - DNA, 1778 bp, Homo sapiens
  Payload ID: 5186
  Gene Symbol: DST
  Gene Name: dystonin
  ENST ID: ENST00000518398
  CDS Start-End: 1-1346
aagttgtgacaacagcaatcaaggaagaaactgaaaaggtagcagcagtgaagcagctggaagagagcaaaaccaaaatagaaaaccttttggactggttgtcaaatgttgacaaagactcagaaagggcagggacaaaacacaaacaggtaatcgaacagaacgggacccattttcaagaaggtgatggcaagtcagcaattggagaagaggatgaagttaatggtaacctgttggagactgatgttgatgggcaagttggaaccactcaggagaatctgaatcagcaatatcagaaagttaaggcccaacacgagaagatcatctctcagcaccaagcagtgatcatagccactcagtctgcacaagtgttgcttgagaaacagggtcagtatctctctcctgaagaaaaagagaaactgcaaaagaacatgaaggaactgaaagtgcattatgaaactgcactggctgagtcagagaagaaaatgaagttaactcactctctgcaggaagaattagaaaagtttgatgctgactataccgagtttgagcactggctacagcagtcagaacaagaacttgaaaacctggaggcaggtgcagatgacatcaatggtttaatgaccaaattgaagaggcagaagagtttctcagaagacgttatttctcacaaaggtgacttgagatacatcacaatttctggaaacagagtgttggaagctgccaaatcttgcagcaagagagacggtggcaaggttgatacttctgcaacccacagagaagtgcagcgcaagttggatcatgctactgatcggttcaggtctctctactctaagtgcaatgttcttggaaataatcttaaagatctggtggataaatatcaacactatgaagatgcttcatgtggacttcttgctggactccaggcctgtgaggccacagcgagcaaacacttatctgaacctattgcggtggaccccaaaaatcttcaaaggcaattagaagagaccaaggctttgcaaggacagatatcaagtcagcaggttgctgtagagaaactgaagaaaacggctgaagtgcttttagatgccaggggatctttacttccagccaagaatgatatccagaaaacacttgatgacattgttgggagatatgaggatctgtccaagtctgttaatgaacgaaatgaaaaactccagataaccttgacccgttcactgagtgtgcaggatggcttggatgaaatgctggactggatgggaaatgtggaaagttctctgaaagaacaagatgttggaacaggatattgcaggtcgtcagagcagtataaatgccatgaatgaaaaagtgaagaaatttatggaaacaacagatccatccactgcatcctcactgcaagccaaaatgaaagacttgtctgctcggttttcagaagcaagtcataaacacaaagaaactcttgccaaaatggaggagctaaaaaccaaagtagaactgtttgagaacctctcagaaaagctccagacatttttagaaacaaaaactcaggctcttactgaagtagatgtgccaggaaaagatgttactgaattgtctcagtatatgcaggaatcaacttctgaatttttagaacacaagaaacatcttgaagttttgcatagtctcttgaaggagatatccagccatggcttaccaagtgataaggctttggtccttgaaaaaacaaataatttgtcaaagaaattcaaggaaatggaggataccatcaaagaaaa

SEQ ID NO: 128715 - DNA, 912 bp, Homo sapiens
  Payload ID: 5186
  Gene Symbol: DST
  Gene Name: dystonin
  ENST ID: ENST00000633795
  CDS Start-End: 1-912
atggggaatgtctgtggatgtgtaagagctgagaaagaagaacaatatgtagatcctgccaaaactcctttgaaccctgaaaaatactctcctggaagaaaatatttcagaagaaaaccgatcaaaaaaactggaggtgacaaagagtcagttggggcaaacaatgaaaatgaaggcaagaagaagagcagcagtcagccttcaaaagaacagccagctcctttatccaggggactggtacagcaggaatctgttaccctaaactctgcactgggagatggtattcagcaaaagaagacagaagttgtagctgacagcgttaaacagaaacttctgccgagtgctgtaagcagttggtctgactgtgtgaacacttctcctgctaaagacagtgaaacagaagtaaaagttagtgaactggatgaaaggatttcagaaaaagacagcactccatattgcgcaaagaggaagaaacatttagatgatgtcaacacaagcgaaataacattccaggaaaaaactgatgttttttctttccgaaaggcagccagcttaagctctattccctcgggtatagaaagatcactcgaaaaaagtgggtttcctgaagacccaccaaaaagttatagcagtattcaagaaaagcaaaacactgagagattttgccctcatgcaacacagcattttcagtttaaaaaaaagagatgccattccctttatactagtatgtcctctgtttctaaggacacagatggaaatgagatatctgatatccatgttactggagagtcagaggatatgtctgcaaaagagagattgctactctggacgcagcaggcaacagagggttatgctggaattcggtgtgaaaatttcactacctgctggagagatggaaaattatttaatgcc

SEQ ID NO: 128716 - DNA, 5024 bp, Homo sapiens
  Payload ID: 5186
  Gene Symbol: DST
  Gene Name: dystonin
  ENST ID: ENST00000340834
  CDS Start-End: 1-5024
atggggaagccactcagcagaccagactgtttacgtcagaatcccccatgtgtagggaagggtgaagaagaggaggacctaaatatcgaagactgttacgtcccacagcggtcaatctatgatactgttagactaaatgaacagatagactctggttcaaaaggtagtctatcttccaggcattttacagatcgaactttaccctacagtcacagaacactggatgttagttctttatgctctaatggtgcccttacttcttccagtgtatttgagctgagaggtcgggaagctaacaaactagatgaaaagatgatctttgatgcactcaaactaaatagtgatatcattcgaaccacaggattacctaaagccaaatctcatgcggaaaagaaagagcatagacggtcatggcgaatgtttgtcccggccaattttatggattatgcaaacaaaagtgaaagctcttttgttgaacctgctgatatgtcagatgctgttaccaaggccagcaagtgcagatggggtactaattctctcacttcggaggaggatgactctggtttatgtagccctccagcagagagggaagaaaaacagggcattttaactggagaccagtcacgaattaaaagtttgtcttctactgaagatattcttgtaacagaccaatacagaccatttttttctgttaattccattagcgaacagaaaatcccactgctttcatgtcaaagtgcccaccctgatgaaaatttcaaaatgattttacatgatgtttctccactagaggaagcaaaacatgtaaatggtcaaagggaaatccacgatgaaaattgttgcctgcagaataatttgaaagagagccctgtgaagtgtgacccattaattatgccaagaaatagagaaaatgagcatatttttaaccttggagaagaggacgaaacatacggacctggagaatcccaaatcacagcacaaagtagggaactcttgaaggattcccctcaagatttagatctctctcacacagatctaggggagagtgatgtagattgtggtagcaccagcttagtagaaaatgtgacacttttgacacaatatgattcaggagaatgcaacattgcatctaaagaggaagtggaggctcctctttctgcccaggagagcgaaatgctctataagaagttctccctgaaattcgtatcagcaagaaagaaagcagcacccagaaaaacaggggcccaggcaggaatattggacacagtctgcaatggctttcagttggttcaggtattccagaaagaagagattgaacccttgcaaggtaaacagcaagatgtaaactggttaggtcaaggccttattcagagtgctgccaaaagcactagcactcagggcttggagcatgacctggatgatgtcaatgcacggtggaagactctcaataagaaggtggctcagcgagcagcccagctgcaggaggccttgctgcactgtgggaggttccaggatgccctggagtccctgctcagctggatggtggacactgaggagcttgtggccaatcagaagcccccgtcggctgagttcaaagtggtaaaggcccagatacaagaacaaaagcttctccagagattgttggatgaccgaaaatctacggtggaggtaatcaaacgagaaggagaaaaaattgctacaacagcagagcccgcagataaagtgaagattttgaaacagctcagtctcttggatagcagatgggaggcattgcttaataaagctgaaacaaggaatcgtcagttggaaggtatctcggtggtagcacagcaatttcatgaaaccttagaaccactgaacgagtggcttacaaccatagaaaagaggctggtgaattgtgaacccataggaacccaagcatctaaacttgaggaacaaattgcacagcacaaagccttagaagatgacatcatcaatcacaataaacatttacaccaggctgttagcattggccagtccttaaaggttttgagctccagggaggataaagatatggtgcagagtaaattagacttctctcaagtatggtacattgagattcaagagaaaagtcacagcaggtctgagctcctccagcaggccttatgtaatgctaagatttttggggaagatgaagttgaactgatgaactggctgaatgaagtgcatgacaaactgagcaagctctcagtccaggattacagcactgaggggctatggaagcagcagtctgaacttcgggttctgcaagaggacatcttactcaggaaacaaaatgtagatcaggctttactaaatggtttagaactacttaaacaaaccacaggtgatgaagttttaataattcaagataaattggaagccattaaagcaaggtacaaagacattactaaactgagcactgatgtggccaagactctggaacaggcgctgcagcttgcaaggcggctgcactccacacacgaagagctgtgtacctggctggacaaagtggaggtggaattactttcatatgaaactcaggttctgaaaggagaagaagcaagtcaagcacaaatgagaccaaaggaactgaaaaaggaagctaagaacaacaaagccttactggactcccttaatgaagtgagcagtgctttgctggaactggtaccatggagggcaagagaaggacttgagaaaatggtagctgaggacaatgagcgctaccgattagtgagcgacaccatcactcagaaggtggaggagatcgatgcagccattctgcgatcacagcagtttgaccaagcagctgatgctgagttatcctggattactgaaacagaaaaaaaattgatgtctctgggtgacatcaggcttgagcaagaccagacttctgctcagcttcaagttcaaaagacattcaccatggagattttgagacacaaggatattattgatgaccttgttaaatctgggcataaaatcatgaccgcatgcagtgaagaggaaaagcaatcaatgaagaaaaaactggacaaggtactgaagaactatgataccatctgccagattaattcagaaaggtatctgcagctggaacgggcacagtccctggttaaccaattctgggaaacatatgaagaactttggccatggctgacagaaacacaatcaatcatctctcagcttcccgccccagcccttgaatatgaaactctaaggcagcagcaggaagaacatcggcaactgcgtgagttgatagctgaacacaagcctcatatagataagatgaacaaaactgggccacagttactggaattgagccctggggaaggcttttctatccaagagaagtatgtggcagccgacaccctttacagtcaaattaaagaagatgtcaaaaagcgtgctgtggcactggatgaagccatttctcaatcaactcagttccatgacaagatagatcagatccttgagagcctggaacgcatcgtggaacgtctgaggcagccaccctctatctctgcagaggttgagaagatcaaggaacagatcagtgaaaataagaatgtgtcagtagacatggaaaagctacagccgttgtatgaaactcttaaacagaggggagaggaaatgattgctagatctggggggactgataaagacatatctgccaaagctgttcaggataagcttgaccaaatggttttcatttgggagaacatacacacactggtggaagagagggaagccaaactactggatgtgatggagctagcagaaaagttctggtgtgatcacatgtcattgatagttaccattaaagatactcaagatttcatccgggacctggaagatcctggaattgatccttcagtagtaaaacaacagcaagaagcagcagagaccataagggaagaaatagatggactacaggaggagctggatatagttattaacctaggttctgaactcattgcggcatgtggggagcctgataaacccattgtcaagaagagtatagatgagttaaattcagcatgggattctctaaataaagcttggaaagaccggattgacaaacttgaggaggcaatgcaggctgccgttcagtaccaggatggactgcaggcggtatttgactgggtagatattgcaggtggtaaattagcttcaatgtctccaattggaacagatctcgaaactgtcaagcagcagattgaagagctaaagcaatttaagtctgaggcctatcaacagcagatagaaatggaaagactgaatcatcaagcagagcttttgctaaagaaagtaacagaagagagtgacaaacacactgttcaagacccattaatggaactgaaattgatatgggatagcctggaggagagaatcatcaacagacagcataaactggagggtgctctattagccttgggtcagttccaacatgccctggatgagctcctggcatggctgacacacaccgagggcttgctaagtgagcagaaacctgttggaggagaccctaaagccattgaaattgaacttgccaagcatcatgtgctccaaaatgatgtattagcccatcagtccacagtggaagccgttaataaagcaggaaatgatctaattgaatcaagtgcaggagaagaagcaagcaaccttcagaacaagctagaggttttaaatcaacgctggcaaaatgttttggaaaaaacagaacaaaggaagcagcagctggatggtgccttgcgccaggccaaagggttccatggcgaaattgaggatttgcagcagtggctgactgacacggagcgtcatctgttggcatctaaaccgctgggaggtttaccggaaacagccaaggagcagcttaatgtccatatggaagtctgtgctgcctttgaagctaaagaagaaacatataagagtctgatgcagaaaggccagcagatgcttgcaagatgcccaaaatctgcagagacaaatattgaccaagacat

SEQ ID NO: 128717 - DNA, 569 bp, Homo sapiens
  Payload ID: 5186
  Gene Symbol: DST
  Gene Name: dystonin
  ENST ID: ENST00000524186
  CDS Start-End: 550-569
agatggtgcctgaagagagagggcgttgctgcaagcgccctggctggagagcatgcctgcccggcaccgtgctgccctgaggagccgcggacagccccggagctcccttccggagttctttctgctgcctccaccgccaccgtctctctctagccccagctgaaatgaaggccataccgcggccacagaacttggttcagtttcaaaggctaatgtagtccctgggttttctgctcaatgtgaattacgctgcctgtgccttagaggaagccgcggagctcttcgttgctgcaattgcctcaggtattccagaaagaagagattgaacccttgcaaggtaaacagcaagatgtaaactggttaggtcaaggccttattcagagtgctgccaaaagcactagcactcagggcttggagcatgacctggatgatgtcaatgcacggtggaagactctcaataagaaggtggctcagcgagcagcccagctgcaggaggccttgctgcactgtgggaggttccaggatgccctggagtccctgctcagctggatggtggacactgaggagct

SEQ ID NO: 128718 - DNA, 1403 bp, Homo sapiens
  Payload ID: 5187
  Gene Symbol: DTNBP1
  Gene Name: dystrobrevin binding protein 1
  Uniprot ID: Q96EV8
  ENST ID: ENST00000344537
  CDS Start-End: 174-1229
acgcggaaggggctggggttgcggcgcggcggcgaggaccagaccgggggcggggccggtagtgggagtgcggggcgcgcggtgacagcgcggggttggcggcgtgggacccagggggcgacagaggcagcagcagcccgaggcctgaggagaggagaccggcggcggcggcaatgctggagacccttcgcgagcggctgctgagcgtgcagcaggatttcacctccgggctgaagactttaagtgacaagtcaagagaagcaaaagtgaaaagcaaacccaggactgttccatttttgccaaagtactctgctggattagaattacttagcaggtatgaggatacatgggctgcacttcacagaagagccaaagactgtgcaagtgctggagagctggtggatagcgaggtggtcatgctttctgcgcactgggagaagaaaaagacaagcctcgtggagctgcaagagcagctccagcagctcccagctttaatcgcagacttagaatccatgacagcaaatctgactcatttagaggcgagttttgaggaggtagagaacaacctgctgcatctggaagacttatgtgggcagtgtgaattagaaagatgcaaacatatgcagtcccagcaactggagaattacaagaaaaataagaggaaggaacttgaaaccttcaaagctgaactagatgcagagcacgcccagaaggtcctggaaatggagcacacccagcaaatgaagctgaaggagcggcagaagttttttgaggaagccttccagcaggacatggagcagtacctgtccactggctacctgcagattgcagagcggcgagagcccataggcagcatgtcatccatggaagtgaacgtggacatgctggagcagatggacctgatggacatatcggaccaggaggccctggacgtcttcctgaactctggaggagaagagaacactgtgctgtcccccgccttagggcctgaatccagtacctgtcagaatgagattaccctccaggttccaaatccctcagaattaagagccaagccaccttcttcttcctccacctgcaccgactcggccacccgggacatcagtgagggtggggagtcccccgttgttcagtccgatgaggaggaagttcaggtggacactgccctggccacatcacacactgacagagaggccactccggatggtggtgaggacagcgactcttaaattgggacatgggcgttgtctggccacactggaatccagttttggctgtatgcggaattccacctggaaagccaggttgttttatagaggttcttgatttttacataattgccaataatgtgtgagaaacttaaagaacagctaacaataaagtgtgaggacggtaaactgaga

SEQ ID NO: 128719 - DNA, 1880 bp, Homo sapiens
  Payload ID: 5187
  Gene Symbol: DTNBP1
  Gene Name: dystrobrevin binding protein 1
  Uniprot ID: Q96EV8
  ENST ID: ENST00000338950
  CDS Start-End: 107-1018
gtgcggggcgcgcggtgacagcgcggggttggcggcgtgggacccagggggcgacagaggcagcagcagcccgaggcctgaggagaggagaccggcggcggcggcaatgctggagacccttcgcgagcggctgctgagcgtgcagcaggatttcacctccgggctgaagactttaagtgacaagtcaagagaagcaaaagtgaaaagcaaacccaggactgttccatttttgccaaagtactctgctggattagaattacttagcaggtatgaggatacatgggctgcacttcacagaagagccaaagactgtgcaagtgctggagagctggtggatagcgaggtggtcatgctttctgcgcactgggagaagaaaaagacaagcctcgtggagctgcaagagcagctccagcagctcccagctttaatcgcagacttagaatccatgacagcaaatctgactcatttagaggcgagttttgaggaggtagagaacaacctgctgcatctggaagacttatgtgggcagtgtgaattagaaagatgcaaacatatgcagtcccagcaactggagaattacaagaaaaataagaggaaggaacttgaaaccttcaaagctgaactagatgcagagcacgcccagaaggtcctggaaatggagcacacccagcaaatgaagctgaaggagcggcagaagttttttgaggaagccttccagcaggacatggagcagtacctgtccactggctacctgcagattgcagagcggcgagagcccataggcagcatgtcatccatggaagtgaacgtggacatgctggagcagatggacctgatggacatatcggaccaggaggccctggacgtcttcctgaactctggaggagaagagaacactgtgctgtcccccgccttaggtagggttgacaaacttgcattagctgaaccagggcagtatcgatgccactcccctccaaaggtgagacgtgagaaccatctgccagtcacttacgcataaacccccaagctcacagccagctcctggctccctaaccccacggttccacacggctgtgtggcagctgcaacagtggtgtggttccgtcatgaattcttctcaaagatttgacatgctccactccggtaactttggtgagttgagagctttcttgtttgttttccctcctttaccacccagaaatccatttgagtctgctccttgtggttaaggactggcgtttgcagggaggtgcggactctcctgcggggctcacgggaaactcttccctcttcgtgcgacaggcatttaggggcgtgcctgccatgggcaaagccatggtgtgtgttcagctcttggcctgtgttgtaaacttagttgcacttcagttcctttcatcccttcacaaaattttgtttcacattcatgcagcaaatatgggctgaggtgccagacctgtacctgggcttggtgcgtttcaaatttcagaccagttctttgggctgggtcaaggcaaagctcagtcgtcccagcagcacctcagccatctgtagaaggttctaccattaccacggtttcagcttcctctaaacttctcacccgcttctcctggcaatctgtcagaacggtgtcatcctggggaagagaaggagcttgggtgcatttgccctcatcctgagaaggccagaatactggagaccagcgtgaaccctcacccagagtcaggggaagatttagaaacagtgacacctgcatatagaattttgattccttgaagagcctatttagttccataaaattggagaactgctgaaggtcagtaattccgactttctcagcagtggtgtctctgaattactgcaaagggtaaaaaaaaaaaaaa

SEQ ID NO: 128720 - DNA, 1359 bp, Homo sapiens
  Payload ID: 5187
  Gene Symbol: DTNBP1
  Gene Name: dystrobrevin binding protein 1
  ENST ID: ENST00000355917
  CDS Start-End: 190-1194
cgcgcgcggggcgggaacgcggaaggggctggggttgcggcgcggcggcgaggaccagaccgggggcggggccggtagtgggagtgcggggcgcgcggtgacagcgcggggttggcggcgtgggacccagggggcgacagaggcagcagcagcccgaggcctgaggagaggagaccggcggcggcggcaatgctggagacccttcgcgagcggctgctgagcgtgcagcaggatttcacctccgggctgaagactttaagtgacaagtcaagagaagcaaaagtgaaaagcaaacccaggtatgaggatacatgggctgcacttcacagaagagccaaagactgtgcaagtgctggagagctggtggatagcgaggtggtcatgctttctgcgcactgggagaagaaaaagacaagcctcgtggagctgcaagagcagctccagcagctcccagctttaatcgcagacttagaatccatgacagcaaatctgactcatttagaggcgagttttgaggaggtagagaacaacctgctgcatctggaagacttatgtgggcagtgtgaattagaaagatgcaaacatatgcagtcccagcaactggagaattacaagaaaaataagaggaaggaacttgaaaccttcaaagctgaactagatgcagagcacgcccagaaggtcctggaaatggagcacacccagcaaatgaagctgaaggagcggcagaagttttttgaggaagccttccagcaggacatggagcagtacctgtccactggctacctgcagattgcagagcggcgagagcccataggcagcatgtcatccatggaagtgaacgtggacatgctggagcagatggacctgatggacatatcggaccaggaggccctggacgtcttcctgaactctggaggagaagagaacactgtgctgtcccccgccttagggcctgaatccagtacctgtcagaatgagattaccctccaggttccaaatccctcagaattaagagccaagccaccttcttcttcctccacctgcaccgactcggccacccgggacatcagtgagggtggggagtcccccgttgttcagtccgatgaggaggaagttcaggtggacactgccctggccacatcacacactgacagagaggccactccggatggtggtgaggacagcgactcttaaattgggacatgggcgttgtctggccacactggaatccagttttggctgtatgcggaattccacctggaaagccaggttgttttatagaggttcttgatttttacataattgccaataatgtgtgagaaacttaaagaacagctaacaataaagtgtgaggacggt

SEQ ID NO: 128721 - DNA, 498 bp, Homo sapiens
  Payload ID: 5187
  Gene Symbol: DTNBP1
  Gene Name: dystrobrevin binding protein 1
  ENST ID: ENST00000509674
  CDS Start-End: 72-498
agattgtgttgaacggccatgaatccatagcagctgaactagatgcagagcacgcccagaaggtcctggaaatggagcacacccagcaaatgaagctgaaggagcggcagaagttttttgaggaagccttccagcaggacatggagcagtacctgtccactggctacctgcagattgcagagcggcgagagcccataggcagcatgtcatccatggaagtgaacgtggacatgctggagcagatggacctgatggacatatcggaccaggaggccctggacgtcttcctgaactctggaggagaagagaacactgtgctgtcccccgccttagggcctgaatccagtacctgtcagaatgagattaccctccaggttccaaatccctcagaattaagagccaagccaccttcttcttcctccacctgcaccgactcggccacccgggacatcagtgagggtggggagtcccccgttgttcagtccgatgaggaggaag

SEQ ID NO: 128722 - DNA, 1542 bp, Homo sapiens
  Payload ID: 5187
  Gene Symbol: DTNBP1
  Gene Name: dystrobrevin binding protein 1
  ENST ID: ENST00000506844
  CDS Start-End: 52-192
agaggcagcagcagcccgaggcctgaggagaggagaccggcggcggcggcaatgctggagacccttcgcgagcggctgctgagcgtgcagcaggatttcacctccgggtcactttcagctgacaaaccactggactgtcagtgtgtgccattagcctgtcacctggtggagaaacaactcatctccaagtgatgtcagtctcccagtagacccggacctctagtgcctgatgttcactttcttcaggctgaagactttaagtgacaagtcaagagaagcaaaagtgaaaagcaaacccaggactgttccatttttgccaaagtactctgctggattagaattacttagcaggtatgaggatacatgggctgcacttcacagaagagccaaagactgtgcaagtgctggagagctggtggatagcgaggtggtcatgctttctgcgcactgggagaagaaaaagacaagcctcgtggagctgcaagagcagctccagcagctcccagctttaatcgcagacttagaatccatgacagcaaatctgactcatttagaggcgagttttgaggaggtagagaacaacctgctgcatctggaagacttatgtgggcagtgtgaattagaaagatgcaaacatatgcagtcccagcaactggagaattacaagaaaaataagaggaaggaacttgaaaccttcaaagctgaactagatgcagagcacgcccagaaggtcctggaaatggagcacacccagcaaatgaagctgaaggagcggcagaagttttttgaggaagccttccagcaggacatggagcagtacctgtccactggctacctgcagattgcagagcggcgagagcccataggcagcatgtcatccatggaagtgaacgtggacatgctggagcagatggacctgatggacatatcggaccaggaggccctggacgtcttcctgaactctggaggagaagagaacactgtgctgtcccccgccttaggtagggttgacaaacttgcattagctgaaccagggcagtatcgatgccactcccctccaaaggtgagacgtgagaaccatctgccagtcacttacgcataaacccccaagctcacagccagctcctggctccctaaccccacggttccacacggctgtgtggcagctgcaacagtggtgtggttccgtcatgaattcttctcaaagatttgacatgctccactccggtaactttggtgagttgagagctttcttgtttgttttccctcctttaccacccagaaatccatttgagtctgctccttgtggttaaggactggcgtttgcagggaggtgcggactctcctgcggggctcacgggaaactcttccctcttcgtgcgacaggcatttaggggcgtgcctgccatgggcaaagccatggtgtgtgttcagctcttggcctgtgttgtaaacttagttgcacttcagttcctttcatcccttcacaaaattttgtttcacattcatgcagcaaatatgggctgaggtgccagacctgta

SEQ ID NO: 128723 - DNA, 1518 bp, Homo sapiens
  Payload ID: 5187
  Gene Symbol: DTNBP1
  Gene Name: dystrobrevin binding protein 1
  ENST ID: ENST00000513680
  CDS Start-End: 190-330
cgcgcgcggggcgggaacgcggaaggggctggggttgcggcgcggcggcgaggaccagaccgggggcggggccggtagtgggagtgcggggcgcgcggtgacagcgcggggttggcggcgtgggacccagggggcgacagaggcagcagcagcccgaggcctgaggagaggagaccggcggcggcggcaatgctggagacccttcgcgagcggctgctgagcgtgcagcaggatttcacctccgggtcactttcagctgacaaaccactggactgtcagtgtgtgccattagcctgtcacctggtggagaaacaactcatctccaagtgatgtcagtctcccagtagacccggacctctagtgcctgatgttcactttcttcaggctgaagactttaagtgacaagtcaagagaagcaaaagtgaaaagcaaacccaggactgttccatttttgccaaagtactctgctggattagaattacttagcaggtatgaggatacatgggctgcacttcacagaagagccaaagactgtgcaagtgctggagagctggtggatagcgaggtggtcatgctttctgcgcactgggagaagaaaaagacaagcctcgtggagctgcaagagcagctccagcagctcccagctttaatcgcagacttagaatccatgacagcaaatctgactcatttagaggcgagttttgaggaggtagagaacaacctgctgcatctggaagacttatgtgggcagtgtgaattagaaagatgcaaacatatgcagtcccagcaactggagaattacaagaaaaataagaggaaggaacttgaaaccttcaaagctgaactagatgcagagcacgcccagaaggtcctggaaatggagcacacccagcaaatgaagctgaaggagcggcagaagttttttgaggaagccttccagcaggacatggagcagtacctgtccactggctacctgcagattgcagagcggcgaggcgacccataggcagcatgtcatccatggaagtgaacgtggacatgctggagcagatggacctgatggacatatcggaccaggaggccctggacgtcttcctgaactctggaggagaagagaacactgtgctgtcccccgccttagggcctgaatccagtacctgtcagaatgagattaccctccaggttccaaatccctcagaattaagagccaagccaccttcttcttcctccacctgcaccgactcggccacccgggacatcagtgagggtggggagtcccccgttgttcagtccgatgaggaggaagttcaggtggacactgccctggccacatcacacactgacagagaggccactccggatggtggtgaggacagcgactcttaaattgggacatgggcgttgtctggccacactggaatccagttttggctgtatgcggaattccacctggaaagccaggttgttttatagaggttcttgatttttacataattgccaataatgtgtgagaaactt

SEQ ID NO: 128724 - DNA, 1404 bp, Homo sapiens
  Payload ID: 5187
  Gene Symbol: DTNBP1
  Gene Name: dystrobrevin binding protein 1
  ENST ID: ENST00000510395
  CDS Start-End: 139-273
ggaccagaccgggggcggggccggtagtgggagtgcggggcgcgcggtgacagcgcggggttggcggcgtgggacccagggggcgacagaggcagcagcagcccgaggcctgaggagaggagaccggcggcggcggcaatgctggagacccttcgcgagcggctgctgagcgtgcagcaggatttcacctccgggctgaagactttaagtgacaagtcaagagaagcaaaagtgaaaagcaaacccagttggctaaatcaagaacagttttaataagtgtttcttttgggcaggactgttccatttttgccaaagtactctgctggattagaattacttagcaggtatgaggatacatgggctgcacttcacagaagagccaaagactgtgcaagtgctggagagctggtggatagcgaggtggtcatgctttctgcgcactgggagaagaaaaagacaagcctcgtggagctgcaagagcagctccagcagctcccagctttaatcgcagacttagaatccatgacagcaaatctgactcatttagaggcgagttttgaggaggtagagaacaacctgctgcatctggaagacttatgtgggcagtgtgaattagaaagatgcaaacatatgcagtcccagcaactggagaattacaagaaaaataagaggaaggaacttgaaaccttcaaagctgaactagatgcagagcacgcccagaaggtcctggaaatggagcacacccagcaaatgaagctgaaggagcggcagaagttttttgaggaagccttccagcaggacatggagcagtacctgtccactggctacctgcagattgcagagcggcgagagcccataggcagcatgtcatccatggaagtgaacgtggacatgctggagcagatggacctgatggacatatcggaccaggaggccctggacgtcttcctgaactctggaggagaagagaacactgtgctgtcccccgccttagggcctgaatccagtacctgtcagaatgagattaccctccaggttccaaatccctcagaattaagagccaagccaccttcttcttcctccacctgcaccgactcggccacccgggacatcagtgagggtggggagtcccccgttgttcagtccgatgaggaggaagttcaggtggacactgccctggccacatcacacactgacagagaggccactccggatggtggtgaggacagcgactcttaaattgggacatgggcgttgtctggccacactggaatccagttttggctgtatgcggaattccacctggaaagccaggttgttttatagaggttcttgatttttacataattgccaataatgtgtgagaaacttaaagaacagctaacaataaagtgtgaggacggt

SEQ ID NO: 128725 - DNA, 1306 bp, Homo sapiens
  Payload ID: 5187
  Gene Symbol: DTNBP1
  Gene Name: dystrobrevin binding protein 1
  ENST ID: ENST00000515875
  CDS Start-End: 162-788
ctggggttgcggcgcggcggcgaggaccagaccgggggcggggccggtagtgggagtgcggggcgcgcggtgacagcgcggggttggcggcgtgggacccagggggcgacagaggcagcagcagcccgaggcctgaggagaggagaccggcggcggcggcaatgctggagacccttcgcgagcggctgctgagcgtgcagcaggatttcacctccgggctgaagactttaagtgacaagtcaagagaagcaaaagtgaaaagcaaacccaggtatgaggatacatgggctgcacttcacagaagagccaaagactgtgcaagtgctggagagctggtggatagcgaggtggtcatgctttctgcgcactgggagaagaaaaagacaagcctcgtggagctgcaagagcagctccagcagctcccagctttaatcgcagacttagaatccatgacagcaaatctgactcatttagaggcgagttttgaggaggtagagaacaacctgctgcatctggaagacttatgtgggcagtgtgaattagaaagatgcaaacatatgcagtcccagcaactggagaattacaagaaaaataagaggaaggaacttgaaaccttcaaagctgaactagatgcagagcacgcccagaaggtcctggaaatggagcacacccagcaaatgaagctgaaggagcggcagaagttttttgaggaagccttccagcaggacatggagcagtacctgtccactggctacctgcagattgcagagcggcgaggcgacccataggcagcatgtcatccatggaagtgaacgtggacatgctggagcagatggacctgatggacatatcggaccaggaggccctggacgtcttcctgaactctggaggagaagagaacactgtgctgtcccccgccttagggcctgaatccagtacctgtcagaatgagattaccctccaggttccaaatccctcagaattaagagccaagccaccttcttcttcctccacctgcaccgactcggccacccgggacatcagtgagggtggggagtcccccgttgttcagtccgatgaggaggaagttcaggtggacactgccctggccacatcacacactgacagagaggccactccggatggtggtgaggacagcgactcttaaattgggacatgggcgttgtctggccacactggaatccagttttggctgtatgcggaattccacctggaaagccaggttgttttatagaggttcttgatttttacataattgccaataatgtgtgagaaacttaaagaa

SEQ ID NO: 128726 - DNA, 1010 bp, Homo sapiens
  Payload ID: 5187
  Gene Symbol: DTNBP1
  Gene Name: dystrobrevin binding protein 1
  ENST ID: ENST00000462989
  CDS Start-End: 255-842
tttgcacactagagcccctgagagcttgcattttgcttttatagaggcagtagattccaatgtatatctgcttaagccatcagcaaaaaactaataggcttactacaatttctttggaaaaacctgcttctggcttcagcctcacttcctttgttctacatcccagaagatgcacgtgagggcagctgcctggtaactggaggcttcacttgaccagcactgagcttctgttcactccttcaggtctcacatccatgtcatctccaggactcaccgaaaatagtcagagggatccctctgaactagatgcagagcacgcccagaaggtcctggaaatggagcacacccagcaaatgaagctgaaggagcggcagaagttttttgaggaagccttccagcaggacatggagcagtacctgtccactggctacctgcagattgcagagcggcgagagcccataggcagcatgtcatccatggaagtgaacgtggacatgctggagcagatggacctgatggacatatcggaccaggaggccctggacgtcttcctgaactctggaggagaagagaacactgtgctgtcccccgccttagggcctgaatccagtacctgtcagaatgagattaccctccaggttccaaatccctcagaattaagagccaagccaccttcttcttcctccacctgcaccgactcggccacccgggacatcagtgagggtggggagtcccccgttgttcagtccgatgaggaggaagttcaggtggacactgccctggccacatcacacactgacagagaggccactccggatggtggtgaggacagcgactcttaaattgggacatgggcgttgtctggccacactggaatccagttttggctgtatgcggaattccacctggaaagccaggttgttttatagaggttcttgatttttacataattgccaataatgtgtgagaaacttaaagaacagctaacaataaagtgtgaggacggtaaa

SEQ ID NO: 128727 - DNA, 843 bp, Homo sapiens
  Payload ID: 5187
  Gene Symbol: DTNBP1
  Gene Name: dystrobrevin binding protein 1
  ENST ID: ENST00000511762
  CDS Start-End: 152-843
ggcgcggcggcgaggaccagaccgggggcggggccggtagtgggagtgcggggcgcgcggtgacagcgcggggttggcggcgtgggacccagggggcgacagaggcagcagcagcccgaggcctgaggagaggagaccggcggcggcggcaatgctggagacccttcgcgagcggctgctgagcgtgcagcaggatttcacctccgggtatgaggatacatgggctgcacttcacagaagagccaaagactgtgcaagtgctggagagctggtggatagcgaggtggtcatgctttctgcgcactgggagaagaaaaagacaagcctcgtggagctgcaagagcagctccagcagctcccagctttaatcgcagacttagaatccatgacagcaaatctgactcatttagaggcgagttttgaggaggtagagaacaacctgctgcatctggaagacttatgtgggcagtgtgaattagaaagatgcaaacatatgcagtcccagcaactggagaattacaagaaaaataagaggaaggaacttgaaaccttcaaagctgaactagatgcagagcacgcccagaaggtcctggaaatggagcacacccagcaaatgaagctgaaggagcggcagaagttttttgaggaagccttccagcaggacatggagcagtacctgtccactggctacctgcagattgcagagcggcgagagcccataggcagcatgtcatccatggaagtgaacgtggacatgctggagcagatggacctgatggacatatcggaccaggaggccctggacgtcttcctgaactctggaggagaagagaacactgtgct

SEQ ID NO: 128728 - DNA, 1305 bp, Homo sapiens
  Payload ID: 5187
  Gene Symbol: DTNBP1
  Gene Name: dystrobrevin binding protein 1
  ENST ID: ENST00000622898
  CDS Start-End: 190-1140
cgcgcgcggggcgggaacgcggaaggggctggggttgcggcgcggcggcgaggaccagaccgggggcggggccggtagtgggagtgcggggcgcgcggtgacagcgcggggttggcggcgtgggacccagggggcgacagaggcagcagcagcccgaggcctgaggagaggagaccggcggcggcggcaatgctggagacccttcgcgagcggctgctgagcgtgcagcaggatttcacctccgggtatgaggatacatgggctgcacttcacagaagagccaaagactgtgcaagtgctggagagctggtggatagcgaggtggtcatgctttctgcgcactgggagaagaaaaagacaagcctcgtggagctgcaagagcagctccagcagctcccagctttaatcgcagacttagaatccatgacagcaaatctgactcatttagaggcgagttttgaggaggtagagaacaacctgctgcatctggaagacttatgtgggcagtgtgaattagaaagatgcaaacatatgcagtcccagcaactggagaattacaagaaaaataagaggaaggaacttgaaaccttcaaagctgaactagatgcagagcacgcccagaaggtcctggaaatggagcacacccagcaaatgaagctgaaggagcggcagaagttttttgaggaagccttccagcaggacatggagcagtacctgtccactggctacctgcagattgcagagcggcgagagcccataggcagcatgtcatccatggaagtgaacgtggacatgctggagcagatggacctgatggacatatcggaccaggaggccctggacgtcttcctgaactctggaggagaagagaacactgtgctgtcccccgccttagggcctgaatccagtacctgtcagaatgagattaccctccaggttccaaatccctcagaattaagagccaagccaccttcttcttcctccacctgcaccgactcggccacccgggacatcagtgagggtggggagtcccccgttgttcagtccgatgaggaggaagttcaggtggacactgccctggccacatcacacactgacagagaggccactccggatggtggtgaggacagcgactcttaaattgggacatgggcgttgtctggccacactggaatccagttttggctgtatgcggaattccacctggaaagccaggttgttttatagaggttcttgatttttacataattgccaataatgtgtgagaaacttaaagaacagctaacaataaagtgtgaggacggt

SEQ ID NO: 128729 - DNA, 1964 bp, Homo sapiens
  Payload ID: 5188
  Gene Symbol: DTNA
  Gene Name: dystrobrevin, alpha
  Uniprot ID: Q9Y4J8
  ENST ID: ENST00000269192
  CDS Start-End: 346-1704
agagttaaagggaatatcaaggatggtggcagaattaaagggcaaacttaccttccatcccaggtctagtattcagtcccccttcctcccactctccaccctactgcgtgctcttacttattctgttggaacccagtgtagcttcctgagatttaaaatataggaagactcaaaactatgttacttcttggaatatagataattcagtactgatttaaataacaactgaatagcaaggaccttctggaacataatcttacattcacaaaatcacctgctaagaagctgactaatgcattaagcaagtccctgagctgtgcttccagccgtgaacctttgcaccccatgttcccagatcagcctgagaagccactcaacttggctcacatcgtgcctcccagacctgtaaccagcatgaacgacaccctgttctcccactctgttccctcctcaggaagtccttttattaccaggaggttacctgagggaataagtgcatccagccctgtggctgaagagcattccctcataaagctgtacgtaaatcagcttgatcacggtgcacgctctcctcccaaggacagtgaagtagagcagaacaaactgctggctagggctgctccagcttttctgaagggcaaagggatacagtacagcctgaatgtggcagacaggctagctgatgaacatgttctcatcgggttgtatgtcaacatgctccggaacaacccctcatgcatgcttgagagttcaaaccggcttgatgaagaacacaggctaattgccaggtatgcggcaaggctggcagcagagtcctcttcgtctcagccacctcagcagagaagtgctcctgacatctctttcaccatcgatgcgaataagcagcaaaggcagctgattgctgagctagaaaacaagaacagagaaatcttacaggagatccagagacttcggctagagcatgaacaagcttctcagcccacgccagagaaggcacagcaaaaccccaccctgctggcagaactccggctcctcagacagcgcaaagatgagctggaacagagaatgtctgctctccaggagagccggagagagctaatggtccagttggagggtctcatgaagctactaaagactcagggggcaggctctccccgctcctcccccagccacaccatcagcaggccaattcccatgcccatccggtcagcgtcagcctgctccaccccgacgcacacgccgcaggactccctcacaggagtagggggagatgtacaagaggcatttgcacaaagttcaagaagaaacttaaggaatgacttgctagtggctgcagattccatcactaacactatgtcctctcttgtgaaagagctgaattctgaggttgggagtgaaacagagagtaatgtggattctgaatttgcacggactcagtttgaggatcttgttccctcaccaacctctgaaaaggcttttctagcgcaaatccatgcccgaaaacctgggtacattcacagtggagctaccacaagtaccatgcgtggcgacatggttacggaggatgcagatccctatgtgcagcctgaagatgaaaactatgaaaatgactctgtccggcagctggagaatgagctccagatggaggaatacctgaaacagaagctgcaagatgaagcttatcaggtcagcttgcaaggttgaatgcaatatccttttatcacactcctctcaagcaagctatagtcagacagatgatgaaagtaacatgaaaactggtgatgatggagagccctgtggccacacagaggaggaagacagcagcctggcagcagcctcaccgaagagaggaaccaccacacccagcagctcctgacagacccccacccctaaagatgtgtcctgatgactatagtgcagctaactttttgttctcagatttgtagtgcataggtgtgtgtttc

SEQ ID NO: 128730 - DNA, 6522 bp, Homo sapiens
  Payload ID: 5188
  Gene Symbol: DTNA
  Gene Name: dystrobrevin, alpha
  Uniprot ID: Q9Y4J8
  ENST ID: ENST00000283365
  CDS Start-End: 352-2412
aggatgagatcatagtttcaggatcctcaggaaaccctggtactggcagcagccagcctctgctgtgcccacatgacccacaactctggcagcggacccggcacttccaacattattaaataataagaaagcggctcctactccaggctcaaacctccctgcagaccaatggacaccttctaagagtttggcgagtcagtgactgaagcgcccgtccattccaagataaataggatttaccaatccttggatgaagtgcttgggaagtctttaagtgccataatcaactgccatttcaaagaatatagatggttttgaaaagttcatgctgtcccttcattgaattttagaatgattgaagatagtgggaaaagaggaaataccatggcagaaagaagacagctgtttgcagagatgagggctcaagatctggatcgcatccgactctccacctacagaacagcatgcaagcttaggtttgttcagaagaaatgcaatttgcacctggtggacatatggaatgtcatagaagcattgcgggaaaatgctctgaacaacctggacccaaacactgaactcaacgtgtcccgcttagaggctgtgctctccactattttttaccagctcaacaaacggatgccaaccactcaccaaatccatgtggagcagtccatcagcctcctccttaacttcctgcttgcagcgtttgatccggaaggccatggtaaaatttcagtatttgctgtcaaaatggctttagccacattgtgtggagggaagatcatggacaaattaagatatattttctcaatgatttctgactccagtggggtgatggtttatggacgatatgaccaattccttcgggaagttctcaaactacccacggcagtttttgaaggtccttcatttggttacacagaacagtcagccagatcctgtttctcccaacagaaaaaagtcacgttaaatggtttcttggacacgcttatgtcagatcctcccccgcagtgtctggtctggttgcctcttctgcatcgactagcaaatgtggaaaatgtcttccatccggttgagtgttcctactgccacagtgagagtatgatgggatttcgctaccgatgccaacagtgtcacaattaccagctctgtcaggactgcttctggaggggacatgccggtggttctcatagcaaccagcaccaaatgaaagagtacacgtcatggaaatcacctgctaagaagctgactaatgcattaagcaagtccctgagctgtgcttccagccgtgaacctttgcaccccatgttcccagatcagcctgagaagccactcaacttggctcacatcgttgatacttggcctcccagacctgtaaccagcatgaacgacaccctgttctcccactctgttccctcctcaggaagtccttttattaccaggagcatgcttgagagttcaaaccggcttgatgaagaacacaggctaattgccaggtatgcggcaaggctggcagcagagtcctcttcgtctcagccacctcagcagagaagtgctcctgacatctctttcaccatcgatgcgaataagcagcaaaggcagctgattgctgagctagaaaacaagaacagagaaatcttacaggagatccagagacttcggctagagcatgaacaagcttctcagcccacgccagagaaggcacagcaaaaccccaccctgctggcagaactccggctcctcagacagcgcaaagatgagctggaacagagaatgtctgctctccaggagagccggagagagctaatggtccagttggagggtctcatgaagctactaaagactcagggggcaggctctccccgctcctcccccagccacaccatcagcaggccaattcccatgcccatccggtcagcgtcagcctgctccaccccgacgcacacgccgcaggactccctcacaggagtagggggagatgtacaagaggcatttgcacaaagttcaagaagaaacttaaggaatgacttgctagtggctgcagattccatcactaacactatgtcctctcttgtgaaagagctgaattctgaggttgggagtgaaacagagagtaatgtggattctgaatttgcacggactcagtttgaggatcttgttccctcaccaacctctgaaaaggcttttctagcgcaaatccatgcccgaaaacctgggtacattcacagtggagctaccacaagtaccatgcgtggcgacatggttacggaggatgcagatccctatgtgcagcctgaagatgaaaactatgaaaatgactctgtccggcagctggagaatgagctccagatggaggaatacctgaaacagaagctgcaagatgaagcttatcaggtcagcttgcaaggttgaatgcaatatccttttatcacactcctctcaagcaagctatagtcagacagatgatgaaagtaacatgaaaactggtgatgatggagagccctgtggccacacagaggaggaagacagcagcctggcagcagcctcaccgaagagaggaaccaccacacccagcagctcctgacagacccccacccctaaagatgtgtcctgatgactatagtgcagctaactttttgttctcagatttgtagtgcataggtgtgtgtttcaagaaggaaaaaaaaagacttctgttcaaagttaacttatcagctacatcctctgtaacgtggttcatccctggttaaaaagcaaacaaacacaggctgaaaacccatgctgctgttatacacaatggcagtattaacaagcattttaaacctttgcacatgatattgaacctgttcagtttacaatgacaatattaatactgtttatagctagaagtttgatttctgaattctttgagattttagcaaaacagtttattatacactgtacatttttttcacagcaattggaaaaaaacaaccacttgcaatcattcaataaccctgaagaatttggttcctgagtgtacaaactcagagcccggaagccaagaagggtccttggcctgcacggtctgtagttgactccaagtctctgtgagcagtgacttgaaccaaacacaccaggaataatccattctttggggcctctttccaactcgaggttgttttctttcaagatactctaatcagccatagaatttagtgtaaatatttttttttccaaatagatatcatattcaaaaaaggcagcattcaaattatatagaatctagtttttaaaatcagcacagatcttcttaaaaactgtgaactatgttttgaaatactcgttactaaagctgtttataaaccacaggtgccataagatccccaaacggactaaagttatctctgctcttccatggtcttgttcctctcgttttggctttaggaagcatgtctttaacagcaccgctcgttcacaagttcccccatcaagttgtttggaggccttcagctttaaatgtacaggcttaaagtgcgcttgcaaacgtttgctctcctttttttctgaatgttgattgccttagctggccacctggtgttctgcatgtagccttctgtggtcatgtgaaaggagacaggctcttctaagttgagttgggatttttgcactcagtgaaaagctgaagtgcaaaagagctatcaaagacaagaggataaaagactgggatagtcttttccaaggaccctctttagagggccctaaagacctcctttgggaattctggggaaaaagaaaaagtaatcttctacttgcttcaagatttgatttttttaaaaaagcctgcgacctattcaatacattatgcttaaattagcagtttctctggaattcctgtctctcctttaaaagaaaggagagaacattttagaacaatagttctcaaagtgtgttccccggacaagcagcatctgcaacacttaggaaggtcttcgaaatactaatttgtaagccccacctcaggcctactgaatcagaagctctgggggttgggtccagaagtctgttttagtcaaccctctaggtgattctgatgctcgctaaaggttgagaactactgctttagaatgaagtcgtataataaagtctctgaaaaggccttattcagaataagcaagaaaggttctgtgattcacttttgcttctggggctggcaaaaaccttctctgaacccacacaccaagttcgtagttggtaggtgcccagccaagtcctgacatcttcatgccccctctgcagagggcggctgtacgatgttcacatgtctgcgtttggtcagacatcatctccttggctgccctttgaaaccaaatcacttgccttggggataaagtgctcaattggcattagtgagaagcccatcctatcccttgacatacttaatcatatatctctccagagaactcacctgacaaatgtctctgagcacaggctgacaccaaagtggcacaactgcacagttctcagatttctttgcacagattgatttttattgcgggttttgttggggtgtcttaatgttcatctcttttccactgcccatcctctgtgaacccatacctctctagatggagcaggtggccactggtgcctcatactcagtattgaaaaccactacatcccagctacctataatgctgtcagctcaaaatcatagccaggtagttcttgaactcagaacttaaatcctgcacgtggcactccaccactgactggaccgagctggcatatgttgtttctttgtgtttctacatcaaaatgttcgtctaagatttgaactgttctgctgataaccttccccgttgtcatagctatttcattgccaaccaactccatcacatggttgttgatatcgtcatataaagccattgcaaggactctggaaactgccgccaatgaccaatttctgactaaccagccaccttttctctctcttagctccacgtcagcactgagaccagactcgagcacccctgtcctgtaagcgagacaaaatggcgtgtgttattttggggttttgtgttttttggtgggtttctttccttggctctccagatttacttttggggcctgttctaagtgcaaacccagcaagtttcacttgtcctgtccattagatacaactacatcttgcgggggttgtttctttcttgttccacaatgaattgcacatccatctccatcagagctgatagcctgttaataagcactggtctaacacagccaaccctcctccacagcgccatattaatggaggaggggaggaaggtgaaatctactgcatgggattcaggaaacagttgtggttggtcaggacggaagttggggtaagtttggttggtcagagggagttgtgctggagattgtgaaaaatgggttcttgaatgatctactataaggcagggaaggttcatttgtaagtagtaatgtgaactgaattgcattaagagtgtgtggcctttgttgtgatatactatgtattttcttatatgcatgagccaaactgttgcatcataatttagcactgatgtctgcttttattttgatcatctttgtccacccttattagttcttggctgttaaccgtagatagatcttgtaaatccagcaacctttggttgctgcattccccttggttcgattccacgcaaggagccacaagtgagaactccactgtccttagaagaaagggcatttttacttttgaaccaaaaagagaaaaaaaaatcagaagtgttgcatcttgaggcgaattaactgtaagacatttttaattatgactactgcaatttgacaccatttgaaataatcaattcagagacactaaagatttcacaatattcattggtattgtaaaaaaaaaatactattgtatggatttttgtattgctgttaagtattgttttgtgtgtgtgtgtgtgtgtgtgtgttggaacctcctggggacatgttatattttgaagtgattaaactatttaattgtgtgtctatattttggagtggaataatttcttcattaaaaaatgtttttaaaaacactatatcttgggtggtttattcctttgtttcagtgaatctttcctaaagcaacgtggagtcagtctgttgaaagaaggaaggcaggtacttgcagtttaaagcaggacccattgatggaatattgagccaccgaggcaaaatagctcaccttctcttgccttgggggatgcatggtttttaccattctactgttttattagcatctgtgagcatctaatagaaatactattctgctatttatggaaatccttattataattgatatggaagtgagtttgaaattctaacagctaacatatttcatgtttgtatcacacactgttcttaacactttatgtgacttcactcaattctttgaatcctctgcatctagccatgtattctgcaaatattaagtgctcaatggtttttttgttgaattactgaataaatgaattagtggtg

SEQ ID NO: 128731 - DNA, 1706 bp, Homo sapiens
  Payload ID: 5188
  Gene Symbol: DTNA
  Gene Name: dystrobrevin, alpha
  Uniprot ID: Q9Y4J8
  ENST ID: ENST00000315456
  CDS Start-End: 325-1449
caggaaaccctggtactggcagcagccagcctctgctgtgcccacatgacccacaactctggcagcggacccggcacttccaacattattaaataataagaaagcggctcctactccaggctcaaacctccctgcagaccaatggacaccttctaagagtttggcgagtcagtgactgaagcgcccgtccattccaagataaataggatttaccaatccttggatgaagtgcttgggaagtctttaagtgccataatcaactgccatttcaaagaatatagatggttttgaaaagttcatgctgtcccttcattgaattttagaatgattgaagatagtgggaaaagaggaaataccatggcagaaagaagacagctgtttgcagagatgagggctcaagatctggatcgcatccgactctccacctacagaacagcatgcaagcttaggtttgttcagaagaaatgcaatttgcacctggtggacatatggaatgtcatagaagcattgcgggaaaatgctctgaacaacctggacccaaacactgaactcaacgtgtcccgcttagaggctgtgctctccactattttttaccagctcaacaaacggatgccaaccactcaccaaatccatgtggagcagtccatcagcctcctccttaacttcctgcttgcagcgtttgatccggaaggccatggtaaaatttcagtatttgctgtcaaaatggctttagccacattgtgtggagggaagatcatggacaaattaagatatattttctcaatgatttctgactccagtggggtgatggtttatggacgatatgaccaattccttcgggaagttctcaaactacccacggcagtttttgaaggtccttcatttggttacacagaacagtcagccagatcctgtttctcccaacagaaaaaagtcacgttaaatggtttcttggacacgcttatgtcagatcctcccccgcagtgtctggtctggttgcctcttctgcatcgactagcaaatgtggaaaatgtcttccatccggttgagtgttcctactgccacagtgagagtatgatgggatttcgctaccgatgccaacagtgtcacaattaccagctctgtcaggactgcttctggaggggacatgccggtggttctcatagcaaccagcaccaaatgaaagagtacacgtcatggaaatcacctgctaagaagctgactaatgcattaagcaagtccctgagctgtgcttccagccgtgaacctttgcaccccatgttcccagatcagcctgagaagccactcaacttggctcacatcgttgatacttggcctcccagacctgtaaccagcatgaacgacaccctgttctcccactctgttccctcctcaggaagtccttttattaccaggagctcggacggtgcttttggtggatgcgtctagatggataacatgacttcttctaccctaaaatattcctataatactttgagctgttctggttcctccagggtgcatggtacccattaacccaaaatatgattatttcccttttttcccattttcagtcattttggaatgttctctgtgaaccacagttgtgttgtttaaagctcacatttctttctgtcaccacagagattggcctacggtttctgttttgagggtgctgttcaataaagctgtgtacactaaatgtc

SEQ ID NO: 128732 - DNA, 4518 bp, Homo sapiens
  Payload ID: 5188
  Gene Symbol: DTNA
  Gene Name: dystrobrevin, alpha
  Uniprot ID: Q9Y4J8
  ENST ID: ENST00000348997
  CDS Start-End: 164-1867
ttgagcacaaggggaagaatgaacacagctttttattgaagttaaaggttactttggagtttgtttggaaatgtgtaaggtcaaatactatagttttcagcatatgtagtacttcagaggaagaattaaggggcatgttggtgcatttaactacaaaaccagaatgattgaagatagtgggaaaagaggaaataccatggcagaaagaagacagctgtttgcagagatgagggctcaagatctggatcgcatccgactctccacctacagaacagcatgcaagcttaggtttgttcagaagaaatgcaatttgcacctggtggacatatggaatgtcatagaagcattgcgggaaaatgctctgaacaacctggacccaaacactgaactcaacgtgtcccgcttagaggctgtgctctccactattttttaccagctcaacaaacggatgccaaccactcaccaaatccatgtggagcagtccatcagcctcctccttaacttcctgcttgcagcgtttgatccggaaggccatggtaaaatttcagtatttgctgtcaaaatggctttagccacattgtgtggagggaagatcatggacaaattaagatatattttctcaatgatttctgactccagtggggtgatggtttatggacgatatgaccaattccttcgggaagttctcaaactacccacggcagtttttgaaggtccttcatttggttacacagaacagtcagccagatcctgtttctcccaacagaaaaaagtcacgttaaatggtttcttggacacgcttatgtcagatcctcccccgcagtgtctggtctggttgcctcttctgcatcgactagcaaatgtggaaaatgtcttccatccggttgagtgttcctactgccacagtgagagtatgatgggatttcgctaccgatgccaacagtgtcacaattaccagctctgtcaggactgcttctggaggggacatgccggtggttctcatagcaaccagcaccaaatgaaagagtacacgtcatggaaatcacctgctaagaagctgactaatgcattaagcaagtccctgagctgtgcttccagccgtgaacctttgcaccccatgttcccagatcagcctgagaagccactcaacttggctcacatcgtgcctcccagacctgtaaccagcatgaacgacaccctgttctcccactctgttccctcctcaggaagtccttttattaccaggagctctcctcccaaggacagtgaagtagagcagaacaaactgctggctagggctgctccagcttttctgaagggcaaagggatacagtacagcctgaatgtggcagacaggctagctgatgaacatgttctcatcgggttgtatgtcaacatgctccggaacaacccctcatgcatgcttgagagttcaaaccggcttgatgaagaacacaggctaattgccaggtatgcggcaaggctggcagcagagtcctcttcgtctcagccacctcagcagagaagtgctcctgacatctctttcaccatcgatgcgaataagcagcaaaggcagctgattgctgagctagaaaacaagaacagagaaatcttacaggagatccagagacttcggctagagcatgaacaagcttctcagcccacgccagagaaggcacagcaaaaccccaccctgctggcagaactccggctcctcagacagcgcaaagatgagctggaacagagaatgtctgctctccaggagagccggagagagctaatggtccagttggagggtctcatgaagctactaaaggaagaagaactgaagcagggagtaagttatgtcccctactgcaggtcttaactaacagtggaggggcctgccgacctgcggttttctcattgcttttgctctaatgtatgttcatgcttcagtttggaaagagaaaaaagtcatactaatttgcttctttttcaatgtagtgcttgaattgagatatataaatttagcattttttataactatcactactatccacatcaaaagaagaactatgacatcttttagaaaagggaacgaattgtcatttattggaaacattttagatccccagaggtataagtttcaaaccagtcttagcttttcaagttgttgatcagacccttctcttaacagagagataccacagtcactagagataccctgaggttcatgtcatcccaaaacccacagcactcagaagctaacctctacacccactcacactgtgagtattcagttcggtttcattttactgaaaacctgtgaaacctctttttataaaaatcaggcaattaaatcccttttcatcacacaattattgagccttgttccccatggctcaccaaaatgtgctcaattttgtgagagaaagactgtactccataactgactattcacgtcccatctttttggctcttccccaaagcagaatccttactgttggttgacagtaatctctttttaaaaagtaactctcagctttttccttagcaccagagcctttcggctccgggagacgagagggtcattacatacttttttttttttctggaaataggggcattgtgactttatagcctaaactggagctgtctgaacctgtggtcaggctcaagagccagcagggggagcagcaaactcaaaaaaaaaaacaaattaaattaaattaaattaaattaaatagaagcaaaataaaagcagctttaatttcaagtgcatgtaccacgctatgtatgacaatatatcccactcactagcattatttaaaagtttcacattatttccatggatcaattagaaccacaacctgtccaatttcaacgtatctttcatttcttctgtatgctcttttctattattcattatgtgtgtttgtgtgtaacaaagaatgtttggaaaatgctggacacatttttacccttcattcccatggtctgtaaaaaaggaaagtgtaaaatcaatctgtaatgtcagacaataaagataatgtattacattattttgtattttgtgaaaaaaattactttactaaattaaagtcaaattttaacagaagacagtccccctgggtgaaggacacataacacatacagcctgtataattgcccatgaatgcatacatggggtattgctattgtatttccaatacacttagatcatggtaaagaaaaatgccttcttcatgatacttctctgcaaatggcttctttcctctcctgtctcttatttagcatgtgcatagaaaaaggaaataaggttcaattataacctccctcctcctagcagagagagagggcaatcatcctgtcgtcatcagccttgctttagccatttcccttggggatactttccaggccatttcccaggcagcaggatcttgaaaggctcctatggaccaggaagttcgtaaacagatggatgcacagagccaaactgtggcagtgcccccaaggtggcgccactgccccctcaccttccagctcctctccaccaagcccctcagcagcttctgcatctcagggggccaacagcgggtactgcggtgtcggtacccaaggaccagggcccacgtcacccagatgtcagcaatacatcgtctgggtagtggcagagtttgcctatttcacttatttatcttttttgcttttatacacaagcctcttttcaaaaaggacctgaggcagcttacaacaaaagatataaacagtgacttcataaaattgaaatagaaaaatcaaaaactaaagaaaataaaatgtgaatatgctaatcttaagggacaaggatgttactctgcatgttctggcaatgaagcaaaaaaaaaaaaaaaaggaaaattatcggtggttttatcagtacagaaataccacttctcaggggaacaaaatttctgttggcataaaatatgaaagaaagtcttcactgggagctttataggagtactggacgatagaaaaggaaaaaaagcagtcatagatttcatgtggctgtttcttatactgacctcagtcaaaattaaaagcagaaccttatcaatcccagccctatagaggcggttctgcaaggaaataaacaaatgctgtccaaatatagacttctcatggtaaaacatgatctaaggagagaatttagaggttttagactggcatctgcttctaaattctgtttttatttatgagtgtttctcccctttggggacattgtctttgtaaaaccaaacttagaacacccccacacaacaaattgtgctggatttaataacctctacttgctttatcataagtctgtgtggttcaatgtagtgttttattatactggcatatataatttctacttacattgtttcttgttagaggtaatgcatgaatttatccctctcgaggagagaacatgaattaaaaaaaatagtgcctgtaatataatgtgatgattatgatatcacaagcaataaatttttttttacaaaacttgaa

SEQ ID NO: 128733 - DNA, 2232 bp, Homo sapiens
  Payload ID: 5188
  Gene Symbol: DTNA
  Gene Name: dystrobrevin, alpha
  Uniprot ID: Q9Y4J8
  ENST ID: ENST00000399113
  CDS Start-End: 1-2232
atgattgaagatagtgggaaaagaggaaataccatggcagaaagaagacagctgtttgcagagatgagggctcaagatctggatcgcatccgactctccacctacagaacagcatgcaagcttaggtttgttcagaagaaatgcaatttgcacctggtggacatatggaatgtcatagaagcattgcgggaaaatgctctgaacaacctggacccaaacactgaactcaacgtgtcccgcttagaggctgtgctctccactattttttaccagctcaacaaacggatgccaaccactcaccaaatccatgtggagcagtccatcagcctcctccttaacttcctgcttgcagcgtttgatccggaaggccatggtaaaatttcagtatttgctgtcaaaatggctttagccacattgtgtggagggaagatcatggacaaattaagatatattttctcaatgatttctgactccagtggggtgatggtttatggacgatatgaccaattccttcgggaagttctcaaactacccacggcagtttttgaaggtccttcatttggttacacagaacagtcagccagatcctgtttctcccaacagaaaaaagtcacgttaaatggtttcttggacacgcttatgtcagatcctcccccgcagtgtctggtctggttgcctcttctgcatcgactagcaaatgtggaaaatgtcttccatccggttgagtgttcctactgccacagtgagagtatgatgggatttcgctaccgatgccaacagtgtcacaattaccagctctgtcaggactgcttctggaggggacatgccggtggttctcatagcaaccagcaccaaatgaaagagtacacgtcatggaaatcacctgctaagaagctgactaatgcattaagcaagtccctgagctgtgcttccagccgtgaacctttgcaccccatgttcccagatcagcctgagaagccactcaacttggctcacatcgttgatacttggcctcccagacctgtaaccagcatgaacgacaccctgttctcccactctgttccctcctcaggaagtccttttattaccaggagctctcctcccaaggacagtgaagtagagcagaacaaactgctggctagggctgctccagcttttctgaagggcaaagggatacagtacagcctgaatgtggcagacaggctagctgatgaacatgttctcatcgggttgtatgtcaacatgctccggaacaacccctcatgcatgcttgagagttcaaaccggcttgatgaagaacacaggctaattgccaggtatgcggcaaggctggcagcagagtcctcttcgtctcagccacctcagcagagaagtgctcctgacatctctttcaccatcgatgcgaataagcagcaaaggcagctgattgctgagctagaaaacaagaacagagaaatcttacaggagatccagagacttcggctagagcatgaacaagcttctcagcccacgccagagaaggcacagcaaaaccccaccctgctggcagaactccggctcctcagacagcgcaaagatgagctggaacagagaatgtctgctctccaggagagccggagagagctaatggtccagttggagggtctcatgaagctactaaagactcagggggcaggctctccccgctcctcccccagccacaccatcagcaggccaattcccatgcccatccggtcagcgtcagcctgctccaccccgacgcacacgccgcaggactccctcacaggagtagggggagatgtacaagaggcatttgcacaaagttcaagaagaaacttaaggaatgacttgctagtggctgcagattccatcactaacactatgtcctctcttgtgaaagagctgaattctgaggttgggagtgaaacagagagtaatgtggattctgaatttgcacggactcagtttgaggatcttgttccctcaccaacctctgaaaaggcttttctagcgcaaatccatgcccgaaaacctgggtacattcacagtggagctaccacaagtaccatgcgtggcgacatggttacggaggatgcagatccctatgtgcagcctgaagatgaaaactatgaaaatgactctgtccggcagctggagaatgagctccagatggaggaatacctgaaacagaagctgcaagatgaagcttatcaggtcagcttgcaaggttga

SEQ ID NO: 128734 - DNA, 6490 bp, Homo sapiens
  Payload ID: 5188
  Gene Symbol: DTNA
  Gene Name: dystrobrevin, alpha
  Uniprot ID: Q9Y4J8
  ENST ID: ENST00000399121
  CDS Start-End: 308-2380
agaggctggatttcatactcatagctctccctagaatttcagagagttctgttatgatctctgttgtaattaccaatttggttcaagtttgttctttaaatgaatatgcttagaattcacatatgttctggatgtactggaattaaaaggatttaagagatcatggtgtgcatgttctaggataaataggatttaccaatccttggatgaagtgcttgggaagtctttaagtgccataatcaactgccatttcaaagaatatagatggttttgaaaagttcatgctgtcccttcattgaattttagaatgattgaagatagtgggaaaagaggaaataccatggcagaaagaagacagctgtttgcagagatgagggctcaagatctggatcgcatccgactctccacctacagaacagcatgcaagcttaggtttgttcagaagaaatgcaatttgcacctggtggacatatggaatgtcatagaagcattgcgggaaaatgctctgaacaacctggacccaaacactgaactcaacgtgtcccgcttagaggctgtgctctccactattttttaccagctcaacaaacggatgccaaccactcaccaaatccatgtggagcagtccatcagcctcctccttaacttcctgcttgcagcgtttgatccggaaggccatggtaaaatttcagtatttgctgtcaaaatggctttagccacattgtgtggagggaagatcatggacaaattaagatatattttctcaatgatttctgactccagtggggtgatggtttatggacgatatgaccaattccttcgggaagttctcaaactacccacggcagtttttgaaggtccttcatttggttacacagaacagtcagccagatcctgtttctcccaacagaaaaaagtcacgttaaatggtttcttggacacgcttatgtcagatcctcccccgcagtgtctggtctggttgcctcttctgcatcgactagcaaatgtggaaaatgtcttccatccggttgagtgttcctactgccacagtgagagtatgatgggatttcgctaccgatgccaacagtgtcacaattaccagctctgtcaggactgcttctggaggggacatgccggtggttctcatagcaaccagcaccaaatgaaagagtacacgtcatggaaatcacctgctaagaagctgactaatgcattaagcaagtccctgagctgtgcttccagccgtgaacctttgcaccccatgttcccagatcagcctgagaagccactcaacttggctcacatcgtgcctcccagacctgtaaccagcatgaacgacaccctgttctcccactctgttccctcctcaggaagtccttttattaccaggagcatgcttgagagttcaaaccggcttgatgaagaacacaggctaattgccaggtatgcggcaaggctggcagcagagtcctcttcgtctcagccacctcagcagagaagtgctcctgacatctctttcaccatcgatgcgaataagcagcaaaggcagctgattgctgagctagaaaacaagaacagagaaatcttacaggagatccagagacttcggctagagcatgaacaagcttctcagcccacgccagagaaggcacagcaaaaccccaccctgctggcagaactccggctcctcagacagcgcaaagatgagctggaacagagaatgtctgctctccaggagagccggagagagctaatggtccagttggagggtctcatgaagctactaaaggaagaagaactgaagcagggaactcagggggcaggctctccccgctcctcccccagccacaccatcagcaggccaattcccatgcccatccggtcagcgtcagcctgctccaccccgacgcacacgccgcaggactccctcacaggagtagggggagatgtacaagaggcatttgcacaaagttcaagaagaaacttaaggaatgacttgctagtggctgcagattccatcactaacactatgtcctctcttgtgaaagagctgaattctgaggttgggagtgaaacagagagtaatgtggattctgaatttgcacggactcagtttgaggatcttgttccctcaccaacctctgaaaaggcttttctagcgcaaatccatgcccgaaaacctgggtacattcacagtggagctaccacaagtaccatgcgtggcgacatggttacggaggatgcagatccctatgtgcagcctgaagatgaaaactatgaaaatgactctgtccggcagctggagaatgagctccagatggaggaatacctgaaacagaagctgcaagatgaagcttatcaggtcagcttgcaaggttgaatgcaatatccttttatcacactcctctcaagcaagctatagtcagacagatgatgaaagtaacatgaaaactggtgatgatggagagccctgtggccacacagaggaggaagacagcagcctggcagcagcctcaccgaagagaggaaccaccacacccagcagctcctgacagacccccacccctaaagatgtgtcctgatgactatagtgcagctaactttttgttctcagatttgtagtgcataggtgtgtgtttcaagaaggaaaaaaaaagacttctgttcaaagttaacttatcagctacatcctctgtaacgtggttcatccctggttaaaaagcaaacaaacacaggctgaaaacccatgctgctgttatacacaatggcagtattaacaagcattttaaacctttgcacatgatattgaacctgttcagtttacaatgacaatattaatactgtttatagctagaagtttgatttctgaattctttgagattttagcaaaacagtttattatacactgtacatttttttcacagcaattggaaaaaaacaaccacttgcaatcattcaataaccctgaagaatttggttcctgagtgtacaaactcagagcccggaagccaagaagggtccttggcctgcacggtctgtagttgactccaagtctctgtgagcagtgacttgaaccaaacacaccaggaataatccattctttggggcctctttccaactcgaggttgttttctttcaagatactctaatcagccatagaatttagtgtaaatatttttttttccaaatagatatcatattcaaaaaaggcagcattcaaattatatagaatctagtttttaaaatcagcacagatcttcttaaaaactgtgaactatgttttgaaatactcgttactaaagctgtttataaaccacaggtgccataagatccccaaacggactaaagttatctctgctcttccatggtcttgttcctctcgttttggctttaggaagcatgtctttaacagcaccgctcgttcacaagttcccccatcaagttgtttggaggccttcagctttaaatgtacaggcttaaagtgcgcttgcaaacgtttgctctcctttttttctgaatgttgattgccttagctggccacctggtgttctgcatgtagccttctgtggtcatgtgaaaggagacaggctcttctaagttgagttgggatttttgcactcagtgaaaagctgaagtgcaaaagagctatcaaagacaagaggataaaagactgggatagtcttttccaaggaccctctttagagggccctaaagacctcctttgggaattctggggaaaaagaaaaagtaatcttctacttgcttcaagatttgatttttttaaaaaagcctgcgacctattcaatacattatgcttaaattagcagtttctctggaattcctgtctctcctttaaaagaaaggagagaacattttagaacaatagttctcaaagtgtgttccccggacaagcagcatctgcaacacttaggaaggtcttcgaaatactaatttgtaagccccacctcaggcctactgaatcagaagctctgggggttgggtccagaagtctgttttagtcaaccctctaggtgattctgatgctcgctaaaggttgagaactactgctttagaatgaagtcgtataataaagtctctgaaaaggccttattcagaataagcaagaaaggttctgtgattcacttttgcttctggggctggcaaaaaccttctctgaacccacacaccaagttcgtagttggtaggtgcccagccaagtcctgacatcttcatgccccctctgcagagggcggctgtacgatgttcacatgtctgcgtttggtcagacatcatctccttggctgccctttgaaaccaaatcacttgccttggggataaagtgctcaattggcattagtgagaagcccatcctatcccttgacatacttaatcatatatctctccagagaactcacctgacaaatgtctctgagcacaggctgacaccaaagtggcacaactgcacagttctcagatttctttgcacagattgatttttattgcgggttttgttggggtgtcttaatgttcatctcttttccactgcccatcctctgtgaacccatacctctctagatggagcaggtggccactggtgcctcatactcagtattgaaaaccactacatcccagctacctataatgctgtcagctcaaaatcatagccaggtagttcttgaactcagaacttaaatcctgcacgtggcactccaccactgactggaccgagctggcatatgttgtttctttgtgtttctacatcaaaatgttcgtctaagatttgaactgttctgctgataaccttccccgttgtcatagctatttcattgccaaccaactccatcacatggttgttgatatcgtcatataaagccattgcaaggactctggaaactgccgccaatgaccaatttctgactaaccagccaccttttctctctcttagctccacgtcagcactgagaccagactcgagcacccctgtcctgtaagcgagacaaaatggcgtgtgttattttggggttttgtgttttttggtgggtttctttccttggctctccagatttacttttggggcctgttctaagtgcaaacccagcaagtttcacttgtcctgtccattagatacaactacatcttgcgggggttgtttctttcttgttccacaatgaattgcacatccatctccatcagagctgatagcctgttaataagcactggtctaacacagccaaccctcctccacagcgccatattaatggaggaggggaggaaggtgaaatctactgcatgggattcaggaaacagttgtggttggtcaggacggaagttggggtaagtttggttggtcagagggagttgtgctggagattgtgaaaaatgggttcttgaatgatctactataaggcagggaaggttcatttgtaagtagtaatgtgaactgaattgcattaagagtgtgtggcctttgttgtgatatactatgtattttcttatatgcatgagccaaactgttgcatcataatttagcactgatgtctgcttttattttgatcatctttgtccacccttattagttcttggctgttaaccgtagatagatcttgtaaatccagcaacctttggttgctgcattccccttggttcgattccacgcaaggagccacaagtgagaactccactgtccttagaagaaagggcatttttacttttgaaccaaaaagagaaaaaaaaatcagaagtgttgcatcttgaggcgaattaactgtaagacatttttaattatgactactgcaatttgacaccatttgaaataatcaattcagagacactaaagatttcacaatattcattggtattgtaaaaaaaaaatactattgtatggatttttgtattgctgttaagtattgttttgtgtgtgtgtgtgtgtgtgtgtgttggaacctcctggggacatgttatattttgaagtgattaaactatttaattgtgtgtctatattttggagtggaataatttcttcattaaaaaatgtttttaaaaacactatatcttgggtggtttattcctttgtttcagtgaatctttcctaaagcaacgtggagtcagtctgttgaaagaaggaaggcaggtacttgcagtttaaagcaggacccattgatggaatattgagccaccgaggcaaaatagctcaccttctcttgccttgggggatgcatggtttttaccattctactgttttattagcatctgtgagcatctaatagaaatactattctgctatttatggaaatccttattataattgatatggaagtgagtttgaaattctaacagctaacatatttcatgtttgtatcacacactgttcttaacactttatgtgacttcactcaattctttgaatcctctgcatctagccatgtattctgcaaatattaagtgctcaatggtttttttgttgaattactgaataaatgaattagtggtg

SEQ ID NO: 128735 - DNA, 6343 bp, Homo sapiens
  Payload ID: 5188
  Gene Symbol: DTNA
  Gene Name: dystrobrevin, alpha
  Uniprot ID: Q9Y4J8
  ENST ID: ENST00000444659
  CDS Start-End: 2-2233
aatgattgaagatagtgggaaaagaggaaataccatggcagaaagaagacagctgtttgcagagatgagggctcaagatctggatcgcatccgactctccacctacagaacagcatgcaagcttaggtttgttcagaagaaatgcaatttgcacctggtggacatatggaatgtcatagaagcattgcgggaaaatgctctgaacaacctggacccaaacactgaactcaacgtgtcccgcttagaggctgtgctctccactattttttaccagctcaacaaacggatgccaaccactcaccaaatccatgtggagcagtccatcagcctcctccttaacttcctgcttgcagcgtttgatccggaaggccatggtaaaatttcagtatttgctgtcaaaatggctttagccacattgtgtggagggaagatcatggacaaattaagatatattttctcaatgatttctgactccagtggggtgatggtttatggacgatatgaccaattccttcgggaagttctcaaactacccacggcagtttttgaaggtccttcatttggttacacagaacagtcagccagatcctgtttctcccaacagaaaaaagtcacgttaaatggtttcttggacacgcttatgtcagatcctcccccgcagtgtctggtctggttgcctcttctgcatcgactagcaaatgtggaaaatgtcttccatccggttgagtgttcctactgccacagtgagagtatgatgggatttcgctaccgatgccaacagtgtcacaattaccagctctgtcaggactgcttctggaggggacatgccggtggttctcatagcaaccagcaccaaatgaaagagtacacgtcatggaaatcacctgctaagaagctgactaatgcattaagcaagtccctgagctgtgcttccagccgtgaacctttgcaccccatgttcccagatcagcctgagaagccactcaacttggctcacatcgttgatacttggcctcccagacctgtaaccagcatgaacgacaccctgttctcccactctgttccctcctcaggaagtccttttattaccaggagctctcctcccaaggacagtgaagtagagcagaacaaactgctggctagggctgctccagcttttctgaagggcaaagggatacagtacagcctgaatgtggcagacaggctagctgatgaacatgttctcatcgggttgtatgtcaacatgctccggaacaacccctcatgcatgcttgagagttcaaaccggcttgatgaagaacacaggctaattgccaggtatgcggcaaggctggcagcagagtcctcttcgtctcagccacctcagcagagaagtgctcctgacatctctttcaccatcgatgcgaataagcagcaaaggcagctgattgctgagctagaaaacaagaacagagaaatcttacaggagatccagagacttcggctagagcatgaacaagcttctcagcccacgccagagaaggcacagcaaaaccccaccctgctggcagaactccggctcctcagacagcgcaaagatgagctggaacagagaatgtctgctctccaggagagccggagagagctaatggtccagttggagggtctcatgaagctactaaagactcagggggcaggctctccccgctcctcccccagccacaccatcagcaggccaattcccatgcccatccggtcagcgtcagcctgctccaccccgacgcacacgccgcaggactccctcacaggagtagggggagatgtacaagaggcatttgcacaaagttcaagaagaaacttaaggaatgacttgctagtggctgcagattccatcactaacactatgtcctctcttgtgaaagagctgaattctgaggttgggagtgaaacagagagtaatgtggattctgaatttgcacggactcagtttgaggatcttgttccctcaccaacctctgaaaaggcttttctagcgcaaatccatgcccgaaaacctgggtacattcacagtggagctaccacaagtaccatgcgtggcgacatggttacggaggatgcagatccctatgtgcagcctgaagatgaaaactatgaaaatgactctgtccggcagctggagaatgagctccagatggaggaatacctgaaacagaagctgcaagatgaagcttatcaggtcagcttgcaaggttgaatgcaatatccttttatcacactcctctcaagcaagctatagtcagacagatgatgaaagtaacatgaaaactggtgatgatggagagccctgtggccacacagaggaggaagacagcagcctggcagcagcctcaccgaagagaggaaccaccacacccagcagctcctgacagacccccacccctaaagatgtgtcctgatgactatagtgcagctaactttttgttctcagatttgtagtgcataggtgtgtgtttcaagaaggaaaaaaaaagacttctgttcaaagttaacttatcagctacatcctctgtaacgtggttcatccctggttaaaaagcaaacaaacacaggctgaaaacccatgctgctgttatacacaatggcagtattaacaagcattttaaacctttgcacatgatattgaacctgttcagtttacaatgacaatattaatactgtttatagctagaagtttgatttctgaattctttgagattttagcaaaacagtttattatacactgtacatttttttcacagcaattggaaaaaaacaaccacttgcaatcattcaataaccctgaagaatttggttcctgagtgtacaaactcagagcccggaagccaagaagggtccttggcctgcacggtctgtagttgactccaagtctctgtgagcagtgacttgaaccaaacacaccaggaataatccattctttggggcctctttccaactcgaggttgttttctttcaagatactctaatcagccatagaatttagtgtaaatatttttttttccaaatagatatcatattcaaaaaaggcagcattcaaattatatagaatctagtttttaaaatcagcacagatcttcttaaaaactgtgaactatgttttgaaatactcgttactaaagctgtttataaaccacaggtgccataagatccccaaacggactaaagttatctctgctcttccatggtcttgttcctctcgttttggctttaggaagcatgtctttaacagcaccgctcgttcacaagttcccccatcaagttgtttggaggccttcagctttaaatgtacaggcttaaagtgcgcttgcaaacgtttgctctcctttttttctgaatgttgattgccttagctggccacctggtgttctgcatgtagccttctgtggtcatgtgaaaggagacaggctcttctaagttgagttgggatttttgcactcagtgaaaagctgaagtgcaaaagagctatcaaagacaagaggataaaagactgggatagtcttttccaaggaccctctttagagggccctaaagacctcctttgggaattctggggaaaaagaaaaagtaatcttctacttgcttcaagatttgatttttttaaaaaagcctgcgacctattcaatacattatgcttaaattagcagtttctctggaattcctgtctctcctttaaaagaaaggagagaacattttagaacaatagttctcaaagtgtgttccccggacaagcagcatctgcaacacttaggaaggtcttcgaaatactaatttgtaagccccacctcaggcctactgaatcagaagctctgggggttgggtccagaagtctgttttagtcaaccctctaggtgattctgatgctcgctaaaggttgagaactactgctttagaatgaagtcgtataataaagtctctgaaaaggccttattcagaataagcaagaaaggttctgtgattcacttttgcttctggggctggcaaaaaccttctctgaacccacacaccaagttcgtagttggtaggtgcccagccaagtcctgacatcttcatgccccctctgcagagggcggctgtacgatgttcacatgtctgcgtttggtcagacatcatctccttggctgccctttgaaaccaaatcacttgccttggggataaagtgctcaattggcattagtgagaagcccatcctatcccttgacatacttaatcatatatctctccagagaactcacctgacaaatgtctctgagcacaggctgacaccaaagtggcacaactgcacagttctcagatttctttgcacagattgatttttattgcgggttttgttggggtgtcttaatgttcatctcttttccactgcccatcctctgtgaacccatacctctctagatggagcaggtggccactggtgcctcatactcagtattgaaaaccactacatcccagctacctataatgctgtcagctcaaaatcatagccaggtagttcttgaactcagaacttaaatcctgcacgtggcactccaccactgactggaccgagctggcatatgttgtttctttgtgtttctacatcaaaatgttcgtctaagatttgaactgttctgctgataaccttccccgttgtcatagctatttcattgccaaccaactccatcacatggttgttgatatcgtcatataaagccattgcaaggactctggaaactgccgccaatgaccaatttctgactaaccagccaccttttctctctcttagctccacgtcagcactgagaccagactcgagcacccctgtcctgtaagcgagacaaaatggcgtgtgttattttggggttttgtgttttttggtgggtttctttccttggctctccagatttacttttggggcctgttctaagtgcaaacccagcaagtttcacttgtcctgtccattagatacaactacatcttgcgggggttgtttctttcttgttccacaatgaattgcacatccatctccatcagagctgatagcctgttaataagcactggtctaacacagccaaccctcctccacagcgccatattaatggaggaggggaggaaggtgaaatctactgcatgggattcaggaaacagttgtggttggtcaggacggaagttggggtaagtttggttggtcagagggagttgtgctggagattgtgaaaaatgggttcttgaatgatctactataaggcagggaaggttcatttgtaagtagtaatgtgaactgaattgcattaagagtgtgtggcctttgttgtgatatactatgtattttcttatatgcatgagccaaactgttgcatcataatttagcactgatgtctgcttttattttgatcatctttgtccacccttattagttcttggctgttaaccgtagatagatcttgtaaatccagcaacctttggttgctgcattccccttggttcgattccacgcaaggagccacaagtgagaactccactgtccttagaagaaagggcatttttacttttgaaccaaaaagagaaaaaaaaatcagaagtgttgcatcttgaggcgaattaactgtaagacatttttaattatgactactgcaatttgacaccatttgaaataatcaattcagagacactaaagatttcacaatattcattggtattgtaaaaaaaaaatactattgtatggatttttgtattgctgttaagtattgttttgtgtgtgtgtgtgtgtgtgtgtgttggaacctcctggggacatgttatattttgaagtgattaaactatttaattgtgtgtctatattttggagtggaataatttcttcattaaaaaatgtttttaaaaacactatatcttgggtggtttattcctttgtttcagtgaatctttcctaaagcaacgtggagtcagtctgttgaaagaaggaaggcaggtacttgcagtttaaagcaggacccattgatggaatattgagccaccgaggcaaaatagctcaccttctcttgccttgggggatgcatggtttttaccattctactgttttattagcatctgtgagcatctaatagaaatactattctgctatttatggaaatccttattataattgatatggaagtgagtttgaaattctaacagctaacatatttcatgtttgtatcacacactgttcttaacactttatgtgacttcactcaattctttgaatcctctgcatctagccatgtattctgcaaatattaagtgctcaatggtttttttgttgaattactgaataaatgaattagtggtg

SEQ ID NO: 128736 - DNA, 1680 bp, Homo sapiens
  Payload ID: 5188
  Gene Symbol: DTNA
  Gene Name: dystrobrevin, alpha
  Uniprot ID: Q9Y4J8
  ENST ID: ENST00000554864
  CDS Start-End: 308-1423
agaggctggatttcatactcatagctctccctagaatttcagagagttctgttatgatctctgttgtaattaccaatttggttcaagtttgttctttaaatgaatatgcttagaattcacatatgttctggatgtactggaattaaaaggatttaagagatcatggtgtgcatgttctaggataaataggatttaccaatccttggatgaagtgcttgggaagtctttaagtgccataatcaactgccatttcaaagaatatagatggttttgaaaagttcatgctgtcccttcattgaattttagaatgattgaagatagtgggaaaagaggaaataccatggcagaaagaagacagctgtttgcagagatgagggctcaagatctggatcgcatccgactctccacctacagaacagcatgcaagcttaggtttgttcagaagaaatgcaatttgcacctggtggacatatggaatgtcatagaagcattgcgggaaaatgctctgaacaacctggacccaaacactgaactcaacgtgtcccgcttagaggctgtgctctccactattttttaccagctcaacaaacggatgccaaccactcaccaaatccatgtggagcagtccatcagcctcctccttaacttcctgcttgcagcgtttgatccggaaggccatggtaaaatttcagtatttgctgtcaaaatggctttagccacattgtgtggagggaagatcatggacaaattaagatatattttctcaatgatttctgactccagtggggtgatggtttatggacgatatgaccaattccttcgggaagttctcaaactacccacggcagtttttgaaggtccttcatttggttacacagaacagtcagccagatcctgtttctcccaacagaaaaaagtcacgttaaatggtttcttggacacgcttatgtcagatcctcccccgcagtgtctggtctggttgcctcttctgcatcgactagcaaatgtggaaaatgtcttccatccggttgagtgttcctactgccacagtgagagtatgatgggatttcgctaccgatgccaacagtgtcacaattaccagctctgtcaggactgcttctggaggggacatgccggtggttctcatagcaaccagcaccaaatgaaagagtacacgtcatggaaatcacctgctaagaagctgactaatgcattaagcaagtccctgagctgtgcttccagccgtgaacctttgcaccccatgttcccagatcagcctgagaagccactcaacttggctcacatcgtgcctcccagacctgtaaccagcatgaacgacaccctgttctcccactctgttccctcctcaggaagtccttttattaccaggagctcggacggtgcttttggtggatgcgtctagatggataacatgacttcttctaccctaaaatattcctataatactttgagctgttctggttcctccagggtgcatggtacccattaacccaaaatatgattatttcccttttttcccattttcagtcattttggaatgttctctgtgaaccacagttgtgttgtttaaagctcacatttctttctgtcaccacagagattggcctacggtttctgttttgagggtgctgttcaataaagctgtgtacactaaatgtc

SEQ ID NO: 128737 - DNA, 1626 bp, Homo sapiens
  Payload ID: 5188
  Gene Symbol: DTNA
  Gene Name: dystrobrevin, alpha
  Uniprot ID: Q9Y4J8
  ENST ID: ENST00000556414
  CDS Start-End: 335-1522
gaatatcaaggatggtggcagaattaaagggcaaacttaccttccatcccaggtctagtattcagtcccccttcctcccactctccaccctactgcgtgctcttacttattctgttggaacccagtgtagcttcctgagatttaaaatataggaagactcaaaactatgttacttcttggaatatagataattcagtactgatttaaataacaactgaatagcaaggaccttctggaacataatcttacattcacaaaatcacctgctaagaagctgactaatgcattaagcaagtccctgagctgtgcttccagccgtgaacctttgcaccccatgttcccagatcagcctgagaagccactcaacttggctcacatcgtgcctcccagacctgtaaccagcatgaacgacaccctgttctcccactctgttccctcctcaggaagtccttttattaccaggaggttacctgagggaataagtgcatccagccctgtggctgaagagcattccctcataaagctgtacgtaaatcagcttgatcacggtgcacgcatgcttgagagttcaaaccggcttgatgaagaacacaggctaattgccaggtatgcggcaaggctggcagcagagtcctcttcgtctcagccacctcagcagagaagtgctcctgacatctctttcaccatcgatgcgaataagcagcaaaggcagctgattgctgagctagaaaacaagaacagagaaatcttacaggagatccagagacttcggctagagcatgaacaagcttctcagcccacgccagagaaggcacagcaaaaccccaccctgctggcagaactccggctcctcagacagcgcaaagatgagctggaacagagaatgtctgctctccaggagagccggagagagctaatggtccagttggagggtctcatgaagctactaaagactcagggggcaggctctccccgctcctcccccagccacaccatcagcaggccaattcccatgcccatccggtcagcgtcagcctgctccaccccgacgcacacgccgcaggactccctcacaggagtagggggagatgtacaagaggcatttgcacaaagttcaagaagaaacttaaggaatgacttgctagtggctgcagattccatcactaacactatgtcctctcttgtgaaagagctgaattctgaggttgggagtgaaacagagagtaatgtggattctgaatttgcacggactcagtttgaggatcttgttccctcaccaacctctgaaaaggcttttctagcgcaaatccatgcccgaaaacctgggtacattcacagtggagctaccacaagtaccatgcgtggcgacatggttacggaggatgcagatccctatgtgcagcctgaagatgaaaactatgaaaatgactctgtccggcagctggagaatgagctccagatggaggaatacctgaaacagaagctgcaagatgaagcttatcaggtcagcttgcaaggttgaatgcaatatccttttatcacactcctctcaagcaagctatagtcagacagatgatgaaagtaacatgaaaactggtgatgatggagagccctgtggccacacag

SEQ ID NO: 128738 - DNA, 576 bp, Homo sapiens
  Payload ID: 5188
  Gene Symbol: DTNA
  Gene Name: dystrobrevin, alpha
  ENST ID: ENST00000588684
  CDS Start-End: 521-576
agaggctggatttcatactcatagctctccctagaatttcagagagttctgttatgatctctgttgtaattaccaatttggttcaagtttgttctttaaatgaatatgcttagaattcacatatgttctggatgtactggaattaaaaggatttaagagatcatggtgtgcatgttctaggataaataggatttaccaatccttggatgaagtgcttgggaagtctttaagtgccataatcaactgccatttcaaagaatatagatggttttgaaaagttcatgctgtcccttcattgaattttagaggtcatctcaactgctcatctgtccattttaatgtactgtggttggactctgaaggacatgatgttccttctaccaacaattttcatctattcaaccaatgtcaatgttgaacctgcaatgcctaatttagaatcctttcagacaatgcgcaaatgccatcatgaacagaatttctaaaactccttcatcatcctaaagctgggagacacagaatgattgaagatagtgggaaaagaggaaataccatggcagaaagaagacagctgtt

SEQ ID NO: 128739 - DNA, 604 bp, Homo sapiens
  Payload ID: 5188
  Gene Symbol: DTNA
  Gene Name: dystrobrevin, alpha
  ENST ID: ENST00000590412
  CDS Start-End: 246-604
gcgccgcagccaggactgcggcgcggcgcctccccgggcggcgggcggcgcctcaggcccgcggggcggcggtagcggctgctgcaggatgtccggcccgggggcgcggggccgcgcagataaataggatttaccaatccttggatgaagtgcttgggaagtctttaagtgccataatcaactgccatttcaaagaatatagatggttttgaaaagttcatgctgtcccttcattgaattttagaatgattgaagatagtgggaaaagaggaaataccatggcagaaagaagacagctgtttgcagagatgagggctcaagatctggatcgcatccgactctccacctacagaacagcatgcaagcttaggtttgttcagaagaaatgcaatttgcacctggtggacatatggaatgtcatagaagcattgcgggaaaatgctctgaacaacctggacccaaacactgaactcaacgtgtcccgcttagaggctgtgctctccactattttttaccagctcaacaaacggatgccaaccactcaccaaatccatgtggagcagtccatcagcctcctccttaacttcctgcttgcagcgtttga

SEQ ID NO: 128740 - DNA, 534 bp, Homo sapiens
  Payload ID: 5188
  Gene Symbol: DTNA
  Gene Name: dystrobrevin, alpha
  ENST ID: ENST00000591816
  CDS Start-End: 434-534
attttcaagttaaagatagacacagtacacaccaggatctagaggctggatttcatactcatagctctccctagaatttcagagagttctgttatgatctctgttgtaattaccaatttggttcaagtttgttctttaaatgaatatgcttagaattcacatatgttctggatgtactggaattaaaaggatttaagagatcatggtgtgcatgttctaggataaataggatttaccaatccttggatgaagtgcttgggaagtctttaagtgccataatcaactgccatttcaaagaatatagatggttttgaaaagttcatgctgtcccttcattgaattttaggtaatttcctgaatttgattacgatggagagaagcagctaaaagtctacactgaatgattgaagatagtgggaaaagaggaaataccatggcagaaagaagacagctgtttgcagagatgagggctcaagatctggatcgcatccgactctccacctacagaacagcatgcaagcttaggtttgttca

SEQ ID NO: 128741 - DNA, 587 bp, Homo sapiens
  Payload ID: 5188
  Gene Symbol: DTNA
  Gene Name: dystrobrevin, alpha
  ENST ID: ENST00000588125
  CDS Start-End: 458-587
agacacagtacacaccaggatctagaggctggatttcatactcatagctctccctagaatttcagagagttctgttatgatctctgttgtaattaccaatttggttcaagtttgttctttaaatgaatatgcttagaattcacatatgttctggatgtactggaattaaaaggatttaagagatcatggtgtgcatgttctagggacaacggttctcaaaatgaagacactttcatgagattcttgaggttaaaactattttaataacaactctatcatattatttgcctttttcactatgggacagtcacacagatgtgcaaaagtaatgataaataggatttaccaatccttggatgaagtgcttgggaagtctttaagtgccataatcaactgccatttcaaagaatatagatggttttgaaaagttcatgctgtcccttcattgaattttagaatgattgaagatagtgggaaaagaggaaataccatggcagaaagaagacagctgtttgcagagatgagggctcaagatctggatcgcatccgactctccacctacagaacagcatgcaagcttaggtttg

SEQ ID NO: 128742 - DNA, 1787 bp, Homo sapiens
  Payload ID: 5188
  Gene Symbol: DTNA
  Gene Name: dystrobrevin, alpha
  Uniprot ID: Q9Y4J8
  ENST ID: ENST00000591182
  CDS Start-End: 336-1511
ggaatatcaaggatggtggcagaattaaagggcaaacttaccttccatcccaggtctagtattcagtcccccttcctcccactctccaccctactgcgtgctcttacttattctgttggaacccagtgtagcttcctgagatttaaaatataggaagactcaaaactatgttacttcttggaatatagataattcagtactgatttaaataacaactgaatagcaaggaccttctggaacataatcttacattcacaaaatcacctgctaagaagctgactaatgcattaagcaagtccctgagctgtgcttccagccgtgaacctttgcaccccatgttcccagatcagcctgagaagccactcaacttggctcacatcgtgcctcccagacctgtaaccagcatgaacgacaccctgttctcccactctgttccctcctcaggaagtccttttattaccaggagctctcctcccaaggacagtgaagtagagcagaacaaactgctggctagggctgctccagcttttctgaagggcaaaggcatgcttgagagttcaaaccggcttgatgaagaacacaggctaattgccaggtatgcggcaaggctggcagcagagtcctcttcgtctcagccacctcagcagagaagtgctcctgacatctctttcaccatcgatgcgaataagcagcaaaggcagctgattgctgagctagaaaacaagaacagagaaatcttacaggagatccagagacttcggctagagcatgaacaagcttctcagcccacgccagagaaggcacagcaaaaccccaccctgctggcagaactccggctcctcagacagcgcaaagatgagctggaacagagaatgtctgctctccaggagagccggagagagctaatggtccagttggagggtctcatgaagctactaaagactcagggggcaggctctccccgctcctcccccagccacaccatcagcaggccaattcccatgcccatccggtcagcgtcagcctgctccaccccgacgcacacgccgcaggactccctcacaggagtagggggagatgtacaagaggcatttgcacaaagttcaagaagaaacttaaggaatgacttgctagtggctgcagattccatcactaacactatgtcctctcttgtgaaagagctgaattctgaggttgggagtgaaacagagagtaatgtggattctgaatttgcacggactcagtttgaggatcttgttccctcaccaacctctgaaaaggcttttctagcgcaaatccatgcccgaaaacctgggtacattcacagtggagctaccacaagtaccatgcgtggcgacatggttacggaggatgcagatccctatgtgcagcctgaagatgaaaactatgaaaatgactctgtccggcagctggagaatgagctccagatggaggaatacctgaaacagaagctgcaagatgaagcttatcaggtcagcttgcaaggttgaatgcaatatccttttatcacactcctctcaagcaagctatagtcagacagatgatgaaagtaacatgaaaactggtgatgatggagagccctgtggccacacagaggaggaagacagcagcctggcagcagcctcaccgaagagaggaaccaccacacccagcagctcctgacagacccccacccctaaagatgtgtcctgatgactatagtgcagctaactttttgttctcagatttgtagtgcataggtgtgtgtttcaagaaggaaaaaaaaa

SEQ ID NO: 128743 - DNA, 556 bp, Homo sapiens
  Payload ID: 5188
  Gene Symbol: DTNA
  Gene Name: dystrobrevin, alpha
  ENST ID: ENST00000590727
  CDS Start-End: 244-556
ttcatttcatttccccacaggcatgattgaaaagggttgtaagattccaggaatgaactaaatgtttctctgagcccaaatcaactatcatctgaaatcgtggtgcagagaagaaaggtgcaattcctgtaaggctgtatttttccttcttctggttcatacttttgttttcttggtttttcttcacttacttcccccttagtcttccatccggttgagtgttcctactgccacagtgagagtatgatgggatttcgctaccgatgccaacagtgtcacaattaccagctctgtcaggactgcttctggaggggacatgccggtggttctcatagcaaccagcaccaaatgaaagagtacacgtcatggaaatcacctgctaagaagctgactaatgcattaagcaagtccctgagctgtgcttccagccgtgaacctttgcaccccatgttcccagatcagcctgagaagccactcaacttggctcacatcgtgcctcccagacctgtaaccagcatgaacgacaccctgttctcccactctgttccctcctcag

SEQ ID NO: 128744 - DNA, 555 bp, Homo sapiens
  Payload ID: 5188
  Gene Symbol: DTNA
  Gene Name: dystrobrevin, alpha
  ENST ID: ENST00000587723
  CDS Start-End: 228-555
agtgctccctgagctctgccgagagtaatttcctaccagccctgctgggagtttcaccccaagagagcagccttcaacagagctgctgggtgtcatgaagatagagggtgtgggtgtgaatagcctggctctaagagctttgctgcttcccactcctccaaagaattagaacgtgatgcactgcaacgtaaaagtccatttcacagcctcccagacctgtaaccagcatgaacgacaccctgttctcccactctgttccctcctcaggaagtccttttattaccaggagcatgcttgagagttcaaaccggcttgatgaagaacacaggctaattgccaggtatgcggcaaggctggcagcagagtcctcttcgtctcagccacctcagcagagaagtgctcctgacatctctttcaccatcgatgcgaataagcagcaaaggcagctgattgctgagctagaaaacaagaacagagaaatcttacaggagatccagagacttcggctagagcatgaacaagcttctcagcccacgccagagaaggcacagcaaa

SEQ ID NO: 128745 - DNA, 682 bp, Homo sapiens
  Payload ID: 5188
  Gene Symbol: DTNA
  Gene Name: dystrobrevin, alpha
  ENST ID: ENST00000590598
  CDS Start-End: 284-682
cttgcagtttgatctcagactgctgtgctagcaatcagcgagactccgtgggcgtaggaccctccgagccaggtgcgggatataatctcatggtgtgccgtttttaaagctggtccgagaagcgcaatattctggtgggagtgacccgattttccagataaataggatttaccaatccttggatgaagtgcttgggaagtctttaagtgccataatcaactgccatttcaaagaatatagatggttttgaaaagttcatgctgtcccttcattgaattttagaatgattgaagatagtgggaaaagaggaaataccatggcagaaagaagacagctgtttgcagagatgagggctcaagatctggatcgcatccgactctccacctacagaacagcatgcaagcttaggtttgttcagaagaaatgcaatttgcacctggtggacatatggaatgtcatagaagcattgcgggaaaatgctctgaacaacctggacccaaacactgaactcaacgtgtcccgcttagaggctgtgctctccactattttttaccagctcaacaaacggatgccaaccactcaccaaatccatgtggagcagtccatcagcctcctccttaacttcctgcttgcagcgtttgatccggaaggccatggtaaaatttcagtatttgctgtcaaa

SEQ ID NO: 128746 - DNA, 578 bp, Homo sapiens
  Payload ID: 5188
  Gene Symbol: DTNA
  Gene Name: dystrobrevin, alpha
  ENST ID: ENST00000588949
  CDS Start-End: 276-578
gaagaatgaacacagctttttattgaagttaaaggttactttggagtttgtttggaaatgtgtaaggtcaaatactatagttttcagcatatgtagtacttcagaggaagaattaaggggcatgttggtgcatttaactacaaaaccagaatgattgaagatagtgggaaaagaggaaataccatggcagaaagaagacagctgtttgcagagatgaagatgtgcttagagtgtttgggagagtttcagccaggccttccaatttcctagaccccatgtgtggtactgtgtcttcacctggaattgtgacctttgtgcagttacaaatccaacagagcaaggagcctagggctcaagatctggatcgcatccgactctccacctacagaacagcatgcaagcttaggtttgttcagaagaaatgcaatttgcacctggtggacatatggaatgtcatagaagcattgcgggaaaatgctctgaacaacctggacccaaacactgaactcaacgtgtcccgcttagaggctgtgctctccactattttttaccagctcaacaaacggatgccaaccact

SEQ ID NO: 128747 - DNA, 1508 bp, Homo sapiens
  Payload ID: 5188
  Gene Symbol: DTNA
  Gene Name: dystrobrevin, alpha
  Uniprot ID: Q9Y4J8
  ENST ID: ENST00000596745
  CDS Start-End: 338-1300
gtttcaggatcctcaggaaaccctggtactggcagcagccagcctctgctgtgcccacatgacccacaactctggcagcggacccggcacttccaacattattaaataataagaaagcggctcctactccaggctcaaacctccctgcagaccaatggacaccttctaagagtttggcgagtcagtgactgaagcgcccgtccattccaagataaataggatttaccaatccttggatgaagtgcttgggaagtctttaagtgccataatcaactgccatttcaaagaatatagatggttttgaaaagttcatgctgtcccttcattgaattttagaatgattgaagatagtgggaaaagaggaaataccatggcagaaagaagacagctgtttgcagagatgagggctcaagatctggatcgcatccgactctccacctacagaacagcatgcaagcttaggtttgttcagaagaaatgcaatttgcacctggtggacatatggaatgtcatagaagcattgcgggaaaatgctctgaacaacctggacccaaacactgaactcaacgtgtcccgcttagaggctgtgctctccactattttttaccagctcaacaaacggatgccaaccactcaccaaatccatgtggagcagtccatcagcctcctccttaacttcctgcttgcagcgtttgatccggaaggccatggtaaaatttcagtatttgctgtcaaaatggctttagccacattgtgtggagggaagatcatggacaaattaagatatattttctcaatgatttctgactccagtggggtgatggtttatggacgatatgaccaattccttcgggaagttctcaaactacccacggcagtttttgaaggtccttcatttggttacacagaacagtcagccagatcctgtttctcccaacagcagccacctcagcagagaagtgctcctgacatctctttcaccatcgatgcgaataagcagcaaaggcagctgattgctgagctagaaaacaagaacagagaaatcttacaggagatccagagacttcggctagagcatgaacaagcttctcagcccacgccagagaaggcacagcaaaaccccaccctgctggcagaactccggctcctcagacagcgcaaagatgagctggaacagagaatgtctgctctccaggagagccggagagagctaatggtccagttggagggtctcatgaagctactaaaggaagaagaactgaagcagggagtaagttatgtcccctactgcaggtcttaactaacagtggaggggcctgccgacctgcggttttctcattgcttttgctctaatgtatgttcatgcttcagtttggaaagagaaaaaagtcatactaatttgcttctttttcaatgtagtgcttgaattgagatatataaatttagcattttttataactatcactactatccacatcaaaagaagaactatgacatcttttagaaaa

SEQ ID NO: 128748 - DNA, 3201 bp, Homo sapiens
  Payload ID: 5188
  Gene Symbol: DTNA
  Gene Name: dystrobrevin, alpha
  Uniprot ID: Q9Y4J8
  ENST ID: ENST00000598334
  CDS Start-End: 327-2501
acagtacacaccaggatctagaggctggatttcatactcatagctctccctagaatttcagagagttctgttatgatctctgttgtaattaccaatttggttcaagtttgttctttaaatgaatatgcttagaattcacatatgttctggatgtactggaattaaaaggatttaagagatcatggtgtgcatgttctaggataaataggatttaccaatccttggatgaagtgcttgggaagtctttaagtgccataatcaactgccatttcaaagaatatagatggttttgaaaagttcatgctgtcccttcattgaattttagaatgattgaagatagtgggaaaagaggaaataccatggcagaaagaagacagctgtttgcagagatgagggctcaagatctggatcgcatccgactctccacctacagaacagcatgcaagcttaggtttgttcagaagaaatgcaatttgcacctggtggacatatggaatgtcatagaagcattgcgggaaaatgctctgaacaacctggacccaaacactgaactcaacgtgtcccgcttagaggctgtgctctccactattttttaccagctcaacaaacggatgccaaccactcaccaaatccatgtggagcagtccatcagcctcctccttaacttcctgcttgcagcgtttgatccggaaggccatggtaaaatttcagtatttgctgtcaaaatggctttagccacattgtgtggagggaagatcatggacaaattaagatatattttctcaatgatttctgactccagtggggtgatggtttatggacgatatgaccaattccttcgggaagttctcaaactacccacggcagtttttgaaggtccttcatttggttacacagaacagtcagccagatcctgtttctcccaacagaaaaaagtcacgttaaatggtttcttggacacgcttatgtcagatcctcccccgcagtgtctggtctggttgcctcttctgcatcgactagcaaatgtggaaaatgtcttccatccggttgagtgttcctactgccacagtgagagtatgatgggatttcgctaccgatgccaacagtgtcacaattaccagctctgtcaggactgcttctggaggggacatgccggtggttctcatagcaaccagcaccaaatgaaagagtacacgtcatggaaatcacctgctaagaagctgactaatgcattaagcaagtccctgagctgtgcttccagccgtgaacctttgcaccccatgttcccagatcagcctgagaagccactcaacttggctcacatcgtgcctcccagacctgtaaccagcatgaacgacaccctgttctcccactctgttccctcctcaggaagtccttttattaccaggagcatgcttgagagttcaaaccggcttgatgaagaacacaggctaattgccaggtatgcggcaaggctggcagcagagtcctcttcgtctcagccacctcagcagagaagtgctcctgacatctctttcaccatcgatgcgaataagcagcaaaggcagctgattgctgagctagaaaacaagaacagagaaatcttacaggagatccagagacttcggctagagcatgaacaagcttctcagcccacgccagagaaggcacagcaaaaccccaccctgctggcagaactccggctcctcagacagcgcaaagatgagctggaacagagaatgtctgctctccaggagagccggagagagctaatggtccagttggagggtctcatgaagctactaaagactcagggggcaggctctccccgctcctcccccagccacaccatcagcaggccaattcccatgcccatccggtcagcgtcagcctgctccaccccgacgcacacgccgcaggactccctcacaggagtagggggagatgtacaagaggcatttgcacaaagttcaagaagaaacttaaggaatgacttgctagtggctgcagattccatcactaacactatgtcctctcttgtgaaagagctgaattctgaggttgggagtgaaacagagagtaatgtggattctgaatttgcacggactcagtttgaggatcttgttccctcaccaacctctgaaaaggcttttctagcgcaaatccatgcccgaaaacctgggtacattcacagtggagctaccacaagtaccatgcgtggcgacatggttacggaggatgcagatccctatgtgcagcctgaagatgaaaactatgaaaatgactctgtccggcagctggagaatgagctccagatggaggaatacctgaaacagaagctgcaagatgaagcttatcagctccacgtcagcactgagaccagactcgagcacccctgtcctgtaagcgagacaaaatggcgtgtgttattttggggttttgtgttttttggtgggtttctttccttggctctccagatttacttttggggcctgttctaagtgcaaacccagcaagtttcacttgtcctgtccattagatacaactacatcttgcgggggttgtttctttcttgttccacaatgaattgcacatccatctccatcagagctgatagcctgttaataagcactggtctaacacagccaaccctcctccacagcgccatattaatggaggaggggaggaaggtgaaatctactgcatgggattcaggaaacagttgtggttggtcaggacggaagttggggtaagtttggttggtcagagggagttgtgctggagattgtgaaaaatgggttcttgaatgatctactataaggcagggaaggttcatttgtaagtagtaatgtgaactgaattgcattaagagtgtgtggcctttgttgtgatatactatgtattttcttatatgcatgagccaaactgttgcatcataatttagcactgatgtctgcttttattttgatcatctttgtccacccttattagttcttggctgttaaccgtagatagatcttgtaaatccagcaacctttggttgctgcattccccttggttcgattccacgcaaggagccacaagtgagaactccactgtccttagaagaaagggcatttttacttttgaaccaaaaagagaaaaaaaaatcagaagtgttgcatcttgaggcgaattaactgtaagacatttttaattatg

SEQ ID NO: 128749 - DNA, 1931 bp, Homo sapiens
  Payload ID: 5188
  Gene Symbol: DTNA
  Gene Name: dystrobrevin, alpha
  ENST ID: ENST00000601125
  CDS Start-End: 448-1545
ttcatttcatttccccacaggcatgattgaaaagggttgtaagattccaggaatgaactaaatgtttctctgagcccaaatcaactatcatctgaaatcgtggtgcagagaagaaaggtgcaattcctgtaaggctgtatttttccttcttctggttcatacttttgttttcttggtttttcttcacttacttcccccttagtcttccatccggttgagtgttcctactgccacagtgagagtatgatgggatttcgctaccgatgccaacagtgtcacaattaccagctctgtcaggactgcttctggaggggacatgccggtggttctcatagcaaccagcaccaaatgaaagagtacacgtcatggaaatcacctgctaagaagctgactaatgcattaagcaagtccctgagctgtgcttccagccgtgaacctttgcaccccatgttcccagatcagcctgagaagccactcaacttggctcacatcgtgcctcccagacctgtaaccagcatgaacgacaccctgttctcccactctgttccctcctcaggaagtccttttattaccaggagcatgcttgagagttcaaaccggcttgatgaagaacacaggctaattgccaggtatgcggcaaggctggcagcagagtcctcttcgtctcagccacctcagcagagaagtgctcctgacatctctttcaccatcgatgcgaataagcagcaaaggcagctgattgctgagctagaaaacaagaacagagaaatcttacaggagatccagagacttcggctagagcatgaacaagcttctcagcccacgccagagaaggcacagcaaaaccccaccctgctggcagaactccggctcctcagacagcgcaaagatgagctggaacagagaatgtctgctctccaggagagccggagagagctaatggtccagttggagggtctcatgaagctactaaagactcagggggcaggctctccccgctcctcccccagccacaccatcagcaggccaattcccatgcccatccggtcagcgtcagcctgctccaccccgacgcacacgccgcaggactccctcacaggagtagggggagatgtacaagaggcatttgcacaaagttcaagaagaaacttaaggaatgacttgctagtggctgcagattccatcactaacactatgtcctctcttgtgaaagagctgaattctgaggttgggagtgaaacagagagtaatgtggattctgaatttgcacggactcagtttgaggatcttgttccctcaccaacctctgaaaaggcttttctagcgcaaatccatgcccgaaaacctgggtacattcacagtggagctaccacaagtaccatgcgtggcgacatggttacggaggatgcagatccctatgtgcagcctgaagatgaaaactatgaaaatgactctgtccggcagctggagaatgagctccagatggaggaatacctgaaacagaagctgcaagatgaagcttatcaggtcagcttgcaaggttgaatgcaatatccttttatcacactcctctcaagcaagctatagtcagacagatgatgaaagtaacatgaaaactggtgatgatggagagccctgtggccacacagaggaggaagacagcagcctggcagcagcctcaccgaagagaggaaccaccacacccagcagctcctgacagacccccacccctaaagatgtgtcctgatgactatagtgcagctaactttttgttctcagatttgtagtgcataggtgtgtgtttcaagaaggaaaaaaaaagacttctgttcaaagttaacttatcagctacatcctctgtaacgtggttcatccctggttaaaaagcaaacaaacacaggctgaaaacccatgctgctgttatacacaat

SEQ ID NO: 128750 - DNA, 2509 bp, Homo sapiens
  Payload ID: 5188
  Gene Symbol: DTNA
  Gene Name: dystrobrevin, alpha
  Uniprot ID: Q9Y4J8
  ENST ID: ENST00000598142
  CDS Start-End: 58-2118
ttcaaagaatatagatggttttgaaaagttcatgctgtcccttcattgaattttagaatgattgaagatagtgggaaaagaggaaataccatggcagaaagaagacagctgtttgcagagatgagggctcaagatctggatcgcatccgactctccacctacagaacagcatgcaagcttaggtttgttcagaagaaatgcaatttgcacctggtggacatatggaatgtcatagaagcattgcgggaaaatgctctgaacaacctggacccaaacactgaactcaacgtgtcccgcttagaggctgtgctctccactattttttaccagctcaacaaacggatgccaaccactcaccaaatccatgtggagcagtccatcagcctcctccttaacttcctgcttgcagcgtttgatccggaaggccatggtaaaatttcagtatttgctgtcaaaatggctttagccacattgtgtggagggaagatcatggacaaattaagatatattttctcaatgatttctgactccagtggggtgatggtttatggacgatatgaccaattccttcgggaagttctcaaactacccacggcagtttttgaaggtccttcatttggttacacagaacagtcagccagatcctgtttctcccaacagaaaaaagtcacgttaaatggtttcttggacacgcttatgtcagatcctcccccgcagtgtctggtctggttgcctcttctgcatcgactagcaaatgtggaaaatgtcttccatccggttgagtgttcctactgccacagtgagagtatgatgggatttcgctaccgatgccaacagtgtcacaattaccagctctgtcaggactgcttctggaggggacatgccggtggttctcatagcaaccagcaccaaatgaaagagtacacgtcatggaaatcacctgctaagaagctgactaatgcattaagcaagtccctgagctgtgcttccagccgtgaacctttgcaccccatgttcccagatcagcctgagaagccactcaacttggctcacatcgttgatacttggcctcccagacctgtaaccagcatgaacgacaccctgttctcccactctgttccctcctcaggaagtccttttattaccaggagcatgcttgagagttcaaaccggcttgatgaagaacacaggctaattgccaggtatgcggcaaggctggcagcagagtcctcttcgtctcagccacctcagcagagaagtgctcctgacatctctttcaccatcgatgcgaataagcagcaaaggcagctgattgctgagctagaaaacaagaacagagaaatcttacaggagatccagagacttcggctagagcatgaacaagcttctcagcccacgccagagaaggcacagcaaaaccccaccctgctggcagaactccggctcctcagacagcgcaaagatgagctggaacagagaatgtctgctctccaggagagccggagagagctaatggtccagttggagggtctcatgaagctactaaagactcagggggcaggctctccccgctcctcccccagccacaccatcagcaggccaattcccatgcccatccggtcagcgtcagcctgctccaccccgacgcacacgccgcaggactccctcacaggagtagggggagatgtacaagaggcatttgcacaaagttcaagaagaaacttaaggaatgacttgctagtggctgcagattccatcactaacactatgtcctctcttgtgaaagagctgaattctgaggttgggagtgaaacagagagtaatgtggattctgaatttgcacggactcagtttgaggatcttgttccctcaccaacctctgaaaaggcttttctagcgcaaatccatgcccgaaaacctgggtacattcacagtggagctaccacaagtaccatgcgtggcgacatggttacggaggatgcagatccctatgtgcagcctgaagatgaaaactatgaaaatgactctgtccggcagctggagaatgagctccagatggaggaatacctgaaacagaagctgcaagatgaagcttatcaggtcagcttgcaaggttgaatgcaatatccttttatcacactcctctcaagcaagctatagtcagacagatgatgaaagtaacatgaaaactggtgatgatggagagccctgtggccacacagaggaggaagacagcagcctggcagcagcctcaccgaagagaggaaccaccacacccagcagctcctgacagacccccacccctaaagatgtgtcctgatgactatagtgcagctaactttttgttctcagatttgtagtgcataggtgtgtgtttcaagaaggaaaaaaaaagacttctgttcaaagttaacttatcagctacatcctctgtaacgtggttcatccctggttaaaaagcaaacaaacacaggctgaaaacccatgctgctgttatacacaatggcag

SEQ ID NO: 128751 - DNA, 853 bp, Homo sapiens
  Payload ID: 5188
  Gene Symbol: DTNA
  Gene Name: dystrobrevin, alpha
  ENST ID: ENST00000599844
  CDS Start-End: 279-767
agtattcagtcccccttcctcccactctccaccctactgcgtgctcttacttattctgttggaacccagtgtagcttcctgagatttaaaatataggaagactcaaaactatgttacttcttggaatatagataattcagtactgatttaaataacaactgaatagcaaggaccttctggaacataatcttacattcacaaaatcacctgctaagaagctgactaatgcattaagcaagtccctgagctgtgcttccagccgtgaacctttgcaccccatgttcccagatcagcctgagaagccactcaacttggctcacatcgtgcctcccagacctgtaaccagcatgaacgacaccctgttctcccactctgttccctcctcaggaagtccttttattaccaggagcatgcttgagagttcaaaccggcttgatgaagaacacaggctaattgccaggtatgcggcaaggctggcagcagagtcctcttcgtctcagccacctcagcagagaagtgctcctgacatctctttcaccatcgatgcgaataagcagcaaaggcagctgattgctgagctagaaaacaagaacagagaaatcttacaggagatccagagacttcggctagagcatgaacaagcttctcagcccacgccagagaaggcacagcaaaaccccaccctgctggcagaactccggctcctcagcgcaaagatgagctggaacagagaatgtctgctctccaggagagccggagagagctaatggtccagttggagggtctcatgaagctactaaaggaagaagaactgaagcagggagtaagttatgtcccctactgcaggtcttaa

SEQ ID NO: 128752 - DNA, 847 bp, Homo sapiens
  Payload ID: 5188
  Gene Symbol: DTNA
  Gene Name: dystrobrevin, alpha
  ENST ID: ENST00000590831
  CDS Start-End: 63-572
agactcagggggcaggctctccccgctcctcccccagccacaccatcagcaggccaattcccatgcccatccggtcagcgtcagcctgctccaccccgacgcacacgccgcaggactccctcacaggagtagggggagatgtacaagaggcatttgcacaaagttcaagaagaaacttaaggaatgacttgctagtggctgcagattccatcactaacactatgtcctctcttgtgaaagagctgaattctgaggttgggagtgaaacagagagtaatgtggattctgaatttgcacggactcagtttgaggatcttgttccctcaccaacctctgaaaaggcttttctagcgcaaatccatgcccgaaaacctgggtacattcacagtggagctaccacaagtaccatgcgtggcgacatggttacggaggatgcagatccctatgtgcagcctgaagatgaaaactatgaaaatgactctgtccggcagctggagaatgagctccagatggaggaatacctgaaacagaagctgcaagatgaagcttatcaggtcagcttgcaaggttgaatgcaatatccttttatcacactcctctcaactccacgtcagcactgagaccagactcgagcacccctgtcctgtaagcgagacaaaatggcgtgtgttattttggggttttgtgttttttggtgggtttctttccttggctctccagatttacttttggggcctgttctaagtgcaaacccagcaagtttcacttgtcctgtccattagatacaactacatcttgcgggggttgtttctttcttgttccacaatgaattgcacatccatctcca

SEQ ID NO: 128753 - DNA, 1732 bp, Homo sapiens
  Payload ID: 5188
  Gene Symbol: DTNA
  Gene Name: dystrobrevin, alpha
  Uniprot ID: Q9Y4J8
  ENST ID: ENST00000597674
  CDS Start-End: 335-913
gaatatcaaggatggtggcagaattaaagggcaaacttaccttccatcccaggtctagtattcagtcccccttcctcccactctccaccctactgcgtgctcttacttattctgttggaacccagtgtagcttcctgagatttaaaatataggaagactcaaaactatgttacttcttggaatatagataattcagtactgatttaaataacaactgaatagcaaggaccttctggaacataatcttacattcacaaaatcacctgctaagaagctgactaatgcattaagcaagtccctgagctgtgcttccagccgtgaacctttgcaccccatgttcccagatcagcctgagaagccactcaacttggctcacatcgtgcctcccagacctgtaaccagcatgaacgacaccctgttctcccactctgttccctcctcaggaagtccttttattaccaggagcatgcttgagagttcaaaccggcttgatgaagaacacaggctaattgccaggtatgcggcaaggctggcagcagagtcctcttcgtctcagccacctcagcagagaagtgctcctgacatctctttcaccatcgatgcgaataagcagcaaaggcagctgattgctgagctagaaaacaagaacagagaaatcttacaggagatccagagacttcggctagagcatgaacaagcttctcagcccacgccagagaaggcacagcaaaaccccaccctgctggcagaactccggctcctcagacagcgcaaagatgagctggaacagagaatgtctgctctccaggagagccggagagagctaatggtccagttggagggtctcatgaagctactaaaggaagaagaactgaagcagggagtaagttatgtcccctactgcaggtcttaactaacagtggaggggcctgccgacctgcggttttctcattgcttttgctctaatgtatgttcatgcttcagtttggaaagagaaaaaagtcatactaatttgcttctttttcaatgtagtgcttgaattgagatatataaatttagcattttttataactatcactactatccacatcaaaagaagaactatgacatcttttagaaaagggaacgaattgtcatttattggaaacattttagatccccagaggtataagtttcaaaccagtcttagcttttcaagttgttgatcagacccttctcttaacagagagataccacagtcactagagataccctgaggttcatgtcatcccaaaacccacagcactcagaagctaacctctacacccactcacactgtgagtattcagttcggtttcattttactgaaaacctgtgaaacctctttttataaaaatcaggcaattaaatcccttttcatcacacaattattgagccttgttccccatggctcaccaaaatgtgctcaattttgtgagagaaagactgtactccataactgactattcacgtcccatctttttggctcttccccaaagcagaatccttactgttggttgacagtaatctctttttaaaaagtaactctcagctttttccttagcaccagagcctttcggctccgggagacgagagggtcattacatacttttttttttttctggaaataggggcattgtgactttatagcctaaactggagctgtctgaacctgtggtcaggctcaagagccagcagggggagcagcaaactc

SEQ ID NO: 128754 - DNA, 2418 bp, Homo sapiens
  Payload ID: 5188
  Gene Symbol: DTNA
  Gene Name: dystrobrevin, alpha
  Uniprot ID: Q9Y4J8
  ENST ID: ENST00000598774
  CDS Start-End: 58-1599
ttcaaagaatatagatggttttgaaaagttcatgctgtcccttcattgaattttagaatgattgaagatagtgggaaaagaggaaataccatggcagaaagaagacagctgtttgcagagatgagggctcaagatctggatcgcatccgactctccacctacagaacagcatgcaagcttaggtttgttcagaagaaatgcaatttgcacctggtggacatatggaatgtcatagaagcattgcgggaaaatgctctgaacaacctggacccaaacactgaactcaacgtgtcccgcttagaggctgtgctctccactattttttaccagctcaacaaacggatgccaaccactcaccaaatccatgtggagcagtccatcagcctcctccttaacttcctgcttgcagcgtttgatccggaaggccatggtaaaatttcagtatttgctgtcaaaatggctttagccacattgtgtggagggaagatcatggacaaattaagatatattttctcaatgatttctgactccagtggggtgatggtttatggacgatatgaccaattccttcgggaagttctcaaactacccacggcagtttttgaaggtccttcatttggttacacagaacagtcagccagatcctgtttctcccaacagaaaaaagtcacgttaaatggtttcttggacacgcttatgtcagatcctcccccgcagtgtctggtctggttgcctcttctgcatcgactagcaaatgtggaaaatgtcttccatccggttgagtgttcctactgccacagtgagagtatgatgggatttcgctaccgatgccaacagtgtcacaattaccagctctgtcaggactgcttctggaggggacatgccggtggttctcatagcaaccagcaccaaatgaaagagtacacgtcatggaaatcacctgctaagaagctgactaatgcattaagcaagtccctgagctgtgcttccagccgtgaacctttgcaccccatgttcccagatcagcctgagaagccactcaacttggctcacatcgttgatacttggcctcccagacctgtaaccagcatgaacgacaccctgttctcccactctgttccctcctcaggaagtccttttattaccaggagcatgcttgagagttcaaaccggcttgatgaagaacacaggctaattgccaggtatgcggcaaggctggcagcagagtcctcttcgtctcagccacctcagcagagaagtgctcctgacatctctttcaccatcgatgcgaataagcagcaaaggcagctgattgctgagctagaaaacaagaacagagaaatcttacaggagatccagagacttcggctagagcatgaacaagcttctcagcccacgccagagaaggcacagcaaaaccccaccctgctggcagaactccggctcctcagacagcgcaaagatgagctggaacagagaatgtctgctctccaggagagccggagagagctaatggtccagttggagggtctcatgaagctactaaaggaagaagaactgaagcagggagtaagttatgtcccctactgcaggtcttaactaacagtggaggggcctgccgacctgcggttttctcattgcttttgctctaatgtatgttcatgcttcagtttggaaagagaaaaaagtcatactaatttgcttctttttcaatgtagtgcttgaattgagatatataaatttagcattttttataactatcactactatccacatcaaaagaagaactatgacatcttttagaaaagggaacgaattgtcatttattggaaacattttagatccccagaggtataagtttcaaaccagtcttagcttttcaagttgttgatcagacccttctcttaacagagagataccacagtcactagagataccctgaggttcatgtcatcccaaaacccacagcactcagaagctaacctctacacccactcacactgtgagtattcagttcggtttcattttactgaaaacctgtgaaacctctttttataaaaatcaggcaattaaatcccttttcatcacacaattattgagccttgttccccatggctcaccaaaatgtgctcaattttgtgagagaaagactgtactccataactgactattcacgtcccatctttttggctcttccccaaagcagaatccttactgttggttgacagtaatctctttttaaaaagtaactctcagctttttccttagcaccagagcctttcggctccgggagacgagagggtcattacatacttttttttttttctggaaataggggcattgtgactttatagcctaaactggagctgtctgaacctgtggtcaggctcaagagccagcagggggagcagcaaactc

SEQ ID NO: 128755 - DNA, 6016 bp, Homo sapiens
  Payload ID: 5188
  Gene Symbol: DTNA
  Gene Name: dystrobrevin, alpha
  Uniprot ID: Q9Y4J8
  ENST ID: ENST00000595022
  CDS Start-End: 301-2352
ggatttcatactcatagctctccctagaatttcagagagttctgttatgatctctgttgtaattaccaatttggttcaagtttgttctttaaatgaatatgcttagaattcacatatgttctggatgtactggaattaaaaggatttaagagatcatggtgtgcatgttctaggataaataggatttaccaatccttggatgaagtgcttgggaagtctttaagtgccataatcaactgccatttcaaagaatatagatggttttgaaaagttcatgctgtcccttcattgaattttagaatgattgaagatagtgggaaaagaggaaataccatggcagaaagaagacagctgtttgcagagatgagggctcaagatctggatcgcatccgactctccacctacagaacagcatgcaagcttaggtttgttcagaagaaatgcaatttgcacctggtggacatatggaatgtcatagaagcattgcgggaaaatgctctgaacaacctggacccaaacactgaactcaacgtgtcccgcttagaggctgtgctctccactattttttaccagctcaacaaacggatgccaaccactcaccaaatccatgtggagcagtccatcagcctcctccttaacttcctgcttgcagcgtttgatccggaaggccatggtaaaatttcagtatttgctgtcaaaatggctttagccacattgtgtggagggaagatcatggacaaattaagatatattttctcaatgatttctgactccagtggggtgatggtttatggacgatatgaccaattccttcgggaagttctcaaactacccacggcagtttttgaaggtccttcatttggttacacagaacagtcagccagatcctgtttctcccaacagaaaaaagtcacgttaaatggtttcttggacacgcttatgtcagatcctcccccgcagtgtctggtctggttgcctcttctgcatcgactagcaaatgtggaaaatgtcttccatccggttgagtgttcctactgccacagtgagagtatgatgggatttcgctaccgatgccaacagtgtcacaattaccagctctgtcaggactgcttctggaggggacatgccggtggttctcatagcaaccagcaccaaatgaaagagtacacgtcatggaaatcacctgctaagaagctgactaatgcattaagcaagtccctgagctgtgcttccagccgtgaacctttgcaccccatgttcccagatcagcctgagaagccactcaacttggctcacatcgtgcctcccagacctgtaaccagcatgaacgacaccctgttctcccactctgttccctcctcaggaagtccttttattaccaggagcatgcttgagagttcaaaccggcttgatgaagaacacaggctaattgccaggtatgcggcaaggctggcagcagagtcctcttcgtctcagccacctcagcagagaagtgctcctgacatctctttcaccatcgatgcgaataagcagcaaaggcagctgattgctgagctagaaaacaagaacagagaaatcttacaggagatccagagacttcggctagagcatgaacaagcttctcagcccacgccagagaaggcacagcaaaaccccaccctgctggcagaactccggctcctcagacagcgcaaagatgagctggaacagagaatgtctgctctccaggagagccggagagagctaatggtccagttggagggtctcatgaagctactaaagactcagggggcaggctctccccgctcctcccccagccacaccatcagcaggccaattcccatgcccatccggtcagcgtcagcctgctccaccccgacgcacacgccgcaggactccctcacaggagtagggggagatgtacaagaggcatttgcacaaagttcaagaagaaacttaaggaatgacttgctagtggctgcagattccatcactaacactatgtcctctcttgtgaaagagctgaattctgaggttgggagtgaaacagagagtaatgtggattctgaatttgcacggactcagtttgaggatcttgttccctcaccaacctctgaaaaggcttttctagcgcaaatccatgcccgaaaacctgggtacattcacagtggagctaccacaagtaccatgcgtggcgacatggttacggaggatgcagatccctatgtgcagcctgaagatgaaaactatgaaaatgactctgtccggcagctggagaatgagctccagatggaggaatacctgaaacagaagctgcaagatgaagcttatcaggtcagcttgcaaggttgaatgcaatatccttttatcacactcctctcaagcaagctatagtcagacagatgatgaaagtaacatgaaaactggtgatgatggagagccctgtggccacacagaggaggaagacagcagcctggcagcagcctcaccgaagagaggaaccaccacacccagcagctcctgacagacccccacccctaaagatgtgtcctgatgactatagtgcagctaactttttgttctcagatttgtagtgcataggtgtgtgtttcaagaaggaaaaaaaaagacttctgttcaaagttaacttatcagctacatcctctgtaacgtggttcatccctggttaaaaagcaaacaaacacaggctgaaaacccatgctgctgttatacacaatggcagtattaacaagcattttaaacctttgcacatgatattgaacctgttcagtttacaatgacaatattaatactgtttatagctagaagtttgatttctgaattctttgagattttagcaaaacagtttattatacactgtacatttttttcacagcaattggaaaaaaacaaccacttgcaatcattcaataaccctgaagaatttggttcctgagtgtacaaactcagagcccggaagccaagaagggtccttggcctgcacggtctgtagttgactccaagtctctgtgagcagtgacttgaaccaaacacaccaggaataatccattctttggggcctctttccaactcgaggttgttttctttcaagatactctaatcagccatagaatttagtgtaaatatttttttttccaaatagatatcatattcaaaaaaggcagcattcaaattatatagaatctagtttttaaaatcagcacagatcttcttaaaaactgtgaactatgttttgaaatactcgttactaaagctgtttataaaccacaggtgccataagatccccaaacggactaaagttatctctgctcttccatggtcttgttcctctcgttttggctttaggaagcatgtctttaacagcaccgctcgttcacaagttcccccatcaagttgtttggaggccttcagctttaaatgtacaggcttaaagtgcgcttgcaaacgtttgctctcctttttttctgaatgttgattgccttagctggccacctggtgttctgcatgtagccttctgtggtcatgtgaaaggagacaggctcttctaagttgagttgggatttttgcactcagtgaaaagctgaagtgcaaaagagctatcaaagacaagaggataaaagactgggatagtcttttccaaggaccctctttagagggccctaaagacctcctttgggaattctggggaaaaagaaaaagtaatcttctacttgcttcaagatttgatttttttaaaaaagcctgcgacctattcaatacattatgcttaaattagcagtttctctggaattcctgtctctcctttaaaagaaaggagagaacattttagaacaatagttctcaaagtgtgttccccggacaagcagcatctgcaacacttaggaaggtcttcgaaatactaatttgtaagccccacctcaggcctactgaatcagaagctctgggggttgggtccagaagtctgttttagtcaaccctctaggtgattctgatgctcgctaaaggttgagaactactgctttagaatgaagtcgtataataaagtctctgaaaaggccttattcagaataagcaagaaaggttctgtgattcacttttgcttctggggctggcaaaaaccttctctgaacccacacaccaagttcgtagttggtaggtgcccagccaagtcctgacatcttcatgccccctctgcagagggcggctgtacgatgttcacatgtctgcgtttggtcagacatcatctccttggctgccctttgaaaccaaatcacttgccttggggataaagtgctcaattggcattagtgagaagcccatcctatcccttgacatacttaatcatatatctctccagagaactcacctgacaaatgtctctgagcacaggctgacaccaaagtggcacaactgcacagttctcagatttctttgcacagattgatttttattgcgggttttgttggggtgtcttaatgttcatctcttttccactgcccatcctctgtgaacccatacctctctagatggagcaggtggccactggtgcctcatactcagtattgaaaaccactacatcccagctacctataatgctgtcagctcaaaatcatagccaggtagttcttgaactcagaacttaaatcctgcacgtggcactccaccactgactggaccgagctggcatatgttgtttctttgtgtttctacatcaaaatgttcgtctaagatttgaactgttctgctgataaccttccccgttgtcatagctatttcattgccaaccaactccatcacatggttgttgatatcgtcatataaagccattgcaaggactctggaaactgccgccaatgaccaatttctgactaaccagccaccttttctctctcttagctccacgtcagcactgagaccagactcgagcacccctgtcctgtaagcgagacaaaatggcgtgtgttattttggggttttgtgttttttggtgggtttctttccttggctctccagatttacttttggggcctgttctaagtgcaaacccagcaagtttcacttgtcctgtccattagatacaactacatcttgcgggggttgtttctttcttgttccacaatgaattgcacatccatctccatcagagctgatagcctgttaataagcactggtctaacacagccaaccctcctccacagcgccatattaatggaggaggggaggaaggtgaaatctactgcatgggattcaggaaacagttgtggttggtcaggacggaagttggggtaagtttggttggtcagagggagttgtgctggagattgtgaaaaatgggttcttgaatgatctactataaggcagggaaggttcatttgtaagtagtaatgtgaactgaattgcattaagagtgtgtggcctttgttgtgatatactatgtattttcttatatgcatgagccaaactgttgcatcataatttagcactgatgtctgcttttattttgatcatctttgtccacccttattagttcttggctgttaaccgtagatagatcttgtaaatccagcaacctttggttgctgcattccccttggttcgattccacgcaaggagccacaagtgagaactccactgtccttagaagaaagggcatttttacttttgaaccaaaaagagaaaaaaaaatcagaagtgttgcatcttgaggcgaattaactgtaagacatttttaattatgactactgcaatttgacaccatttgaaataatcaattcagagacactaaagatttcacaatattcattggtattgtaaaaaaaaaatactattgtatggatttttgtattgctgttaagtattgttttgtgtgtgtgtgtgtgtgtgtgtgttggaacctcctggggacatgttatattttgaagtgattaaactatttaattgtgtgtctatattttggagtggaataatttcttcattaaaaaatgtttttaaaaac

SEQ ID NO: 128756 - DNA, 1869 bp, Homo sapiens
  Payload ID: 5188
  Gene Symbol: DTNA
  Gene Name: dystrobrevin, alpha
  Uniprot ID: Q9Y4J8
  ENST ID: ENST00000597599
  CDS Start-End: 151-1683
gaagaatgaacacagctttttattgaagttaaaggttactttggagtttgtttggaaatgtgtaaggtcaaatactatagttttcagcatatgtagtacttcagaggaagaattaaggggcatgttggtgcatttaactacaaaaccagaatgattgaagatagtgggaaaagaggaaataccatggcagaaagaagacagctgtttgcagagatgagggctcaagatctggatcgcatccgactctccacctacagaacagcatgcaagcttaggtttgttcagaagaaatgcaatttgcacctggtggacatatggaatgtcatagaagcattgcgggaaaatgctctgaacaacctggacccaaacactgaactcaacgtgtcccgcttagaggctgtgctctccactattttttaccagctcaacaaacggatgccaaccactcaccaaatccatgtggagcagtccatcagcctcctccttaacttcctgcttgcagcgtttgatccggaaggccatggtaaaatttcagtatttgctgtcaaaatggctttagccacattgtgtggagggaagatcatggacaaattaagatatattttctcaatgatttctgactccagtggggtgatggtttatggacgatatgaccaattccttcgggaagttctcaaactacccacggcagtttttgaaggtccttcatttggttacacagaacagtcagccagatcctgtttctcccaacagaaaaaagtcacgttaaatggtttcttggacacgcttatgtcagatcctcccccgcagtgtctggtctggttgcctcttctgcatcgactagcaaatgtggaaaatgtcttccatccggttgagtgttcctactgccacagtgagagtatgatgggatttcgctaccgatgccaacagtgtcacaattaccagctctgtcaggactgcttctggaggggacatgccggtggttctcatagcaaccagcaccaaatgaaagagtacacgtcatggaaatcacctgctaagaagctgactaatgcattaagcaagtccctgagctgtgcttccagccgtgaacctttgcaccccatgttcccagatcagcctgagaagccactcaacttggctcacatcgtgcctcccagacctgtaaccagcatgaacgacaccctgttctcccactctgttccctcctcaggaagtccttttattaccaggagcatgcttgagagttcaaaccggcttgatgaagaacacaggctaattgccaggtatgcggcaaggctggcagcagagtcctcttcgtctcagccacctcagcagagaagtgctcctgacatctctttcaccatcgatgcgaataagcagcaaaggcagctgattgctgagctagaaaacaagaacagagaaatcttacaggagatccagagacttcggctagagcatgaacaagcttctcagcccacgccagagaaggcacagcaaaaccccaccctgctggcagaactccggctcctcagacagcgcaaagatgagctggaacagagaatgtctgctctccaggagagccggagagagctaatggtccagttggagggtctcatgaagctactaaaggaagaagaactgaagcagggagtaagttatgtcccctactgcaggtcttaactaacagtggaggggcctgccgacctgcggttttctcattgcttttgctctaatgtatgttcatgcttcagtttggaaagagaaaaaagtcatactaatttgcttctttttcaatgtagtgcttgaattgagatatataaatttagcattttttataactatcactactatccacatcaaaagaag

SEQ ID NO: 128757 - DNA, 2464 bp, Homo sapiens
  Payload ID: 5189
  Gene Symbol: DTNB
  Gene Name: dystrobrevin, beta
  ENST ID: ENST00000288642
  CDS Start-End: 264-2126
gcgcgctcgcgctgggcgcgcgcccgcccatccgccctccgccctccgccctcgcgccctcgcgccgggggcgggcgctgcgcgtgccgggcggagaagcggcgcgagccgggcgctgcgaacgttcgccgcgggggtggctccggggcctgagtaggcgctgccgctgcctcagccgagggggctgggccggagcgtgcggaggagtgaggccgcaggagaccttcccgacgacccctgctccggcggggaagtgagcaaggatgattgaggaaagtgggaacaagcggaagaccatggcagagaagaggcagctgttcatagaaatgcgtgctcagaattttgatgtcatacgactatcaacttacagaacagcctgcaaattacgatttgtacaaaaacgatgcaaccttcatcttgttgatatctggaacatgattgaagccttccgagacaatggccttaatacactggaccataccaccgagatcagtgtgtcccgcctcgaaactgtcatctcctccatctactatcagttgaacaagcgccttccttctactcaccaaattagtgtggaacaatctatcagcctcctcctcaactttatgattgctgcatatgacagtgagggccgaggcaagttgacggtattttcagttaaagctatgttagcaaccatgtgtggtggaaaaatgctggacaaattgagatatgttttctcccagatgtcagattccaatggcttaatgatatttagcaagtttgaccagtttctgaaggaagttctgaagctcccaacagctgtctttgaagggccatcttttggttacacagagcactcagtccgcacctgttttccacagcagagaaagataatgctaaatatgtttttagacacaatgatggctgaccctcctccccagtgccttgtctggctacctctcatgcacaggcttgcccatgttgagaatgtcttccatcccgtggagtgctcctactgccgatgtgagagtatgatgggtttccggtaccgatgccagcagtgccacaactatcagctctgccagaattgcttttggcgtggccatgccggcggccctcacagcaaccagcaccagatgaaggagcattcctcttggaaatctcctgcaaagaagctgagccatgcaattagtaaatctttggggtgtgtacccacgagagaacccccgcatcctgtttttcctgagcaaccagagaaaccacttgaccttgcacatatagttcctcctcgccctctgactaatatgaatgacaccatggttagccacatgtcctctggagtgcccactcccaccaagaggttacagtatagccaggatatacccagtcacttggccgatgagcatgcgctgatagcctcctatgtggcccgtctgcagcactgtgcacgtgttctggacagtcctagccgactggatgaggaacaccgtcttatagctcgctatgctgcccggctggctgcagaagcaggaaacgtgactcgtcctcccactgacttgagctttaactttgatgccaacaaacaacaaagacagcttattgcagaactggaaaacaaaaacagagagatcctgcaggagattcagcgtctccgcctggaacacgagcaggcctcccagcccacccctgagaaggcacagcagaaccccacgctgctggcagagctgcggctgctgaggcaaaggaaggatgaactggagcagaggatgtcggccctgcaggagagcaggcgggagctgatggtccagctggaagagctgatgaagttgctgaaggctcaggccacagggtcaccacatacatcgcccacccatggaggcggccggccaatgcccatgccagtgcgctccacgtctgccggctccacccccacccactgtccgcaggactcgctgagcggagtcgggggagacgtgcaggaggccttcgcacaaggtacgaggagaaacctccgcaatgacctgctggtggcagctgactccatcaccaacaccatgtcatccctggtgaaggagctccattcagcagaggaaggtgcagaggaagaagaagagaagatgcagaatgggaaagacagaggttagcagaggagccggacacagaggaagctcaggcacagaggacgaggagcaagctggcgccgacatggcgaaggcaaggtcttcccccagaggcacattcctctccatctttccaccgcacacctggaccaggcttgcaggctgccagacgtcactccacccgccagggagaggggagccagagccggtgggaagcggggaggggctgcgtggcacagctagtgggcctccccctgcacagccctgcatgtactagcaccttcatcactcccctcagggcatggtctcatctccgcatcaggaattcacctggaggttgaaaagagaaaagaaaaagcacc

SEQ ID NO: 128758 - DNA, 822 bp, Homo sapiens
  Payload ID: 5189
  Gene Symbol: DTNB
  Gene Name: dystrobrevin, beta
  ENST ID: ENST00000303659
  CDS Start-End: 258-822
attcaagttgagaattggatggggacacagccaaaccgtatcagggattaatacctgatttctttaatatgaaattgaatattcatgtatattttatgtataagctaactgttcttatgtcctttattacagcctttcattacatttattttctaaattatatttagtaacatgtttatccatataaaacagtagagatatgggaagttacctcaactaatccaggactctgcagagaaaataatcaaagttagaagatgattgaggaaagtgggaacaagcggaagaccatggcagagaagaggcagctgttcatagaaatgcgtgctcagaattttgatgtcatacgactatcaacttacagaacagcctgcaaattacgatttgtacaaaaacgatgcaaccttcatcttgttgatatctggaacatgattgaagccttccgagacaatggccttaatacactggaccataccaccgagatcagtgtgtcccgcctcgaaactgtcatctcctccatctactatcagttgaacaagcgccttccttctactcaccaaattagtgtggaacaatctatcagcctcctcctcaactttatgattgctgcatatgacagtgagggccgaggcaagttgacggtattttcagttaaagctatgttagcaaccatgtgtggtggaaaaatgctggacaaattgagatatgttttctcccagatgtcagattccaatggcttaatgatatttagcaagtttgaccagtttctgaaggaagttctgaagctcccaacagctgtctttgaagggccatcttttggtt

SEQ ID NO: 128759 - DNA, 565 bp, Homo sapiens
  Payload ID: 5189
  Gene Symbol: DTNB
  Gene Name: dystrobrevin, beta
  ENST ID: ENST00000349996
  CDS Start-End: 169-565
agatcaccccaaatcactgtttcccgaggcgcctaatagcgaacctgtccaggaggtcaccctggacaggaaagaagtgtcccgagacgaggatgccggtgacgaatacttgcccttaaattcctgtgccaggccttgggattaggaagaccttccagctaccgtaggatgattgaggaaagtgggaacaagcggaagaccatggcagagaagaggcagctgttcatagaaatgcgtgctcagaattttgatgtcatacgactatcaacttacagaacagcctgcaaattacgatttgtacaaaaacgatgcaaccttcatcttgttgatatctggaacatgattgaagccttccgagacaatggccttaatacactggaccataccaccgagatcagtgtgtcccgcctcgaaactgtcatctcctccatctactatcagttgaacaagcgccttccttctactcaccaaattagtgtggaacaatctatcagcctcctcctcaactttatgattgctgcatatgacagtgagggccgaggcaagttgacggtattttcagtta

SEQ ID NO: 128760 - DNA, 1775 bp, Homo sapiens
  Payload ID: 5189
  Gene Symbol: DTNB
  Gene Name: dystrobrevin, beta
  ENST ID: ENST00000356599
  CDS Start-End: 213-404
tcgcgccctcgcgccgggggcgggcgctgcgcgtgccgggcggagaagcggcgcgagccgggcgctgcgaacgttcgccgcgggggtggctccggggcctgagtaggcgctgccgctgcctcagccgagggggctgggccggagcgtgcggaggagtgaggccgcaggagaccttcccgacgacccctgctccggcggggaagtgagcaaggatgattgaggaaagtgggaacaagcggaagaccatggcagagaagaggcagctgttcatagaaatgcgtgctcagaattttgatgtcatacgactatcaacttacagaacagcctgcaaattacgatttgtacaaaaacgatgcaaccagaaagataatgctaaatatgtttttagacacaatgatggctgaccctcctccccagtgccttgtctggctacctctcatgcacaggcttgcccatgttgagaatgtcttccatcccgtggagtgctcctactgccgatgtgagagtatgatgggtttccggtaccgatgccagcagtgccacaactatcagctctgccagaattgcttttggcgtggccatgccggcggccctcacagcaaccagcaccagatgaaggagcattcctcttggaaatctcctgcaaagaagctgagccatgcaattagtaaatctttggggtgtgtacccacgagagaacccccgcatcctgtttttcctgagcaaccagagaaaccacttgaccttgcacatatagttcctcctcgccctctgactaatatgaatgacaccatggttagccacatgtcctctggagtgcccactcccaccaagagtgttctggacagtcctagccgactggatgaggaacaccgtcttatagctcgctatgctgcccggctggctgcagaagcaggaaacgtgactcgtcctcccactgacttgagctttaactttgatgccaacaaacaacaaagacagcttattgcagaactggaaaacaaaaacagagagatcctgcaggagattcagcgtctccgcctggaacacgagcaggcctcccagcccacccctgagaaggcacagcagaaccccacgctgctggcagagctgcggctgctgaggcaaaggaaggatgaactggagcagaggatgtcggccctgcaggagagcaggcgggagctgatggtccagctggaagagctgatgaagttgctgaaggctcaggccacagggtcaccacatacatcgcccacccatggaggcggccggccaatgcccatgccagtgcgctccacgtctgccggctccacccccacccactgtccgcaggactcgctgagcggagtcgggggagacgtgcaggaggccttcgcacaaggtacgaggagaaacctccgcaatgacctgctggtggcagctgactccatcaccaacaccatgtcatccctggtgaaggagctccattcaggttagcagaggagccggacacagaggaagctcaggcacagaggacgaggagcaagctggcgccgacatggcgaaggcaaggtcttcccccagaggcacattcctctccatctttccaccgcacacctggaccaggcttgcaggctgccagacgtcactccacccgccagggagaggggagccagagccggtgggaagcggggaggggctgcgtggcacagctagtgggcctccccctgcacagccctgcatgtactagcaccttcatcactcccctcagggcatggtctcatctccgcatcagg

SEQ ID NO: 128761 - DNA, 2160 bp, Homo sapiens
  Payload ID: 5189
  Gene Symbol: DTNB
  Gene Name: dystrobrevin, beta
  ENST ID: ENST00000398951
  CDS Start-End: 167-616
agcggcgcgagccgggcgctgcgaacgttcgccgcgggggtggctccggggcctgagtaggcgctgccgctgcctcagccgagggggctgggccggagcgtgcggaggagtgaggccgcaggagaccttcccgacgacccctgctccggcggggaagtgagcaaggatgattgaggaaagtgggaacaagcggaagaccatggcagagaagaggcagctgttcatagaaatgcgtgctcagaattttgatgtcatacgactatcaacttacagaacagcctgcaaattacgatttgtacaaaaacgatgcaaccttcatcttgttgatatctggaacatgattgaagccttccgagacaatggccttaatacactggaccataccaccgagatcagtgtgtcccgcctcgaaactgtcatctcctccatctactatcagttgaacaagcgccttccttctactcaccaaattagtgtggaacaatctatcagcctcctcctcaactttatgattgctgcatatgacagtgagggccgaggcaagttgacggtattttcagttaaagctatgttagcaaccatgtgtggtggaaaaatgctggacaaattgagatagaaagataatgctaaatatgtttttagacacaatgatggctgaccctcctccccagtgccttgtctggctacctctcatgcacaggcttgcccatgttgagaatgtcttccatcccgtggagtgctcctactgccgatgtgagagtatgatgggtttccggtaccgatgccagcagtgccacaactatcagctctgccagaattgcttttggcgtggccatgccggcggccctcacagcaaccagcaccagatgaaggagcattcctcttggaaatctcctgcaaagaagctgagccatgcaattagtaaatctttggggtgtgtacccacgagagaacccccgcatcctgtttttcctgagcaaccagagaaaccacttgaccttgcacatatagttcctcctcgccctctgactaatatgaatgacaccatggttagccacatgtcctctggagtgcccactcccaccaagaggttacagtatagccaggatatacccagtcacttggccgatgagcatgcgctgatagcctcctatgtggcccgtctgcagcactgtgcacgtgttctggacagtcctagccgactggatgaggaacaccgtcttatagctcgctatgctgcccggctggctgcagaagcaggaaacgtgactcgtcctcccactgacttgagctttaactttgatgccaacaaacaacaaagacagcttattgcagaactggaaaacaaaaacagagagatcctgcaggagattcagcgtctccgcctggaacacgagcaggcctcccagcccacccctgagaaggcacagcagaaccccacgctgctggcagagctgcggctgctgaggcaaaggaaggatgaactggagcagaggatgtcggccctgcaggagagcaggcgggagctgatggtccagctggaagagctgatgaagttgctgaaggctcaggccacagggtcaccacatacatcgcccacccatggaggcggccggccaatgcccatgccagtgcgctccacgtctgccggctccacccccacccactgtccgcaggactcgctgagcggagtcgggggagacgtgcaggaggccttcgcacaaggtacgaggagaaacctccgcaatgacctgctggtggcagctgactccatcaccaacaccatgtcatccctggtgaaggagctccattcaggttagcagaggagccggacacagaggaagctcaggcacagaggacgaggagcaagctggcgccgacatggcgaaggcaaggtcttcccccagaggcacattcctctccatctttccaccgcacacctggaccaggcttgcaggctgccagacgtcactccacccgccagggagaggggagccagagccggtgggaagcggggaggggctgcgtggcacagctagtgggcctccccctgcacagccctgcatgtactagcaccttcatcactcccctcagggcatggtctcatctccgcatcaggaattcacctggaggttgaaaagagaaaagaaaaagcaccaa

SEQ ID NO: 128762 - DNA, 2474 bp, Homo sapiens
  Payload ID: 5189
  Gene Symbol: DTNB
  Gene Name: dystrobrevin, beta
  Uniprot ID: O60941
  ENST ID: ENST00000406818
  CDS Start-End: 251-2134
gggcgcgcgcccgcccatccgccctccgccctccgccctcgcgccctcgcgccgggggcgggcgctgcgcgtgccgggcggagaagcggcgcgagccgggcgctgcgaacgttcgccgcgggggtggctccggggcctgagtaggcgctgccgctgcctcagccgagggggctgggccggagcgtgcggaggagtgaggccgcaggagaccttcccgacgacccctgctccggcggggaagtgagcaaggatgattgaggaaagtgggaacaagcggaagaccatggcagagaagaggcagctgttcatagaaatgcgtgctcagaattttgatgtcatacgactatcaacttacagaacagcctgcaaattacgatttgtacaaaaacgatgcaaccttcatcttgttgatatctggaacatgattgaagccttccgagacaatggccttaatacactggaccataccaccgagatcagtgtgtcccgcctcgaaactgtcatctcctccatctactatcagttgaacaagcgccttccttctactcaccaaattagtgtggaacaatctatcagcctcctcctcaactttatgattgctgcatatgacagtgagggccgaggcaagttgacggtattttcagttaaagctatgttagcaaccatgtgtggtggaaaaatgctggacaaattgagatatgttttctcccagatgtcagattccaatggcttaatgatatttagcaagtttgaccagtttctgaaggaagttctgaagctcccaacagctgtctttgaagggccatcttttggttacacagagcactcagtccgcacctgttttccacagcagagaaagataatgctaaatatgtttttagacacaatgatggctgaccctcctccccagtgccttgtctggctacctctcatgcacaggcttgcccatgttgagaatgtcttccatcccgtggagtgctcctactgccgatgtgagagtatgatgggtttccggtaccgatgccagcagtgccacaactatcagctctgccagaattgcttttggcgtggccatgccggcggccctcacagcaaccagcaccagatgaaggagcattcctcttggaaatctcctgcaaagaagctgagccatgcaattagtaaatctttggggtgtgtacccacgagagaacccccgcatcctgtttttcctgagcaaccagagaaaccacttgaccttgcacatatagttcctcctcgccctctgactaatatgaatgacaccatggttagccacatgtcctctggagtgcccactcccaccaagaggttacagtatagccaggatatacccagtcacttggccgatgagcatgcgctgatagcctcctatgtggcccgtctgcagcactgtgcacgtgttctggacagtcctagccgactggatgaggaacaccgtcttatagctcgctatgctgcccggctggctgcagaagcaggaaacgtgactcgtcctcccactgacttgagctttaactttgatgccaacaaacaacaaagacagcttattgcagaactggaaaacaaaaacagagagatcctgcaggagattcagcgtctccgcctggaacacgagcaggcctcccagcccacccctgagaaggcacagcagaaccccacgctgctggcagagctgcggctgctgaggcaaaggaaggatgaactggagcagaggatgtcggccctgcaggagagcaggcgggagctgatggtccagctggaagagctgatgaagttgctgaaggaggaagagcaaaagcaggcagctcaggccacagggtcaccacatacatcgcccacccatggaggcggccggccaatgcccatgccagtgcgctccacgtctgccggctccacccccacccactgtccgcaggactcgctgagcggagtcgggggagacgtgcaggaggccttcgcacaaggtacgaggagaaacctccgcaatgacctgctggtggcagctgactccatcaccaacaccatgtcatccctggtgaaggagctccattcagcagaggaaggtgcagaggaagaagaagagaagatgcagaatgggaaagacagaggttagcagaggagccggacacagaggaagctcaggcacagaggacgaggagcaagctggcgccgacatggcgaaggcaaggtcttcccccagaggcacattcctctccatctttccaccgcacacctggaccaggcttgcaggctgccagacgtcactccacccgccagggagaggggagccagagccggtgggaagcggggaggggctgcgtggcacagctagtgggcctccccctgcacagccctgcatgtactagcaccttcatcactcccctcagggcatggtctcatctccgcatcaggaattcacctggaggttgaaaagagaaaagaaaaagcaccaa

SEQ ID NO: 128763 - DNA, 2294 bp, Homo sapiens
  Payload ID: 5189
  Gene Symbol: DTNB
  Gene Name: dystrobrevin, beta
  Uniprot ID: O60941
  ENST ID: ENST00000407038
  CDS Start-End: 251-1954
gggcgcgcgcccgcccatccgccctccgccctccgccctcgcgccctcgcgccgggggcgggcgctgcgcgtgccgggcggagaagcggcgcgagccgggcgctgcgaacgttcgccgcgggggtggctccggggcctgagtaggcgctgccgctgcctcagccgagggggctgggccggagcgtgcggaggagtgaggccgcaggagaccttcccgacgacccctgctccggcggggaagtgagcaaggatgattgaggaaagtgggaacaagcggaagaccatggcagagaagaggcagctgttcatagaaatgcgtgctcagaattttgatgtcatacgactatcaacttacagaacagcctgcaaattacgatttgtacaaaaacgatgcaaccttcatcttgttgatatctggaacatgattgaagccttccgagacaatggccttaatacactggaccataccaccgagatcagtgtgtcccgcctcgaaactgtcatctcctccatctactatcagttgaacaagcgccttccttctactcaccaaattagtgtggaacaatctatcagcctcctcctcaactttatgattgctgcatatgacagtgagggccgaggcaagttgacggtattttcagttaaagctatgttagcaaccatgtgtggtggaaaaatgctggacaaattgagatatgttttctcccagatgtcagattccaatggcttaatgatatttagcaagtttgaccagtttctgaaggaagttctgaagctcccaacagctgtctttgaagggccatcttttggttacacagagcactcagtccgcacctgttttccacagcagagaaagataatgctaaatatgtttttagacacaatgatggctgaccctcctccccagtgccttgtctggctacctctcatgcacaggcttgcccatgttgagaatgtcttccatcccgtggagtgctcctactgccgatgtgagagtatgatgggtttccggtaccgatgccagcagtgccacaactatcagctctgccagaattgcttttggcgtggccatgccggcggccctcacagcaaccagcaccagatgaaggagcattcctcttggaaatctcctgcaaagaagctgagccatgcaattagtaaatctttggggtgtgtacccacgagagaacccccgcatcctgtttttcctgagcaaccagagaaaccacttgaccttgcacatatagttcctcctcgccctctgactaatatgaatgacaccatggttagccacatgtcctctggagtgcccactcccaccaagagtgttctggacagtcctagccgactggatgaggaacaccgtcttatagctcgctatgctgcccggctggctgcagaagcaggaaacgtgactcgtcctcccactgacttgagctttaactttgatgccaacaaacaacaaagacagcttattgcagaactggaaaacaaaaacagagagatcctgcaggagattcagcgtctccgcctggaacacgagcaggcctcccagcccacccctgagaaggcacagcagaaccccacgctgctggcagagctgcggctgctgaggcaaaggaaggatgaactggagcagaggatgtcggccctgcaggagagcaggcgggagctgatggtccagctggaagagctgatgaagttgctgaaggaggaagagcaaaagcaggcagctcaggccacagggtcaccacatacatcgcccacccatggaggcggccggccaatgcccatgccagtgcgctccacgtctgccggctccacccccacccactgtccgcaggactcgctgagcggagtcgggggagacgtgcaggaggccttcgcacaagcagaggaaggtgcagaggaagaagaagagaagatgcagaatgggaaagacagaggttagcagaggagccggacacagaggaagctcaggcacagaggacgaggagcaagctggcgccgacatggcgaaggcaaggtcttcccccagaggcacattcctctccatctttccaccgcacacctggaccaggcttgcaggctgccagacgtcactccacccgccagggagaggggagccagagccggtgggaagcggggaggggctgcgtggcacagctagtgggcctccccctgcacagccctgcatgtactagcaccttcatcactcccctcagggcatggtctcatctccgcatcaggaattcacctggaggttgaaaagagaaaagaaaaagcaccaa

SEQ ID NO: 128764 - DNA, 2273 bp, Homo sapiens
  Payload ID: 5189
  Gene Symbol: DTNB
  Gene Name: dystrobrevin, beta
  Uniprot ID: O60941
  ENST ID: ENST00000405222
  CDS Start-End: 251-1933
gggcgcgcgcccgcccatccgccctccgccctccgccctcgcgccctcgcgccgggggcgggcgctgcgcgtgccgggcggagaagcggcgcgagccgggcgctgcgaacgttcgccgcgggggtggctccggggcctgagtaggcgctgccgctgcctcagccgagggggctgggccggagcgtgcggaggagtgaggccgcaggagaccttcccgacgacccctgctccggcggggaagtgagcaaggatgattgaggaaagtgggaacaagcggaagaccatggcagagaagaggcagctgttcatagaaatgcgtgctcagaattttgatgtcatacgactatcaacttacagaacagcctgcaaattacgatttgtacaaaaacgatgcaaccttcatcttgttgatatctggaacatgattgaagccttccgagacaatggccttaatacactggaccataccaccgagatcagtgtgtcccgcctcgaaactgtcatctcctccatctactatcagttgaacaagcgccttccttctactcaccaaattagtgtggaacaatctatcagcctcctcctcaactttatgattgctgcatatgacagtgagggccgaggcaagttgacggtattttcagttaaagctatgttagcaaccatgtgtggtggaaaaatgctggacaaattgagatatgttttctcccagatgtcagattccaatggcttaatgatatttagcaagtttgaccagtttctgaaggaagttctgaagctcccaacagctgtctttgaagggccatcttttggttacacagagcactcagtccgcacctgttttccacagcagagaaagataatgctaaatatgtttttagacacaatgatggctgaccctcctccccagtgccttgtctggctacctctcatgcacaggcttgcccatgttgagaatgtcttccatcccgtggagtgctcctactgccgatgtgagagtatgatgggtttccggtaccgatgccagcagtgccacaactatcagctctgccagaattgcttttggcgtggccatgccggcggccctcacagcaaccagcaccagatgaaggagcattcctcttggaaatctcctgcaaagaagctgagccatgcaattagtaaatctttggggtgtgtacccacgagagaacccccgcatcctgtttttcctgagcaaccagagaaaccacttgaccttgcacatatagttcctcctcgccctctgactaatatgaatgacaccatggttagccacatgtcctctggagtgcccactcccaccaagagtgttctggacagtcctagccgactggatgaggaacaccgtcttatagctcgctatgctgcccggctggctgcagaagcaggaaacgtgactcgtcctcccactgacttgagctttaactttgatgccaacaaacaacaaagacagcttattgcagaactggaaaacaaaaacagagagatcctgcaggagattcagcgtctccgcctggaacacgagcaggcctcccagcccacccctgagaaggcacagcagaaccccacgctgctggcagagctgcggctgctgaggcaaaggaaggatgaactggagcagaggatgtcggccctgcaggagagcaggcgggagctgatggtccagctggaagagctgatgaagttgctgaaggctcaggccacagggtcaccacatacatcgcccacccatggaggcggccggccaatgcccatgccagtgcgctccacgtctgccggctccacccccacccactgtccgcaggactcgctgagcggagtcgggggagacgtgcaggaggccttcgcacaagcagaggaaggtgcagaggaagaagaagagaagatgcagaatgggaaagacagaggttagcagaggagccggacacagaggaagctcaggcacagaggacgaggagcaagctggcgccgacatggcgaaggcaaggtcttcccccagaggcacattcctctccatctttccaccgcacacctggaccaggcttgcaggctgccagacgtcactccacccgccagggagaggggagccagagccggtgggaagcggggaggggctgcgtggcacagctagtgggcctccccctgcacagccctgcatgtactagcaccttcatcactcccctcagggcatggtctcatctccgcatcaggaattcacctggaggttgaaaagagaaaagaaaaagcaccaa

SEQ ID NO: 128765 - DNA, 2420 bp, Homo sapiens
  Payload ID: 5189
  Gene Symbol: DTNB
  Gene Name: dystrobrevin, beta
  Uniprot ID: O60941
  ENST ID: ENST00000407661
  CDS Start-End: 251-2080
gggcgcgcgcccgcccatccgccctccgccctccgccctcgcgccctcgcgccgggggcgggcgctgcgcgtgccgggcggagaagcggcgcgagccgggcgctgcgaacgttcgccgcgggggtggctccggggcctgagtaggcgctgccgctgcctcagccgagggggctgggccggagcgtgcggaggagtgaggccgcaggagaccttcccgacgacccctgctccggcggggaagtgagcaaggatgattgaggaaagtgggaacaagcggaagaccatggcagagaagaggcagctgttcatagaaatgcgtgctcagaattttgatgtcatacgactatcaacttacagaacagcctgcaaattacgatttgtacaaaaacgatgcaaccttcatcttgttgatatctggaacatgattgaagccttccgagacaatggccttaatacactggaccataccaccgagatcagtgtgtcccgcctcgaaactgtcatctcctccatctactatcagttgaacaagcgccttccttctactcaccaaattagtgtggaacaatctatcagcctcctcctcaactttatgattgctgcatatgacagtgagggccgaggcaagttgacggtattttcagttaaagctatgttagcaaccatgtgtggtggaaaaatgctggacaaattgagatatgttttctcccagatgtcagattccaatggcttaatgatatttagcaagtttgaccagtttctgaaggaagttctgaagctcccaacagctgtctttgaagggccatcttttggttacacagagcactcagtccgcacctgttttccacagcagagaaagataatgctaaatatgtttttagacacaatgatggctgaccctcctccccagtgccttgtctggctacctctcatgcacaggcttgcccatgttgagaatgtcttccatcccgtggagtgctcctactgccgatgtgagagtatgatgggtttccggtaccgatgccagcagtgccacaactatcagctctgccagaattgcttttggcgtggccatgccggcggccctcacagcaaccagcaccagatgaaggagcattcctcttggaaatctcctgcaaagaagctgagccatgcaattagtaaatctttggggtgtgtacccacgagagaacccccgcatcctgtttttcctgagcaaccagagaaaccacttgaccttgcacatatagttcctcctcgccctctgactaatatgaatgacaccatggttagccacatgtcctctggagtgcccactcccaccaagaggttacagtatagccaggatatacccagtcacttggccgatgagcatgcgctgatagcctcctatgtggcccgtctgcagcactgtgcacgtgttctggacagtcctagccgactggatgaggaacaccgtcttatagctcgctatgctgcccggctggctgcagaagcaggaaacgtgactcgtcctcccactgacttgagctttaactttgatgccaacaaacaacaaagacagcttattgcagaactggaaaacaaaaacagagagatcctgcaggagattcagcgtctccgcctggaacacgagcaggcctcccagcccacccctgagaaggcacagcagaaccccacgctgctggcagagctgcggctgctgaggcaaaggaaggatgaactggagcagaggatgtcggccctgcaggagagcaggcgggagctgatggtccagctggaagagctgatgaagttgctgaaggaggaagagcaaaagcaggcagctcaggccacagggtcaccacatacatcgcccacccatggaggcggccggccaatgcccatgccagtgcgctccacgtctgccggctccacccccacccactgtccgcaggactcgctgagcggagtcgggggagacgtgcaggaggccttcgcacaaggtacgaggagaaacctccgcaatgacctgctggtggcagctgactccatcaccaacaccatgtcatccctggtgaaggagctccattcaggttagcagaggagccggacacagaggaagctcaggcacagaggacgaggagcaagctggcgccgacatggcgaaggcaaggtcttcccccagaggcacattcctctccatctttccaccgcacacctggaccaggcttgcaggctgccagacgtcactccacccgccagggagaggggagccagagccggtgggaagcggggaggggctgcgtggcacagctagtgggcctccccctgcacagccctgcatgtactagcaccttcatcactcccctcagggcatggtctcatctccgcatcaggaattcacctggaggttgaaaagagaaaagaaaaagcaccaa

SEQ ID NO: 128766 - DNA, 2384 bp, Homo sapiens
  Payload ID: 5189
  Gene Symbol: DTNB
  Gene Name: dystrobrevin, beta
  Uniprot ID: O60941
  ENST ID: ENST00000404103
  CDS Start-End: 251-2044
gggcgcgcgcccgcccatccgccctccgccctccgccctcgcgccctcgcgccgggggcgggcgctgcgcgtgccgggcggagaagcggcgcgagccgggcgctgcgaacgttcgccgcgggggtggctccggggcctgagtaggcgctgccgctgcctcagccgagggggctgggccggagcgtgcggaggagtgaggccgcaggagaccttcccgacgacccctgctccggcggggaagtgagcaaggatgattgaggaaagtgggaacaagcggaagaccatggcagagaagaggcagctgttcatagaaatgcgtgctcagaattttgatgtcatacgactatcaacttacagaacagcctgcaaattacgatttgtacaaaaacgatgcaaccttcatcttgttgatatctggaacatgattgaagccttccgagacaatggccttaatacactggaccataccaccgagatcagtgtgtcccgcctcgaaactgtcatctcctccatctactatcagttgaacaagcgccttccttctactcaccaaattagtgtggaacaatctatcagcctcctcctcaactttatgattgctgcatatgacagtgagggccgaggcaagttgacggtattttcagttaaagctatgttagcaaccatgtgtggtggaaaaatgctggacaaattgagatatgttttctcccagatgtcagattccaatggcttaatgatatttagcaagtttgaccagtttctgaaggaagttctgaagctcccaacagctgtctttgaagggccatcttttggttacacagagcactcagtccgcacctgttttccacagcagagaaagataatgctaaatatgtttttagacacaatgatggctgaccctcctccccagtgccttgtctggctacctctcatgcacaggcttgcccatgttgagaatgtcttccatcccgtggagtgctcctactgccgatgtgagagtatgatgggtttccggtaccgatgccagcagtgccacaactatcagctctgccagaattgcttttggcgtggccatgccggcggccctcacagcaaccagcaccagatgaaggagcattcctcttggaaatctcctgcaaagaagctgagccatgcaattagtaaatctttggggtgtgtacccacgagagaacccccgcatcctgtttttcctgagcaaccagagaaaccacttgaccttgcacatatagttcctcctcgccctctgactaatatgaatgacaccatggttagccacatgtcctctggagtgcccactcccaccaagaggttacagtatagccaggatatacccagtcacttggccgatgagcatgcgctgatagcctcctatgtggcccgtctgcagcactgtgcacgtgttctggacagtcctagccgactggatgaggaacaccgtcttatagctcgctatgctgcccggctggctgcagaagcaggaaacgtgactcgtcctcccactgacttgagctttaactttgatgccaacaaacaacaaagacagcttattgcagaactggaaaacaaaaacagagagatcctgcaggagattcagcgtctccgcctggaacacgagcaggcctcccagcccacccctgagaaggcacagcagaaccccacgctgctggcagagctgcggctgctgaggcaaaggaaggatgaactggagcagaggatgtcggccctgcaggagagcaggcgggagctgatggtccagctggaagagctgatgaagttgctgaaggaggaagagcaaaagcaggcagctcaggccacagggtcaccacatacatcgcccacccatggaggcggccggccaatgcccatgccagtgcgctccacgtctgccggctccacccccacccactgtccgcaggactcgctgagcggagtcgggggagacgtgcaggaggccttcgcacaagcagaggaaggtgcagaggaagaagaagagaagatgcagaatgggaaagacagaggttagcagaggagccggacacagaggaagctcaggcacagaggacgaggagcaagctggcgccgacatggcgaaggcaaggtcttcccccagaggcacattcctctccatctttccaccgcacacctggaccaggcttgcaggctgccagacgtcactccacccgccagggagaggggagccagagccggtgggaagcggggaggggctgcgtggcacagctagtgggcctccccctgcacagccctgcatgtactagcaccttcatcactcccctcagggcatggtctcatctccgcatcaggaattcacctggaggttgaaaagagaaaagaaaaagcaccaa

SEQ ID NO: 128767 - DNA, 2275 bp, Homo sapiens
  Payload ID: 5189
  Gene Symbol: DTNB
  Gene Name: dystrobrevin, beta
  ENST ID: ENST00000407186
  CDS Start-End: 178-1950
ccgggcggagaagcggcgcgagccgggcgctgcgaacgttcgccgcgggggtggctccggggcctgagtaggcgctgccgctgcctcagccgagggggctgggccggagcgtgcggaggagtgaggccgcaggagaccttcccgacgacccctgctccggcggggaagtgagcaaggatgattgaggaaagtgggaacaagcggaagaccatggcagagaagaggcagctgttcatagaaatgcgtgctcagaattttgatgtcatacgactatcaacttacagaacagcctgcaaattacgatttgtacaaaaacgatgcaaccttcatcttgttgatatctggaacatgattgaagccttccgagacaatggccttaatacactggaccataccaccgagatcagtgtgtcccgcctcgaaactgtcatctcctccatctactatcagttgaacaagcgccttccttctactcaccaaattagtgtggaacaatctatcagcctcctcctcaactttatgattgctgcatatgacagtgagggccgaggcaagttgacggtattttcagttaaagctatgttagcaaccatgtgtggtggaaaaatgctggacaaattgagatatgttttctcccagatgtcagattccaatggcttaatgatatttagcaagtttgaccagtttctgaaggaagttctgaagctcccaacagctgtctttgaagggccatcttttggttacacagagcactcagtccgcacctgttttccacagcagagaaagataatgctaaatatgtttttagacacaatgatggctgaccctcctccccagtgccttgtctggctacctctcatgcacaggcttgcccatgttgagaatgtcttccatcccgtggagtgctcctactgccgatgtgagagtatgatgggtttccggtaccgatgccagcagtgccacaactatcagctctgccagaattgcttttggcgtggccatgccggcggccctcacagcaaccagcaccagatgaaggagcattcctcttggaaatctcctgcaaagaagctgagccatgcaattagtaaatctttggggtgtgtacccacgagagaacccccgcatcctgtttttcctgagcaaccagagaaaccacttgaccttgcacatatagttcctcctcgccctctgactaatatgaatgacaccatggttagccacatgtcctctggagtgcccactcccaccaagagtgttctggacagtcctagccgactggatgaggaacaccgtcttatagctcgctatgctgcccggctggctgcagaagcaggaaacgtgactcgtcctcccactgacttgagctttaactttgatgccaacaaacaacaaagacagcttattgcagaactggaaaacaaaaacagagagatcctgcaggagattcagcgtctccgcctggaacacgagcaggcctcccagcccacccctgagaaggcacagcagaaccccacgctgctggcagagctgcggctgctgaggcaaaggaaggatgaactggagcagaggatgtcggccctgcaggagagcaggcgggagctgatggtccagctggaagagctgatgaagttgctgaaggctcaggccacagggtcaccacatacatcgcccacccatggaggcggccggccaatgcccatgccagtgcgctccacgtctgccggctccacccccacccactgtccgcaggactcgctgagcggagtcgggggagacgtgcaggaggccttcgcacaaggtacgaggagaaacctccgcaatgacctgctggtggcagctgactccatcaccaacaccatgtcatccctggtgaaggagctccattcagcagaggaaggtgcagaggaagaagaagagaagatgcagaatgggaaagacagaggttagcagaggagccggacacagaggaagctcaggcacagaggacgaggagcaagctggcgccgacatggcgaaggcaaggtcttcccccagaggcacattcctctccatctttccaccgcacacctggaccaggcttgcaggctgccagacgtcactccacccgccagggagaggggagccagagccggtgggaagcggggaggggctgcgtggcacagctagtgggcctccccctgcacagccctgcatgtactagcaccttcatcactcccctcagggcatggtctcatctccgcatcaggaattcacctggaggttgaaaagagaa

SEQ ID NO: 128768 - DNA, 2328 bp, Homo sapiens
  Payload ID: 5189
  Gene Symbol: DTNB
  Gene Name: dystrobrevin, beta
  Uniprot ID: O60941
  ENST ID: ENST00000496972
  CDS Start-End: 306-1943
aaacacagtaattcctgatactaagaagaggctggggtgccttaagtaatacgcatgcaggcgttgatggggtagagatctgaagtagtcctgccaagaactgggtttacttctttgtgaatgttactactcttacacagaaacctcatatgaattatcatcctctgacttaaggataacagtcagtctgggagacgtttggtgctcagaattttgatgtcatacgactatcaacttacagaacagcctgcaaattacgatttgtacaaaaacgatgcaaccttcatcttgttgatatctggaacatgattgaagccttccgagacaatggccttaatacactggaccataccaccgagatcagtgtgtcccgcctcgaaactgtcatctcctccatctactatcagttgaacaagcgccttccttctactcaccaaattagtgtggaacaatctatcagcctcctcctcaactttatgattgctgcatatgacagtgagggccgaggcaagttgacggtattttcagttaaagctatgttagcaaccatgtgtggtggaaaaatgctggacaaattgagatatgttttctcccagatgtcagattccaatggcttaatgatatttagcaagtttgaccagtttctgaaggaagttctgaagctcccaacagctgtctttgaagggccatcttttggttacacagagcactcagtccgcacctgttttccacagcagagaaagataatgctaaatatgtttttagacacaatgatggctgaccctcctccccagtgccttgtctggctacctctcatgcacaggcttgcccatgttgagaatgtcttccatcccgtggagtgctcctactgccgatgtgagagtatgatgggtttccggtaccgatgccagcagtgccacaactatcagctctgccagaattgcttttggcgtggccatgccggcggccctcacagcaaccagcaccagatgaaggagcattcctcttggaaatctcctgcaaagaagctgagccatgcaattagtaaatctttggggtgtgtacccacgagagaacccccgcatcctgtttttcctgagcaaccagagaaaccacttgaccttgcacatatagttcctcctcgccctctgactaatatgaatgacaccatggttagccacatgtcctctggagtgcccactcccaccaagaggttacagtatagccaggatatacccagtcacttggccgatgagcatgcgctgatagcctcctatgtggcccgtctgcagcactgtgcacgtgttctggacagtcctagccgactggatgaggaacaccgtcttatagctcgctatgctgcccggctggctgcagaagcaggaaacgtgactcgtcctcccactgacttgagctttaactttgatgccaacaaacaacaaagacagcttattgcagaactggaaaacaaaaacagagagatcctgcaggagattcagcgtctccgcctggaacacgagcaggcctcccagcccacccctgagaaggcacagcagaaccccacgctgctggcagagctgcggctgctgaggcaaaggaaggatgaactggagcagaggatgtcggccctgcaggagagcaggcgggagctgatggtccagctggaagagctgatgaagttgctgaaggctcaggccacagggtcaccacatacatcgcccacccatggaggcggccggccaatgcccatgccagtgcgctccacgtctgccggctccacccccacccactgtccgcaggactcgctgagcggagtcgggggagacgtgcaggaggccttcgcacaaggtacgaggagaaacctccgcaatgacctgctggtggcagctgactccatcaccaacaccatgtcatccctggtgaaggagctccattcaggttagcagaggagccggacacagaggaagctcaggcacagaggacgaggagcaagctggcgccgacatggcgaaggcaaggtcttcccccagaggcacattcctctccatctttccaccgcacacctggaccaggcttgcaggctgccagacgtcactccacccgccagggagaggggagccagagccggtgggaagcggggaggggctgcgtggcacagctagtgggcctccccctgcacagccctgcatgtactagcaccttcatcactcccctcagggcatggtctcatctccgcatcaggaattcacctggaggttgaaaagagaaaagaaaaagcaccaagctcttgtgtgtttgtgacctgatgaaacacttcctggcgtctgg

SEQ ID NO: 128769 - DNA, 5522 bp, Homo sapiens
  Payload ID: 5190
  Gene Symbol: DAG1
  Gene Name: dystroglycan 1 (dystrophin-associated glycoprotein 1)
  Uniprot ID: Q14118
  ENST ID: ENST00000308775
  CDS Start-End: 419-3106
aggcagaagccggcggcgcgcggacagccagtcggcgccgcgcggagctggccgctggattggctgcaacactcgcgtgtcaggcggttgctaggctccggccgcgcgccccgcccttgcgctcagcgccctctcaccgcccggtacgtgctcgcgcgaaggctgcggcgcggcgctcgcgcctcttaggcttggcggtggcggcggcggcagcttcgcgccgaatccccggggagcggcggtggcggcgtcctggggccaggaggagcgaacacctgccgcggtcctcccgccggcgctgggctctgtgtgctccgggatggagcaggtgtgcagagggtgagaacccagctctgggaccaagtcacttgcttccttacttagcaagactatcgacttgagcaaacttggacctgggatgaggatgtctgtgggcctctcgctgctgctgcccctctcggggaggacctttctcctcctgctctctgtggttatggctcagtcccactggcccagtgaaccctcagaggctgtcagggactgggaaaaccagcttgaggcatccatgcactcagtgctctcagacctccacgaggctgttcccacagtggttggcattcctgatggcacggctgtcgtcgggcgctcatttcgagtgaccattccaacagatttgattgcctccagtggagatatcatcaaggtatcagcggcagggaaggaggctttgccatcttggctgcactgggactcacagagccacaccctggagggcctcccccttgacactgataagggtgtgcattacatttcagtgagcgctacacggctgggggccaacgggagccacatcccccagacctccagtgtgttctccatcgaggtctaccctgaagaccacagtgagctgcagtcggtgaggacagcctccccagaccctggtgaggtggtatcatctgcctgtgctgcggatgaacctgtgactgttttgacggtgattttggatgccgacctcaccaagatgaccccaaagcaaaggattgacctcctgcacaggatgcggagcttctcagaagtagagcttcacaacatgaaattagtgccggtggtgaataacagactatttgacatgtcggccttcatggctggcccgggaaatgcaaaaaaggtggtggagaatggggcccttctctcctggaagctgggctgctccctgaaccagaacagtgtgcctgacattcatggtgtagaggcccctgccagggagggcgcaatgtctgctcagcttggctaccctgtggtgggttggcacatcgccaataagaagccccctcttcccaaacgcgtccggaggcagatccatgctacacccacacctgtcactgccattgggcccccaaccacggctatccaggagcccccatccaggatcgtgccaacccccacatctccagccattgctcctccaacagagaccatggctcctccagtcagggatcctgttcctgggaaacccacggtcaccatccggactcgaggcgccattattcaaaccccaaccctaggccccatccagcctactcgggtgtcagaagctggcaccacagttcctggccagattcgcccaacgatgaccattcctggctatgtggagcctactgcagttgctacccctcccacaaccaccaccaagaagccacgagtatccacaccaaaaccagcaacgccttcaactgactccaccaccaccacgactcgcaggccaaccaagaaaccacggacaccccggccagtgccccgggtcaccaccaaagtttccatcaccagattggaaactgcctcaccgcctactcgtattcgcaccaccaccagtggagtgccccgtggcggagaacccaaccagcgcccagagctcaagaaccatattgacagggtagatgcctgggttggcacctactttgaggtgaagatcccgtcagacactttctatgaccatgaggacaccaccactgacaagctgaagctgaccctgaaactgcgggagcagcagctggtgggcgagaagtcctgggtacagttcaacagcaacagccagctcatgtatggccttcccgacagcagccacgtgggcaaacacgagtatttcatgcatgccacagacaaggggggcctgtcggctgtggatgccttcgagatccacgtccacaggcgcccccaaggggatagggctcctgcaaggttcaaggccaagtttgtgggtgacccggcactggtgttgaatgacatccacaagaagattgccttggtaaagaaactggccttcgcctttggagaccgaaactgtagcaccatcaccctgcagaatatcacccggggctccatcgtggtggaatggaccaacaacacactgcccttggagccctgccccaaggagcagatcgctgggctgagccgccggatcgctgaggatgatggaaaacctcggcctgccttctccaacgccctagagcctgactttaaggccacaagcatcactgtgacgggctctggcagttgtcggcacctacagtttatccctgtggtaccacccaggagagtgccctcagaggcgccgcccacagaagtgcctgacagggaccctgagaagagcagtgaggatgatgtctacctgcacacagtcattccggccgtggtggtcgcagccatcctgctcattgctggcatcattgccatgatctgctaccgcaagaagcggaagggcaagcttacccttgaggaccaggccaccttcatcaagaagggggtgcctatcatctttgcagacgaactggacgactccaagcccccaccctcctccagcatgccactcattctgcaggaggagaaggctcccctaccccctcctgagtaccccaaccagagtgtgcccgagaccactcctctgaaccaggacaccatgggagagtacacgcccctgcgggatgaggatcccaatgcgcctccctaccagcccccaccgcccttcacagcacccatggagggcaagggctcccgtcccaagaacatgaccccataccggtcacctcctccctatgtcccaccttaacccgcaagcgcctgggtggaggcagggtagggcaggggcctggagacgacatggtgttgtctgtggagaccggtggcctgcagaccattgcccaccgggagccgacacctgacctagcacacactgacacaggggcctggacaagcccgccctctctggtcctcccaaaccccaaagcagctggagagactttggggacttttttatttttattttttgcctaacagcttttggtttgttcatagagaattcttcgcttcatttttgatggctggctctgaaagcaccatgtggagtggaggtggagggagcgaggaaccatgaatgaactcgcaggcagtgccgggcggccccctggctctctgcgttttgcctttaacactaactgtactgttttttctattcacgtgtgtctagctgcaggatgtaacatggaaaacagtaactaaagattaaattcaaaggactttcagaagttaaggttaagtttttacgtttaatctgctgtttacctaaacttgtatgtataatttttgggtgggtatggggaattgctttgctaaaaataagctcccagggtgtttcaaacttagagaagaccaagggacagtattttttatcaaaggaatactattttttcacactacgtcaacttggttgctctgataccccagagcctgattgggggcctcccggccctggctcacgccaagtccctggtgctgggtttgctctcccgctgttgccaggggctggaagctggaggggtctcttgggccatggacatccccacttccagcccatgtacactagtggcccacgaccaaggggtcttcatttccatgaaaaagggactccaagaggcagtggtggctgtggcccccaactttggtgctccagggtgggccagctgcttgtgggggcacctgggaggtcaaaggtctccaccacatcaacctattttgttttaccctttttctgtgcattgtttttttttttcctcctaaaaggaatatcacggttttttgaaacactcagtgggggacattttggtgaagatgcaatatttttatgtcatgtgatgctctttcctcacttgaccttggccgctttgtcctaacagtccacagtcctgccccgacccaccccatcccttttctctggcactccagtcccaggccttgggcctgaactactggaaaaggtctggcggctggggaggagtgccagcaatagttcataataaaaatctgttagctctcaaagctaattttttactaaagtttttatacagcctcaaattgttttattaaaaaaaagatttaaaatggtgatgcttacagcagtttgtacgagctcttaagtgttgattccatggaactgacggctttgcttgttttgattcttttccccctacttttcctaatggtttaaattctggaattacactggggttcttttgccttttttagcagaacatccgtccgtccatctgcatctctgtcccatgactcaggggcgcccactctgcttcgattctcctcctgtggaagaaaccattttgagcatgacttttcttgatgtctgaagcgttattttgggtactttttagggaggaatgcctttcgcaataatgtatccattccctgattgagggtgggtgggtggacccaggctccctttgcacacagagcagctacttctaagccatatcgactgttttgcagaggatttgtgtgtgctgcctcaggaggggagggctggtaggagggggggagaggtctctgtcctactgctctccagagggcatttccccttgcgccttctcccacagggcccagcccctctcccctgccccagtccccagggggtactctggagtgagcagtgcccctgtgggggagcctgtaaatgcgggctcagtggaccactggtgactgggctcatgcctccaagtcagagtttccctggtgccccagagacaggagcacaagtgggatctgacctggtgagattatttctgatgacctcatcaaaaaataaacaattcccaatgttccaggtgagggctttgaaaggccttccaaacagctccgtcgcccctagcaactccaccattgggcactgccatgcagagacgtggctggcccagaatggcctgttgccatagcaactggaggcgatggggcagtgaacagaataacaacagcaacaatgcctttgcaggcagcctgctcccctgagcgctgggctggtgatggtcgttggactctgtgagatggagagccaatctcacattcaagtgttcaccaaccactgatgtgtttttatttccttctatatgattttaagatgtgttttctgcattctgtaaagaaacatatcaaactaaataaaagcagtgtctttattacaa

SEQ ID NO: 128770 - DNA, 547 bp, Homo sapiens
  Payload ID: 5190
  Gene Symbol: DAG1
  Gene Name: dystroglycan 1 (dystrophin-associated glycoprotein 1)
  ENST ID: ENST00000452317
  CDS Start-End: 425-547
acgtgctcgcgcgaaggctgcggcgcggcgctcgcgcctcttaggcttggcggtggcggcggcggcagcttcgcgccgaatccccggggagcggcggtggcggcgtcctggggccaggaggagcgaacacctgccgcggtcctcccgccggcgctggatagccctgggatctcctgaatttccaggttgggctactcaggcatggattgactcctacagttcaggcggatggagatcccaccaacccacagcttaattcttcagatgctttatcttcatttctcatgtatcttcagttggcttctaatgctctgtgtgctccgggatggagcaggtgtgcagagggtgagaacccagctctgggaccaagtcacttgcttccttacttagcaagactatcgacttgagcaaacttggacctgggatgaggatgtctgtgggcctctcgctgctgctgcccctctcggggaggacctttctcctcctgctctctgtggttatggctcagtcccactggcccagtgaaccctcagaggctgtcagggac

SEQ ID NO: 128771 - DNA, 549 bp, Homo sapiens
  Payload ID: 5190
  Gene Symbol: DAG1
  Gene Name: dystroglycan 1 (dystrophin-associated glycoprotein 1)
  ENST ID: ENST00000431960
  CDS Start-End: 197-549
cttgcgctcagcgccctctcaccgcccgggccactgctctccaggaagataaggcttttaaagcagcctagcactagaaggctctgtgtgctccgggatggagcaggtgtgcagagggtgagaacccagctctgggaccaagtcacttgcttccttacttagcaagactatcgacttgagcaaacttggacctgggatgaggatgtctgtgggcctctcgctgctgctgcccctctcggggaggacctttctcctcctgctctctgtggttatggctcagtcccactggcccagtgaaccctcagaggctgtcagggactgggaaaaccagcttgaggcatccatgcactcagtgctctcagacctccacgaggctgttcccacagtggttggcattcctgatggcacggctgtcgtcgggcgctcatttcgagtgaccattccaacagatttgattgcctccagtggagatatcatcaaggtatcagcggcagggaaggaggctttgccatcttggctgcactgggactcacagagccacaccctgga

SEQ ID NO: 128772 - DNA, 841 bp, Homo sapiens
  Payload ID: 5190
  Gene Symbol: DAG1
  Gene Name: dystroglycan 1 (dystrophin-associated glycoprotein 1)
  ENST ID: ENST00000428779
  CDS Start-End: 555-841
cgcggcgctcgcgcctcttaggcttggcggtggcggcggcggcagcttcgcgccgaatccccggggagcggcggtggcggcgtcctggggccaggaggagcgaacacctgccgcggtcctcccgccggcgctggacctggttcacctgcgagtgtatttggatagtgtctccacagaaaatgtcgtctcggcttggaatctttttgccataaattctaaggccactgctctccaggaagataaggcttttaaagcagcctagcactagaaggtgaggcacacgactgtctatcccagatggctgcactggcctaggacagacggttcttcccccagtacgtcaagaccctggagggtgcaagctacagaacagctgggctcctgcattcctcccagaccctgtcttcagtaggacaacaggcaacaaacttaaatttggctctgtgtgctccgggatggagcaggtgtgcagagggtgagaacccagctctgggaccaagtcacttgcttccttacttagcaagactatcgacttgagcaaacttggacctgggatgaggatgtctgtgggcctctcgctgctgctgcccctctcggggaggacctttctcctcctgctctctgtggttatggctcagtcccactggcccagtgaaccctcagaggctgtcagggactgggaaaaccagcttgaggcatccatgcactcagtgctctcagacctccacgaggctgttcccacagtggttggcattcctgatggcacggctgtcgtcgggcgctcatttcgagtgaccattccaacagatttgattgcctccagtggagatatcatcaaggt

SEQ ID NO: 128773 - DNA, 397 bp, Homo sapiens
  Payload ID: 5190
  Gene Symbol: DAG1
  Gene Name: dystroglycan 1 (dystrophin-associated glycoprotein 1)
  ENST ID: ENST00000430636
  CDS Start-End: 372-397
aggcttggcggtggcggcggcggcagcttcgcgccgaatccccggggagcggcggtggcggcgtcctggggccaggaggagcgaacacctgccgcggtcctcccgccggcgctgggtgagtgcaccgcccgccctatccgctgtgcctggctgcttgggcccccatccctgctgccggctgagccttccgcggaacacctgctgctgctcgctgttcggcccggggcggggacacggccgcggacgtccttgtgggctctgtgtgctccgggatggagcaggtgtgcagagggtgagaacccagctctgggaccaagtcacttgcttccttacttagcaagactatcgacttgagcaaacttggacctgggatgaggatgtctgtgggcctctcgct

SEQ ID NO: 128774 - DNA, 562 bp, Homo sapiens
  Payload ID: 5190
  Gene Symbol: DAG1
  Gene Name: dystroglycan 1 (dystrophin-associated glycoprotein 1)
  ENST ID: ENST00000419218
  CDS Start-End: 517-562
cttaggcttggcggtggcggcggcggcagcttcgcgccgaatccccggggagcggcggtggcggcgtcctggggccaggaggagcgaacacctgccgcggtcctcccgccggcgctgggcacacgactgtctatcccagatggctgcactggcctaggacagacggttcttcccccagtacgtcaagaccctggagggtgcaagctacagaacagctgggctcctgcattcctcccagaccctgtcttcagtaggacaacaggcaacaaacttaaatttgggattctcattctgtctcccatgctggagtgcagtggcgcggtcttggctcactgaaacctttgcttcccagggtcaagcgattcccctgcctcagcttcctgagtagctgggattacaggctctgtgtgctccgggatggagcaggtgtgcagagggtgagaacccagctctgggaccaagtcacttgcttccttacttagcaagactatcgacttgagcaaacttggacctgggatgaggatgtctgtgggcctctcgctgctgctgcccctctcgggga

SEQ ID NO: 128775 - DNA, 731 bp, Homo sapiens
  Payload ID: 5190
  Gene Symbol: DAG1
  Gene Name: dystroglycan 1 (dystrophin-associated glycoprotein 1)
  ENST ID: ENST00000418588
  CDS Start-End: 467-731
agaagccggcggcgcgcggacagccagtcggcgccgcgcggagctggccgctggattggctgcaacactcgcgtgtcaggcggttgctaggctccggccgcgcgccccgcccttgcgctcagcgccctctcaccgcccggtacgtgctcgcgcgaaggctgcggcgcggcgctcgcgcctcttaggcttggcggtggcggcggcggcagcttcgcgccgaatccccggggagcggcggtggcggcgtcctggggccaggaggagcgaacacctgccgcggtcctcccgccggcgctggggccactgctctccaggaagataaggcttttaaagcagcctagcactagaaggctctgtgtgctccgggatggagcaggtgtgcagagggtgagaacccagctctgggaccaagtcacttgcttccttacttagcaagactatcgacttgagcaaacttggacctgggatgaggatgtctgtgggcctctcgctgctgctgcccctctcggggaggacctttctcctcctgctctctgtggttatggctcagtcccactggcccagtgaaccctcagaggctgtcagggactgggaaaaccagcttgaggcatccatgcactcagtgctctcagacctccacgaggctgttcccacagtggttggcattcctgatggcacggctgtcgtcgggcgctcatttcgagtgaccattccaacagatttgattgcct

SEQ ID NO: 128776 - DNA, 588 bp, Homo sapiens
  Payload ID: 5190
  Gene Symbol: DAG1
  Gene Name: dystroglycan 1 (dystrophin-associated glycoprotein 1)
  ENST ID: ENST00000452060
  CDS Start-End: 329-588
gtgctcgcgcgaaggctgcggcgcggcgctcgcgcctcttaggcttggcggtggcggcggcggcagcttcgcgccgaatccccggggagcggcggtggcggcgtcctggggccaggaggagcgaacacctgccgcggtcctcccgccggcgctggggccactgctctccaggaagataaggcttttaaagcagcctagcactagaaggtgaggctctgtgtgctccgggatggagcaggtgtgcagagggtgagaacccagctctgggaccaagtcacttgcttccttacttagcaagactatcgacttgagcaaacttggacctgggatgaggatgtctgtgggcctctcgctgctgctgcccctctcggggaggacctttctcctcctgctctctgtggttatggctcagtcccactggcccagtgaaccctcagaggctgtcagggactgggaaaaccagcttgaggcatccatgcactcagtgctctcagacctccacgaggctgttcccacagtggttggcattcctgatggcacggctgtcgtcgggcgctcatttcgagtgaccattccaacagatttgat

SEQ ID NO: 128777 - DNA, 579 bp, Homo sapiens
  Payload ID: 5190
  Gene Symbol: DAG1
  Gene Name: dystroglycan 1 (dystrophin-associated glycoprotein 1)
  ENST ID: ENST00000421560
  CDS Start-End: 260-579
aggcagaagccggcggcgcgcggacagccagtcggcgccgcgcggagctggccgctggattggctgcaacactcgcgtgtcaggcggttgctaggctccggccgcgcgccccgcccttgcgctcagcgccctctcaccgcccggctctgtgtgctccgggatggagcaggtgtgcagagggtgagaacccagctctgggaccaagtcacttgcttccttacttagcaagactatcgacttgagcaaacttggacctgggatgaggatgtctgtgggcctctcgctgctgctgcccctctcggggaggacctttctcctcctgctctctgtggttatggctcagtcccactggcccagtgaaccctcagaggctgtcagggactgggaaaaccagcttgaggcatccatgcactcagtgctctcagacctccacgaggctgttcccacagtggttggcattcctgatggcacggctgtcgtcgggcgctcatttcgagtgaccattccaacagatttgattgcctccagtggagatatcatcaaggtatcagcggcagggaaggaggctttgccatcttg

SEQ ID NO: 128778 - DNA, 624 bp, Homo sapiens
  Payload ID: 5190
  Gene Symbol: DAG1
  Gene Name: dystroglycan 1 (dystrophin-associated glycoprotein 1)
  ENST ID: ENST00000435508
  CDS Start-End: 394-550
acgtgctcgcgcgaaggctgcggcgcggcgctcgcgcctcttaggcttggcggtggcggcggcggcagcttcgcgccgaatccccggggagcggcggtggcggcgtcctggggccaggaggagcgaacacctgccgcggtcctcccgccggcgctggggattctcattctgtctcccatgctggagtgcagtggcgcggtcttggctcactgaaacctttgcttcccagggtcaagcgattcccctgcctcagcttcctgagtagctgggattacaggctctgtgtgctccgggatggagcaggtgtgcagagggtgagaacccagctctgggaccaagtcacttgcttccttacttagcaagactatcgacttgagcaaacttggacctgggatgaggatgtctgtgggcctctcgctgctgctgcccctctcggggaggacctttctcctcctgctctctgtggttatggctcagtcccactggcccagtgaaccctcagaggctgtcagggactgggaaaaccagcttgaggcatccatgcactcagtgctctcagacctccacgaggctgttcccacagtggttggcattcctgatggcacggctgtcgtcgggcgctca

SEQ ID NO: 128779 - DNA, 5582 bp, Homo sapiens
  Payload ID: 5190
  Gene Symbol: DAG1
  Gene Name: dystroglycan 1 (dystrophin-associated glycoprotein 1)
  Uniprot ID: Q14118
  ENST ID: ENST00000538711
  CDS Start-End: 476-3163
aggcagaagccggcggcgcgcggacagccagtcggcgccgcgcggagctggccgctggattggctgcaacactcgcgtgtcaggcggttgctaggctccggccgcgcgccccgcccttgcgctcagcgccctctcaccgcccggtacgtgctcgcgcgaaggctgcggcgcggcgctcgcgcctcttaggcttggcggtggcggcggcggcagcttcgcgccgaatccccggggagcggcggtggcggcgtcctggggccaggaggagcgaacacctgccgcggtcctcccgccggcgctggggccactgctctccaggaagataaggcttttaaagcagcctagcactagaaggtgaggctctgtgtgctccgggatggagcaggtgtgcagagggtgagaacccagctctgggaccaagtcacttgcttccttacttagcaagactatcgacttgagcaaacttggacctgggatgaggatgtctgtgggcctctcgctgctgctgcccctctcggggaggacctttctcctcctgctctctgtggttatggctcagtcccactggcccagtgaaccctcagaggctgtcagggactgggaaaaccagcttgaggcatccatgcactcagtgctctcagacctccacgaggctgttcccacagtggttggcattcctgatggcacggctgtcgtcgggcgctcatttcgagtgaccattccaacagatttgattgcctccagtggagatatcatcaaggtatcagcggcagggaaggaggctttgccatcttggctgcactgggactcacagagccacaccctggagggcctcccccttgacactgataagggtgtgcattacatttcagtgagcgctacacggctgggggccaacgggagccacatcccccagacctccagtgtgttctccatcgaggtctaccctgaagaccacagtgagctgcagtcggtgaggacagcctccccagaccctggtgaggtggtatcatctgcctgtgctgcggatgaacctgtgactgttttgacggtgattttggatgccgacctcaccaagatgaccccaaagcaaaggattgacctcctgcacaggatgcggagcttctcagaagtagagcttcacaacatgaaattagtgccggtggtgaataacagactatttgacatgtcggccttcatggctggcccgggaaatgcaaaaaaggtggtggagaatggggcccttctctcctggaagctgggctgctccctgaaccagaacagtgtgcctgacattcatggtgtagaggcccctgccagggagggcgcaatgtctgctcagcttggctaccctgtggtgggttggcacatcgccaataagaagccccctcttcccaaacgcgtccggaggcagatccatgctacacccacacctgtcactgccattgggcccccaaccacggctatccaggagcccccatccaggatcgtgccaacccccacatctccagccattgctcctccaacagagaccatggctcctccagtcagggatcctgttcctgggaaacccacggtcaccatccggactcgaggcgccattattcaaaccccaaccctaggccccatccagcctactcgggtgtcagaagctggcaccacagttcctggccagattcgcccaacgatgaccattcctggctatgtggagcctactgcagttgctacccctcccacaaccaccaccaagaagccacgagtatccacaccaaaaccagcaacgccttcaactgactccaccaccaccacgactcgcaggccaaccaagaaaccacggacaccccggccagtgccccgggtcaccaccaaagtttccatcaccagattggaaactgcctcaccgcctactcgtattcgcaccaccaccagtggagtgccccgtggcggagaacccaaccagcgcccagagctcaagaaccatattgacagggtagatgcctgggttggcacctactttgaggtgaagatcccgtcagacactttctatgaccatgaggacaccaccactgacaagctgaagctgaccctgaaactgcgggagcagcagctggtgggcgagaagtcctgggtacagttcaacagcaacagccagctcatgtatggccttcccgacagcagccacgtgggcaaacacgagtatttcatgcatgccacagacaaggggggcctgtcggctgtggatgccttcgagatccacgtccacaggcgcccccaaggggatagggctcctgcaaggttcaaggccaagtttgtgggtgacccggcactggtgttgaatgacatccacaagaagattgccttggtaaagaaactggccttcgcctttggagaccgaaactgtagcaccatcaccctgcagaatatcacccggggctccatcgtggtggaatggaccaacaacacactgcccttggagccctgccccaaggagcagatcgctgggctgagccgccggatcgctgaggatgatggaaaacctcggcctgccttctccaacgccctagagcctgactttaaggccacaagcatcactgtgacgggctctggcagttgtcggcacctacagtttatccctgtggtaccacccaggagagtgccctcagaggcgccgcccacagaagtgcctgacagggaccctgagaagagcagtgaggatgatgtctacctgcacacagtcattccggccgtggtggtcgcagccatcctgctcattgctggcatcattgccatgatctgctaccgcaagaagcggaagggcaagcttacccttgaggaccaggccaccttcatcaagaagggggtgcctatcatctttgcagacgaactggacgactccaagcccccaccctcctccagcatgccactcattctgcaggaggagaaggctcccctaccccctcctgagtaccccaaccagagtgtgcccgagaccactcctctgaaccaggacaccatgggagagtacacgcccctgcgggatgaggatcccaatgcgcctccctaccagcccccaccgcccttcacagcacccatggagggcaagggctcccgtcccaagaacatgaccccataccggtcacctcctccctatgtcccaccttaacccgcaagcgcctgggtggaggcagggtagggcaggggcctggagacgacatggtgttgtctgtggagaccggtggcctgcagaccattgcccaccgggagccgacacctgacctagcacacactgacacaggggcctggacaagcccgccctctctggtcctcccaaaccccaaagcagctggagagactttggggacttttttatttttattttttgcctaacagcttttggtttgttcatagagaattcttcgcttcatttttgatggctggctctgaaagcaccatgtggagtggaggtggagggagcgaggaaccatgaatgaactcgcaggcagtgccgggcggccccctggctctctgcgttttgcctttaacactaactgtactgttttttctattcacgtgtgtctagctgcaggatgtaacatggaaaacagtaactaaagattaaattcaaaggactttcagaagttaaggttaagtttttacgtttaatctgctgtttacctaaacttgtatgtataatttttgggtgggtatggggaattgctttgctaaaaataagctcccagggtgtttcaaacttagagaagaccaagggacagtattttttatcaaaggaatactattttttcacactacgtcaacttggttgctctgataccccagagcctgattgggggcctcccggccctggctcacgccaagtccctggtgctgggtttgctctcccgctgttgccaggggctggaagctggaggggtctcttgggccatggacatccccacttccagcccatgtacactagtggcccacgaccaaggggtcttcatttccatgaaaaagggactccaagaggcagtggtggctgtggcccccaactttggtgctccagggtgggccagctgcttgtgggggcacctgggaggtcaaaggtctccaccacatcaacctattttgttttaccctttttctgtgcattgtttttttttttcctcctaaaaggaatatcacggttttttgaaacactcagtgggggacattttggtgaagatgcaatatttttatgtcatgtgatgctctttcctcacttgaccttggccgctttgtcctaacagtccacagtcctgccccgacccaccccatcccttttctctggcactccagtcccaggccttgggcctgaactactggaaaaggtctggcggctggggaggagtgccagcaatagttcataataaaaatctgttagctctcaaagctaattttttactaaagtttttatacagcctcaaattgttttattaaaaaaaagatttaaaatggtgatgcttacagcagtttgtacgagctcttaagtgttgattccatggaactgacggctttgcttgttttgattcttttccccctacttttcctaatggtttaaattctggaattacactggggttcttttgccttttttagcagaacatccgtccgtccatctgcatctctgtcccatgactcaggggcgcccactctgcttcgattctcctcctgtggaagaaaccattttgagcatgacttttcttgatgtctgaagcgttattttgggtactttttagggaggaatgcctttcgcaataatgtatccattccctgattgagggtgggtgggtggacccaggctccctttgcacacagagcagctacttctaagccatatcgactgttttgcagaggatttgtgtgtgctgcctcaggaggggagggctggtaggagggggggagaggtctctgtcctactgctctccagagggcatttccccttgcgccttctcccacagggcccagcccctctcccctgccccagtccccagggggtactctggagtgagcagtgcccctgtgggggagcctgtaaatgcgggctcagtggaccactggtgactgggctcatgcctccaagtcagagtttccctggtgccccagagacaggagcacaagtgggatctgacctggtgagattatttctgatgacctcatcaaaaaataaacaattcccaatgttccaggtgagggctttgaaaggccttccaaacagctccgtcgcccctagcaactccaccattgggcactgccatgcagagacgtggctggcccagaatggcctgttgccatagcaactggaggcgatggggcagtgaacagaataacaacagcaacaatgcctttgcaggcagcctgctcccctgagcgctgggctggtgatggtcgttggactctgtgagatggagagccaatctcacattcaagtgttcaccaaccactgatgtgtttttatttccttctatatgattttaagatgtgttttctgcattctgtaaagaaacatatcaaactaaataaaagcagtgtctttattacaacgc

SEQ ID NO: 128780 - DNA, 5665 bp, Homo sapiens
  Payload ID: 5190
  Gene Symbol: DAG1
  Gene Name: dystroglycan 1 (dystrophin-associated glycoprotein 1)
  Uniprot ID: Q14118
  ENST ID: ENST00000539901
  CDS Start-End: 559-3246
aggcagaagccggcggcgcgcggacagccagtcggcgccgcgcggagctggccgctggattggctgcaacactcgcgtgtcaggcggttgctaggctccggccgcgcgccccgcccttgcgctcagcgccctctcaccgcccggtacgtgctcgcgcgaaggctgcggcgcggcgctcgcgcctcttaggcttggcggtggcggcggcggcagcttcgcgccgaatccccggggagcggcggtggcggcgtcctggggccaggaggagcgaacacctgccgcggtcctcccgccggcgctgggtgagtgcaccgcccgccctatccgctgtgcctggctgcttgggcccccatccctgctgccggctgagccttccgcggaacacctgctgctgctcgctgttcggcccggggcggggacacggccgcggacgtccttgtgggctctgtgtgctccgggatggagcaggtgtgcagagggtgagaacccagctctgggaccaagtcacttgcttccttacttagcaagactatcgacttgagcaaacttggacctgggatgaggatgtctgtgggcctctcgctgctgctgcccctctcggggaggacctttctcctcctgctctctgtggttatggctcagtcccactggcccagtgaaccctcagaggctgtcagggactgggaaaaccagcttgaggcatccatgcactcagtgctctcagacctccacgaggctgttcccacagtggttggcattcctgatggcacggctgtcgtcgggcgctcatttcgagtgaccattccaacagatttgattgcctccagtggagatatcatcaaggtatcagcggcagggaaggaggctttgccatcttggctgcactgggactcacagagccacaccctggagggcctcccccttgacactgataagggtgtgcattacatttcagtgagcgctacacggctgggggccaacgggagccacatcccccagacctccagtgtgttctccatcgaggtctaccctgaagaccacagtgagctgcagtcggtgaggacagcctccccagaccctggtgaggtggtatcatctgcctgtgctgcggatgaacctgtgactgttttgacggtgattttggatgccgacctcaccaagatgaccccaaagcaaaggattgacctcctgcacaggatgcggagcttctcagaagtagagcttcacaacatgaaattagtgccggtggtgaataacagactatttgacatgtcggccttcatggctggcccgggaaatgcaaaaaaggtggtggagaatggggcccttctctcctggaagctgggctgctccctgaaccagaacagtgtgcctgacattcatggtgtagaggcccctgccagggagggcgcaatgtctgctcagcttggctaccctgtggtgggttggcacatcgccaataagaagccccctcttcccaaacgcgtccggaggcagatccatgctacacccacacctgtcactgccattgggcccccaaccacggctatccaggagcccccatccaggatcgtgccaacccccacatctccagccattgctcctccaacagagaccatggctcctccagtcagggatcctgttcctgggaaacccacggtcaccatccggactcgaggcgccattattcaaaccccaaccctaggccccatccagcctactcgggtgtcagaagctggcaccacagttcctggccagattcgcccaacgatgaccattcctggctatgtggagcctactgcagttgctacccctcccacaaccaccaccaagaagccacgagtatccacaccaaaaccagcaacgccttcaactgactccaccaccaccacgactcgcaggccaaccaagaaaccacggacaccccggccagtgccccgggtcaccaccaaagtttccatcaccagattggaaactgcctcaccgcctactcgtattcgcaccaccaccagtggagtgccccgtggcggagaacccaaccagcgcccagagctcaagaaccatattgacagggtagatgcctgggttggcacctactttgaggtgaagatcccgtcagacactttctatgaccatgaggacaccaccactgacaagctgaagctgaccctgaaactgcgggagcagcagctggtgggcgagaagtcctgggtacagttcaacagcaacagccagctcatgtatggccttcccgacagcagccacgtgggcaaacacgagtatttcatgcatgccacagacaaggggggcctgtcggctgtggatgccttcgagatccacgtccacaggcgcccccaaggggatagggctcctgcaaggttcaaggccaagtttgtgggtgacccggcactggtgttgaatgacatccacaagaagattgccttggtaaagaaactggccttcgcctttggagaccgaaactgtagcaccatcaccctgcagaatatcacccggggctccatcgtggtggaatggaccaacaacacactgcccttggagccctgccccaaggagcagatcgctgggctgagccgccggatcgctgaggatgatggaaaacctcggcctgccttctccaacgccctagagcctgactttaaggccacaagcatcactgtgacgggctctggcagttgtcggcacctacagtttatccctgtggtaccacccaggagagtgccctcagaggcgccgcccacagaagtgcctgacagggaccctgagaagagcagtgaggatgatgtctacctgcacacagtcattccggccgtggtggtcgcagccatcctgctcattgctggcatcattgccatgatctgctaccgcaagaagcggaagggcaagcttacccttgaggaccaggccaccttcatcaagaagggggtgcctatcatctttgcagacgaactggacgactccaagcccccaccctcctccagcatgccactcattctgcaggaggagaaggctcccctaccccctcctgagtaccccaaccagagtgtgcccgagaccactcctctgaaccaggacaccatgggagagtacacgcccctgcgggatgaggatcccaatgcgcctccctaccagcccccaccgcccttcacagcacccatggagggcaagggctcccgtcccaagaacatgaccccataccggtcacctcctccctatgtcccaccttaacccgcaagcgcctgggtggaggcagggtagggcaggggcctggagacgacatggtgttgtctgtggagaccggtggcctgcagaccattgcccaccgggagccgacacctgacctagcacacactgacacaggggcctggacaagcccgccctctctggtcctcccaaaccccaaagcagctggagagactttggggacttttttatttttattttttgcctaacagcttttggtttgttcatagagaattcttcgcttcatttttgatggctggctctgaaagcaccatgtggagtggaggtggagggagcgaggaaccatgaatgaactcgcaggcagtgccgggcggccccctggctctctgcgttttgcctttaacactaactgtactgttttttctattcacgtgtgtctagctgcaggatgtaacatggaaaacagtaactaaagattaaattcaaaggactttcagaagttaaggttaagtttttacgtttaatctgctgtttacctaaacttgtatgtataatttttgggtgggtatggggaattgctttgctaaaaataagctcccagggtgtttcaaacttagagaagaccaagggacagtattttttatcaaaggaatactattttttcacactacgtcaacttggttgctctgataccccagagcctgattgggggcctcccggccctggctcacgccaagtccctggtgctgggtttgctctcccgctgttgccaggggctggaagctggaggggtctcttgggccatggacatccccacttccagcccatgtacactagtggcccacgaccaaggggtcttcatttccatgaaaaagggactccaagaggcagtggtggctgtggcccccaactttggtgctccagggtgggccagctgcttgtgggggcacctgggaggtcaaaggtctccaccacatcaacctattttgttttaccctttttctgtgcattgtttttttttttcctcctaaaaggaatatcacggttttttgaaacactcagtgggggacattttggtgaagatgcaatatttttatgtcatgtgatgctctttcctcacttgaccttggccgctttgtcctaacagtccacagtcctgccccgacccaccccatcccttttctctggcactccagtcccaggccttgggcctgaactactggaaaaggtctggcggctggggaggagtgccagcaatagttcataataaaaatctgttagctctcaaagctaattttttactaaagtttttatacagcctcaaattgttttattaaaaaaaagatttaaaatggtgatgcttacagcagtttgtacgagctcttaagtgttgattccatggaactgacggctttgcttgttttgattcttttccccctacttttcctaatggtttaaattctggaattacactggggttcttttgccttttttagcagaacatccgtccgtccatctgcatctctgtcccatgactcaggggcgcccactctgcttcgattctcctcctgtggaagaaaccattttgagcatgacttttcttgatgtctgaagcgttattttgggtactttttagggaggaatgcctttcgcaataatgtatccattccctgattgagggtgggtgggtggacccaggctccctttgcacacagagcagctacttctaagccatatcgactgttttgcagaggatttgtgtgtgctgcctcaggaggggagggctggtaggagggggggagaggtctctgtcctactgctctccagagggcatttccccttgcgccttctcccacagggcccagcccctctcccctgccccagtccccagggggtactctggagtgagcagtgcccctgtgggggagcctgtaaatgcgggctcagtggaccactggtgactgggctcatgcctccaagtcagagtttccctggtgccccagagacaggagcacaagtgggatctgacctggtgagattatttctgatgacctcatcaaaaaataaacaattcccaatgttccaggtgagggctttgaaaggccttccaaacagctccgtcgcccctagcaactccaccattgggcactgccatgcagagacgtggctggcccagaatggcctgttgccatagcaactggaggcgatggggcagtgaacagaataacaacagcaacaatgcctttgcaggcagcctgctcccctgagcgctgggctggtgatggtcgttggactctgtgagatggagagccaatctcacattcaagtgttcaccaaccactgatgtgtttttatttccttctatatgattttaagatgtgttttctgcattctgtaaagaaacatatcaaactaaataaaagcagtgtctttattacaacgc

SEQ ID NO: 128781 - DNA, 5676 bp, Homo sapiens
  Payload ID: 5190
  Gene Symbol: DAG1
  Gene Name: dystroglycan 1 (dystrophin-associated glycoprotein 1)
  Uniprot ID: Q14118
  ENST ID: ENST00000541308
  CDS Start-End: 570-3257
aggcagaagccggcggcgcgcggacagccagtcggcgccgcgcggagctggccgctggattggctgcaacactcgcgtgtcaggcggttgctaggctccggccgcgcgccccgcccttgcgctcagcgccctctcaccgcccggtacgtgctcgcgcgaaggctgcggcgcggcgctcgcgcctcttaggcttggcggtggcggcggcggcagcttcgcgccgaatccccggggagcggcggtggcggcgtcctggggccaggaggagcgaacacctgccgcggtcctcccgccggcgctggatagccctgggatctcctgaatttccaggttgggctactcaggcatggattgactcctacagttcaggcggatggagatcccaccaacccacagcttaattcttcagatgctttatcttcatttctcatgtatcttcagttggcttctaatgctctgtgtgctccgggatggagcaggtgtgcagagggtgagaacccagctctgggaccaagtcacttgcttccttacttagcaagactatcgacttgagcaaacttggacctgggatgaggatgtctgtgggcctctcgctgctgctgcccctctcggggaggacctttctcctcctgctctctgtggttatggctcagtcccactggcccagtgaaccctcagaggctgtcagggactgggaaaaccagcttgaggcatccatgcactcagtgctctcagacctccacgaggctgttcccacagtggttggcattcctgatggcacggctgtcgtcgggcgctcatttcgagtgaccattccaacagatttgattgcctccagtggagatatcatcaaggtatcagcggcagggaaggaggctttgccatcttggctgcactgggactcacagagccacaccctggagggcctcccccttgacactgataagggtgtgcattacatttcagtgagcgctacacggctgggggccaacgggagccacatcccccagacctccagtgtgttctccatcgaggtctaccctgaagaccacagtgagctgcagtcggtgaggacagcctccccagaccctggtgaggtggtatcatctgcctgtgctgcggatgaacctgtgactgttttgacggtgattttggatgccgacctcaccaagatgaccccaaagcaaaggattgacctcctgcacaggatgcggagcttctcagaagtagagcttcacaacatgaaattagtgccggtggtgaataacagactatttgacatgtcggccttcatggctggcccgggaaatgcaaaaaaggtggtggagaatggggcccttctctcctggaagctgggctgctccctgaaccagaacagtgtgcctgacattcatggtgtagaggcccctgccagggagggcgcaatgtctgctcagcttggctaccctgtggtgggttggcacatcgccaataagaagccccctcttcccaaacgcgtccggaggcagatccatgctacacccacacctgtcactgccattgggcccccaaccacggctatccaggagcccccatccaggatcgtgccaacccccacatctccagccattgctcctccaacagagaccatggctcctccagtcagggatcctgttcctgggaaacccacggtcaccatccggactcgaggcgccattattcaaaccccaaccctaggccccatccagcctactcgggtgtcagaagctggcaccacagttcctggccagattcgcccaacgatgaccattcctggctatgtggagcctactgcagttgctacccctcccacaaccaccaccaagaagccacgagtatccacaccaaaaccagcaacgccttcaactgactccaccaccaccacgactcgcaggccaaccaagaaaccacggacaccccggccagtgccccgggtcaccaccaaagtttccatcaccagattggaaactgcctcaccgcctactcgtattcgcaccaccaccagtggagtgccccgtggcggagaacccaaccagcgcccagagctcaagaaccatattgacagggtagatgcctgggttggcacctactttgaggtgaagatcccgtcagacactttctatgaccatgaggacaccaccactgacaagctgaagctgaccctgaaactgcgggagcagcagctggtgggcgagaagtcctgggtacagttcaacagcaacagccagctcatgtatggccttcccgacagcagccacgtgggcaaacacgagtatttcatgcatgccacagacaaggggggcctgtcggctgtggatgccttcgagatccacgtccacaggcgcccccaaggggatagggctcctgcaaggttcaaggccaagtttgtgggtgacccggcactggtgttgaatgacatccacaagaagattgccttggtaaagaaactggccttcgcctttggagaccgaaactgtagcaccatcaccctgcagaatatcacccggggctccatcgtggtggaatggaccaacaacacactgcccttggagccctgccccaaggagcagatcgctgggctgagccgccggatcgctgaggatgatggaaaacctcggcctgccttctccaacgccctagagcctgactttaaggccacaagcatcactgtgacgggctctggcagttgtcggcacctacagtttatccctgtggtaccacccaggagagtgccctcagaggcgccgcccacagaagtgcctgacagggaccctgagaagagcagtgaggatgatgtctacctgcacacagtcattccggccgtggtggtcgcagccatcctgctcattgctggcatcattgccatgatctgctaccgcaagaagcggaagggcaagcttacccttgaggaccaggccaccttcatcaagaagggggtgcctatcatctttgcagacgaactggacgactccaagcccccaccctcctccagcatgccactcattctgcaggaggagaaggctcccctaccccctcctgagtaccccaaccagagtgtgcccgagaccactcctctgaaccaggacaccatgggagagtacacgcccctgcgggatgaggatcccaatgcgcctccctaccagcccccaccgcccttcacagcacccatggagggcaagggctcccgtcccaagaacatgaccccataccggtcacctcctccctatgtcccaccttaacccgcaagcgcctgggtggaggcagggtagggcaggggcctggagacgacatggtgttgtctgtggagaccggtggcctgcagaccattgcccaccgggagccgacacctgacctagcacacactgacacaggggcctggacaagcccgccctctctggtcctcccaaaccccaaagcagctggagagactttggggacttttttatttttattttttgcctaacagcttttggtttgttcatagagaattcttcgcttcatttttgatggctggctctgaaagcaccatgtggagtggaggtggagggagcgaggaaccatgaatgaactcgcaggcagtgccgggcggccccctggctctctgcgttttgcctttaacactaactgtactgttttttctattcacgtgtgtctagctgcaggatgtaacatggaaaacagtaactaaagattaaattcaaaggactttcagaagttaaggttaagtttttacgtttaatctgctgtttacctaaacttgtatgtataatttttgggtgggtatggggaattgctttgctaaaaataagctcccagggtgtttcaaacttagagaagaccaagggacagtattttttatcaaaggaatactattttttcacactacgtcaacttggttgctctgataccccagagcctgattgggggcctcccggccctggctcacgccaagtccctggtgctgggtttgctctcccgctgttgccaggggctggaagctggaggggtctcttgggccatggacatccccacttccagcccatgtacactagtggcccacgaccaaggggtcttcatttccatgaaaaagggactccaagaggcagtggtggctgtggcccccaactttggtgctccagggtgggccagctgcttgtgggggcacctgggaggtcaaaggtctccaccacatcaacctattttgttttaccctttttctgtgcattgtttttttttttcctcctaaaaggaatatcacggttttttgaaacactcagtgggggacattttggtgaagatgcaatatttttatgtcatgtgatgctctttcctcacttgaccttggccgctttgtcctaacagtccacagtcctgccccgacccaccccatcccttttctctggcactccagtcccaggccttgggcctgaactactggaaaaggtctggcggctggggaggagtgccagcaatagttcataataaaaatctgttagctctcaaagctaattttttactaaagtttttatacagcctcaaattgttttattaaaaaaaagatttaaaatggtgatgcttacagcagtttgtacgagctcttaagtgttgattccatggaactgacggctttgcttgttttgattcttttccccctacttttcctaatggtttaaattctggaattacactggggttcttttgccttttttagcagaacatccgtccgtccatctgcatctctgtcccatgactcaggggcgcccactctgcttcgattctcctcctgtggaagaaaccattttgagcatgacttttcttgatgtctgaagcgttattttgggtactttttagggaggaatgcctttcgcaataatgtatccattccctgattgagggtgggtgggtggacccaggctccctttgcacacagagcagctacttctaagccatatcgactgttttgcagaggatttgtgtgtgctgcctcaggaggggagggctggtaggagggggggagaggtctctgtcctactgctctccagagggcatttccccttgcgccttctcccacagggcccagcccctctcccctgccccagtccccagggggtactctggagtgagcagtgcccctgtgggggagcctgtaaatgcgggctcagtggaccactggtgactgggctcatgcctccaagtcagagtttccctggtgccccagagacaggagcacaagtgggatctgacctggtgagattatttctgatgacctcatcaaaaaataaacaattcccaatgttccaggtgagggctttgaaaggccttccaaacagctccgtcgcccctagcaactccaccattgggcactgccatgcagagacgtggctggcccagaatggcctgttgccatagcaactggaggcgatggggcagtgaacagaataacaacagcaacaatgcctttgcaggcagcctgctcccctgagcgctgggctggtgatggtcgttggactctgtgagatggagagccaatctcacattcaagtgttcaccaaccactgatgtgtttttatttccttctatatgattttaagatgtgttttctgcattctgtaaagaaacatatcaaactaaataaaagcagtgtctttattacaacgc

SEQ ID NO: 128782 - DNA, 5576 bp, Homo sapiens
  Payload ID: 5190
  Gene Symbol: DAG1
  Gene Name: dystroglycan 1 (dystrophin-associated glycoprotein 1)
  Uniprot ID: Q14118
  ENST ID: ENST00000515359
  CDS Start-End: 470-3157
ttttttgtatttttagtagagacggggtttcacgttgttggtcaggctggtctcaaactcctgacctcaggtgatccacccgccttggcctcccaaagtgctgggattacaggtgtgagccaccgcggctggtcaaaattttttttttttggtactttttttgcagaggcggggtttcgacacgttgcccaggctggtcttgaactcctgagctcaagctatccatccacctgcctcggcctcccatagtgctgggactacaggcgggagcacagcacctagccccttccttttcttgtctctgtgaatgaggtttggagccgagacactgaagtatagataattgcaaaaaggctctgtgtgctccgggatggagcaggtgtgcagagggtgagaacccagctctgggaccaagtcacttgcttccttacttagcaagactatcgacttgagcaaacttggacctgggatgaggatgtctgtgggcctctcgctgctgctgcccctctcggggaggacctttctcctcctgctctctgtggttatggctcagtcccactggcccagtgaaccctcagaggctgtcagggactgggaaaaccagcttgaggcatccatgcactcagtgctctcagacctccacgaggctgttcccacagtggttggcattcctgatggcacggctgtcgtcgggcgctcatttcgagtgaccattccaacagatttgattgcctccagtggagatatcatcaaggtatcagcggcagggaaggaggctttgccatcttggctgcactgggactcacagagccacaccctggagggcctcccccttgacactgataagggtgtgcattacatttcagtgagcgctacacggctgggggccaacgggagccacatcccccagacctccagtgtgttctccatcgaggtctaccctgaagaccacagtgagctgcagtcggtgaggacagcctccccagaccctggtgaggtggtatcatctgcctgtgctgcggatgaacctgtgactgttttgacggtgattttggatgccgacctcaccaagatgaccccaaagcaaaggattgacctcctgcacaggatgcggagcttctcagaagtagagcttcacaacatgaaattagtgccggtggtgaataacagactatttgacatgtcggccttcatggctggcccgggaaatgcaaaaaaggtggtggagaatggggcccttctctcctggaagctgggctgctccctgaaccagaacagtgtgcctgacattcatggtgtagaggcccctgccagggagggcgcaatgtctgctcagcttggctaccctgtggtgggttggcacatcgccaataagaagccccctcttcccaaacgcgtccggaggcagatccatgctacacccacacctgtcactgccattgggcccccaaccacggctatccaggagcccccatccaggatcgtgccaacccccacatctccagccattgctcctccaacagagaccatggctcctccagtcagggatcctgttcctgggaaacccacggtcaccatccggactcgaggcgccattattcaaaccccaaccctaggccccatccagcctactcgggtgtcagaagctggcaccacagttcctggccagattcgcccaacgatgaccattcctggctatgtggagcctactgcagttgctacccctcccacaaccaccaccaagaagccacgagtatccacaccaaaaccagcaacgccttcaactgactccaccaccaccacgactcgcaggccaaccaagaaaccacggacaccccggccagtgccccgggtcaccaccaaagtttccatcaccagattggaaactgcctcaccgcctactcgtattcgcaccaccaccagtggagtgccccgtggcggagaacccaaccagcgcccagagctcaagaaccatattgacagggtagatgcctgggttggcacctactttgaggtgaagatcccgtcagacactttctatgaccatgaggacaccaccactgacaagctgaagctgaccctgaaactgcgggagcagcagctggtgggcgagaagtcctgggtacagttcaacagcaacagccagctcatgtatggccttcccgacagcagccacgtgggcaaacacgagtatttcatgcatgccacagacaaggggggcctgtcggctgtggatgccttcgagatccacgtccacaggcgcccccaaggggatagggctcctgcaaggttcaaggccaagtttgtgggtgacccggcactggtgttgaatgacatccacaagaagattgccttggtaaagaaactggccttcgcctttggagaccgaaactgtagcaccatcaccctgcagaatatcacccggggctccatcgtggtggaatggaccaacaacacactgcccttggagccctgccccaaggagcagatcgctgggctgagccgccggatcgctgaggatgatggaaaacctcggcctgccttctccaacgccctagagcctgactttaaggccacaagcatcactgtgacgggctctggcagttgtcggcacctacagtttatccctgtggtaccacccaggagagtgccctcagaggcgccgcccacagaagtgcctgacagggaccctgagaagagcagtgaggatgatgtctacctgcacacagtcattccggccgtggtggtcgcagccatcctgctcattgctggcatcattgccatgatctgctaccgcaagaagcggaagggcaagcttacccttgaggaccaggccaccttcatcaagaagggggtgcctatcatctttgcagacgaactggacgactccaagcccccaccctcctccagcatgccactcattctgcaggaggagaaggctcccctaccccctcctgagtaccccaaccagagtgtgcccgagaccactcctctgaaccaggacaccatgggagagtacacgcccctgcgggatgaggatcccaatgcgcctccctaccagcccccaccgcccttcacagcacccatggagggcaagggctcccgtcccaagaacatgaccccataccggtcacctcctccctatgtcccaccttaacccgcaagcgcctgggtggaggcagggtagggcaggggcctggagacgacatggtgttgtctgtggagaccggtggcctgcagaccattgcccaccgggagccgacacctgacctagcacacactgacacaggggcctggacaagcccgccctctctggtcctcccaaaccccaaagcagctggagagactttggggacttttttatttttattttttgcctaacagcttttggtttgttcatagagaattcttcgcttcatttttgatggctggctctgaaagcaccatgtggagtggaggtggagggagcgaggaaccatgaatgaactcgcaggcagtgccgggcggccccctggctctctgcgttttgcctttaacactaactgtactgttttttctattcacgtgtgtctagctgcaggatgtaacatggaaaacagtaactaaagattaaattcaaaggactttcagaagttaaggttaagtttttacgtttaatctgctgtttacctaaacttgtatgtataatttttgggtgggtatggggaattgctttgctaaaaataagctcccagggtgtttcaaacttagagaagaccaagggacagtattttttatcaaaggaatactattttttcacactacgtcaacttggttgctctgataccccagagcctgattgggggcctcccggccctggctcacgccaagtccctggtgctgggtttgctctcccgctgttgccaggggctggaagctggaggggtctcttgggccatggacatccccacttccagcccatgtacactagtggcccacgaccaaggggtcttcatttccatgaaaaagggactccaagaggcagtggtggctgtggcccccaactttggtgctccagggtgggccagctgcttgtgggggcacctgggaggtcaaaggtctccaccacatcaacctattttgttttaccctttttctgtgcattgtttttttttttcctcctaaaaggaatatcacggttttttgaaacactcagtgggggacattttggtgaagatgcaatatttttatgtcatgtgatgctctttcctcacttgaccttggccgctttgtcctaacagtccacagtcctgccccgacccaccccatcccttttctctggcactccagtcccaggccttgggcctgaactactggaaaaggtctggcggctggggaggagtgccagcaatagttcataataaaaatctgttagctctcaaagctaattttttactaaagtttttatacagcctcaaattgttttattaaaaaaaagatttaaaatggtgatgcttacagcagtttgtacgagctcttaagtgttgattccatggaactgacggctttgcttgttttgattcttttccccctacttttcctaatggtttaaattctggaattacactggggttcttttgccttttttagcagaacatccgtccgtccatctgcatctctgtcccatgactcaggggcgcccactctgcttcgattctcctcctgtggaagaaaccattttgagcatgacttttcttgatgtctgaagcgttattttgggtactttttagggaggaatgcctttcgcaataatgtatccattccctgattgagggtgggtgggtggacccaggctccctttgcacacagagcagctacttctaagccatatcgactgttttgcagaggatttgtgtgtgctgcctcaggaggggagggctggtaggagggggggagaggtctctgtcctactgctctccagagggcatttccccttgcgccttctcccacagggcccagcccctctcccctgccccagtccccagggggtactctggagtgagcagtgcccctgtgggggagcctgtaaatgcgggctcagtggaccactggtgactgggctcatgcctccaagtcagagtttccctggtgccccagagacaggagcacaagtgggatctgacctggtgagattatttctgatgacctcatcaaaaaataaacaattcccaatgttccaggtgagggctttgaaaggccttccaaacagctccgtcgcccctagcaactccaccattgggcactgccatgcagagacgtggctggcccagaatggcctgttgccatagcaactggaggcgatggggcagtgaacagaataacaacagcaacaatgcctttgcaggcagcctgctcccctgagcgctgggctggtgatggtcgttggactctgtgagatggagagccaatctcacattcaagtgttcaccaaccactgatgtgtttttatttccttctatatgattttaagatgtgttttctgcattctgtaaagaaacatatcaaactaaataaaagcagtgtctttattacaacgc

SEQ ID NO: 128783 - DNA, 5829 bp, Homo sapiens
  Payload ID: 5190
  Gene Symbol: DAG1
  Gene Name: dystroglycan 1 (dystrophin-associated glycoprotein 1)
  Uniprot ID: Q14118
  ENST ID: ENST00000545947
  CDS Start-End: 723-3410
aggcagaagccggcggcgcgcggacagccagtcggcgccgcgcggagctggccgctggattggctgcaacactcgcgtgtcaggcggttgctaggctccggccgcgcgccccgcccttgcgctcagcgccctctcaccgcccggtacgtgctcgcgcgaaggctgcggcgcggcgctcgcgcctcttaggcttggcggtggcggcggcggcagcttcgcgccgaatccccggggagcggcggtggcggcgtcctggggccaggaggagcgaacacctgccgcggtcctcccgccggcgctggacctggttcacctgcgagtgtatttggatagtgtctccacagaaaatgtcgtctcggcttggaatctttttgccataaattctaaggccactgctctccaggaagataaggcttttaaagcagcctagcactagaaggtgaggcacacgactgtctatcccagatggctgcactggcctaggacagacggttcttcccccagtacgtcaagaccctggagggtgcaagctacagaacagctgggctcctgcattcctcccagaccctgtcttcagtaggacaacaggcaacaaacttaaatttggctctgtgtgctccgggatggagcaggtgtgcagagggtgagaacccagctctgggaccaagtcacttgcttccttacttagcaagactatcgacttgagcaaacttggacctgggatgaggatgtctgtgggcctctcgctgctgctgcccctctcggggaggacctttctcctcctgctctctgtggttatggctcagtcccactggcccagtgaaccctcagaggctgtcagggactgggaaaaccagcttgaggcatccatgcactcagtgctctcagacctccacgaggctgttcccacagtggttggcattcctgatggcacggctgtcgtcgggcgctcatttcgagtgaccattccaacagatttgattgcctccagtggagatatcatcaaggtatcagcggcagggaaggaggctttgccatcttggctgcactgggactcacagagccacaccctggagggcctcccccttgacactgataagggtgtgcattacatttcagtgagcgctacacggctgggggccaacgggagccacatcccccagacctccagtgtgttctccatcgaggtctaccctgaagaccacagtgagctgcagtcggtgaggacagcctccccagaccctggtgaggtggtatcatctgcctgtgctgcggatgaacctgtgactgttttgacggtgattttggatgccgacctcaccaagatgaccccaaagcaaaggattgacctcctgcacaggatgcggagcttctcagaagtagagcttcacaacatgaaattagtgccggtggtgaataacagactatttgacatgtcggccttcatggctggcccgggaaatgcaaaaaaggtggtggagaatggggcccttctctcctggaagctgggctgctccctgaaccagaacagtgtgcctgacattcatggtgtagaggcccctgccagggagggcgcaatgtctgctcagcttggctaccctgtggtgggttggcacatcgccaataagaagccccctcttcccaaacgcgtccggaggcagatccatgctacacccacacctgtcactgccattgggcccccaaccacggctatccaggagcccccatccaggatcgtgccaacccccacatctccagccattgctcctccaacagagaccatggctcctccagtcagggatcctgttcctgggaaacccacggtcaccatccggactcgaggcgccattattcaaaccccaaccctaggccccatccagcctactcgggtgtcagaagctggcaccacagttcctggccagattcgcccaacgatgaccattcctggctatgtggagcctactgcagttgctacccctcccacaaccaccaccaagaagccacgagtatccacaccaaaaccagcaacgccttcaactgactccaccaccaccacgactcgcaggccaaccaagaaaccacggacaccccggccagtgccccgggtcaccaccaaagtttccatcaccagattggaaactgcctcaccgcctactcgtattcgcaccaccaccagtggagtgccccgtggcggagaacccaaccagcgcccagagctcaagaaccatattgacagggtagatgcctgggttggcacctactttgaggtgaagatcccgtcagacactttctatgaccatgaggacaccaccactgacaagctgaagctgaccctgaaactgcgggagcagcagctggtgggcgagaagtcctgggtacagttcaacagcaacagccagctcatgtatggccttcccgacagcagccacgtgggcaaacacgagtatttcatgcatgccacagacaaggggggcctgtcggctgtggatgccttcgagatccacgtccacaggcgcccccaaggggatagggctcctgcaaggttcaaggccaagtttgtgggtgacccggcactggtgttgaatgacatccacaagaagattgccttggtaaagaaactggccttcgcctttggagaccgaaactgtagcaccatcaccctgcagaatatcacccggggctccatcgtggtggaatggaccaacaacacactgcccttggagccctgccccaaggagcagatcgctgggctgagccgccggatcgctgaggatgatggaaaacctcggcctgccttctccaacgccctagagcctgactttaaggccacaagcatcactgtgacgggctctggcagttgtcggcacctacagtttatccctgtggtaccacccaggagagtgccctcagaggcgccgcccacagaagtgcctgacagggaccctgagaagagcagtgaggatgatgtctacctgcacacagtcattccggccgtggtggtcgcagccatcctgctcattgctggcatcattgccatgatctgctaccgcaagaagcggaagggcaagcttacccttgaggaccaggccaccttcatcaagaagggggtgcctatcatctttgcagacgaactggacgactccaagcccccaccctcctccagcatgccactcattctgcaggaggagaaggctcccctaccccctcctgagtaccccaaccagagtgtgcccgagaccactcctctgaaccaggacaccatgggagagtacacgcccctgcgggatgaggatcccaatgcgcctccctaccagcccccaccgcccttcacagcacccatggagggcaagggctcccgtcccaagaacatgaccccataccggtcacctcctccctatgtcccaccttaacccgcaagcgcctgggtggaggcagggtagggcaggggcctggagacgacatggtgttgtctgtggagaccggtggcctgcagaccattgcccaccgggagccgacacctgacctagcacacactgacacaggggcctggacaagcccgccctctctggtcctcccaaaccccaaagcagctggagagactttggggacttttttatttttattttttgcctaacagcttttggtttgttcatagagaattcttcgcttcatttttgatggctggctctgaaagcaccatgtggagtggaggtggagggagcgaggaaccatgaatgaactcgcaggcagtgccgggcggccccctggctctctgcgttttgcctttaacactaactgtactgttttttctattcacgtgtgtctagctgcaggatgtaacatggaaaacagtaactaaagattaaattcaaaggactttcagaagttaaggttaagtttttacgtttaatctgctgtttacctaaacttgtatgtataatttttgggtgggtatggggaattgctttgctaaaaataagctcccagggtgtttcaaacttagagaagaccaagggacagtattttttatcaaaggaatactattttttcacactacgtcaacttggttgctctgataccccagagcctgattgggggcctcccggccctggctcacgccaagtccctggtgctgggtttgctctcccgctgttgccaggggctggaagctggaggggtctcttgggccatggacatccccacttccagcccatgtacactagtggcccacgaccaaggggtcttcatttccatgaaaaagggactccaagaggcagtggtggctgtggcccccaactttggtgctccagggtgggccagctgcttgtgggggcacctgggaggtcaaaggtctccaccacatcaacctattttgttttaccctttttctgtgcattgtttttttttttcctcctaaaaggaatatcacggttttttgaaacactcagtgggggacattttggtgaagatgcaatatttttatgtcatgtgatgctctttcctcacttgaccttggccgctttgtcctaacagtccacagtcctgccccgacccaccccatcccttttctctggcactccagtcccaggccttgggcctgaactactggaaaaggtctggcggctggggaggagtgccagcaatagttcataataaaaatctgttagctctcaaagctaattttttactaaagtttttatacagcctcaaattgttttattaaaaaaaagatttaaaatggtgatgcttacagcagtttgtacgagctcttaagtgttgattccatggaactgacggctttgcttgttttgattcttttccccctacttttcctaatggtttaaattctggaattacactggggttcttttgccttttttagcagaacatccgtccgtccatctgcatctctgtcccatgactcaggggcgcccactctgcttcgattctcctcctgtggaagaaaccattttgagcatgacttttcttgatgtctgaagcgttattttgggtactttttagggaggaatgcctttcgcaataatgtatccattccctgattgagggtgggtgggtggacccaggctccctttgcacacagagcagctacttctaagccatatcgactgttttgcagaggatttgtgtgtgctgcctcaggaggggagggctggtaggagggggggagaggtctctgtcctactgctctccagagggcatttccccttgcgccttctcccacagggcccagcccctctcccctgccccagtccccagggggtactctggagtgagcagtgcccctgtgggggagcctgtaaatgcgggctcagtggaccactggtgactgggctcatgcctccaagtcagagtttccctggtgccccagagacaggagcacaagtgggatctgacctggtgagattatttctgatgacctcatcaaaaaataaacaattcccaatgttccaggtgagggctttgaaaggccttccaaacagctccgtcgcccctagcaactccaccattgggcactgccatgcagagacgtggctggcccagaatggcctgttgccatagcaactggaggcgatggggcagtgaacagaataacaacagcaacaatgcctttgcaggcagcctgctcccctgagcgctgggctggtgatggtcgttggactctgtgagatggagagccaatctcacattcaagtgttcaccaaccactgatgtgtttttatttccttctatatgattttaagatgtgttttctgcattctgtaaagaaacatatcaaactaaataaaagcagtgtctttattacaacgc

SEQ ID NO: 128784 - DNA, 3305 bp, Homo sapiens
  Payload ID: 5191
  Gene Symbol: DMWD
  Gene Name: dystrophia myotonica, WD repeat containing
  Uniprot ID: Q09019
  ENST ID: ENST00000270223
  CDS Start-End: 47-2071
ctgcgggcggcagtccggcagtggcggggcccggggggcgcccaagatggcggcgggcggcgcggagggcggctcgggccccggcgccgccatgggggactgcgcggagattaagtcgcaattccgcacgcgcgagggtttctacaagctactcccgggcgacggcgccgctcgcaggtcgggtccggcttccgcccagactccggtgccgcctcagccaccgcagcccccgcccggccctgcctccgcctccggtcccggcgctgcaggccccgcgtcgtccccgccgcccgcaggccccggacccgggcccgccctgcccgccgtgcgcctcagcctcgtgcgcctcggggagccggacagcgccggggccggggagccgcccgccacgcccgcggggctgggctcggggggagaccgcgtctgcttcaacttgggccgtgagctctatttctacccaggctgctgtcgtcgtgggagccaacggtccattgacctcaacaagccaattgacaagcggatctacaagggcacccagcccacctgccacgatttcaaccagttcactgctgccaccgagaccatctcgctgctggtgggcttctcagcgggtcaagtgcagtacctggatctcatcaaaaaggacaccagcaagctgttcaatgaggagcggttgatcgacaagaccaaggtgacatatctgaagtggctgcctgagtcggagagcctgttcctggcatcacacgccagtggccacctgtacctgtacaacgtcagccacccctgcgcctcggccccgccccagtacagcctgctgaagcagggcgagggcttctctgtctatgctgccaagagcaaggcaccccgcaacccgctggccaagtgggcggtgggtgaggggcccctcaacgagttcgccttctcgcccgatggccggcacctggcctgtgtgagccaggatggctgcctgcgcgtcttccacttcgactccatgctcctgcgtgggctcatgaagagctactttgggggcctgctgtgtgtgtgctggagccctgacggccgctacgtggtgacgggtggcgaagatgacctggtcaccgtgtggtccttcaccgagggccgcgtggtggctcgaggccatggccacaagtcctgggtcaacgctgtggcctttgacccctacaccacaagggcagaggaggcggcgacagcagccggtgctgatggggagcggagcggcgaagaggaggaggaggagcccgaggctgcgggcacaggctcggccgggggcgccccgctctctccactgcccaaggctggctccattacttaccgctttggctcggcgggccaggacacgcagttctgcctgtgggacctcactgaagacgtgctctacccgcacccccccctggcccgcacccgcaccctccctggcacacctggcaccacgccaccggccgccagcagctcgaggggtggcgagcctggcccaggccccctgcctcgctcgctgtcccgctccaacagtctcccgcacccagctggcgggggcaaggcgggcggcccgggtgtggcggcagagcctggcacaccattcagcattggccgcttcgccacgctcacactgcaggagcggcgggaccggggggcagagaaggagcacaagcgctaccacagcctgggcaacatcagccggggtggcagtggcggcagtggcagtggtggggagaagcccagcggccctgttccccgcagccgcctggaccccgccaaggtgctgggcactgcgctgtgcccgcgcatccacgaggtgcccctgctggagccccttgtgtgcaagaagatcgcccaggagcggctcacagtcctcctgttcctggaggactgcatcatcactgcctgccaggagggcctcatctgcacctgggcccggccgggcaaggcgttcacagacgaggagaccgaggcccagacaggggaaggaagttggcccaggtcacccagcaagtcagtggtagagggcatctcctcccaaccaggcaactccccgagtggcacagtggtgtgaagccatggatatcgggcccccccaaccccatgcccccagcctcctagccataaccctccctgctgacctcacagatcaacgtattaacaagactaaccatgatggatggactgctccagtccccccacctgcacaaaatttgggggccccccagactggcccggacacgggcgatgtaatagcccttgtggcctcagccttgtcccccacccactgccaagtacaatgacctcttcctctgaaacatcagtgttaccctcatccctgtccccagcatgtgactggtcactcctggggagagactccccgcccctgccacaagagccccaggtctgcagtgtgcccctcagttgagtgggcagggccgggggtggtccagccctcgcccggcccccaccccagctgcccttgctattgtctgtgcttttgaagagtgttaaattatggaagcccctcaggttcctccctgtcccgcaggacctcttatttatactaaagttccctgttttctcagcgggtctgtccccttcggaggagatgatgtagaggacctgtgtgtgtactctgtggttctaggcagtccgctttccccagaggaggagtgcaggcctgctcccagcccagcgcctcccaccccttttcatagcaggaaaagccggagcccagggagggaacggacctgcgagtcacacaactggtgacccacaccagcggctggagcaggaccctcttggggagaagagcatcctgcccgcagccagggcccctcatcaaagtcctcggtgttttttaaattatcagaactgcccaggaccacgtttcccaggccctgcccagctgggactcctcggtccttgcctcctagtttctcaggcctggccctctcaaggcccaggcaccccaggccggttggaggccccgacttccactctggagaaccgtccaccctggaaagaagagctcagattcctcttggctctcggagccgcagggagtgtgtcttcccgcgccaccctccaccccccgaaatgtttctgtttctaatcccagcctgggcaggaatgtggctccccggccaggggccaaggagctattttggggtctcgtttgcccagggagggcttggctccaccactttcctcccccagcctttgggcagcaggtcacccctgttcaggctctgagggtgccccctcctggtcctgtcctcaccaccccttccccacctcctggg

SEQ ID NO: 128785 - DNA, 3292 bp, Homo sapiens
  Payload ID: 5191
  Gene Symbol: DMWD
  Gene Name: dystrophia myotonica, WD repeat containing
  ENST ID: ENST00000377735
  CDS Start-End: 47-1996
ctgcgggcggcagtccggcagtggcggggcccggggggcgcccaagatggcggcgggcggcgcggagggcggctcgggccccggcgccgccatgggggactgcgcggagattaagtcgcaattccgcacgcgcgagggtttctacaagctactcccgggcgacggcgccgctcgcaggtcgggtccggcttccgcccagactccggtgccgcctcagccaccgcagcccccgcccggccctgcctccgcctccggtcccggcgctgcaggccccgcgtcgtccccgccgcccgcaggccccggacccgggcccgccctgcccgccgtgcgcctcagcctcgtgcgcctcggggagccggacagcgccggggccggggagccgcccgccacgcccgcggggctgggctcggggggagaccgcgtctgcttcaacttgggccgtgagctctatttctacccaggctgctgtcgtcgtgggagccaacggtccattgacctcaacaagccaattgacaagcggatctacaagggcacccagcccacctgccacgatttcaaccagttcactgctgccaccgagaccatctcgctgctggtgggcttctcagcgggtcaagtgcagtacctggatctcatcaaaaaggacaccagcaagctgttcaatgaggagcggttgatcgacaagaccaaggtgacatatctgaagtggctgcctgagtcggagagcctgttcctggcatcacacgccagtggccacctgtacctgtacaacgtcagccacccctgcgcctcggccccgccccagtacagcctgctgaagcagggcgagggcttctctgtctatgctgccaagagcaaggcaccccgcaacccgctggccaagtgggcggtgggtgaggggcccctcaacgagttcgccttctcgcccgatggccggcacctggcctgtgtgagccaggatggctgcctgcgcgtcttccacttcgactccatgctcctgcgtgggctcatgaagagctactttgggggcctgctgtgtgtgtgctggagccctgacggccgctacgtggtgacgggtggcgaagatgacctggtcaccgtgtggtccttcaccgagggccgcgtggtggctcgaggccatggccacaagtcctgggtcaacgctgtggcctttgacccctacaccacaagggcagaggaggcggcgacagcagccggtgctgatggggagcggagcggcgaagaggaggaggaggagcccgaggctgcgggcacaggctcggccgggggcgccccgctctctccactgcccaaggctggctccattacttaccgctttggctcggcgggccaggacacgcagttctgcctgtgggacctcactgaagacgtgctctacccgcacccccccctggcccgcacccgcaccctccctggcacacctggcaccacgccaccggccgccagcagctcgaggggtggcgagcctggcccaggccccctgcctcgctcgctgtcccgctccaacagtctcccgcacccagctggcgggggcaaggcgggcggcccgggtgtggcggcagagcctggcacaccattcagcattggccgcttcgccacgctcacactgcaggagcggcgggaccggggggcagagaaggagcacaagcgctaccacagcctgggcaacatcagccggggtggcagtggcggcagtggcagtggtggggagaagcccagcggccctgttccccgcagccgcctggaccccgccaaggtgctgggcactgcgctgtgcccgcgcatccacgaggtgcccctgctggagccccttgtgtgcaagaagatcgcccaggagcggctcacagtcctcctgttcctggaggactgcatcatcactgcctgccaggagggcctcatctgcacctgggcccggccgggcaaggcgggcatctcctcccaaccaggcaactccccgagtggcacagtggtgtgaagccatggatatcgggcccccccaaccccatgcccccagcctcctagccataaccctccctgctgacctcacagatcaacgtattaacaagactaaccatgatggatggactgctccagtccccccacctgcacaaaatttgggggccccccagactggcccggacacgggcgatgtaatagcccttgtggcctcagccttgtcccccacccactgccaagtacaatgacctcttcctctgaaacatcagtgttaccctcatccctgtccccagcatgtgactggtcactcctggggagagactccccgcccctgccacaagagccccaggtctgcagtgtgcccctcagttgagtgggcagggccgggggtggtccagccctcgcccggcccccaccccagctgcccttgctattgtctgtgcttttgaagagtgttaaattatggaagcccctcaggttcctccctgtcccgcaggacctcttatttatactaaagttccctgttttctcagcgggtctgtccccttcggaggagatgatgtagaggacctgtgtgtgtactctgtggttctaggcagtccgctttccccagaggaggagtgcaggcctgctcccagcccagcgcctcccaccccttttcatagcaggaaaagccggagcccagggagggaacggacctgcgagtcacacaactggtgacccacaccagcggctggagcaggaccctcttggggagaagagcatcctgcccgcagccagggcccctcatcaaagtcctcggtgttttttaaattatcagaactgcccaggaccacgtttcccaggccctgcccagctgggactcctcggtccttgcctcctagtttctcaggcctggccctctcaaggcccaggcaccccaggccggttggaggccccgacttccactctggagaaccgtccaccctggaaagaagagctcagattcctcttggctctcggagccgcagggagtgtgtcttcccgcgccaccctccaccccccgaaatgtttctgtttctaatcccagcctgggcaggaatgtggctccccggccaggggccaaggagctattttggggtctcgtttgcccagggagggcttggctccaccactttcctcccccagcctttgggcagcaggtcacccctgttcaggctctgagggtgccccctcctggtcctgtcctcaccaccccttccccacctcctgggaaaaaaaaaaaaaaaaaaaaaaaaagctggtataaagcagagagcctgagggctaaatttaa

SEQ ID NO: 128786 - DNA, 843 bp, Homo sapiens
  Payload ID: 5191
  Gene Symbol: DMWD
  Gene Name: dystrophia myotonica, WD repeat containing
  ENST ID: ENST00000537879
  CDS Start-End: 1-195
gaggactgcatcatcactgcctgccaggagggcctcatctgcacctgggcccggccgggcaaggcgttcacagacgaggagaccgaggcccagacaggggaaggaagttggcccaggtcacccagcaagtcagtggtagaggtaggactgtccctgagttctttccccagcacctcagggtccctcccaagttagaagggagctccagtttccccctcccctcccacccttacccttaccccatggtctcactcaggatccgccaaggactttgattattgcgtgaaagtgctgactgccaggacaggaagctagctaagatgcaagttcccagcctagagcagtggcctctggggggtctagggcggacccaagggcaaggccagggtggcagcagctttggggactctgggctggctccctccccttgacactggctgaagcccaggtggtctctaacccctcccatctctccctctcatcttccccagggcatctcctcccaaccaggcaactccccgagtggcacagtggtgtgaagccatggatatcgggcccccccaaccccatgcccccagcctcctagccataaccctccctgctgacctcacagatcaacgtattaacaagactaaccatgatggatggactgctccagtccccccacctgcacaaaatttgggggccccccagactggcccggacacgggcgatgtaatagcccttgtggcctcagccttgtcccccacccactgccaagtacaatgacctcttcctctgaaacatcagtgttaccctcatccctgtccccagcatgtgactggtcactcctggggagagact

SEQ ID NO: 128787 - DNA, 655 bp, Homo sapiens
  Payload ID: 5191
  Gene Symbol: DMWD
  Gene Name: dystrophia myotonica, WD repeat containing
  ENST ID: ENST00000602829
  CDS Start-End: 1-485
aggagcggcgggaccggggggcagagaaggagcacaagcgctaccacagcctgggcaacatcagccggggtggcagtggcggcagtggcagtggtggggagaagcccagcggccctgttccccgcagccgcctggaccccgccaaggtgctgggcactgcgctgtgcccgcgcatccacgaggtgcccctgctggagccccttgtgtgcaagaagatcgcccaggagcggctcacagtcctcctgttcctggaggactgcatcatcactgcctgccaggagggcctcatctgcacctgggcccggccgggcaaggcggtgagtggccccacaccagcctgccggggacctggcaggacctttcgtgggaagaggcaggcattggcagagagagggctttgttgctgtcacagcctctggctccgtggggtgaggggaagccagggaaatcttagtgtctcagtacaagacctctcagatccttagagtgagggggtctagccctaggcagcaggcagcagaaagaggggtgggtgtgagagccagctaggaattggggcatccaaggctggccgtctgaagggcagcagatgggccccacatggccaggtcttactgcctgtcactcgaaccagaatctatttctgttgaacatc

SEQ ID NO: 128788 - DNA, 643 bp, Homo sapiens
  Payload ID: 5191
  Gene Symbol: DMWD
  Gene Name: dystrophia myotonica, WD repeat containing
  ENST ID: ENST00000598237
  CDS Start-End: 1-449
ccggggccggggagccgcccgccacgcccgcggggctgggctcggggggagaccgcgtctgcttcaacttgggccgtgagctctatttctacccaggctgctgtcgtcgtgggagccaacggtccattgacctcaacaagccaattgacaagcggatctacaagggcacccagcccacctgccacgatttcaaccagttcactgctgccaccgagaccatctcgctgctggtgggcttctcagcgggtcaagtgcagtacctggatctcatcaaaaaggacaccagcaagctgttcaatgaggaggtgattgcagcccccagagcccccaacttctctgccttctcacctacccactatatgccattaggatgcagctgcctgcggaacagtgtaggcctgagaggggcaggaccagggagagatggagaatggggtgacagcagctaatgacagctgcctttactgtacccaggccctgtgctgtgttacccttgtgctgaatactttactccttgggttttctttctttctttctttcttttatttatttattttgagatggagtctcaccctgtcacccaggctggagtgcagtggcgcgatctctgctcactgcaagatccacctcccgggttcatgcc

SEQ ID NO: 128789 - DNA, 370 bp, Homo sapiens
  Payload ID: 5191
  Gene Symbol: DMWD
  Gene Name: dystrophia myotonica, WD repeat containing
  ENST ID: ENST00000597053
  CDS Start-End: 1-309
ggcacccagcccacctgccacgatttcaaccagttcactgctgccaccgagaccatctcgctgctggtgggcttctcagcgggtcaagtgcagtacctggatctcatcaaaaaggacaccagcaagctgttcaatgaggaggaccgctgttgtagaatcatacatggagattgctcagtcctgggccaacttggcctacgaggagataccagtaaacgaccttatccgcgggcagggactgctcttggcttctgtctcattctctctggtccagaggaggtgttccataaatattctcagaatgagtgaatggctgaagggagtgaacggaacagtcagtggattaaaaattcattagctcatccattca

SEQ ID NO: 128790 - DNA, 2787 bp, Homo sapiens
  Payload ID: 5192
  Gene Symbol: DMPK
  Gene Name: dystrophia myotonica-protein kinase
  Uniprot ID: Q09013
  ENST ID: ENST00000291270
  CDS Start-End: 127-2016
gggacagccagggacaggcagacatgcagccagggctccagggcctggacaggggctgccaggccctgtgacaggaggaccccgagcccccggcccggggaggggccatggtgctgcctgtccaacatgtcagccgaggtgcggctgaggcggctccagcagctggtgttggacccgggcttcctggggctggagcccctgctcgaccttctcctgggcgtccaccaggagctgggcgcctccgaactggcccaggacaagtacgtggccgacttcttgcagtgggcggagcccatcgtggtgaggcttaaggaggtccgactgcagagggacgacttcgagattctgaaggtgatcggacgcggggcgttcagcgaggtagcggtagtgaagatgaagcagacgggccaggtgtatgccatgaagatcatgaacaagtgggacatgctgaagaggggcgaggtgtcgtgcttccgtgaggagagggacgtgttggtgaatggggaccggcggtggatcacgcagctgcacttcgccttccaggatgagaactacctgtacctggtcatggagtattacgtgggcggggacctgctgacactgctgagcaagtttggggagcggattccggccgagatggcgcgcttctacctggcggagattgtcatggccatagactcggtgcaccggcttggctacgtgcacagggacatcaaacccgacaacatcctgctggaccgctgtggccacatccgcctggccgacttcggctcttgcctcaagctgcgggcagatggaacggtgcggtcgctggtggctgtgggcaccccagactacctgtcccccgagatcctgcaggctgtgggcggtgggcctgggacaggcagctacgggcccgagtgtgactggtgggcgctgggtgtattcgcctatgaaatgttctatgggcagacgcccttctacgcggattccacggcggagacctatggcaagatcgtccactacaaggagcacctctctctgccgctggtggacgaaggggtccctgaggaggctcgagacttcattcagcggttgctgtgtcccccggagacacggctgggccggggtggagcaggcgacttccggacacatcccttcttctttggcctcgactgggatggtctccgggacagcgtgcccccctttacaccggatttcgaaggtgccaccgacacatgcaacttcgacttggtggaggacgggctcactgccatggtgagcgggggcggggagacactgtcggacattcgggaaggtgcgccgctaggggtccacctgccttttgtgggctactcctactcctgcatggccctcagggacagtgaggtcccaggccccacacccatggaactggaggccgagcagctgcttgagccacacgtgcaagcgcccagcctggagccctcggtgtccccacaggatgaaacagctgaagtggcagttccagcggctgtccctgcggcagaggctgaggccgaggtgacgctgcgggagctccaggaagccctggaggaggaggtgctcacccggcagagcctgagccgggagatggaggccatccgcacggacaaccagaacttcgccagtcaactacgcgaggcagaggctcggaaccgggacctagaggcacacgtccggcagttgcaggagcggatggagttgctgcaggcagagggagccacagctgtcacgggggtccccagtccccgggccacggatccaccttcccatctagatggccccccggccgtggctgtgggccagtgcccgctggtggggccaggccccatgcaccgccgccacctgctgctccctgccagggtccctaggcctggcctatcggaggcgctttccctgctcctgttcgccgttgttctgtctcgtgccgccgccctgggctgcattgggttggtggcccacgccggccaactcaccgcagtctggcgccgcccaggagccgcccgcgctccctgaaccctagaactgtcttcgactccggggccccgttggaagactgagtgcccggggcacggcacagaagccgcgcccaccgcctgccagttcacaaccgctccgagcgtgggtctccgcccagctccagtcctgtgatccgggcccgccccctagcggccggggagggaggggccgggtccgcggccggcgaacggggctcgaagggtccttgtagccgggaatgctgctgctgctgctgctgctgctgctgctgctgctgctgctgctgctgctgctgctgctggggggatcacagaccatttctttctttcggccaggctgaggccctgacgtggatgggcaaactgcaggcctgggaaggcagcaagccgggccgtccgtgttccatcctccacgcacccccacctatcgttggttcgcaaagtgcaaagctttcttgtgcatgacgccctgctctggggagcgtctggcgcgatctctgcctgcttactcgggaaatttgcttttgccaaacccgctttttcggggatcccgcgcccccctcctcacttgcgctgctctcggagccccagccggctccgcccgcttcggcggtttggatatttattgacctcgtcctccgactcgctgacaggctacaggacccccaacaaccccaatccacgttttggatgcactgagaccccgacattcctcggtatttattgtctgtccccacctaggacccccacccccgaccctcgcgaataaaaggccctccatctgcccaaa

SEQ ID NO: 128791 - DNA, 3227 bp, Homo sapiens
  Payload ID: 5192
  Gene Symbol: DMPK
  Gene Name: dystrophia myotonica-protein kinase
  Uniprot ID: Q09013
  ENST ID: ENST00000343373
  CDS Start-End: 545-2464
gccacaagcctccaccccagctggtcccccacccaggctgcccagtttaacattcctagtcataggaccttgacttctgagaggcctgattgtcatctgtaaataaggggtaggactaaagcactcctcctggaggactgagagatgggctggaccggagcacttgagtctgggatatgtgaccatgctacctttgtctccctgtcctgttccttcccccagccccaaatccagggttttccaaagtgtggttcaagaaccacctgcatctgaatctagaggtactggatacaaccccacgtctgggccgttacccaggacattctacatgagaacgtgggggtggggccctggctgcacctgaactgtcacctggagtcagggtggaaggtggaagaactgggtcttatttccttctccccttgttctttagggtctgtccttctgcagactccgttaccccaccctaaccatcctgcacacccttggagccctctgggccaatgccctgtcccgcaaagggcttctcaggcatctcacctctatgggagggcatttttggcccccagaaccttacacggtgtttatgtggggaagcccctgggaagcagacagtcctagggtgaagctgagaggcagagagaaggggagacagacagagggtggggctttcccccttgtctccagtgccctttctggtgaccctcggttcttttcccccaccacccccccagcggagcccatcgtggtgaggcttaaggaggtccgactgcagagggacgacttcgagattctgaaggtgatcggacgcggggcgttcagcgaggtagcggtagtgaagatgaagcagacgggccaggtgtatgccatgaagatcatgaacaagtgggacatgctgaagaggggcgaggtgtcgtgcttccgtgaggagagggacgtgttggtgaatggggaccggcggtggatcacgcagctgcacttcgccttccaggatgagaactacctgtacctggtcatggagtattacgtgggcggggacctgctgacactgctgagcaagtttggggagcggattccggccgagatggcgcgcttctacctggcggagattgtcatggccatagactcggtgcaccggcttggctacgtgcacagggacatcaaacccgacaacatcctgctggaccgctgtggccacatccgcctggccgacttcggctcttgcctcaagctgcgggcagatggaacggtgcggtcgctggtggctgtgggcaccccagactacctgtcccccgagatcctgcaggctgtgggcggtgggcctgggacaggcagctacgggcccgagtgtgactggtgggcgctgggtgtattcgcctatgaaatgttctatgggcagacgcccttctacgcggattccacggcggagacctatggcaagatcgtccactacaaggagcacctctctctgccgctggtggacgaaggggtccctgaggaggctcgagacttcattcagcggttgctgtgtcccccggagacacggctgggccggggtggagcaggcgacttccggacacatcccttcttctttggcctcgactgggatggtctccgggacagcgtgcccccctttacaccggatttcgaaggtgccaccgacacatgcaacttcgacttggtggaggacgggctcactgccatggtgagcgggggcggggagacactgtcggacattcgggaaggtgcgccgctaggggtccacctgccttttgtgggctactcctactcctgcatggccctcagggacagtgaggtcccaggccccacacccatggaactggaggccgagcagctgcttgagccacacgtgcaagcgcccagcctggagccctcggtgtccccacaggatgaaacagctgaagtggcagttccagcggctgtccctgcggcagaggctgaggccgaggtgacgctgcgggagctccaggaagccctggaggaggaggtgctcacccggcagagcctgagccgggagatggaggccatccgcacggacaaccagaacttcgccagtcaactacgcgaggcagaggctcggaaccgggacctagaggcacacgtccggcagttgcaggagcggatggagttgctgcaggcagagggagccacagctgtcacgggggtccccagtccccgggccacggatccaccttcccatctagatggccccccggccgtggctgtgggccagtgcccgctggtggggccaggccccatgcaccgccgccacctgctgctccctgccagggtccctaggcctggcctatcggaggcgctttccctgctcctgttcgccgttgttctgtctcgtgccgccgccctgggctgcattgggttggtggcccacgccggccaactcaccgcagtctggcgccgcccaggagccgcccgcgctccctgaaccctagaactgtcttcgactccggggccccgttggaagactgagtgcccggggcacggcacagaagccgcgcccaccgcctgccagttcacaaccgctccgagcgtgggtctccgcccagctccagtcctgtgatccgggcccgccccctagcggccggggagggaggggccgggtccgcggccggcgaacggggctcgaagggtccttgtagccgggaatgctgctgctgctgctgctgctgctgctgctgctgctgctgctgctgctgctgctgctgctggggggatcacagaccatttctttctttcggccaggctgaggccctgacgtggatgggcaaactgcaggcctgggaaggcagcaagccgggccgtccgtgttccatcctccacgcacccccacctatcgttggttcgcaaagtgcaaagctttcttgtgcatgacgccctgctctggggagcgtctggcgcgatctctgcctgcttactcgggaaatttgcttttgccaaacccgctttttcggggatcccgcgcccccctcctcacttgcgctgctctcggagccccagccggctccgcccgcttcggcggtttggatatttattgacctcgtcctccgactcgctgacaggctacaggacccccaacaaccccaatccacgttttggatgcactgagaccccgacattcctcggtatttattgtctgtccccacctaggacccccacccccgaccctcgcgaataaaaggccctccatc

SEQ ID NO: 128792 - DNA, 1982 bp, Homo sapiens
  Payload ID: 5192
  Gene Symbol: DMPK
  Gene Name: dystrophia myotonica-protein kinase
  Uniprot ID: Q09013
  ENST ID: ENST00000354227
  CDS Start-End: 138-1730
gagaggcccaggggacagccagggacaggcagacatgcagccagggctccagggcctggacaggggctgccaggccctgtgacaggaggaccccgagcccccggcccggggaggggccatggtgctgcctgtccaacatgtcagccgaggtgcggctgaggcggctccagcagctggtgttggacccgggcttcctggggctggagcccctgctcgaccttctcctgggcgtccaccaggagctgggcgcctccgaactggcccaggacaagtacgtggccgacttcttgcagtgggcggagcccatcgtggtgaggcttaaggaggtccgactgcagagggacgacttcgagattctgaaggtgatcggacgcggggcgttcagcgaggtagcggtagtgaagatgaagcagacgggccaggtgtatgccatgaagatcatgaacaagtgggacatgctgaagaggggcgaggtgtcgtgcttccgtgaggagagggacgtgttggtgaatggggaccggcggtggatcacgcagctgcacttcgccttccaggatgagaactacctgtacctggtcatggagtattacgtgggcggggacctgctgacactgctgagcaagtttggggagcggattccggccgagatggcgcgcttctacctggcggagattgtcatggccatagactcggtgcaccggcttggctacgtgcacagggacatcaaacccgacaacatcctgctggaccgctgtggccacatccgcctggccgacttcggctcttgcctcaagctgcgggcagatggaacggtgcggtcgctggtggctgtgggcaccccagactacctgtcccccgagatcctgcaggctgtgggcggtgggcctgggacaggcagctacgggcccgagtgtgactggtgggcgctgggtgtattcgcctatgaaatgttctatgggcagacgcccttctacgcggattccacggcggagacctatggcaagatcgtccactacaaggagcacctctctctgccgctggtggacgaaggggtccctgaggaggctcgagacttcattcagcggttgctgtgtcccccggagacacggctgggccggggtggagcaggcgacttccggacacatcccttcttctttggcctcgactgggatggtctccgggacagcgtgcccccctttacaccggatttcgaaggtgccaccgacacatgcaacttcgacttggtggaggacgggctcactgccatggagacactgtcggacattcgggaaggtgcgccgctaggggtccacctgccttttgtgggctactcctactcctgcatggccctcagggacagtgaggtcccaggccccacacccatggaactggaggccgagcagctgcttgagccacacgtgcaagcgcccagcctggagccctcggtgtccccacaggatgaaacagctgaagtggcagttccagcggctgtccctgcggcagaggctgaggccgaggtgacgctgcgggagctccaggaagccctggaggaggaggtgctcacccggcagagcctgagccgggagatggaggccatccgcacggacaaccagaacttcgccagtcaactacgcgaggcagaggctcggaaccgggacctagaggcacacgtccggcagttgcaggagcggatggagttgctgcaggcagagggagccacaggtccctaggcctggcctatcggaggcgctttccctgctcctgttcgccgttgttctgtctcgtgccgccgccctgggctgcattgggttggtggcccacgccggccaactcaccgcagtctggcgccgcccaggagccgcccgcgctccctgaaccctagaactgtcttcgactccggggccccgttggaagactgagtgcccggggcacggcacagaagccgcgcccaccgcctgccagttcacaaccgctccgagcgt

SEQ ID NO: 128793 - DNA, 2548 bp, Homo sapiens
  Payload ID: 5192
  Gene Symbol: DMPK
  Gene Name: dystrophia myotonica-protein kinase
  Uniprot ID: Q09013
  ENST ID: ENST00000458663
  CDS Start-End: 37-1914
cggcccggggaggggccatggtgctgcctgtccaacatgtcagccgaggtgcggctgaggcggctccagcagctggtgttggacccgggcttcctggggctggagcccctgctcgaccttctcctgggcgtccaccaggagctgggcgcctccgaactggcccaggacaagtacgtggccgacttcttgcagtgggcggagcccatcgtggtgaggcttaaggaggtccgactgcagagggacgacttcgagattctgaaggtgatcggacgcggggcgttcagcgaggtagcggtagtgaagatgaagcagacgggccaggtgtatgccatgaagatcatgaacaagtgggacatgctgaagaggggcgaggtgtcgtgcttccgtgaggagagggacgtgttggtgaatggggaccggcggtggatcacgcagctgcacttcgccttccaggatgagaactacctgtacctggtcatggagtattacgtgggcggggacctgctgacactgctgagcaagtttggggagcggattccggccgagatggcgcgcttctacctggcggagattgtcatggccatagactcggtgcaccggcttggctacgtgcacagggacatcaaacccgacaacatcctgctggaccgctgtggccacatccgcctggccgacttcggctcttgcctcaagctgcgggcagatggaacggtgcggtcgctggtggctgtgggcaccccagactacctgtcccccgagatcctgcaggctgtgggcggtgggcctgggacaggcagctacgggcccgagtgtgactggtgggcgctgggtgtattcgcctatgaaatgttctatgggcagacgcccttctacgcggattccacggcggagacctatggcaagatcgtccactacaaggagcacctctctctgccgctggtggacgaaggggtccctgaggaggctcgagacttcattcagcggttgctgtgtcccccggagacacggctgggccggggtggagcaggcgacttccggacacatcccttcttctttggcctcgactgggatggtctccgggacagcgtgcccccctttacaccggatttcgaaggtgccaccgacacatgcaacttcgacttggtggaggacgggctcactgccatggagacactgtcggacattcgggaaggtgcgccgctaggggtccacctgccttttgtgggctactcctactcctgcatggccctcagggacagtgaggtcccaggccccacacccatggaactggaggccgagcagctgcttgagccacacgtgcaagcgcccagcctggagccctcggtgtccccacaggatgaaacagctgaagtggcagttccagcggctgtccctgcggcagaggctgaggccgaggtgacgctgcgggagctccaggaagccctggaggaggaggtgctcacccggcagagcctgagccgggagatggaggccatccgcacggacaaccagaacttcgccagtcaactacgcgaggcagaggctcggaaccgggacctagaggcacacgtccggcagttgcaggagcggatggagttgctgcaggcagagggagccacagctgtcacgggggtccccagtccccgggccacggatccaccttcccatatggccccccggccgtggctgtgggccagtgcccgctggtggggccaggccccatgcaccgccgccacctgctgctccctgccagggtccctaggcctggcctatcggaggcgctttccctgctcctgttcgccgttgttctgtctcgtgccgccgccctgggctgcattgggttggtggcccacgccggccaactcaccgcagtctggcgccgcccaggagccgcccgcgctccctgaaccctagaactgtcttcgactccggggccccgttggaagactgagtgcccggggcacggcacagaagccgcgcccaccgcctgccagttcacaaccgctccgagcgtgggtctccgcccagctccagtcctgtgatccgggcccgccccctagcggccggggagggaggggccgggtccgcggccggcgaacggggctcgaagggtccttgtagccgggaatgctgctgctgctgctgctgctgctgctgctgctgctgctgctgctgctgctgctgctgctggggggatcacagaccatttctttctttcggccaggctgaggccctgacgtggatgggcaaactgcaggcctgggaaggcagcaagccgggccgtccgtgttccatcctccacgcacccccacctatcgttggttcgcaaagtgcaaagctttcttgtgcatgacgccctgctctggggagcgtctggcgcgatctctgcctgcttactcgggaaatttgcttttgccaaacccgctttttcggggatcccgcgcccccctcctcacttgcgctgctctcggagccccagccggctccgcccgcttcggcggtttggatatttattgacctcgtcctccgactcgctgacaggctacag

SEQ ID NO: 128794 - DNA, 2754 bp, Homo sapiens
  Payload ID: 5192
  Gene Symbol: DMPK
  Gene Name: dystrophia myotonica-protein kinase
  Uniprot ID: Q09013
  ENST ID: ENST00000447742
  CDS Start-End: 128-2002
ggggacagccagggacaggcagacatgcagccagggctccagggcctggacaggggctgccaggccctgtgacaggaggaccccgagcccccggcccggggaggggccatggtgctgcctgtccaacatgtcagccgaggtgcggctgaggcggctccagcagctggtgttggacccgggcttcctggggctggagcccctgctcgaccttctcctgggcgtccaccaggagctgggcgcctccgaactggcccaggacaagtacgtggccgacttcttgcagtgggcggagcccatcgtggtgaggcttaaggaggtccgactgcagagggacgacttcgagattctgaaggtgatcggacgcggggcgttcagcgaggtagcggtagtgaagatgaagcagacgggccaggtgtatgccatgaagatcatgaacaagtgggacatgctgaagaggggcgaggtgtcgtgcttccgtgaggagagggacgtgttggtgaatggggaccggcggtggatcacgcagctgcacttcgccttccaggatgagaactacctgtacctggtcatggagtattacgtgggcggggacctgctgacactgctgagcaagtttggggagcggattccggccgagatggcgcgcttctacctggcggagattgtcatggccatagactcggtgcaccggcttggctacgtgcacagggacatcaaacccgacaacatcctgctggaccgctgtggccacatccgcctggccgacttcggctcttgcctcaagctgcgggcagatggaacggtgcggtcgctggtggctgtgggcaccccagactacctgtcccccgagatcctgcaggctgtgggcggtgggcctgggacaggcagctacgggcccgagtgtgactggtgggcgctgggtgtattcgcctatgaaatgttctatgggcagacgcccttctacgcggattccacggcggagacctatggcaagatcgtccactacaaggagcacctctctctgccgctggtggacgaaggggtccctgaggaggctcgagacttcattcagcggttgctgtgtcccccggagacacggctgggccggggtggagcaggcgacttccggacacatcccttcttctttggcctcgactgggatggtctccgggacagcgtgcccccctttacaccggatttcgaaggtgccaccgacacatgcaacttcgacttggtggaggacgggctcactgccatggagacactgtcggacattcgggaaggtgcgccgctaggggtccacctgccttttgtgggctactcctactcctgcatggccctcagggacagtgaggtcccaggccccacacccatggaactggaggccgagcagctgcttgagccacacgtgcaagcgcccagcctggagccctcggtgtccccacaggatgaaacagctgaagtggcagttccagcggctgtccctgcggcagaggctgaggccgaggtgacgctgcgggagctccaggaagccctggaggaggaggtgctcacccggcagagcctgagccgggagatggaggccatccgcacggacaaccagaacttcgccagtcaactacgcgaggcagaggctcggaaccgggacctagaggcacacgtccggcagttgcaggagcggatggagttgctgcaggcagagggagccacagctgtcacgggggtccccagtccccgggccacggatccaccttcccatctagatggccccccggccgtggctgtgggccagtgcccgctggtggggccaggccccatgcaccgccgccacctgctgctccctgccagggtccctaggcctggcctatcggaggcgctttccctgctcctgttcgccgttgttctgtctcgtgccgccgccctgggctgcattgggttggtggcccacgccggccaactcaccgcagtctggcgccgcccaggagccgcccgcgctccctgaaccctagaactgtcttcgactccggggccccgttggaagactgagtgcccggggcacggcacagaagccgcgcccaccgcctgccagttcacaaccgctccgagcgtgggtctccgcccagctccagtcctgtgatccgggcccgccccctagcggccggggagggaggggccgggtccgcggccggcgaacggggctcgaagggtccttgtagccgggaatgctgctgctgctgctgctgctgctgctgctgctgctgctgctgctgctgctgctgctgctggggggatcacagaccatttctttctttcggccaggctgaggccctgacgtggatgggcaaactgcaggcctgggaaggcagcaagccgggccgtccgtgttccatcctccacgcacccccacctatcgttggttcgcaaagtgcaaagctttcttgtgcatgacgccctgctctggggagcgtctggcgcgatctctgcctgcttactcgggaaatttgcttttgccaaacccgctttttcggggatcccgcgcccccctcctcacttgcgctgctctcggagccccagccggctccgcccgcttcggcggtttggatatttattgacctcgtcctccgactcgctgacaggctacaggacccccaacaaccccaatccacgttttggatgcactgagaccccgacattcctcggtatttattgtctgtccccacctaggacccccacccccgaccctcgcgaataaaa

SEQ ID NO: 128795 - DNA, 2920 bp, Homo sapiens
  Payload ID: 5192
  Gene Symbol: DMPK
  Gene Name: dystrophia myotonica-protein kinase
  ENST ID: ENST00000588522
  CDS Start-End: 201-437
ggctggaccaaggggtggggagaaggggaggaggcctcggccggccgcagagagaagtggccagagaggcccaggggacagccagggacaggcagacatgcagccagggctccagggcctggacaggggctgccaggccctgtgacaggaggaccccgagcccccggcccggggaggggccatggtgctgcctgtccaacatgtcagccgaggtgcggctgaggcggctccagcagctggtgttggacccgggcttcctggggctggagcccctgctcgaccttctcctgggcgtccaccaggagctgggcgcctccgaactggcccaggacaagtacgtggccgacttcttgcagtgggccccaaatccagggttttccaaagtgtggttcaagaaccacctgcatctgaatctagagcggagcccatcgtggtgaggcttaaggaggtccgactgcagagggacgacttcgagattctgaaggtgatcggacgcggggcgttcagcgaggtagcggtagtgaagatgaagcagacgggccaggtgtatgccatgaagatcatgaacaagtgggacatgctgaagaggggcgaggtgtcgtgcttccgtgaggagagggacgtgttggtgaatggggaccggcggtggatcacgcagctgcacttcgccttccaggatgagaactacctgtacctggtcatggagtattacgtgggcggggacctgctgacactgctgagcaagtttggggagcggattccggccgagatggcgcgcttctacctggcggagattgtcatggccatagactcggtgcaccggcttggctacgtgcacagggacatcaaacccgacaacatcctgctggaccgctgtggccacatccgcctggccgacttcggctcttgcctcaagctgcgggcagatggaacggtgcggtcgctggtggctgtgggcaccccagactacctgtcccccgagatcctgcaggctgtgggcggtgggcctgggacaggcagctacgggcccgagtgtgactggtgggcgctgggtgtattcgcctatgaaatgttctatgggcagacgcccttctacgcggattccacggcggagacctatggcaagatcgtccactacaaggagcacctctctctgccgctggtggacgaaggggtccctgaggaggctcgagacttcattcagcggttgctgtgtcccccggagacacggctgggccggggtggagcaggcgacttccggacacatcccttcttctttggcctcgactgggatggtctccgggacagcgtgcccccctttacaccggatttcgaaggtgccaccgacacatgcaacttcgacttggtggaggacgggctcactgccatggtgagcgggggcggggagacactgtcggacattcgggaaggtgcgccgctaggggtccacctgccttttgtgggctactcctactcctgcatggccctcagggacagtgaggtcccaggccccacacccatggaactggaggccgagcagctgcttgagccacacgtgcaagcgcccagcctggagccctcggtgtccccacaggatgaaacagctgaagtggcagttccagcggctgtccctgcggcagaggctgaggccgaggtgacgctgcgggagctccaggaagccctggaggaggaggtgctcacccggcagagcctgagccgggagatggaggccatccgcacggacaaccagaacttcgccagtcaactacgcgaggcagaggctcggaaccgggacctagaggcacacgtccggcagttgcaggagcggatggagttgctgcaggcagagggagccacagctgtcacgggggtccccagtccccgggccacggatccaccttcccatctagatggccccccggccgtggctgtgggccagtgcccgctggtggggccaggccccatgcaccgccgccacctgctgctccctgccagggtccctaggcctggcctatcggaggcgctttccctgctcctgttcgccgttgttctgtctcgtgccgccgccctgggctgcattgggttggtggcccacgccggccaactcaccgcagtctggcgccgcccaggagccgcccgcgctccctgaaccctagaactgtcttcgactccggggccccgttggaagactgagtgcccggggcacggcacagaagccgcgcccaccgcctgccagttcacaaccgctccgagcgtgggtctccgcccagctccagtcctgtgatccgggcccgccccctagcggccggggagggaggggccgggtccgcggccggcgaacggggctcgaagggtccttgtagccgggaatgctgctgctgctgctgctgctgctgctgctgctgctgctgctgctgctgctgctgctgctggggggatcacagaccatttctttctttcggccaggctgaggccctgacgtggatgggcaaactgcaggcctgggaaggcagcaagccgggccgtccgtgttccatcctccacgcacccccacctatcgttggttcgcaaagtgcaaagctttcttgtgcatgacgccctgctctggggagcgtctggcgcgatctctgcctgcttactcgggaaatttgcttttgccaaacccgctttttcggggatcccgcgcccccctcctcacttgcgctgctctcggagccccagccggctccgcccgcttcggcggtttggatatttattgacctcgtcctccgactcgctgacaggctacaggacccccaacaaccccaatccacgttttggatgcactgagaccccgacattcctcggtatttattgtctgtccccacctaggacccccacccccgaccctcgcgaataaaaggccctccatctgcccaaa

SEQ ID NO: 128796 - DNA, 548 bp, Homo sapiens
  Payload ID: 5192
  Gene Symbol: DMPK
  Gene Name: dystrophia myotonica-protein kinase
  ENST ID: ENST00000593574
  CDS Start-End: 1-548
cgactgggatggtctccgggacagcgtgcccccctttacaccggatttcgaaggtgccaccgacacatgcaacttcgacttggtggaggacgggctcactgccatggtgagcgggggcggggagacactgtcggacattcgggaaggtgcgccgctaggggtccacctgccttttgtgggctactcctactcctgcatggccctcagggacagtgaggtcccaggccccacacccatggaactggaggccgagcagctgcttgagccacacgtgcaagcgcccagcctggagccctcggtgtccccacaggatgaaacatcaactacgcgaggcagaggctcggaaccgggacctagaggcacacgtccggcagttgcaggagcggatggagttgctgcaggcagagggagccacaggtccctaggcctggcctatcggaggcgctttccctgctcctgttcgccgttgttctgtctcgtgccgccgccctgggctgcattgggttggtggcccacgccggccaactcaccgcagtctggcgccgccc

SEQ ID NO: 128797 - DNA, 498 bp, Homo sapiens
  Payload ID: 5192
  Gene Symbol: DMPK
  Gene Name: dystrophia myotonica-protein kinase
  ENST ID: ENST00000596067
  CDS Start-End: 123-498
taggaccttgacttctgagaggcctgattgtcatctgtaaataaggggtaggactaaagcactcctcctggaggactgagagatgggctggaccggagcacttgagtctgggatatgtgaccatgctacctttgtctccctgtcctgttccttcccccagccccaaatccagggttttccaaagtgtggttcaagaaccacctgcatctgaatctagagcggagcccatcgtggtgaggcttaaggaggtccgactgcagagggacgacttcgagattctgaaggtgatcggacgcggggcgttcagcgaggtagcggtagtgaagatgaagcagacgggccaggtgtatgccatgaagatcatgaacaagtgggacatgctgaagaggggcgaggtgtcgtgcttccgtgaggagagggacgtgttggtgaatggggaccggcggtggatcacgcagctgcacttcgccttccaggatgagaactacctgtacctgg

SEQ ID NO: 128798 - DNA, 803 bp, Homo sapiens
  Payload ID: 5192
  Gene Symbol: DMPK
  Gene Name: dystrophia myotonica-protein kinase
  ENST ID: ENST00000597660
  CDS Start-End: 1-567
gccgagcagctgcttgagccacacgtgcaagcgcccagcctggagccctcggtgtccccacaggatgaaacagctgaagtggcagttccagcggctgtccctgcggcagaggctgaggccgaggtgacgctgcgggagctccaggaagccctggaggaggaggtgctcacccggcagagcctgagccgggagatggaggccatccgcacggacaaccagaacttcgccagtcaactacgcgaggcagaggctcggaaccgggacctagaggcacacgtccggcagttgcaggagcggatggagttgctgcaggcagagggagccacagctgtcacgggggtccccagtccccgggccacggatccaccttcccatgtaagacccctctctttcccctgcctcagacctgctgcccattctgcagatcccctccctggctcctggtctccccgtccagatatagggctcaccctacgtctttgcgactttagagggcagaagccctttattcagccccagatctccctccgttcaggcctcaccagattccctccgggatctccctagataacctccccaacctcgattcccctcgctgtctctcgccccaccgctgagggctgggctgggctccgatcgggtcacctgtcccttctctctccagctagatggccccccggccgtggctgtgggccagtgcccgctggtggggccaggccccatgcaccgccgccacctgctgctccctgccagggtacgtccggctgcccacgcccccctccgccgtcgcgccccgcgctcca

SEQ ID NO: 128799 - DNA, 3357 bp, Homo sapiens
  Payload ID: 5192
  Gene Symbol: DMPK
  Gene Name: dystrophia myotonica-protein kinase
  ENST ID: ENST00000600757
  CDS Start-End: 689-2596
ggaaccccccggaacccctctctttcctccagaacccactgtctcctctccttccctcccctcccatacccatccctctctccatcctgcctccacttcttccacccccgggagtccaggcctccctgtccccacagtccctgagccacaagcctccaccccagctggtcccccacccaggctgcccagtttaacattcctagtcataggaccttgacttctgagaggcctgattgtcatctgtaaataaggggtaggactaaagcactcctcctggaggactgagagatgggctggaccggagcacttgagtctgggatatgtgaccatgctacctttgtctccctgtcctgttccttcccccagccccaaatccagggttttccaaagtgtggttcaagaaccacctgcatctgaatctagaggtactggatacaaccccacgtctgggccgttacccaggacattctacatgagaacgtgggggtggggccctggctgcacctgaactgtcacctggagtcagggtggaaggtggaagaactgggtcttatttccttctccccttgttctttagggtctgtccttctgcagactccgttaccccaccctaaccatcctgcacacccttggagccctctgggccaatgccctgtcccgcaaagggcttctcaggcatctcacctctatgggagggcatttttggcccccagaaccttacacggtgtttatgtggggaagcccctgggaagcagacagtcctagggtgaagctgagaggcagagagaaggggagacagacagagggtggggctttcccccttgtctccagtgccctttctggtgaccctcggttcttttcccccaccacccccccagcggagcccatcgtggtgaggcttaaggaggtccgactgcagagggacgacttcgagattctgaaggtgatcggacgcggggcgttcagcgaggtagcggtagtgaagatgaagcagacgggccaggtgtatgccatgaagatcatgaacaagtgggacatgctgaagaggggcgaggtgtcgtgcttccgtgaggagagggacgtgttggtgaatggggaccggcggtggatcacgcagctgcacttcgccttccaggatgagaactacctgtacctggtcatggagtattacgtgggcggggacctgctgacactgctgagcaagtttggggagcggattccggccgagatggcgcgcttctacctggcggagattgtcatggccatagactcggtgcaccggcttggctacgtgcacagggacatcaaacccgacaacatcctgctggaccgctgtggccacatccgcctggccgacttcggctcttgcctcaagctgcgggcagatggaacggtgcggtcgctggtggctgtgggcaccccagactacctgtcccccgagatcctgcaggctgtgggcggtgggcctgggacaggcagctacgggcccgagtgtgactggtgggcgctgggtgtattcgcctatgaaatgttctatgggcagacgcccttctacgcggattccacggcggagacctatggcaagatcgtccactacaaggagcacctctctctgccgctggtggacgaaggggtccctgaggaggctcgagacttcattcagcggttgctgtgtcccccggagacacggctgggccggggtggagcaggcgacttccggacacatcccttcttctttggcctcgactgggatggtctccgggacagcgtgcccccctttacaccggatttcgaaggtgccaccgacacatgcaacttcgacttggtggaggacgggctcactgccatggagacactgtcggacattcgggaaggtgcgccgctaggggtccacctgccttttgtgggctactcctactcctgcatggccctcagggacagtgaggtcccaggccccacacccatggaactggaggccgagcagctgcttgagccacacgtgcaagcgcccagcctggagccctcggtgtccccacaggatgaaacagctgaagtggcagttccagcggctgtccctgcggcagaggctgaggccgaggtgacgctgcgggagctccaggaagccctggaggaggaggtgctcacccggcagagcctgagccgggagatggaggccatccgcacggacaaccagaacttcgccagtcaactacgcgaggcagaggctcggaaccgggacctagaggcacacgtccggcagttgcaggagcggatggagttgctgcaggcagagggagccacagctgtcacgggggtccccagtccccgggccacggatccaccttcccatatggccccccggccgtggctgtgggccagtgcccgctggtggggccaggccccatgcaccgccgccacctgctgctccctgccagggtccctaggcctggcctatcggaggcgctttccctgctcctgttcgccgttgttctgtctcgtgccgccgccctgggctgcattgggttggtggcccacgccggccaactcaccgcagtctggcgccgcccaggagccgcccgcgctccctgaaccctagaactgtcttcgactccggggccccgttggaagactgagtgcccggggcacggcacagaagccgcgcccaccgcctgccagttcacaaccgctccgagcgtgggtctccgcccagctccagtcctgtgatccgggcccgccccctagcggccggggagggaggggccgggtccgcggccggcgaacggggctcgaagggtccttgtagccgggaatgctgctgctgctgctgctgctgctgctgctgctgctgctgctgctgctgctgctgctgctggggggatcacagaccatttctttctttcggccaggctgaggccctgacgtggatgggcaaactgcaggcctgggaaggcagcaagccgggccgtccgtgttccatcctccacgcacccccacctatcgttggttcgcaaagtgcaaagctttcttgtgcatgacgccctgctctggggagcgtctggcgcgatctctgcctgcttactcgggaaatttgcttttgccaaacccgctttttcggggatcccgcgcccccctcctcacttgcgctgctctcggagccccagccggctccgcccgcttcggcggtttggatatttattgacctcgtcctccgactcgctgacaggctacaggacccccaacaaccccaatccacgttttggatgcactgagaccccgacattcctcggtatttattgtctgtccccacctaggacccccacccccgaccctcgcgaataaaaggccctccatctgccc

SEQ ID NO: 128800 - DNA, 2503 bp, Homo sapiens
  Payload ID: 5192
  Gene Symbol: DMPK
  Gene Name: dystrophia myotonica-protein kinase
  Uniprot ID: Q09013
  ENST ID: ENST00000618091
  CDS Start-End: 37-1914
cggcccggggaggggccatggtgctgcctgtccaacatgtcagccgaggtgcggctgaggcggctccagcagctggtgttggacccgggcttcctggggctggagcccctgctcgaccttctcctgggcgtccaccaggagctgggcgcctccgaactggcccaggacaagtacgtggccgacttcttgcagtgggcggagcccatcgtggtgaggcttaaggaggtccgactgcagagggacgacttcgagattctgaaggtgatcggacgcggggcgttcagcgaggtagcggtagtgaagatgaagcagacgggccaggtgtatgccatgaagatcatgaacaagtgggacatgctgaagaggggcgaggtgtcgtgcttccgtgaggagagggacgtgttggtgaatggggaccggcggtggatcacgcagctgcacttcgccttccaggatgagaactacctgtacctggtcatggagtattacgtgggcggggacctgctgacactgctgagcaagtttggggagcggattccggccgagatggcgcgcttctacctggcggagattgtcatggccatagactcggtgcaccggcttggctacgtgcacagggacatcaaacccgacaacatcctgctggaccgctgtggccacatccgcctggccgacttcggctcttgcctcaagctgcgggcagatggaacggtgcggtcgctggtggctgtgggcaccccagactacctgtcccccgagatcctgcaggctgtgggcggtgggcctgggacaggcagctacgggcccgagtgtgactggtgggcgctgggtgtattcgcctatgaaatgttctatgggcagacgcccttctacgcggattccacggcggagacctatggcaagatcgtccactacaaggagcacctctctctgccgctggtggacgaaggggtccctgaggaggctcgagacttcattcagcggttgctgtgtcccccggagacacggctgggccggggtggagcaggcgacttccggacacatcccttcttctttggcctcgactgggatggtctccgggacagcgtgcccccctttacaccggatttcgaaggtgccaccgacacatgcaacttcgacttggtggaggacgggctcactgccatggagacactgtcggacattcgggaaggtgcgccgctaggggtccacctgccttttgtgggctactcctactcctgcatggccctcagggacagtgaggtcccaggccccacacccatggaactggaggccgagcagctgcttgagccacacgtgcaagcgcccagcctggagccctcggtgtccccacaggatgaaacagctgaagtggcagttccagcggctgtccctgcggcagaggctgaggccgaggtgacgctgcgggagctccaggaagccctggaggaggaggtgctcacccggcagagcctgagccgggagatggaggccatccgcacggacaaccagaacttcgccagtcaactacgcgaggcagaggctcggaaccgggacctagaggcacacgtccggcagttgcaggagcggatggagttgctgcaggcagagggagccacagctgtcacgggggtccccagtccccgggccacggatccaccttcccatatggccccccggccgtggctgtgggccagtgcccgctggtggggccaggccccatgcaccgccgccacctgctgctccctgccagggtccctaggcctggcctatcggaggcgctttccctgctcctgttcgccgttgttctgtctcgtgccgccgccctgggctgcattgggttggtggcccacgccggccaactcaccgcagtctggcgccgcccaggagccgcccgcgctccctgaaccctagaactgtcttcgactccggggccccgttggaagactgagtgcccggggcacggcacagaagccgcgcccaccgcctgccagttcacaaccgctccgagcgtgggtctccgcccagctccagtcctgtgatccgggcccgccccctagcggccggggagggaggggccgggtccgcggccggcgaacggggctcgaagggtccttgtagccgggaatgctgctgctgctgctggggggatcacagaccatttctttctttcggccaggctgaggccctgacgtggatgggcaaactgcaggcctgggaaggcagcaagccgggccgtccgtgttccatcctccacgcacccccacctatcgttggttcgcaaagtgcaaagctttcttgtgcatgacgccctgctctggggagcgtctggcgcgatctctgcctgcttactcgggaaatttgcttttgccaaacccgctttttcggggatcccgcgcccccctcctcacttgcgctgctctcggagccccagccggctccgcccgcttcggcggtttggatatttattgacctcgtcctccgactcgctgacaggctacag

SEQ ID NO: 128801 - DNA, 3856 bp, Homo sapiens
  Payload ID: 5193
  Gene Symbol: DMD
  Gene Name: dystrophin
  ENST ID: ENST00000288447
  CDS Start-End: 177-2495
atgcgaaaggggagctgttggaattcaaatagactttctggttcccagcagtcggcagtaatagaatgctttcaggaagatgacagaatcaggagaaagatgctgttttgcactatcttgatttgttacagcagccaacttattggcatgatggagtgacaggaaaaacagctggcatggaagatgaaagagaagatgttcaaaagaaaacattcacaaaatgggtaaatgcacaattttctaagtttgggaagcagcatattgagaacctcttcagtgacctacaggatgggaggcgcctcctagacctcctcgaaggcctgacagggcaaaaactgccaaaagaaaaaggatccacaagagttcatgccctgaacaatgtcaacaaggcactgcgggttttgcagaacaataatgttgatttagtgaatattggaagtactgacatcgtagatggaaatcataaactgactcttggtttgatttggaatataatcctccactggcaggtcaaaaatgtaatgaaaaatatcatggctggattgcaacaaaccaacagtgaaaagattctcctgagctgggtccgacaatcaactcgtaattatccacaggttaatgtaatcaacttcaccaccagctggtctgatggcctggctttgaatgctctcatccatagtcataggccagacctatttgactggaatagtgtggtttgccagcagtcagccacacaacgactggaacatgcattcaacatcgccagatatcaattaggcatagagaaactactcgatcctgaagatgttgataccacctatccagataagaagtccatcttaatgtacatcacatcactcttccaagttttgcctcaacaagtgagcattgaagccatccaggaagtggaaatgttgccaaggccacctaaagtgactaaagaagaacattttcagttacatcatcaaatgcactattctcaacagatcacggtcagtctagcacagggatatgagagaacttcttcccctaagcctcgattcaagagctatgcctacacacaggctgcttatgtcaccacctctgaccctacacggagcccatttccttcacagcatttggaagctcctgaagacaagtcatttggcagttcattgatggagagtgaagtaaacctggaccgttatcaaacagctttagaagaagtattatcgtggcttctttctgctgaggacacattgcaagcacaaggagagatttctaatgatgtggaagtggtgaaagaccagtttcatactcatgaggggtacatgatggatttgacagcccatcagggccgggttggtaatattctacaattgggaagtaagctgattggaacaggaaaattatcagaagatgaagaaactgaagtacaagagcagatgaatctcctaaattcaagatgggaatgcctcagggtagctagcatggaaaaacaaagcaatttacatagagttttaatggatctccagaatcagaaactgaaagagttgaatgactggctaacaaaaacagaagaaagaacaaggaaaatggaggaagagcctcttggacctgatcttgaagacctaaaacgccaagtacaacaacataaggtgcttcaagaagatctagaacaagaacaagtcagggtcaattctctcactcacatggtggtggtagttgatgaatctagtggagatcacgcaactgctgctttggaagaacaacttaaggtattgggagatcgatgggcaaacatctgtagatggacagaagaccgctgggttcttttacaagacatccttctcaaatggcaacgtcttactgaagaacagtgcctttttagtgcatggctttcagaaaaagaagatgcagtgaacaagattcacacaactggctttaaagatcaaaatgaaatgttatcaagtcttcaaaaactggccgttttaaaagcggatctagaaaagaaaaagcaatccatgggcaaactgtattcactcaaacaagatcttctttcaacactgaagaataagtcagtgacccagaagacggaagcatggctggataactttgcccggtgttgggataatttagtccaaaaacttgaaaagagtacagcacagatttcacaggctgtcaccaccactcagccatcactaacacagacaactgtaatggaaacagtaactacggtgaccacaagggaacagatcctggtaaagcatgctcaagaggaacttccaccaccacctccccaaaagaagaggcagattactgtggattctgaaattaggaaaaggttggatgttgatataactgaacttcacagctggattactcgctcagaagctgtgttgcagagtcctgaatttgcaatctttcggaaggaaggcaacttctcagacttaaaagaaaaagtcaatgtaggttatgcattaatttttatatctgtactcattttgtgctgcttgtaaactccgtgctttgttatctgtgattctactagttgatagattaatgcgatatgataaaatgctgtttaatatgtcttaaaaatatattttagatagcaagcaaaatcaaagtttagcctagagaaatctttctggattcttctgtgactgactagggatgcctttcataaacttgccttaacttacatattatttaactataaattaacaattttatgacattaattcatgttgattcctttcatatattgttcagttacctcaaggctaggccttagcaagcttgcacaattgtgtagagtagaatagagtaaaatagaatagaataatataatagataccatacttaggactatgtctatattctcactgttatcaaaaagttattctttatagtcatcaatccctgtcatatattataagatatttaaatttcccagatatttgtgtattaccttatctaaaaggtgtccagcctttctcagtatttacatgtggtagcagatgctttgttgttgttattcccttctgagatggtataattttgaccttcacaaataggaagttttattaatttaatataaagtgtttcatctttagggaaattgtcaaggctttaatttttcaacttcaacaattataaaacatgcatctttgtatatgattggcaacagtttgtaaaataatttctaacaggcagagtaaataaaatgggcaagctaaggaagcagtgattatgaatgaaaagtaattttatccatgggaagatcacatctaaatgtgtatattagctctgctttttctctccaggattcaaatcatgaagttcaaaatccattgtatttttacaaatacgacattacctcagttacaagctaatgtttgctgttggggttggaacttttggagatcaacaaaagatatatatatattctggaaaaaaaatctattttttaggctgcttgaaaaagggaagacaattttgtcaccagttcttcttagagttaactacttataaattggaaagctattttaaattacttattagctttataagacatgctgttgtcagcattataatagactattctaaattgtttcaagaaatgggaaatatgaaaactgaaagataatatataattgtagaaaattagctaaatgtcttttttcaagtatacttctttgaaggtaaattgtttgctgtgatttttgagggaaattctcttagtagtagaaaattaattagagaacattaaactctaattttcaaacatcatgttacatatttgaccactgaaagtatgaatcacctttagcattttattagctaattaaaaatgattattgatctgattctcaca

SEQ ID NO: 128802 - DNA, 5623 bp, Homo sapiens
  Payload ID: 5193
  Gene Symbol: DMD
  Gene Name: dystrophin
  ENST ID: ENST00000343523
  CDS Start-End: 62-2932
gggttttctcaggattgctatgcaacaggatcagtgctgtagtgcccggttcaagctgaaaatgttacacaggaagacataccatgtaaaggacctccaaggtgaaattgaagctcacacagatgtttatcacaacctggatgaaaacagccaaaaaatcctgagatccctggaaggttccgatgatgcagtcctgttacaaagacgtttggataacatgaacttcaagtggagtgaacttcggaaaaagtctctcaacattaggtcccatttggaagccagttctgaccagtggaagcgtctgcacctttctctgcaggaacttctggtgtggctacagctgaaagatgatgaattaagccggcaggcacctattggaggcgactttccagcagttcagaagcagaacgatgtacatagggccttcaagagggaattgaaaactaaagaacctgtaatcatgagtactcttgagactgtacgaatatttctgacagagcagcctttggaaggactagagaaactctaccaggagcccagagagctgcctcctgaggagagagcccagaatgtcactcggcttctacgaaagcaggctgaggaggtcaatactgagtgggaaaaattgaacctgcactccgctgactggcagagaaaaatagatgagacccttgaaagactccgggaacttcaagaggccacggatgagctggacctcaagctgcgccaagctgaggtgatcaagggatcctggcagcccgtgggcgatctcctcattgactctctccaagatcacctcgagaaagtcaaggcacttcgaggagaaattgcgcctctgaaagagaacgtgagccacgtcaatgaccttgctcgccagcttaccactttgggcattcagctctcaccgtataacctcagcactctggaagacctgaacaccagatggaagcttctgcaggtggccgtcgaggaccgagtcaggcagctgcatgaagcccacagggactttggtccagcatctcagcactttctttccacgtctgtccagggtccctgggagagagccatctcgccaaacaaagtgccctactatatcaaccacgagactcaaacaacttgctgggaccatcccaaaatgacagagctctaccagtctttagctgacctgaataatgtcagattctcagcttataggactgccatgaaactccgaagactgcagaaggccctttgcttggatctcttgagcctgtcagctgcatgtgatgccttggaccagcacaacctcaagcaaaatgaccagcccatggatatcctgcagattattaattgtttgaccactatttatgaccgcctggagcaagagcacaacaatttggtcaacgtccctctctgcgtggatatgtgtctgaactggctgctgaatgtttatgatacgggacgaacagggaggatccgtgtcctgtcttttaaaactggcatcatttccctgtgtaaagcacatttggaagacaagtacagataccttttcaagcaagtggcaagttcaacaggattttgtgaccagcgcaggctgggcctccttctgcatgattctatccaaattccaagacagttgggtgaagttgcatcctttgggggcagtaacattgagccaagtgtccggagctgcttccaatttgctaataataagccagagatcgaagcggccctcttcctagactggatgagactggaaccccagtccatggtgtggctgcccgtcctgcacagagtggctgctgcagaaactgccaagcatcaggccaaatgtaacatctgcaaagagtgtccaatcattggattcaggtacaggagtctaaagcactttaattatgacatctgccaaagctgctttttttctggtcgagttgcaaaaggccataaaatgcactatcccatggtggaatattgcactccgactacatcaggagaagatgttcgagactttgccaaggtactaaaaaacaaatttcgaaccaaaaggtattttgcgaagcatccccgaatgggctacctgccagtgcagactgtcttagagggggacaacatggaaactcccgttactctgatcaacttctggccagtagattctgcgcctgcctcgtcccctcagctttcacacgatgatactcattcacgcattgaacattatgctagcaggctagcagaaatggaaaacagcaatggatcttatctaaatgatagcatctctcctaatgagagcatagatgatgaacatttgttaatccagcattactgccaaagtttgaaccaggactcccccctgagccagcctcgtagtcctgcccagatcttgatttccttagagagtgaggaaagaggggagctagagagaatcctagcagatcttgaggaagaaaacaggaatctgcaagcagaatatgaccgtctaaagcagcagcacgaacataaaggcctgtccccactgccgtcccctcctgaaatgatgcccacctctccccagagtccccgggatgctgagctcattgctgaggccaagctactgcgtcaacacaaaggccgcctggaagccaggatgcaaatcctggaagaccacaataaacagctggagtcacagttacacaggctaaggcagctgctggagcaaccccaggcagaggccaaagtgaatggcacaacggtgtcctctccttctacctctctacagaggtccgacagcagtcagcctatgctgctccgagtggttggcagtcaaacttcggactccatgggtgaggaagatcttctcagtcctccccaggacacaagcacagggttagaggaggtgatggagcaactcaacaactccttccctagttcaagaggaagaaatacccctggaaagccaatgagagaggacacaatgtaggaagtcttttccacatggcagatgatttgggcagagcgatggagtccttagtatcagtcatgacagatgaagaaggagcagaataaatgttttacaactcctgattcccgcatggtttttataatattcatacaacaaagaggattagacagtaagagtttacaagaaataaatctatatttttgtgaagggtagtggtattatactgtagatttcagtagtttctaagtctgttattgttttgttaacaatggcaggttttacacgtctatgcaattgtacaaaaaagttataagaaaactacatgtaaaatcttgatagctaaataacttgccatttctttatatggaacgcattttgggttgtttaaaaatttataacagttataaagaaagattgtaaactaaagtgtgctttataaaaaaaagttgtttataaaaacccctaaaaacaaaacaaacacacacacacacacatacacacacacacacaaaactttgaggcagcgcattgttttgcatccttttggcgtgatatccatatgaaattcatggctttttctttttttgcatattaaagataagacttcctctaccaccacaccaaatgactactacacactgctcatttgagaactgtcagctgagtggggcaggcttgagttttcatttcatatatctatatgtctataagtatataaatactatagttatatagataaagagatacgaatttctatagactgactttttccattttttaaatgttcatgtcacatcctaatagaaagaaattacttctagtcagtcatccaggcttacctgcttggtctagaatggatttttcccggagccggaagccaggaggaaactacaccacactaaaacattgtctacagctccagatgtttctcattttaaacaactttccactgacaacgaaagtaaagtaaagtattggatttttttaaagggaacatgtgaatgaatacacaggacttattatatcagagtgagtaatcggttggttggttgattgattgattgattgatacattcagcttcctgctgctagcaatgccacgatttagatttaatgatgcttcagtggaaatcaatcagaaggtattctgaccttgtgaacatcagaaggtattttttaactcccaagcagtagcaggacgatgatagggctggagggctatggattcccagcccatccctgtgaaggagtaggccactctttaagtgaaggattggatgattgttcataatacataaagttctctgtaattacaactaaattattatgccctcttctcacagtcaaaaggaactgggtggtttggtttttgttgcttttttagatttattgtcccatgtgggatgagtttttaaatgccacaagacataatttaaaataaataaactttgggaaaaggtgtaaaacagtagccccatcacatttgtgatactgacaggtatcaacccagaagcccatgaactgtgtttccatcctttgcatttctctgcgagtagttccacacaggtttgtaagtaagtaagaaagaaggcaaattgattcaaatgttacaaaaaaacccttcttggtggattagacaggttaaatatataaacaaacaaacaaaaattgctcaaaaaagaggagaaaagctcaagaggaaaagctaaggactggtaggaaaaagctttactctttcatgccattttatttctttttgatttttaaatcattcattcaatagataccaccgtgtgacctataattttgcaaatctgttacctctgacatcaagtgtaattagcttttggagagtgggctgacatcaagtgtaattagcttttggagagtgggttttgtccattattaataattaattaattaacatcaaacacggcttctcatgctatttctacctcactttggttttggggtgttcctgataattgtgcacacctgagttcacagcttcaccacttgtccattgcgttattttctttttcctttataattctttctttttccttcataattttcaaaagaaaacccaaagctctaaggtaacaaattaccaaattacatgaagatttggtttttgtcttgcatttttttcctttatgtgacgctggaccttttctttacccaaggatttttaaaactcagatttaaaacaaggggttactttacatcctactaagaagtttaagtaagtaagtttcattctaaaatcagaggtaaatagagtgcataaataattttgttttaatctttttgtttttcttttagacacattagctctggagtgagtctgtcataatatttgaacaaaaattgagagctttattgctgcattttaagcataattaatttggacattatttcgtgttgtgttctttataaccaccaagtattaaactgtaaatcataatgtaactgaagcataaacatcacatggcatgttttgtcattgttttcaggtactgagttcttacttgagtatcataatatattgtgttttaacaccaacactgtaacatttacgaattatttttttaaacttcagttttactgcattttcacaacatatcagacttcaccaaatatatgccttactattgtattatagtactgctttactgtgtatctcaataaagcacgcagttatgttac

SEQ ID NO: 128803 - DNA, 6773 bp, Homo sapiens
  Payload ID: 5193
  Gene Symbol: DMD
  Gene Name: dystrophin
  ENST ID: ENST00000358062
  CDS Start-End: 1-4161
gtttccagagctttacctgagaaacaaggagaaattgaagctcaaataaaagaccttgggcagcttgaaaaaaagcttgaagaccttgaagagcagttaaatcatctgctgctgtggttatctcctattaggaatcagttggaaatttataaccaaccaaaccaagaaggaccatttgacgttaaggaaactgaaatagcagttcaagctaaacaaccggatgtggaagagattttgtctaaagggcagcatttgtacaaggaaaaaccagccactcagccagtgaagaggaagttagaagatctgagctctgagtggaaggcggtaaaccgtttacttcaagagctgagggcaaagcagcctgacctagctcctggactgaccactattggagcctctcctactcagactgttactctggtgacacaacctgtggttactaaggaaactgccatctccaaactagaaatgccatcttccttgatgttggaggtacctgctctggcagatttcaaccgggcttggacagaacttaccgactggctttctctgcttgatcaagttataaaatcacagagggtgatggtgggtgaccttgaggatatcaacgagatgatcatcaagcagaaggcaacaatgcaggatttggaacagaggcgtccccagttggaagaactcattaccgctgcccaaaatttgaaaaacaagaccagcaatcaagaggctagaacaatcattacggatcgaattgaaagaattcagaatcagtgggatgaagtacaagaacaccttcagaaccggaggcaacagttgaatgaaatgttaaaggattcaacacaatggctggaagctaaggaagaagctgagcaggtcttaggacaggccagagccaagcttgagtcatggaaggagggtccctatacagtagatgcaatccaaaagaaaatcacagaaaccaagcagttggccaaagacctccgccagtggcagacaaatgtagatgtggcaaatgacttggccctgaaacttctccgggattattctgcagatgataccagaaaagtccacatgataacagagaatatcaatgcctcttggagaagcattcataaaagggtgagtgagcgagaggctgctttggaagaaactcatagattactgcaacagttccccctggacctggaaaagtttcttgcctggcttacagaagctgaaacaactgccaatgtcctacaggatgctacccgtaaggaaaggctcctagaagactccaagggagtaaaagagctgatgaaacaatggcaagacctccaaggtgaaattgaagctcacacagatgtttatcacaacctggatgaaaacagccaaaaaatcctgagatccctggaaggttccgatgatgcagtcctgttacaaagacgtttggataacatgaacttcaagtggagtgaacttcggaaaaagtctctcaacattaggtcccatttggaagccagttctgaccagtggaagcgtctgcacctttctctgcaggaacttctggtgtggctacagctgaaagatgatgaattaagccggcaggcacctattggaggcgactttccagcagttcagaagcagaacgatgtacatagggccttcaagagggaattgaaaactaaagaacctgtaatcatgagtactcttgagactgtacgaatatttctgacagagcagcctttggaaggactagagaaactctaccaggagcccagagagctgcctcctgaggagagagcccagaatgtcactcggcttctacgaaagcaggctgaggaggtcaatactgagtgggaaaaattgaacctgcactccgctgactggcagagaaaaatagatgagacccttgaaagactccgggaacttcaagaggccacggatgagctggacctcaagctgcgccaagctgaggtgatcaagggatcctggcagcccgtgggcgatctcctcattgactctctccaagatcacctcgagaaagtcaaggcacttcgaggagaaattgcgcctctgaaagagaacgtgagccacgtcaatgaccttgctcgccagcttaccactttgggcattcagctctcaccgtataacctcagcactctggaagacctgaacaccagatggaagcttctgcaggtggccgtcgaggaccgagtcaggcagctgcatgaagcccacagggactttggtccagcatctcagcactttctttccacgtctgtccagggtccctgggagagagccatctcgccaaacaaagtgccctactatatcaaccacgagactcaaacaacttgctgggaccatcccaaaatgacagagctctaccagtctttagctgacctgaataatgtcagattctcagcttataggactgccatgaaactccgaagactgcagaaggccctttgcttggatctcttgagcctgtcagctgcatgtgatgccttggaccagcacaacctcaagcaaaatgaccagcccatggatatcctgcagattattaattgtttgaccactatttatgaccgcctggagcaagagcacaacaatttggtcaacgtccctctctgcgtggatatgtgtctgaactggctgctgaatgtttatgatacgggacgaacagggaggatccgtgtcctgtcttttaaaactggcatcatttccctgtgtaaagcacatttggaagacaagtacagataccttttcaagcaagtggcaagttcaacaggattttgtgaccagcgcaggctgggcctccttctgcatgattctatccaaattccaagacagttgggtgaagttgcatcctttgggggcagtaacattgagccaagtgtccggagctgcttccaatttgctaataataagccagagatcgaagcggccctcttcctagactggatgagactggaaccccagtccatggtgtggctgcccgtcctgcacagagtggctgctgcagaaactgccaagcatcaggccaaatgtaacatctgcaaagagtgtccaatcattggattcaggtacaggagtctaaagcactttaattatgacatctgccaaagctgctttttttctggtcgagttgcaaaaggccataaaatgcactatcccatggtggaatattgcactccgactacatcaggagaagatgttcgagactttgccaaggtactaaaaaacaaatttcgaaccaaaaggtattttgcgaagcatccccgaatgggctacctgccagtgcagactgtcttagagggggacaacatggaaacgcctgcctcgtcccctcagctttcacacgatgatactcattcacgcattgaacattatgctagcaggctagcagaaatggaaaacagcaatggatcttatctaaatgatagcatctctcctaatgagagcatagatgatgaacatttgttaatccagcattactgccaaagtttgaaccaggactcccccctgagccagcctcgtagtcctgcccagatcttgatttccttagagagtgaggaaagaggggagctagagagaatcctagcagatcttgaggaagaaaacaggaatctgcaagcagaatatgaccgtctaaagcagcagcacgaacataaaggcctgtccccactgccgtcccctcctgaaatgatgcccacctctccccagagtccccgggatgctgagctcattgctgaggccaagctactgcgtcaacacaaaggccgcctggaagccaggatgcaaatcctggaagaccacaataaacagctggagtcacagttacacaggctaaggcagctgctggagcaaccccaggcagaggccaaagtgaatggcacaacggtgtcctctccttctacctctctacagaggtccgacagcagtcagcctatgctgctccgagtggttggcagtcaaacttcggactccatgggtgaggaagatcttctcagtcctccccaggacacaagcacagggttagaggaggtgatggagcaactcaacaactccttccctagttcaagaggacacaatgtaggaagtcttttccacatggcagatgatttgggcagagcgatggagtccttagtatcagtcatgacagatgaagaaggagcagaataaatgttttacaactcctgattcccgcatggtttttataatattcatacaacaaagaggattagacagtaagagtttacaagaaataaatctatatttttgtgaagggtagtggtattatactgtagatttcagtagtttctaagtctgttattgttttgttaacaatggcaggttttacacgtctatgcaattgtacaaaaaagttataagaaaactacatgtaaaatcttgatagctaaataacttgccatttctttatatggaacgcattttgggttgtttaaaaatttataacagttataaagaaagattgtaaactaaagtgtgctttataaaaaaaagttgtttataaaaacccctaaaaacaaaacaaacacacacacacacacatacacacacacacacaaaactttgaggcagcgcattgttttgcatccttttggcgtgatatccatatgaaattcatggctttttctttttttgcatattaaagataagacttcctctaccaccacaccaaatgactactacacactgctcatttgagaactgtcagctgagtggggcaggcttgagttttcatttcatatatctatatgtctataagtatataaatactatagttatatagataaagagatacgaatttctatagactgactttttccattttttaaatgttcatgtcacatcctaatagaaagaaattacttctagtcagtcatccaggcttacctgcttggtctagaatggatttttcccggagccggaagccaggaggaaactacaccacactaaaacattgtctacagctccagatgtttctcattttaaacaactttccactgacaacgaaagtaaagtaaagtattggatttttttaaagggaacatgtgaatgaatacacaggacttattatatcagagtgagtaatcggttggttggttgattgattgattgattgatacattcagcttcctgctgctagcaatgccacgatttagatttaatgatgcttcagtggaaatcaatcagaaggtattctgaccttgtgaacatcagaaggtattttttaactcccaagcagtagcaggacgatgatagggctggagggctatggattcccagcccatccctgtgaaggagtaggccactctttaagtgaaggattggatgattgttcataatacataaagttctctgtaattacaactaaattattatgccctcttctcacagtcaaaaggaactgggtggtttggtttttgttgcttttttagatttattgtcccatgtgggatgagtttttaaatgccacaagacataatttaaaataaataaactttgggaaaaggtgtaaaacagtagccccatcacatttgtgatactgacaggtatcaacccagaagcccatgaactgtgtttccatcctttgcatttctctgcgagtagttccacacaggtttgtaagtaagtaagaaagaaggcaaattgattcaaatgttacaaaaaaacccttcttggtggattagacaggttaaatatataaacaaacaaacaaaaattgctcaaaaaagaggagaaaagctcaagaggaaaagctaaggactggtaggaaaaagctttactctttcatgccattttatttctttttgatttttaaatcattcattcaatagataccaccgtgtgacctataattttgcaaatctgttacctctgacatcaagtgtaattagcttttggagagtgggctgacatcaagtgtaattagcttttggagagtgggttttgtccattattaataattaattaattaacatcaaacacggcttctcatgctatttctacctcactttggttttggggtgttcctgataattgtgcacacctgagttcacagcttcaccacttgtccattgcgttattttctttttcctttataattctttctttttccttcataattttcaaaagaaaacccaaagctctaaggtaacaaattaccaaattacatgaagatttggtttttgtcttgcatttttttcctttatgtgacgctggaccttttctttacccaaggatttttaaaactcagatttaaaacaaggggttactttacatcctactaagaagtttaagtaagtaagtttcattctaaaatcagaggtaaatagagtgcataaataattttgttttaatctttttgtttttcttttagacacattagctctggagtgagtctgtcataatatttgaacaaaaattgagagctttattgctgcattttaagcataattaatttggacattatttcgtgttgtgttctttataaccaccaagtattaaactgtaaatcataatgtaactgaagcataaacatcacatggcatgttttgtcattgttttcaggtactgagttcttacttgagtatcataatatattgtgttttaacaccaacactgtaacatttacgaattatttttttaaacttcagttttactgcattttcacaacatatcagacttcaccaaatatatgccttactattgtattatagtactgctttactgtgtatctcaataaagcacgcagttatgttacaaaaaag

SEQ ID NO: 128804 - DNA, 7339 bp, Homo sapiens
  Payload ID: 5193
  Gene Symbol: DMD
  Gene Name: dystrophin
  ENST ID: ENST00000359836
  CDS Start-End: 1042-4734
acactagcaatggcaaagctttgtgcggaggcattgctggctgctctgaactaaaagcatccgtggggaccgaaagaggtttttgcacaccttattaaggaactccaggatggcattgggcagcggcaaactgttgtcagaacattgaatgcaactggggaagaaataattcagcaatcctcaaaaacagatgccagtattctacaggaaaaattgggaagcctgaatctgcggtggcaggaggtctgcaaacagctgtcagacagaaaaaagaggctagaagaacaaaagaatatcttgtcagaatttcaaagagatttaaatgaatttgttttatggttggaggaagcagataacattgctagtatcccacttgaacctggaaaagagcagcaactaaaagaaaagcttgagcaagtcaagttactggtggaagagttgcccctgcgccagggaattctcaaacaattaaatgaaactggaggacccgtgcttgtaagtgctcccataagcccagaagagcaagataaacttgaaaataagctcaagcagacaaatctccagtggataaaggtttccagagctttacctgagaaacaaggagaaattgaagctcaaataaaagaccttgggcagcttgaaaaaaagcttgaagaccttgaagagcagttaaatcatctgctgctgtggttatctcctattaggaatcagttggaaatttataaccaaccaaaccaagaaggaccatttgacgttaaggaaactgaaatagcagttcaagctaaacaaccggatgtggaagagattttgtctaaagggcagcatttgtacaaggaaaaaccagccactcagccagtgaagaggaagttagaagatctgagctctgagtggaaggcggtaaaccgtttacttcaagagctgagggcaaagcagcctgacctagctcctggactgaccactattggagcctctcctactcagactgttactctggtgacacaacctgtggttactaaggaaactgccatctccaaactagaaatgccatcttccttgatgttggaggtacctgctctggcagatttcaaccgggcttggacagaacttaccgactggctttctctgcttgatcaagttataaaatcacagagggtgatggtgggtgaccttgaggatatcaacgagatgatcatcaagcagaaggcaacaatgcaggatttggaacagaggcgtccccagttggaagaactcattaccgctgcccaaaatttgaaaaacaagaccagcaatcaagaggctagaacaatcattacggatcgaattgaaagaattcagaatcagtgggatgaagtacaagaacaccttcagaaccggaggcaacagttgaatgaaatgttaaaggattcaacacaatggctggaagctaaggaagaagctgagcaggtcttaggacaggccagagccaagcttgagtcatggaaggagggtccctatacagtagatgcaatccaaaagaaaatcacagaaaccaagcagttggccaaagacctccgccagtggcagacaaatgtagatgtggcaaatgacttggccctgaaacttctccgggattattctgcagatgataccagaaaagtccacatgataacagagaatatcaatgcctcttggagaagcattcataaaagggtgagtgagcgagaggctgctttggaagaaactcatagattactgcaacagttccccctggacctggaaaagtttcttgcctggcttacagaagctgaaacaactgccaatgtcctacaggatgctacccgtaaggaaaggctcctagaagactccaagggagtaaaagagctgatgaaacaatggcaagacctccaaggtgaaattgaagctcacacagatgtttatcacaacctggatgaaaacagccaaaaaatcctgagatccctggaaggttccgatgatgcagtcctgttacaaagacgtttggataacatgaacttcaagtggagtgaacttcggaaaaagtctctcaacattaggtcccatttggaagccagttctgaccagtggaagcgtctgcacctttctctgcaggaacttctggtgtggctacagctgaaagatgatgaattaagccggcaggcacctattggaggcgactttccagcagttcagaagcagaacgatgtacatagggccttcaagagggaattgaaaactaaagaacctgtaatcatgagtactcttgagactgtacgaatatttctgacagagcagcctttggaaggactagagaaactctaccaggagcccagagagctgcctcctgaggagagagcccagaatgtcactcggcttctacgaaagcaggctgaggaggtcaatactgagtgggaaaaattgaacctgcactccgctgactggcagagaaaaatagatgagacccttgaaagactccgggaacttcaagaggccacggatgagctggacctcaagctgcgccaagctgaggtgatcaagggatcctggcagcccgtgggcgatctcctcattgactctctccaagatcacctcgagaaagtcaaggcacttcgaggagaaattgcgcctctgaaagagaacgtgagccacgtcaatgaccttgctcgccagcttaccactttgggcattcagctctcaccgtataacctcagcactctggaagacctgaacaccagatggaagcttctgcaggtggccgtcgaggaccgagtcaggcagctgcatgaagcccacagggactttggtccagcatctcagcactttctttccacgtctgtccagggtccctgggagagagccatctcgccaaacaaagtgccctactatatcaaccacgagactcaaacaacttgctgggaccatcccaaaatgacagagctctaccagtctttagctgacctgaataatgtcagattctcagcttataggactgccatgaaactccgaagactgcagaaggccctttgcttggatctcttgagcctgtcagctgcatgtgatgccttggaccagcacaacctcaagcaaaatgaccagcccatggatatcctgcagattattaattgtttgaccactatttatgaccgcctggagcaagagcacaacaatttggtcaacgtccctctctgcgtggatatgtgtctgaactggctgctgaatgtttatgatacgggacgaacagggaggatccgtgtcctgtcttttaaaactggcatcatttccctgtgtaaagcacatttggaagacaagtacagataccttttcaagcaagtggcaagttcaacaggattttgtgaccagcgcaggctgggcctccttctgcatgattctatccaaattccaagacagttgggtgaagttgcatcctttgggggcagtaacattgagccaagtgtccggagctgcttccaatttgctaataataagccagagatcgaagcggccctcttcctagactggatgagactggaaccccagtccatggtgtggctgcccgtcctgcacagagtggctgctgcagaaactgccaagcatcaggccaaatgtaacatctgcaaagagtgtccaatcattggattcaggtacaggagtctaaagcactttaattatgacatctgccaaagctgctttttttctggtcgagttgcaaaaggccataaaatgcactatcccatggtggaatattgcactccgactacatcaggagaagatgttcgagactttgccaaggtactaaaaaacaaatttcgaaccaaaaggtattttgcgaagcatccccgaatgggctacctgccagtgcagactgtcttagagggggacaacatggaaacgcctgcctcgtcccctcagctttcacacgatgatactcattcacgcattgaacattatgctagcaggctagcagaaatggaaaacagcaatggatcttatctaaatgatagcatctctcctaatgagagcatagatgatgaacatttgttaatccagcattactgccaaagtttgaaccaggactcccccctgagccagcctcgtagtcctgcccagatcttgatttccttagagagtgaggaaagaggggagctagagagaatcctagcagatcttgaggaagaaaacaggaatctgcaagcagaatatgaccgtctaaagcagcagcacgaacataaaggcctgtccccactgccgtcccctcctgaaatgatgcccacctctccccagagtccccgggatgctgagctcattgctgaggccaagctactgcgtcaacacaaaggccgcctggaagccaggatgcaaatcctggaagaccacaataaacagctggagtcacagttacacaggctaaggcagctgctggagcaaccccaggcagaggccaaagtgaatggcacaacggtgtcctctccttctacctctctacagaggtccgacagcagtcagcctatgctgctccgagtggttggcagtcaaacttcggactccatgggtgaggaagatcttctcagtcctccccaggacacaagcacagggttagaggaggtgatggagcaactcaacaactccttccctagttcaagaggacacaatgtaggaagtcttttccacatggcagatgatttgggcagagcgatggagtccttagtatcagtcatgacagatgaagaaggagcagaataaatgttttacaactcctgattcccgcatggtttttataatattcatacaacaaagaggattagacagtaagagtttacaagaaataaatctatatttttgtgaagggtagtggtattatactgtagatttcagtagtttctaagtctgttattgttttgttaacaatggcaggttttacacgtctatgcaattgtacaaaaaagttataagaaaactacatgtaaaatcttgatagctaaataacttgccatttctttatatggaacgcattttgggttgtttaaaaatttataacagttataaagaaagattgtaaactaaagtgtgctttataaaaaaaagttgtttataaaaacccctaaaaacaaaacaaacacacacacacacacatacacacacacacacaaaactttgaggcagcgcattgttttgcatccttttggcgtgatatccatatgaaattcatggctttttctttttttgcatattaaagataagacttcctctaccaccacaccaaatgactactacacactgctcatttgagaactgtcagctgagtggggcaggcttgagttttcatttcatatatctatatgtctataagtatataaatactatagttatatagataaagagatacgaatttctatagactgactttttccattttttaaatgttcatgtcacatcctaatagaaagaaattacttctagtcagtcatccaggcttacctgcttggtctagaatggatttttcccggagccggaagccaggaggaaactacaccacactaaaacattgtctacagctccagatgtttctcattttaaacaactttccactgacaacgaaagtaaagtaaagtattggatttttttaaagggaacatgtgaatgaatacacaggacttattatatcagagtgagtaatcggttggttggttgattgattgattgattgatacattcagcttcctgctgctagcaatgccacgatttagatttaatgatgcttcagtggaaatcaatcagaaggtattctgaccttgtgaacatcagaaggtattttttaactcccaagcagtagcaggacgatgatagggctggagggctatggattcccagcccatccctgtgaaggagtaggccactctttaagtgaaggattggatgattgttcataatacataaagttctctgtaattacaactaaattattatgccctcttctcacagtcaaaaggaactgggtggtttggtttttgttgcttttttagatttattgtcccatgtgggatgagtttttaaatgccacaagacataatttaaaataaataaactttgggaaaaggtgtaaaacagtagccccatcacatttgtgatactgacaggtatcaacccagaagcccatgaactgtgtttccatcctttgcatttctctgcgagtagttccacacaggtttgtaagtaagtaagaaagaaggcaaattgattcaaatgttacaaaaaaacccttcttggtggattagacaggttaaatatataaacaaacaaacaaaaattgctcaaaaaagaggagaaaagctcaagaggaaaagctaaggactggtaggaaaaagctttactctttcatgccattttatttctttttgatttttaaatcattcattcaatagataccaccgtgtgacctataattttgcaaatctgttacctctgacatcaagtgtaattagcttttggagagtgggctgacatcaagtgtaattagcttttggagagtgggttttgtccattattaataattaattaattaacatcaaacacggcttctcatgctatttctacctcactttggttttggggtgttcctgataattgtgcacacctgagttcacagcttcaccacttgtccattgcgttattttctttttcctttataattctttctttttccttcataattttcaaaagaaaacccaaagctctaaggtaacaaattaccaaattacatgaagatttggtttttgtcttgcatttttttcctttatgtgacgctggaccttttctttacccaaggatttttaaaactcagatttaaaacaaggggttactttacatcctactaagaagtttaagtaagtaagtttcattctaaaatcagaggtaaatagagtgcataaataattttgttttaatctttttgtttttcttttagacacattagctctggagtgagtctgtcataatatttgaacaaaaattgagagctttattgctgcattttaagcataattaatttggacattatttcgtgttgtgttctttataaccaccaagtattaaactgtaaatcataatgtaactgaagcataaacatcacatggcatgttttgtcattgttttcaggtactgagttcttacttgagtatcataatatattgtgttttaacaccaacactgtaacatttacgaattatttttttaaacttcagttttactgcattttcacaacatatcagacttcaccaaatatatgccttactattgtattatagtactgctttactgtgtatctcaataaagcacgcagttatgttac

SEQ ID NO: 128805 - DNA, 2224 bp, Homo sapiens
  Payload ID: 5193
  Gene Symbol: DMD
  Gene Name: dystrophin
  Uniprot ID: P11532
  ENST ID: ENST00000361471
  CDS Start-End: 79-1947
actttcggggagcccggcggctctgggaagctcactcctccactcgtacccacactcgaccgcggagcccttgcagccatgagggaacagctcaaaggccacgagactcaaacaacttgctgggaccatcccaaaatgacagagctctaccagtctttagctgacctgaataatgtcagattctcagcttataggactgccatgaaactccgaagactgcagaaggccctttgcttggatctcttgagcctgtcagctgcatgtgatgccttggaccagcacaacctcaagcaaaatgaccagcccatggatatcctgcagattattaattgtttgaccactatttatgaccgcctggagcaagagcacaacaatttggtcaacgtccctctctgcgtggatatgtgtctgaactggctgctgaatgtttatgatacgggacgaacagggaggatccgtgtcctgtcttttaaaactggcatcatttccctgtgtaaagcacatttggaagacaagtacagataccttttcaagcaagtggcaagttcaacaggattttgtgaccagcgcaggctgggcctccttctgcatgattctatccaaattccaagacagttgggtgaagttgcatcctttgggggcagtaacattgagccaagtgtccggagctgcttccaatttgctaataataagccagagatcgaagcggccctcttcctagactggatgagactggaaccccagtccatggtgtggctgcccgtcctgcacagagtggctgctgcagaaactgccaagcatcaggccaaatgtaacatctgcaaagagtgtccaatcattggattcaggtacaggagtctaaagcactttaattatgacatctgccaaagctgctttttttctggtcgagttgcaaaaggccataaaatgcactatcccatggtggaatattgcactccgactacatcaggagaagatgttcgagactttgccaaggtactaaaaaacaaatttcgaaccaaaaggtattttgcgaagcatccccgaatgggctacctgccagtgcagactgtcttagagggggacaacatggaaacgcctgcctcgtcccctcagctttcacacgatgatactcattcacgcattgaacattatgctagcaggctagcagaaatggaaaacagcaatggatcttatctaaatgatagcatctctcctaatgagagcatagatgatgaacatttgttaatccagcattactgccaaagtttgaaccaggactcccccctgagccagcctcgtagtcctgcccagatcttgatttccttagagagtgaggaaagaggggagctagagagaatcctagcagatcttgaggaagaaaacaggaatctgcaagcagaatatgaccgtctaaagcagcagcacgaacataaaggcctgtccccactgccgtcccctcctgaaatgatgcccacctctccccagagtccccgggatgctgagctcattgctgaggccaagctactgcgtcaacacaaaggccgcctggaagccaggatgcaaatcctggaagaccacaataaacagctggagtcacagttacacaggctaaggcagctgctggagcaaccccaggcagaggccaaagtgaatggcacaacggtgtcctctccttctacctctctacagaggtccgacagcagtcagcctatgctgctccgagtggttggcagtcaaacttcggactccatgggtgaggaagatcttctcagtcctccccaggacacaagcacagggttagaggaggtgatggagcaactcaacaactccttccctagttcaagaggacacaatgtaggaagtcttttccacatggcagatgatttgggcagagcgatggagtccttagtatcagtcatgacagatgaagaaggagcagaataaatgttttacaactcctgattcccgcatggtttttataatattcatacaacaaagaggattagacagtaagagtttacaagaaataaatctatatttttgtgaagggtagtggtattatactgtagatttcagtagtttctaagtctgttattgttttgttaacaatggcaggttttacacgtctatgcaattgtacaaaaaagttataagaaaactacatgtaaaatcttgatagctaaataacttgccatttctttatatggaacgcattttgggt

SEQ ID NO: 128806 - DNA, 13956 bp, Homo sapiens
  Payload ID: 5193
  Gene Symbol: DMD
  Gene Name: dystrophin
  ENST ID: ENST00000357033
  CDS Start-End: 208-11265
gggatcactcactttccccctacaggactcagatctgggaggcaattaccttcggagaaaaacgaataggaaaaactgaagtgttactttttttaaagctgctgaagtttgttggtttctcattgtttttaagcctactggagcaataaagtttgaagaacttttaccaggttttttttatcgctgccttgatatacacttttcaaaatgctttggtgggaagaagtagaggactgttatgaaagagaagatgttcaaaagaaaacattcacaaaatgggtaaatgcacaattttctaagtttgggaagcagcatattgagaacctcttcagtgacctacaggatgggaggcgcctcctagacctcctcgaaggcctgacagggcaaaaactgccaaaagaaaaaggatccacaagagttcatgccctgaacaatgtcaacaaggcactgcgggttttgcagaacaataatgttgatttagtgaatattggaagtactgacatcgtagatggaaatcataaactgactcttggtttgatttggaatataatcctccactggcaggtcaaaaatgtaatgaaaaatatcatggctggattgcaacaaaccaacagtgaaaagattctcctgagctgggtccgacaatcaactcgtaattatccacaggttaatgtaatcaacttcaccaccagctggtctgatggcctggctttgaatgctctcatccatagtcataggccagacctatttgactggaatagtgtggtttgccagcagtcagccacacaacgactggaacatgcattcaacatcgccagatatcaattaggcatagagaaactactcgatcctgaagatgttgataccacctatccagataagaagtccatcttaatgtacatcacatcactcttccaagttttgcctcaacaagtgagcattgaagccatccaggaagtggaaatgttgccaaggccacctaaagtgactaaagaagaacattttcagttacatcatcaaatgcactattctcaacagatcacggtcagtctagcacagggatatgagagaacttcttcccctaagcctcgattcaagagctatgcctacacacaggctgcttatgtcaccacctctgaccctacacggagcccatttccttcacagcatttggaagctcctgaagacaagtcatttggcagttcattgatggagagtgaagtaaacctggaccgttatcaaacagctttagaagaagtattatcgtggcttctttctgctgaggacacattgcaagcacaaggagagatttctaatgatgtggaagtggtgaaagaccagtttcatactcatgaggggtacatgatggatttgacagcccatcagggccgggttggtaatattctacaattgggaagtaagctgattggaacaggaaaattatcagaagatgaagaaactgaagtacaagagcagatgaatctcctaaattcaagatgggaatgcctcagggtagctagcatggaaaaacaaagcaatttacatagagttttaatggatctccagaatcagaaactgaaagagttgaatgactggctaacaaaaacagaagaaagaacaaggaaaatggaggaagagcctcttggacctgatcttgaagacctaaaacgccaagtacaacaacataaggtgcttcaagaagatctagaacaagaacaagtcagggtcaattctctcactcacatggtggtggtagttgatgaatctagtggagatcacgcaactgctgctttggaagaacaacttaaggtattgggagatcgatgggcaaacatctgtagatggacagaagaccgctgggttcttttacaagacatccttctcaaatggcaacgtcttactgaagaacagtgcctttttagtgcatggctttcagaaaaagaagatgcagtgaacaagattcacacaactggctttaaagatcaaaatgaaatgttatcaagtcttcaaaaactggccgttttaaaagcggatctagaaaagaaaaagcaatccatgggcaaactgtattcactcaaacaagatcttctttcaacactgaagaataagtcagtgacccagaagacggaagcatggctggataactttgcccggtgttgggataatttagtccaaaaacttgaaaagagtacagcacagatttcacaggctgtcaccaccactcagccatcactaacacagacaactgtaatggaaacagtaactacggtgaccacaagggaacagatcctggtaaagcatgctcaagaggaacttccaccaccacctccccaaaagaagaggcagattactgtggattctgaaattaggaaaaggttggatgttgatataactgaacttcacagctggattactcgctcagaagctgtgttgcagagtcctgaatttgcaatctttcggaaggaaggcaacttctcagacttaaaagaaaaagtcaatgccatagagcgagaaaaagctgagaagttcagaaaactgcaagatgccagcagatcagctcaggccctggtggaacagatggtgaatgagggtgttaatgcagatagcatcaaacaagcctcagaacaactgaacagccggtggatcgaattctgccagttgctaagtgagagacttaactggctggagtatcagaacaacatcatcgctttctataatcagctacaacaattggagcagatgacaactactgctgaaaactggttgaaaatccaacccaccaccccatcagagccaacagcaattaaaagtcagttaaaaatttgtaaggatgaagtcaaccggctatcagatcttcaacctcaaattgaacgattaaaaattcaaagcatagccctgaaagagaaaggacaaggacccatgttcctggatgcagactttgtggcctttacaaatcattttaagcaagtcttttctgatgtgcaggccagagagaaagagctacagacaatttttgacactttgccaccaatgcgctatcaggagaccatgagtgccatcaggacatgggtccagcagtcagaaaccaaactctccatacctcaacttagtgtcaccgactatgaaatcatggagcagagactcggggaattgcaggctttacaaagttctctgcaagagcaacaaagtggcctatactatctcagcaccactgtgaaagagatgtcgaagaaagcgccctctgaaattagccggaaatatcaatcagaatttgaagaaattgagggacgctggaagaagctctcctcccagctggttgagcattgtcaaaagctagaggagcaaatgaataaactccgaaaaattcagaatcacatacaaaccctgaagaaatggatggctgaagttgatgtttttctgaaggaggaatggcctgcccttggggattcagaaattctaaaaaagcagctgaaacagtgcagacttttagtcagtgatattcagacaattcagcccagtctaaacagtgtcaatgaaggtgggcagaagataaagaatgaagcagagccagagtttgcttcgagacttgagacagaactcaaagaacttaacactcagtgggatcacatgtgccaacaggtctatgccagaaaggaggccttgaagggaggtttggagaaaactgtaagcctccagaaagatctatcagagatgcacgaatggatgacacaagctgaagaagagtatcttgagagagattttgaatataaaactccagatgaattacagaaagcagttgaagagatgaagagagctaaagaagaggcccaacaaaaagaagcgaaagtgaaactccttactgagtctgtaaatagtgtcatagctcaagctccacctgtagcacaagaggccttaaaaaaggaacttgaaactctaaccaccaactaccagtggctctgcactaggctgaatgggaaatgcaagactttggaagaagtttgggcatgttggcatgagttattgtcatacttggagaaagcaaacaagtggctaaatgaagtagaatttaaacttaaaaccactgaaaacattcctggcggagctgaggaaatctctgaggtgctagattcacttgaaaatttgatgcgacattcagaggataacccaaatcagattcgcatattggcacagaccctaacagatggcggagtcatggatgagctaatcaatgaggaacttgagacatttaattctcgttggagggaactacatgaagaggctgtaaggaggcaaaagttgcttgaacagagcatccagtctgcccaggagactgaaaaatccttacacttaatccaggagtccctcacattcattgacaagcagttggcagcttatattgcagacaaggtggacgcagctcaaatgcctcaggaagcccagaaaatccaatctgatttgacaagtcatgagatcagtttagaagaaatgaagaaacataatcaggggaaggaggctgcccaaagagtcctgtctcagattgatgttgcacagaaaaaattacaagatgtctccatgaagtttcgattattccagaaaccagccaattttgagcagcgtctacaagaaagtaagatgattttagatgaagtgaagatgcacttgcctgcattggaaacaaagagtgtggaacaggaagtagtacagtcacagctaaatcattgtgtgaacttgtataaaagtctgagtgaagtgaagtctgaagtggaaatggtgataaagactggacgtcagattgtacagaaaaagcagacggaaaatcccaaagaacttgatgaaagagtaacagctttgaaattgcattataatgagctgggagcaaaggtaacagaaagaaagcaacagttggagaaatgcttgaaattgtcccgtaagatgcgaaaggaaatgaatgtcttgacagaatggctggcagctacagatatggaattgacaaagagatcagcagttgaaggaatgcctagtaatttggattctgaagttgcctggggaaaggctactcaaaaagagattgagaaacagaaggtgcacctgaagagtatcacagaggtaggagaggccttgaaaacagttttgggcaagaaggagacgttggtggaagataaactcagtcttctgaatagtaactggatagctgtcacctcccgagcagaagagtggttaaatcttttgttggaataccagaaacacatggaaacttttgaccagaatgtggaccacatcacaaagtggatcattcaggctgacacacttttggatgaatcagagaaaaagaaaccccagcaaaaagaagacgtgcttaagcgtttaaaggcagaactgaatgacatacgcccaaaggtggactctacacgtgaccaagcagcaaacttgatggcaaaccgcggtgaccactgcaggaaattagtagagccccaaatctcagagctcaaccatcgatttgcagccatttcacacagaattaagactggaaaggcctccattcctttgaaggaattggagcagtttaactcagatatacaaaaattgcttgaaccactggaggctgaaattcagcagggggtgaatctgaaagaggaagacttcaataaagatatgaatgaagacaatgagggtactgtaaaagaattgttgcaaagaggagacaacttacaacaaagaatcacagatgagagaaagcgagaggaaataaagataaaacagcagctgttacagacaaaacataatgctctcaaggatttgaggtctcaaagaagaaaaaaggctctagaaatttctcatcagtggtatcagtacaagaggcaggctgatgatctcctgaaatgcttggatgacattgaaaaaaaattagccagcctacctgagcccagagatgaaaggaaaataaaggaaattgatcgggaattgcagaagaagaaagaggagctgaatgcagtgcgtaggcaagctgagggcttgtctgaggatggggccgcaatggcagtggagccaactcagatccagctcagcaagcgctggcgggaaattgagagcaaatttgctcagtttcgaagactcaactttgcacaaattcacactgtccgtgaagaaacgatgatggtgatgactgaagacatgcctttggaaatttcttatgtgccttctacttatttgactgaaatcactcatgtctcacaagccctattagaagtggaacaacttctcaatgctcctgacctctgtgctaaggactttgaagatctctttaagcaagaggagtctctgaagaatataaaagatagtctacaacaaagctcaggtcggattgacattattcatagcaagaagacagcagcattgcaaagtgcaacgcctgtggaaagggtgaagctacaggaagctctctcccagcttgatttccaatgggaaaaagttaacaaaatgtacaaggaccgacaagggcgatttgacagatctgttgagaaatggcggcgttttcattatgatataaagatatttaatcagtggctaacagaagctgaacagtttctcagaaagacacaaattcctgagaattgggaacatgctaaatacaaatggtatcttaaggaactccaggatggcattgggcagcggcaaactgttgtcagaacattgaatgcaactggggaagaaataattcagcaatcctcaaaaacagatgccagtattctacaggaaaaattgggaagcctgaatctgcggtggcaggaggtctgcaaacagctgtcagacagaaaaaagaggctagaagaacaaaagaatatcttgtcagaatttcaaagagatttaaatgaatttgttttatggttggaggaagcagataacattgctagtatcccacttgaacctggaaaagagcagcaactaaaagaaaagcttgagcaagtcaagttactggtggaagagttgcccctgcgccagggaattctcaaacaattaaatgaaactggaggacccgtgcttgtaagtgctcccataagcccagaagagcaagataaacttgaaaataagctcaagcagacaaatctccagtggataaaggtttccagagctttacctgagaaacaaggagaaattgaagctcaaataaaagaccttgggcagcttgaaaaaaagcttgaagaccttgaagagcagttaaatcatctgctgctgtggttatctcctattaggaatcagttggaaatttataaccaaccaaaccaagaaggaccatttgacgttaaggaaactgaaatagcagttcaagctaaacaaccggatgtggaagagattttgtctaaagggcagcatttgtacaaggaaaaaccagccactcagccagtgaagaggaagttagaagatctgagctctgagtggaaggcggtaaaccgtttacttcaagagctgagggcaaagcagcctgacctagctcctggactgaccactattggagcctctcctactcagactgttactctggtgacacaacctgtggttactaaggaaactgccatctccaaactagaaatgccatcttccttgatgttggaggtacctgctctggcagatttcaaccgggcttggacagaacttaccgactggctttctctgcttgatcaagttataaaatcacagagggtgatggtgggtgaccttgaggatatcaacgagatgatcatcaagcagaaggcaacaatgcaggatttggaacagaggcgtccccagttggaagaactcattaccgctgcccaaaatttgaaaaacaagaccagcaatcaagaggctagaacaatcattacggatcgaattgaaagaattcagaatcagtgggatgaagtacaagaacaccttcagaaccggaggcaacagttgaatgaaatgttaaaggattcaacacaatggctggaagctaaggaagaagctgagcaggtcttaggacaggccagagccaagcttgagtcatggaaggagggtccctatacagtagatgcaatccaaaagaaaatcacagaaaccaagcagttggccaaagacctccgccagtggcagacaaatgtagatgtggcaaatgacttggccctgaaacttctccgggattattctgcagatgataccagaaaagtccacatgataacagagaatatcaatgcctcttggagaagcattcataaaagggtgagtgagcgagaggctgctttggaagaaactcatagattactgcaacagttccccctggacctggaaaagtttcttgcctggcttacagaagctgaaacaactgccaatgtcctacaggatgctacccgtaaggaaaggctcctagaagactccaagggagtaaaagagctgatgaaacaatggcaagacctccaaggtgaaattgaagctcacacagatgtttatcacaacctggatgaaaacagccaaaaaatcctgagatccctggaaggttccgatgatgcagtcctgttacaaagacgtttggataacatgaacttcaagtggagtgaacttcggaaaaagtctctcaacattaggtcccatttggaagccagttctgaccagtggaagcgtctgcacctttctctgcaggaacttctggtgtggctacagctgaaagatgatgaattaagccggcaggcacctattggaggcgactttccagcagttcagaagcagaacgatgtacatagggccttcaagagggaattgaaaactaaagaacctgtaatcatgagtactcttgagactgtacgaatatttctgacagagcagcctttggaaggactagagaaactctaccaggagcccagagagctgcctcctgaggagagagcccagaatgtcactcggcttctacgaaagcaggctgaggaggtcaatactgagtgggaaaaattgaacctgcactccgctgactggcagagaaaaatagatgagacccttgaaagactccgggaacttcaagaggccacggatgagctggacctcaagctgcgccaagctgaggtgatcaagggatcctggcagcccgtgggcgatctcctcattgactctctccaagatcacctcgagaaagtcaaggcacttcgaggagaaattgcgcctctgaaagagaacgtgagccacgtcaatgaccttgctcgccagcttaccactttgggcattcagctctcaccgtataacctcagcactctggaagacctgaacaccagatggaagcttctgcaggtggccgtcgaggaccgagtcaggcagctgcatgaagcccacagggactttggtccagcatctcagcactttctttccacgtctgtccagggtccctgggagagagccatctcgccaaacaaagtgccctactatatcaaccacgagactcaaacaacttgctgggaccatcccaaaatgacagagctctaccagtctttagctgacctgaataatgtcagattctcagcttataggactgccatgaaactccgaagactgcagaaggccctttgcttggatctcttgagcctgtcagctgcatgtgatgccttggaccagcacaacctcaagcaaaatgaccagcccatggatatcctgcagattattaattgtttgaccactatttatgaccgcctggagcaagagcacaacaatttggtcaacgtccctctctgcgtggatatgtgtctgaactggctgctgaatgtttatgatacgggacgaacagggaggatccgtgtcctgtcttttaaaactggcatcatttccctgtgtaaagcacatttggaagacaagtacagataccttttcaagcaagtggcaagttcaacaggattttgtgaccagcgcaggctgggcctccttctgcatgattctatccaaattccaagacagttgggtgaagttgcatcctttgggggcagtaacattgagccaagtgtccggagctgcttccaatttgctaataataagccagagatcgaagcggccctcttcctagactggatgagactggaaccccagtccatggtgtggctgcccgtcctgcacagagtggctgctgcagaaactgccaagcatcaggccaaatgtaacatctgcaaagagtgtccaatcattggattcaggtacaggagtctaaagcactttaattatgacatctgccaaagctgctttttttctggtcgagttgcaaaaggccataaaatgcactatcccatggtggaatattgcactccgactacatcaggagaagatgttcgagactttgccaaggtactaaaaaacaaatttcgaaccaaaaggtattttgcgaagcatccccgaatgggctacctgccagtgcagactgtcttagagggggacaacatggaaactcccgttactctgatcaacttctggccagtagattctgcgcctgcctcgtcccctcagctttcacacgatgatactcattcacgcattgaacattatgctagcaggctagcagaaatggaaaacagcaatggatcttatctaaatgatagcatctctcctaatgagagcatagatgatgaacatttgttaatccagcattactgccaaagtttgaaccaggactcccccctgagccagcctcgtagtcctgcccagatcttgatttccttagagagtgaggaaagaggggagctagagagaatcctagcagatcttgaggaagaaaacaggaatctgcaagcagaatatgaccgtctaaagcagcagcacgaacataaaggcctgtccccactgccgtcccctcctgaaatgatgcccacctctccccagagtccccgggatgctgagctcattgctgaggccaagctactgcgtcaacacaaaggccgcctggaagccaggatgcaaatcctggaagaccacaataaacagctggagtcacagttacacaggctaaggcagctgctggagcaaccccaggcagaggccaaagtgaatggcacaacggtgtcctctccttctacctctctacagaggtccgacagcagtcagcctatgctgctccgagtggttggcagtcaaacttcggactccatgggtgaggaagatcttctcagtcctccccaggacacaagcacagggttagaggaggtgatggagcaactcaacaactccttccctagttcaagaggaagaaatacccctggaaagccaatgagagaggacacaatgtaggaagtcttttccacatggcagatgatttgggcagagcgatggagtccttagtatcagtcatgacagatgaagaaggagcagaataaatgttttacaactcctgattcccgcatggtttttataatattcatacaacaaagaggattagacagtaagagtttacaagaaataaatctatatttttgtgaagggtagtggtattatactgtagatttcagtagtttctaagtctgttattgttttgttaacaatggcaggttttacacgtctatgcaattgtacaaaaaagttataagaaaactacatgtaaaatcttgatagctaaataacttgccatttctttatatggaacgcattttgggttgtttaaaaatttataacagttataaagaaagattgtaaactaaagtgtgctttataaaaaaaagttgtttataaaaacccctaaaaacaaaacaaacacacacacacacacatacacacacacacacaaaactttgaggcagcgcattgttttgcatccttttggcgtgatatccatatgaaattcatggctttttctttttttgcatattaaagataagacttcctctaccaccacaccaaatgactactacacactgctcatttgagaactgtcagctgagtggggcaggcttgagttttcatttcatatatctatatgtctataagtatataaatactatagttatatagataaagagatacgaatttctatagactgactttttccattttttaaatgttcatgtcacatcctaatagaaagaaattacttctagtcagtcatccaggcttacctgcttggtctagaatggatttttcccggagccggaagccaggaggaaactacaccacactaaaacattgtctacagctccagatgtttctcattttaaacaactttccactgacaacgaaagtaaagtaaagtattggatttttttaaagggaacatgtgaatgaatacacaggacttattatatcagagtgagtaatcggttggttggttgattgattgattgattgatacattcagcttcctgctgctagcaatgccacgatttagatttaatgatgcttcagtggaaatcaatcagaaggtattctgaccttgtgaacatcagaaggtattttttaactcccaagcagtagcaggacgatgatagggctggagggctatggattcccagcccatccctgtgaaggagtaggccactctttaagtgaaggattggatgattgttcataatacataaagttctctgtaattacaactaaattattatgccctcttctcacagtcaaaaggaactgggtggtttggtttttgttgcttttttagatttattgtcccatgtgggatgagtttttaaatgccacaagacataatttaaaataaataaactttgggaaaaggtgtaaaacagtagccccatcacatttgtgatactgacaggtatcaacccagaagcccatgaactgtgtttccatcctttgcatttctctgcgagtagttccacacaggtttgtaagtaagtaagaaagaaggcaaattgattcaaatgttacaaaaaaacccttcttggtggattagacaggttaaatatataaacaaacaaacaaaaattgctcaaaaaagaggagaaaagctcaagaggaaaagctaaggactggtaggaaaaagctttactctttcatgccattttatttctttttgatttttaaatcattcattcaatagataccaccgtgtgacctataattttgcaaatctgttacctctgacatcaagtgtaattagcttttggagagtgggctgacatcaagtgtaattagcttttggagagtgggttttgtccattattaataattaattaattaacatcaaacacggcttctcatgctatttctacctcactttggttttggggtgttcctgataattgtgcacacctgagttcacagcttcaccacttgtccattgcgttattttctttttcctttataattctttctttttccttcataattttcaaaagaaaacccaaagctctaaggtaacaaattaccaaattacatgaagatttggtttttgtcttgcatttttttcctttatgtgacgctggaccttttctttacccaaggatttttaaaactcagatttaaaacaaggggttactttacatcctactaagaagtttaagtaagtaagtttcattctaaaatcagaggtaaatagagtgcataaataattttgttttaatctttttgtttttcttttagacacattagctctggagtgagtctgtcataatatttgaacaaaaattgagagctttattgctgcattttaagcataattaatttggacattatttcgtgttgtgttctttataaccaccaagtattaaactgtaaatcataatgtaactgaagcataaacatcacatggcatgttttgtcattgttttcaggtactgagttcttacttgagtatcataatatattgtgttttaacaccaacactgtaacatttacgaattatttttttaaacttcagttttactgcattttcacaacatatcagacttcaccaaatatatgccttactattgtattatagtactgctttactgtgtatctcaataaagcacgcagttatgttac

SEQ ID NO: 128807 - DNA, 13932 bp, Homo sapiens
  Payload ID: 5193
  Gene Symbol: DMD
  Gene Name: dystrophin
  ENST ID: ENST00000378677
  CDS Start-End: 196-11241
gtgcaaaaagattgtgtgtttgtctgcttttgtgaggctggtcagagattctgtgcctgctttatctgtgcttggctatgactctacctccaggtttaccataccccatagaatgtgtaagagaaaagtaccaacagggaaatcagcaaaaagctttcctatgaaggtgtgtagccagcctccgcagaatttgaaatgtctgaggtctcatctgatgaaagagaagatgttcaaaagaaaacattcacaaaatgggtaaatgcacaattttctaagtttgggaagcagcatattgagaacctcttcagtgacctacaggatgggaggcgcctcctagacctcctcgaaggcctgacagggcaaaaactgccaaaagaaaaaggatccacaagagttcatgccctgaacaatgtcaacaaggcactgcgggttttgcagaacaataatgttgatttagtgaatattggaagtactgacatcgtagatggaaatcataaactgactcttggtttgatttggaatataatcctccactggcaggtcaaaaatgtaatgaaaaatatcatggctggattgcaacaaaccaacagtgaaaagattctcctgagctgggtccgacaatcaactcgtaattatccacaggttaatgtaatcaacttcaccaccagctggtctgatggcctggctttgaatgctctcatccatagtcataggccagacctatttgactggaatagtgtggtttgccagcagtcagccacacaacgactggaacatgcattcaacatcgccagatatcaattaggcatagagaaactactcgatcctgaagatgttgataccacctatccagataagaagtccatcttaatgtacatcacatcactcttccaagttttgcctcaacaagtgagcattgaagccatccaggaagtggaaatgttgccaaggccacctaaagtgactaaagaagaacattttcagttacatcatcaaatgcactattctcaacagatcacggtcagtctagcacagggatatgagagaacttcttcccctaagcctcgattcaagagctatgcctacacacaggctgcttatgtcaccacctctgaccctacacggagcccatttccttcacagcatttggaagctcctgaagacaagtcatttggcagttcattgatggagagtgaagtaaacctggaccgttatcaaacagctttagaagaagtattatcgtggcttctttctgctgaggacacattgcaagcacaaggagagatttctaatgatgtggaagtggtgaaagaccagtttcatactcatgaggggtacatgatggatttgacagcccatcagggccgggttggtaatattctacaattgggaagtaagctgattggaacaggaaaattatcagaagatgaagaaactgaagtacaagagcagatgaatctcctaaattcaagatgggaatgcctcagggtagctagcatggaaaaacaaagcaatttacatagagttttaatggatctccagaatcagaaactgaaagagttgaatgactggctaacaaaaacagaagaaagaacaaggaaaatggaggaagagcctcttggacctgatcttgaagacctaaaacgccaagtacaacaacataaggtgcttcaagaagatctagaacaagaacaagtcagggtcaattctctcactcacatggtggtggtagttgatgaatctagtggagatcacgcaactgctgctttggaagaacaacttaaggtattgggagatcgatgggcaaacatctgtagatggacagaagaccgctgggttcttttacaagacatccttctcaaatggcaacgtcttactgaagaacagtgcctttttagtgcatggctttcagaaaaagaagatgcagtgaacaagattcacacaactggctttaaagatcaaaatgaaatgttatcaagtcttcaaaaactggccgttttaaaagcggatctagaaaagaaaaagcaatccatgggcaaactgtattcactcaaacaagatcttctttcaacactgaagaataagtcagtgacccagaagacggaagcatggctggataactttgcccggtgttgggataatttagtccaaaaacttgaaaagagtacagcacagatttcacaggctgtcaccaccactcagccatcactaacacagacaactgtaatggaaacagtaactacggtgaccacaagggaacagatcctggtaaagcatgctcaagaggaacttccaccaccacctccccaaaagaagaggcagattactgtggattctgaaattaggaaaaggttggatgttgatataactgaacttcacagctggattactcgctcagaagctgtgttgcagagtcctgaatttgcaatctttcggaaggaaggcaacttctcagacttaaaagaaaaagtcaatgccatagagcgagaaaaagctgagaagttcagaaaactgcaagatgccagcagatcagctcaggccctggtggaacagatggtgaatgagggtgttaatgcagatagcatcaaacaagcctcagaacaactgaacagccggtggatcgaattctgccagttgctaagtgagagacttaactggctggagtatcagaacaacatcatcgctttctataatcagctacaacaattggagcagatgacaactactgctgaaaactggttgaaaatccaacccaccaccccatcagagccaacagcaattaaaagtcagttaaaaatttgtaaggatgaagtcaaccggctatcagatcttcaacctcaaattgaacgattaaaaattcaaagcatagccctgaaagagaaaggacaaggacccatgttcctggatgcagactttgtggcctttacaaatcattttaagcaagtcttttctgatgtgcaggccagagagaaagagctacagacaatttttgacactttgccaccaatgcgctatcaggagaccatgagtgccatcaggacatgggtccagcagtcagaaaccaaactctccatacctcaacttagtgtcaccgactatgaaatcatggagcagagactcggggaattgcaggctttacaaagttctctgcaagagcaacaaagtggcctatactatctcagcaccactgtgaaagagatgtcgaagaaagcgccctctgaaattagccggaaatatcaatcagaatttgaagaaattgagggacgctggaagaagctctcctcccagctggttgagcattgtcaaaagctagaggagcaaatgaataaactccgaaaaattcagaatcacatacaaaccctgaagaaatggatggctgaagttgatgtttttctgaaggaggaatggcctgcccttggggattcagaaattctaaaaaagcagctgaaacagtgcagacttttagtcagtgatattcagacaattcagcccagtctaaacagtgtcaatgaaggtgggcagaagataaagaatgaagcagagccagagtttgcttcgagacttgagacagaactcaaagaacttaacactcagtgggatcacatgtgccaacaggtctatgccagaaaggaggccttgaagggaggtttggagaaaactgtaagcctccagaaagatctatcagagatgcacgaatggatgacacaagctgaagaagagtatcttgagagagattttgaatataaaactccagatgaattacagaaagcagttgaagagatgaagagagctaaagaagaggcccaacaaaaagaagcgaaagtgaaactccttactgagtctgtaaatagtgtcatagctcaagctccacctgtagcacaagaggccttaaaaaaggaacttgaaactctaaccaccaactaccagtggctctgcactaggctgaatgggaaatgcaagactttggaagaagtttgggcatgttggcatgagttattgtcatacttggagaaagcaaacaagtggctaaatgaagtagaatttaaacttaaaaccactgaaaacattcctggcggagctgaggaaatctctgaggtgctagattcacttgaaaatttgatgcgacattcagaggataacccaaatcagattcgcatattggcacagaccctaacagatggcggagtcatggatgagctaatcaatgaggaacttgagacatttaattctcgttggagggaactacatgaagaggctgtaaggaggcaaaagttgcttgaacagagcatccagtctgcccaggagactgaaaaatccttacacttaatccaggagtccctcacattcattgacaagcagttggcagcttatattgcagacaaggtggacgcagctcaaatgcctcaggaagcccagaaaatccaatctgatttgacaagtcatgagatcagtttagaagaaatgaagaaacataatcaggggaaggaggctgcccaaagagtcctgtctcagattgatgttgcacagaaaaaattacaagatgtctccatgaagtttcgattattccagaaaccagccaattttgagcagcgtctacaagaaagtaagatgattttagatgaagtgaagatgcacttgcctgcattggaaacaaagagtgtggaacaggaagtagtacagtcacagctaaatcattgtgtgaacttgtataaaagtctgagtgaagtgaagtctgaagtggaaatggtgataaagactggacgtcagattgtacagaaaaagcagacggaaaatcccaaagaacttgatgaaagagtaacagctttgaaattgcattataatgagctgggagcaaaggtaacagaaagaaagcaacagttggagaaatgcttgaaattgtcccgtaagatgcgaaaggaaatgaatgtcttgacagaatggctggcagctacagatatggaattgacaaagagatcagcagttgaaggaatgcctagtaatttggattctgaagttgcctggggaaaggctactcaaaaagagattgagaaacagaaggtgcacctgaagagtatcacagaggtaggagaggccttgaaaacagttttgggcaagaaggagacgttggtggaagataaactcagtcttctgaatagtaactggatagctgtcacctcccgagcagaagagtggttaaatcttttgttggaataccagaaacacatggaaacttttgaccagaatgtggaccacatcacaaagtggatcattcaggctgacacacttttggatgaatcagagaaaaagaaaccccagcaaaaagaagacgtgcttaagcgtttaaaggcagaactgaatgacatacgcccaaaggtggactctacacgtgaccaagcagcaaacttgatggcaaaccgcggtgaccactgcaggaaattagtagagccccaaatctcagagctcaaccatcgatttgcagccatttcacacagaattaagactggaaaggcctccattcctttgaaggaattggagcagtttaactcagatatacaaaaattgcttgaaccactggaggctgaaattcagcagggggtgaatctgaaagaggaagacttcaataaagatatgaatgaagacaatgagggtactgtaaaagaattgttgcaaagaggagacaacttacaacaaagaatcacagatgagagaaagcgagaggaaataaagataaaacagcagctgttacagacaaaacataatgctctcaaggatttgaggtctcaaagaagaaaaaaggctctagaaatttctcatcagtggtatcagtacaagaggcaggctgatgatctcctgaaatgcttggatgacattgaaaaaaaattagccagcctacctgagcccagagatgaaaggaaaataaaggaaattgatcgggaattgcagaagaagaaagaggagctgaatgcagtgcgtaggcaagctgagggcttgtctgaggatggggccgcaatggcagtggagccaactcagatccagctcagcaagcgctggcgggaaattgagagcaaatttgctcagtttcgaagactcaactttgcacaaattcacactgtccgtgaagaaacgatgatggtgatgactgaagacatgcctttggaaatttcttatgtgccttctacttatttgactgaaatcactcatgtctcacaagccctattagaagtggaacaacttctcaatgctcctgacctctgtgctaaggactttgaagatctctttaagcaagaggagtctctgaagaatataaaagatagtctacaacaaagctcaggtcggattgacattattcatagcaagaagacagcagcattgcaaagtgcaacgcctgtggaaagggtgaagctacaggaagctctctcccagcttgatttccaatgggaaaaagttaacaaaatgtacaaggaccgacaagggcgatttgacagatctgttgagaaatggcggcgttttcattatgatataaagatatttaatcagtggctaacagaagctgaacagtttctcagaaagacacaaattcctgagaattgggaacatgctaaatacaaatggtatcttaaggaactccaggatggcattgggcagcggcaaactgttgtcagaacattgaatgcaactggggaagaaataattcagcaatcctcaaaaacagatgccagtattctacaggaaaaattgggaagcctgaatctgcggtggcaggaggtctgcaaacagctgtcagacagaaaaaagaggctagaagaacaaaagaatatcttgtcagaatttcaaagagatttaaatgaatttgttttatggttggaggaagcagataacattgctagtatcccacttgaacctggaaaagagcagcaactaaaagaaaagcttgagcaagtcaagttactggtggaagagttgcccctgcgccagggaattctcaaacaattaaatgaaactggaggacccgtgcttgtaagtgctcccataagcccagaagagcaagataaacttgaaaataagctcaagcagacaaatctccagtggataaaggtttccagagctttacctgagaaacaaggagaaattgaagctcaaataaaagaccttgggcagcttgaaaaaaagcttgaagaccttgaagagcagttaaatcatctgctgctgtggttatctcctattaggaatcagttggaaatttataaccaaccaaaccaagaaggaccatttgacgttaaggaaactgaaatagcagttcaagctaaacaaccggatgtggaagagattttgtctaaagggcagcatttgtacaaggaaaaaccagccactcagccagtgaagaggaagttagaagatctgagctctgagtggaaggcggtaaaccgtttacttcaagagctgagggcaaagcagcctgacctagctcctggactgaccactattggagcctctcctactcagactgttactctggtgacacaacctgtggttactaaggaaactgccatctccaaactagaaatgccatcttccttgatgttggaggtacctgctctggcagatttcaaccgggcttggacagaacttaccgactggctttctctgcttgatcaagttataaaatcacagagggtgatggtgggtgaccttgaggatatcaacgagatgatcatcaagcagaaggcaacaatgcaggatttggaacagaggcgtccccagttggaagaactcattaccgctgcccaaaatttgaaaaacaagaccagcaatcaagaggctagaacaatcattacggatcgaattgaaagaattcagaatcagtgggatgaagtacaagaacaccttcagaaccggaggcaacagttgaatgaaatgttaaaggattcaacacaatggctggaagctaaggaagaagctgagcaggtcttaggacaggccagagccaagcttgagtcatggaaggagggtccctatacagtagatgcaatccaaaagaaaatcacagaaaccaagcagttggccaaagacctccgccagtggcagacaaatgtagatgtggcaaatgacttggccctgaaacttctccgggattattctgcagatgataccagaaaagtccacatgataacagagaatatcaatgcctcttggagaagcattcataaaagggtgagtgagcgagaggctgctttggaagaaactcatagattactgcaacagttccccctggacctggaaaagtttcttgcctggcttacagaagctgaaacaactgccaatgtcctacaggatgctacccgtaaggaaaggctcctagaagactccaagggagtaaaagagctgatgaaacaatggcaagacctccaaggtgaaattgaagctcacacagatgtttatcacaacctggatgaaaacagccaaaaaatcctgagatccctggaaggttccgatgatgcagtcctgttacaaagacgtttggataacatgaacttcaagtggagtgaacttcggaaaaagtctctcaacattaggtcccatttggaagccagttctgaccagtggaagcgtctgcacctttctctgcaggaacttctggtgtggctacagctgaaagatgatgaattaagccggcaggcacctattggaggcgactttccagcagttcagaagcagaacgatgtacatagggccttcaagagggaattgaaaactaaagaacctgtaatcatgagtactcttgagactgtacgaatatttctgacagagcagcctttggaaggactagagaaactctaccaggagcccagagagctgcctcctgaggagagagcccagaatgtcactcggcttctacgaaagcaggctgaggaggtcaatactgagtgggaaaaattgaacctgcactccgctgactggcagagaaaaatagatgagacccttgaaagactccgggaacttcaagaggccacggatgagctggacctcaagctgcgccaagctgaggtgatcaagggatcctggcagcccgtgggcgatctcctcattgactctctccaagatcacctcgagaaagtcaaggcacttcgaggagaaattgcgcctctgaaagagaacgtgagccacgtcaatgaccttgctcgccagcttaccactttgggcattcagctctcaccgtataacctcagcactctggaagacctgaacaccagatggaagcttctgcaggtggccgtcgaggaccgagtcaggcagctgcatgaagcccacagggactttggtccagcatctcagcactttctttccacgtctgtccagggtccctgggagagagccatctcgccaaacaaagtgccctactatatcaaccacgagactcaaacaacttgctgggaccatcccaaaatgacagagctctaccagtctttagctgacctgaataatgtcagattctcagcttataggactgccatgaaactccgaagactgcagaaggccctttgcttggatctcttgagcctgtcagctgcatgtgatgccttggaccagcacaacctcaagcaaaatgaccagcccatggatatcctgcagattattaattgtttgaccactatttatgaccgcctggagcaagagcacaacaatttggtcaacgtccctctctgcgtggatatgtgtctgaactggctgctgaatgtttatgatacgggacgaacagggaggatccgtgtcctgtcttttaaaactggcatcatttccctgtgtaaagcacatttggaagacaagtacagataccttttcaagcaagtggcaagttcaacaggattttgtgaccagcgcaggctgggcctccttctgcatgattctatccaaattccaagacagttgggtgaagttgcatcctttgggggcagtaacattgagccaagtgtccggagctgcttccaatttgctaataataagccagagatcgaagcggccctcttcctagactggatgagactggaaccccagtccatggtgtggctgcccgtcctgcacagagtggctgctgcagaaactgccaagcatcaggccaaatgtaacatctgcaaagagtgtccaatcattggattcaggtacaggagtctaaagcactttaattatgacatctgccaaagctgctttttttctggtcgagttgcaaaaggccataaaatgcactatcccatggtggaatattgcactccgactacatcaggagaagatgttcgagactttgccaaggtactaaaaaacaaatttcgaaccaaaaggtattttgcgaagcatccccgaatgggctacctgccagtgcagactgtcttagagggggacaacatggaaactcccgttactctgatcaacttctggccagtagattctgcgcctgcctcgtcccctcagctttcacacgatgatactcattcacgcattgaacattatgctagcaggctagcagaaatggaaaacagcaatggatcttatctaaatgatagcatctctcctaatgagagcatagatgatgaacatttgttaatccagcattactgccaaagtttgaaccaggactcccccctgagccagcctcgtagtcctgcccagatcttgatttccttagagagtgaggaaagaggggagctagagagaatcctagcagatcttgaggaagaaaacaggaatctgcaagcagaatatgaccgtctaaagcagcagcacgaacataaaggcctgtccccactgccgtcccctcctgaaatgatgcccacctctccccagagtccccgggatgctgagctcattgctgaggccaagctactgcgtcaacacaaaggccgcctggaagccaggatgcaaatcctggaagaccacaataaacagctggagtcacagttacacaggctaaggcagctgctggagcaaccccaggcagaggccaaagtgaatggcacaacggtgtcctctccttctacctctctacagaggtccgacagcagtcagcctatgctgctccgagtggttggcagtcaaacttcggactccatgggtgaggaagatcttctcagtcctccccaggacacaagcacagggttagaggaggtgatggagcaactcaacaactccttccctagttcaagaggaagaaatacccctggaaagccaatgagagaggacacaatgtaggaagtcttttccacatggcagatgatttgggcagagcgatggagtccttagtatcagtcatgacagatgaagaaggagcagaataaatgttttacaactcctgattcccgcatggtttttataatattcatacaacaaagaggattagacagtaagagtttacaagaaataaatctatatttttgtgaagggtagtggtattatactgtagatttcagtagtttctaagtctgttattgttttgttaacaatggcaggttttacacgtctatgcaattgtacaaaaaagttataagaaaactacatgtaaaatcttgatagctaaataacttgccatttctttatatggaacgcattttgggttgtttaaaaatttataacagttataaagaaagattgtaaactaaagtgtgctttataaaaaaaagttgtttataaaaacccctaaaaacaaaacaaacacacacacacacacatacacacacacacacaaaactttgaggcagcgcattgttttgcatccttttggcgtgatatccatatgaaattcatggctttttctttttttgcatattaaagataagacttcctctaccaccacaccaaatgactactacacactgctcatttgagaactgtcagctgagtggggcaggcttgagttttcatttcatatatctatatgtctataagtatataaatactatagttatatagataaagagatacgaatttctatagactgactttttccattttttaaatgttcatgtcacatcctaatagaaagaaattacttctagtcagtcatccaggcttacctgcttggtctagaatggatttttcccggagccggaagccaggaggaaactacaccacactaaaacattgtctacagctccagatgtttctcattttaaacaactttccactgacaacgaaagtaaagtaaagtattggatttttttaaagggaacatgtgaatgaatacacaggacttattatatcagagtgagtaatcggttggttggttgattgattgattgattgatacattcagcttcctgctgctagcaatgccacgatttagatttaatgatgcttcagtggaaatcaatcagaaggtattctgaccttgtgaacatcagaaggtattttttaactcccaagcagtagcaggacgatgatagggctggagggctatggattcccagcccatccctgtgaaggagtaggccactctttaagtgaaggattggatgattgttcataatacataaagttctctgtaattacaactaaattattatgccctcttctcacagtcaaaaggaactgggtggtttggtttttgttgcttttttagatttattgtcccatgtgggatgagtttttaaatgccacaagacataatttaaaataaataaactttgggaaaaggtgtaaaacagtagccccatcacatttgtgatactgacaggtatcaacccagaagcccatgaactgtgtttccatcctttgcatttctctgcgagtagttccacacaggtttgtaagtaagtaagaaagaaggcaaattgattcaaatgttacaaaaaaacccttcttggtggattagacaggttaaatatataaacaaacaaacaaaaattgctcaaaaaagaggagaaaagctcaagaggaaaagctaaggactggtaggaaaaagctttactctttcatgccattttatttctttttgatttttaaatcattcattcaatagataccaccgtgtgacctataattttgcaaatctgttacctctgacatcaagtgtaattagcttttggagagtgggctgacatcaagtgtaattagcttttggagagtgggttttgtccattattaataattaattaattaacatcaaacacggcttctcatgctatttctacctcactttggttttggggtgttcctgataattgtgcacacctgagttcacagcttcaccacttgtccattgcgttattttctttttcctttataattctttctttttccttcataattttcaaaagaaaacccaaagctctaaggtaacaaattaccaaattacatgaagatttggtttttgtcttgcatttttttcctttatgtgacgctggaccttttctttacccaaggatttttaaaactcagatttaaaacaaggggttactttacatcctactaagaagtttaagtaagtaagtttcattctaaaatcagaggtaaatagagtgcataaataattttgttttaatctttttgtttttcttttagacacattagctctggagtgagtctgtcataatatttgaacaaaaattgagagctttattgctgcattttaagcataattaatttggacattatttcgtgttgtgttctttataaccaccaagtattaaactgtaaatcataatgtaactgaagcataaacatcacatggcatgttttgtcattgttttcaggtactgagttcttacttgagtatcataatatattgtgttttaacaccaacactgtaacatttacgaattatttttttaaacttcagttttactgcattttcacaacatatcagacttcaccaaatatatgccttactattgtattatagtactgctttactgtgtatctcaataaagcacgcagttatgttac

SEQ ID NO: 128808 - DNA, 1858 bp, Homo sapiens
  Payload ID: 5193
  Gene Symbol: DMD
  Gene Name: dystrophin
  Uniprot ID: P11532
  ENST ID: ENST00000378680
  CDS Start-End: 121-1698
gctttcagctgtgagcttgggcggcggcggcggcggcgctccactttcggggagcccggcggctctgggaagctcactcctccactcgtacccacactcgaccgcggagcccttgcagccatgagggaacagctcaaaggccacgagactcaaacaacttgctgggaccatcccaaaatgacagagctctaccagtctttagctgacctgaataatgtcagattctcagcttataggactgccatgaaactccgaagactgcagaaggccctttgcttggatctcttgagcctgtcagctgcatgtgatgccttggaccagcacaacctcaagcaaaatgaccagcccatggatatcctgcagattattaattgtttgaccactatttatgaccgcctggagcaagagcacaacaatttggtcaacgtccctctctgcgtggatatgtgtctgaactggctgctgaatgtttatgatacgggacgaacagggaggatccgtgtcctgtcttttaaaactggcatcatttccctgtgtaaagcacatttggaagacaagtacagataccttttcaagcaagtggcaagttcaacaggattttgtgaccagcgcaggctgggcctccttctgcatgattctatccaaattccaagacagttgggtgaagttgcatcctttgggggcagtaacattgagccaagtgtccggagctgcttccaatttgctaataataagccagagatcgaagcggccctcttcctagactggatgagactggaaccccagtccatggtgtggctgcccgtcctgcacagagtggctgctgcagaaactgccaagcatcaggccaaatgtaacatctgcaaagagtgtccaatcattggattcaggtacaggagtctaaagcactttaattatgacatctgccaaagctgctttttttctggtcgagttgcaaaaggccataaaatgcactatcccatggtggaatattgcactccgactacatcaggagaagatgttcgagactttgccaaggtactaaaaaacaaatttcgaaccaaaaggtattttgcgaagcatccccgaatgggctacctgccagtgcagactgtcttagagggggacaacatggaaacgaatctgcaagcagaatatgaccgtctaaagcagcagcacgaacataaaggcctgtccccactgccgtcccctcctgaaatgatgcccacctctccccagagtccccgggatgctgagctcattgctgaggccaagctactgcgtcaacacaaaggccgcctggaagccaggatgcaaatcctggaagaccacaataaacagctggagtcacagttacacaggctaaggcagctgctggagcaaccccaggcagaggccaaagtgaatggcacaacggtgtcctctccttctacctctctacagaggtccgacagcagtcagcctatgctgctccgagtggttggcagtcaaacttcggactccatgggtgaggaagatcttctcagtcctccccaggacacaagcacagggttagaggaggtgatggagcaactcaacaactccttccctagttcaagaggacacaatgtaggaagtcttttccacatggcagatgatttgggcagagcgatggagtccttagtatcagtcatgacagatgaagaaggagcagaataaatgttttacaactcctgattcccgcatggtttttataatattcatacaacaaagaggattagacagtaagagtttacaagaaataaatctatatttttgtgaagggtagtggtattatactgtagatttcagtagtttctaagtctgttattgttttgtt

SEQ ID NO: 128809 - DNA, 2617 bp, Homo sapiens
  Payload ID: 5193
  Gene Symbol: DMD
  Gene Name: dystrophin
  Uniprot ID: P11532
  ENST ID: ENST00000378702
  CDS Start-End: 29-1882
cacactcgaccgcggagcccttgcagccatgagggaacagctcaaaggccacgagactcaaacaacttgctgggaccatcccaaaatgacagagctctaccagtctttagctgacctgaataatgtcagattctcagcttataggactgccatgaaactccgaagactgcagaaggccctttgcttggatctcttgagcctgtcagctgcatgtgatgccttggaccagcacaacctcaagcaaaatgaccagcccatggatatcctgcagattattaattgtttgaccactatttatgaccgcctggagcaagagcacaacaatttggtcaacgtccctctctgcgtggatatgtgtctgaactggctgctgaatgtttatgatacgggacgaacagggaggatccgtgtcctgtcttttaaaactggcatcatttccctgtgtaaagcacatttggaagacaagtacagataccttttcaagcaagtggcaagttcaacaggattttgtgaccagcgcaggctgggcctccttctgcatgattctatccaaattccaagacagttgggtgaagttgcatcctttgggggcagtaacattgagccaagtgtccggagctgcttccaatttgctaataataagccagagatcgaagcggccctcttcctagactggatgagactggaaccccagtccatggtgtggctgcccgtcctgcacagagtggctgctgcagaaactgccaagcatcaggccaaatgtaacatctgcaaagagtgtccaatcattggattcaggtacaggagtctaaagcactttaattatgacatctgccaaagctgctttttttctggtcgagttgcaaaaggccataaaatgcactatcccatggtggaatattgcactccgactacatcaggagaagatgttcgagactttgccaaggtactaaaaaacaaatttcgaaccaaaaggtattttgcgaagcatccccgaatgggctacctgccagtgcagactgtcttagagggggacaacatggaaactcccgttactctgatcaacttctggccagtagattctgcgcctgcctcgtcccctcagctttcacacgatgatactcattcacgcattgaacattatgctagcaggctagcagaaatggaaaacagcaatggatcttatctaaatgatagcatctctcctaatgagagcatagatgatgaacatttgttaatccagcattactgccaaagtttgaaccaggactcccccctgagccagcctcgtagtcctgcccagatcttgatttccttagagagtgaggaaagaggggagctagagagaatcctagcagatcttgaggaagaaaacaggaatctgcaagcagaatatgaccgtctaaagcagcagcacgaacataaaggcctgtccccactgccgtcccctcctgaaatgatgcccacctctccccagagtccccgggatgctgagctcattgctgaggccaagctactgcgtcaacacaaaggccgcctggaagccaggatgcaaatcctggaagaccacaataaacagctggagtcacagttacacaggctaaggcagctgctggagcaaccccaggcagaggccaaagtgaatggcacaacggtgtcctctccttctacctctctacagaggtccgacagcagtcagcctatgctgctccgagtggttggcagtcaaacttcggactccatgggtgaggaagatcttctcagtcctccccaggacacaagcacagggttagaggaggtgatggagcaactcaacaactccttccctagttcaagaggaagaaatacccctggaaagccaatgagagaggacacaatgtaggaagtcttttccacatggcagatgatttgggcagagcgatggagtccttagtatcagtcatgacagatgaagaaggagcagaataaatgttttacaactcctgattcccgcatggtttttataatattcatacaacaaagaggattagacagtaagagtttacaagaaataaatctatatttttgtgaagggtagtggtattatactgtagatttcagtagtttctaagtctgttattgttttgttaacaatggcaggttttacacgtctatgcaattgtacaaaaaagttataagaaaactacatgtaaaatcttgatagctaaataacttgccatttctttatatggaacgcattttgggttgtttaaaaatttataacagttataaagaaagattgtaaactaaagtgtgctttataaaaaaaagttgtttataaaaacccctaaaaacaaaacaaacacacacacacacacatacacacacacacacaaaactttgaggcagcgcattgttttgcatccttttggcgtgatatccatatgaaattcatggctttttctttttttgcatattaaagataagacttcctctaccaccacaccaaatgactactacacactgctcatttgagaactgtcagctgagtggggcaggcttgagttttcatttcatatatctatatgtctataagtatataaatactatagttatatagataaagagatacgaattt

SEQ ID NO: 128810 - DNA, 714 bp, Homo sapiens
  Payload ID: 5193
  Gene Symbol: DMD
  Gene Name: dystrophin
  ENST ID: ENST00000378705
  CDS Start-End: 1-714
ttggaagacaagtacagataccttttcaagcaagtggcaagttcaacaggattttgtgaccagcgcaggctgggcctccttctgcatgattctatccaaattccaagacagttgggtgaagttgcatcctttgggggcagtaacattgagccaagtgtccggagctgcttccaatttgctaataataagccagagatcgaagcggccctcttcctagactggatgagactggaaccccagtccatggtgtggctgcccgtcctgcacagagtggctgctgcagaaactgccaagcatcaggccaaatgtaacatctgcaaagagtgtccaatcattggattcaggtacaggagtctaaagcactttaattatgacatctgccaaagctgctttttttctggtcgagttgcaaaaggccataaaatgcactatcccatggtggaatattgcactccgactacatcaggagaagatgttcgagactttgccaaggtactaaaaaacaaatttcgaaccaaaaggtattttgcgaagcatccccgaatgggctacctgccagtgcagactgtcttagagggggacaacatggaaactcccgttactctgatcaacttctggccagtagattctgcgcctgcctcgtcccctcagctttcacacgatgatactcattcacgcattgaacattatgctagcagagatgatgaacatttg

SEQ ID NO: 128811 - DNA, 7410 bp, Homo sapiens
  Payload ID: 5193
  Gene Symbol: DMD
  Gene Name: dystrophin
  ENST ID: ENST00000378707
  CDS Start-End: 1042-4719
acactagcaatggcaaagctttgtgcggaggcattgctggctgctctgaactaaaagcatccgtggggaccgaaagaggtttttgcacaccttattaaggaactccaggatggcattgggcagcggcaaactgttgtcagaacattgaatgcaactggggaagaaataattcagcaatcctcaaaaacagatgccagtattctacaggaaaaattgggaagcctgaatctgcggtggcaggaggtctgcaaacagctgtcagacagaaaaaagaggctagaagaacaaaagaatatcttgtcagaatttcaaagagatttaaatgaatttgttttatggttggaggaagcagataacattgctagtatcccacttgaacctggaaaagagcagcaactaaaagaaaagcttgagcaagtcaagttactggtggaagagttgcccctgcgccagggaattctcaaacaattaaatgaaactggaggacccgtgcttgtaagtgctcccataagcccagaagagcaagataaacttgaaaataagctcaagcagacaaatctccagtggataaaggtttccagagctttacctgagaaacaaggagaaattgaagctcaaataaaagaccttgggcagcttgaaaaaaagcttgaagaccttgaagagcagttaaatcatctgctgctgtggttatctcctattaggaatcagttggaaatttataaccaaccaaaccaagaaggaccatttgacgttaaggaaactgaaatagcagttcaagctaaacaaccggatgtggaagagattttgtctaaagggcagcatttgtacaaggaaaaaccagccactcagccagtgaagaggaagttagaagatctgagctctgagtggaaggcggtaaaccgtttacttcaagagctgagggcaaagcagcctgacctagctcctggactgaccactattggagcctctcctactcagactgttactctggtgacacaacctgtggttactaaggaaactgccatctccaaactagaaatgccatcttccttgatgttggaggtacctgctctggcagatttcaaccgggcttggacagaacttaccgactggctttctctgcttgatcaagttataaaatcacagagggtgatggtgggtgaccttgaggatatcaacgagatgatcatcaagcagaaggcaacaatgcaggatttggaacagaggcgtccccagttggaagaactcattaccgctgcccaaaatttgaaaaacaagaccagcaatcaagaggctagaacaatcattacggatcgaattgaaagaattcagaatcagtgggatgaagtacaagaacaccttcagaaccggaggcaacagttgaatgaaatgttaaaggattcaacacaatggctggaagctaaggaagaagctgagcaggtcttaggacaggccagagccaagcttgagtcatggaaggagggtccctatacagtagatgcaatccaaaagaaaatcacagaaaccaagcagttggccaaagacctccgccagtggcagacaaatgtagatgtggcaaatgacttggccctgaaacttctccgggattattctgcagatgataccagaaaagtccacatgataacagagaatatcaatgcctcttggagaagcattcataaaagggtgagtgagcgagaggctgctttggaagaaactcatagattactgcaacagttccccctggacctggaaaagtttcttgcctggcttacagaagctgaaacaactgccaatgtcctacaggatgctacccgtaaggaaaggctcctagaagactccaagggagtaaaagagctgatgaaacaatggcaagacctccaaggtgaaattgaagctcacacagatgtttatcacaacctggatgaaaacagccaaaaaatcctgagatccctggaaggttccgatgatgcagtcctgttacaaagacgtttggataacatgaacttcaagtggagtgaacttcggaaaaagtctctcaacattaggtcccatttggaagccagttctgaccagtggaagcgtctgcacctttctctgcaggaacttctggtgtggctacagctgaaagatgatgaattaagccggcaggcacctattggaggcgactttccagcagttcagaagcagaacgatgtacatagggccttcaagagggaattgaaaactaaagaacctgtaatcatgagtactcttgagactgtacgaatatttctgacagagcagcctttggaaggactagagaaactctaccaggagcccagagagctgcctcctgaggagagagcccagaatgtcactcggcttctacgaaagcaggctgaggaggtcaatactgagtgggaaaaattgaacctgcactccgctgactggcagagaaaaatagatgagacccttgaaagactccgggaacttcaagaggccacggatgagctggacctcaagctgcgccaagctgaggtgatcaagggatcctggcagcccgtgggcgatctcctcattgactctctccaagatcacctcgagaaagtcaaggcacttcgaggagaaattgcgcctctgaaagagaacgtgagccacgtcaatgaccttgctcgccagcttaccactttgggcattcagctctcaccgtataacctcagcactctggaagacctgaacaccagatggaagcttctgcaggtggccgtcgaggaccgagtcaggcagctgcatgaagcccacagggactttggtccagcatctcagcactttctttccacgtctgtccagggtccctgggagagagccatctcgccaaacaaagtgccctactatatcaaccacgagactcaaacaacttgctgggaccatcccaaaatgacagagctctaccagtctttagctgacctgaataatgtcagattctcagcttataggactgccatgaaactccgaagactgcagaaggccctttgcttggatctcttgagcctgtcagctgcatgtgatgccttggaccagcacaacctcaagcaaaatgaccagcccatggatatcctgcagattattaattgtttgaccactatttatgaccgcctggagcaagagcacaacaatttggtcaacgtccctctctgcgtggatatgtgtctgaactggctgctgaatgtttatgatacgggacgaacagggaggatccgtgtcctgtcttttaaaactggcatcatttccctgtgtaaagcacatttggaagacaagtacagataccttttcaagcaagtggcaagttcaacaggattttgtgaccagcgcaggctgggcctccttctgcatgattctatccaaattccaagacagttgggtgaagttgcatcctttgggggcagtaacattgagccaagtgtccggagctgcttccaatttgctaataataagccagagatcgaagcggccctcttcctagactggatgagactggaaccccagtccatggtgtggctgcccgtcctgcacagagtggctgctgcagaaactgccaagcatcaggccaaatgtaacatctgcaaagagtgtccaatcattggattcaggtacaggagtctaaagcactttaattatgacatctgccaaagctgctttttttctggtcgagttgcaaaaggccataaaatgcactatcccatggtggaatattgcactccgactacatcaggagaagatgttcgagactttgccaaggtactaaaaaacaaatttcgaaccaaaaggtattttgcgaagcatccccgaatgggctacctgccagtgcagactgtcttagagggggacaacatggaaactcccgttactctgatcaacttctggccagtagattctgcgcctgcctcgtcccctcagctttcacacgatgatactcattcacgcattgaacattatgctagcaggctagcagaaatggaaaacagcaatggatcttatctaaatgatagcatctctcctaatgagagcatagatgatgaacatttgttaatccagcattactgccaaagtttgaaccaggactcccccctgagccagcctcgtagtcctgcccagatcttgatttccttagagagtgaggaaagaggggagctagagagaatcctagcagatcttgaggaagaaaacaggaatctgcaagcagaatatgaccgtctaaagcagcagcacgaacataaaggcctgtccccactgccgtcccctcctgaaatgatgcccacctctccccagagtccccgggatgctgagctcattgctgaggccaagctactgcgtcaacacaaaggccgcctggaagccaggatgcaaatcctggaagaccacaataaacagctggagtcacagttacacaggctaaggcagctgctggagcaaccccaggcagaggccaaagtgaatggcacaacggtgtcctctccttctacctctctacagaggtccgacagcagtcagcctatgctgctccgagtggttggcagtcaaacttcggactccatgggtgaggaagatcttctcagtcctccccaggacacaagcacagggttagaggaggtgatggagcaactcaacaactccttccctagttcaagaggaagaaatacccctggaaagccaatgagagaggacacaatgtaggaagtcttttccacatggcagatgatttgggcagagcgatggagtccttagtatcagtcatgacagatgaagaaggagcagaataaatgttttacaactcctgattcccgcatggtttttataatattcatacaacaaagaggattagacagtaagagtttacaagaaataaatctatatttttgtgaagggtagtggtattatactgtagatttcagtagtttctaagtctgttattgttttgttaacaatggcaggttttacacgtctatgcaattgtacaaaaaagttataagaaaactacatgtaaaatcttgatagctaaataacttgccatttctttatatggaacgcattttgggttgtttaaaaatttataacagttataaagaaagattgtaaactaaagtgtgctttataaaaaaaagttgtttataaaaacccctaaaaacaaaacaaacacacacacacacacatacacacacacacacaaaactttgaggcagcgcattgttttgcatccttttggcgtgatatccatatgaaattcatggctttttctttttttgcatattaaagataagacttcctctaccaccacaccaaatgactactacacactgctcatttgagaactgtcagctgagtggggcaggcttgagttttcatttcatatatctatatgtctataagtatataaatactatagttatatagataaagagatacgaatttctatagactgactttttccattttttaaatgttcatgtcacatcctaatagaaagaaattacttctagtcagtcatccaggcttacctgcttggtctagaatggatttttcccggagccggaagccaggaggaaactacaccacactaaaacattgtctacagctccagatgtttctcattttaaacaactttccactgacaacgaaagtaaagtaaagtattggatttttttaaagggaacatgtgaatgaatacacaggacttattatatcagagtgagtaatcggttggttggttgattgattgattgattgatacattcagcttcctgctgctagcaatgccacgatttagatttaatgatgcttcagtggaaatcaatcagaaggtattctgaccttgtgaacatcagaaggtattttttaactcccaagcagtagcaggacgatgatagggctggagggctatggattcccagcccatccctgtgaaggagtaggccactctttaagtgaaggattggatgattgttcataatacataaagttctctgtaattacaactaaattattatgccctcttctcacagtcaaaaggaactgggtggtttggtttttgttgcttttttagatttattgtcccatgtgggatgagtttttaaatgccacaagacataatttaaaataaataaactttgggaaaaggtgtaaaacagtagccccatcacatttgtgatactgacaggtatcaacccagaagcccatgaactgtgtttccatcctttgcatttctctgcgagtagttccacacaggtttgtaagtaagtaagaaagaaggcaaattgattcaaatgttacaaaaaaacccttcttggtggattagacaggttaaatatataaacaaacaaacaaaaattgctcaaaaaagaggagaaaagctcaagaggaaaagctaaggactggtaggaaaaagctttactctttcatgccattttatttctttttgatttttaaatcattcattcaatagataccaccgtgtgacctataattttgcaaatctgttacctctgacatcaagtgtaattagcttttggagagtgggctgacatcaagtgtaattagcttttggagagtgggttttgtccattattaataattaattaattaacatcaaacacggcttctcatgctatttctacctcactttggttttggggtgttcctgataattgtgcacacctgagttcacagcttcaccacttgtccattgcgttattttctttttcctttataattctttctttttccttcataattttcaaaagaaaacccaaagctctaaggtaacaaattaccaaattacatgaagatttggtttttgtcttgcatttttttcctttatgtgacgctggaccttttctttacccaaggatttttaaaactcagatttaaaacaaggggttactttacatcctactaagaagtttaagtaagtaagtttcattctaaaatcagaggtaaatagagtgcataaataattttgttttaatctttttgtttttcttttagacacattagctctggagtgagtctgtcataatatttgaacaaaaattgagagctttattgctgcattttaagcataattaatttggacattatttcgtgttgtgttctttataaccaccaagtattaaactgtaaatcataatgtaactgaagcataaacatcacatggcatgttttgtcattgttttcaggtactgagttcttacttgagtatcataatatattgtgttttaacaccaacactgtaacatttacgaattatttttttaaacttcagttttactgcattttcacaacatatcagacttcaccaaatatatgccttactattgtattatagtactgctttactgtgtatctcaataaagcacgcagttatgttac

SEQ ID NO: 128812 - DNA, 4645 bp, Homo sapiens
  Payload ID: 5193
  Gene Symbol: DMD
  Gene Name: dystrophin
  Uniprot ID: P11532
  ENST ID: ENST00000378723
  CDS Start-End: 124-2031
agtgctttcagctgtgagcttgggcggcggcggcggcggcgctccactttcggggagcccggcggctctgggaagctcactcctccactcgtacccacactcgaccgcggagcccttgcagccatgagggaacagctcaaaggccacgagactcaaacaacttgctgggaccatcccaaaatgacagagctctaccagtctttagctgacctgaataatgtcagattctcagcttataggactgccatgaaactccgaagactgcagaaggccctttgcttggatctcttgagcctgtcagctgcatgtgatgccttggaccagcacaacctcaagcaaaatgaccagcccatggatatcctgcagattattaattgtttgaccactatttatgaccgcctggagcaagagcacaacaatttggtcaacgtccctctctgcgtggatatgtgtctgaactggctgctgaatgtttatgatacgggacgaacagggaggatccgtgtcctgtcttttaaaactggcatcatttccctgtgtaaagcacatttggaagacaagtacagataccttttcaagcaagtggcaagttcaacaggattttgtgaccagcgcaggctgggcctccttctgcatgattctatccaaattccaagacagttgggtgaagttgcatcctttgggggcagtaacattgagccaagtgtccggagctgcttccaatttgctaataataagccagagatcgaagcggccctcttcctagactggatgagactggaaccccagtccatggtgtggctgcccgtcctgcacagagtggctgctgcagaaactgccaagcatcaggccaaatgtaacatctgcaaagagtgtccaatcattggattcaggtacaggagtctaaagcactttaattatgacatctgccaaagctgctttttttctggtcgagttgcaaaaggccataaaatgcactatcccatggtggaatattgcactccgactacatcaggagaagatgttcgagactttgccaaggtactaaaaaacaaatttcgaaccaaaaggtattttgcgaagcatccccgaatgggctacctgccagtgcagactgtcttagagggggacaacatggaaactcccgttactctgatcaacttctggccagtagattctgcgcctgcctcgtcccctcagctttcacacgatgatactcattcacgcattgaacattatgctagcaggctagcagaaatggaaaacagcaatggatcttatctaaatgatagcatctctcctaatgagagcatagatgatgaacatttgttaatccagcattactgccaaagtttgaaccaggactcccccctgagccagcctcgtagtcctgcccagatcttgatttccttagagagtgaggaaagaggggagctagagagaatcctagcagatcttgaggaagaaaacaggaatctgcaagcagaatatgaccgtctaaagcagcagcacgaacataaaggcctgtccccactgccgtcccctcctgaaatgatgcccacctctccccagagtccccgggatgctgagctcattgctgaggccaagctactgcgtcaacacaaaggccgcctggaagccaggatgcaaatcctggaagaccacaataaacagctggagtcacagttacacaggctaaggcagctgctggagcaaccccaggcagaggccaaagtgaatggcacaacggtgtcctctccttctacctctctacagaggtccgacagcagtcagcctatgctgctccgagtggttggcagtcaaacttcggactccatgggtgaggaagatcttctcagtcctccccaggacacaagcacagggttagaggaggtgatggagcaactcaacaactccttccctagttcaagaggacacaatgtaggaagtcttttccacatggcagatgatttgggcagagcgatggagtccttagtatcagtcatgacagatgaagaaggagcagaataaatgttttacaactcctgattcccgcatggtttttataatattcatacaacaaagaggattagacagtaagagtttacaagaaataaatctatatttttgtgaagggtagtggtattatactgtagatttcagtagtttctaagtctgttattgttttgttaacaatggcaggttttacacgtctatgcaattgtacaaaaaagttataagaaaactacatgtaaaatcttgatagctaaataacttgccatttctttatatggaacgcattttgggttgtttaaaaatttataacagttataaagaaagattgtaaactaaagtgtgctttataaaaaaaagttgtttataaaaacccctaaaaacaaaacaaacacacacacacacacatacacacacacacacaaaactttgaggcagcgcattgttttgcatccttttggcgtgatatccatatgaaattcatggctttttctttttttgcatattaaagataagacttcctctaccaccacaccaaatgactactacacactgctcatttgagaactgtcagctgagtggggcaggcttgagttttcatttcatatatctatatgtctataagtatataaatactatagttatatagataaagagatacgaatttctatagactgactttttccattttttaaatgttcatgtcacatcctaatagaaagaaattacttctagtcagtcatccaggcttacctgcttggtctagaatggatttttcccggagccggaagccaggaggaaactacaccacactaaaacattgtctacagctccagatgtttctcattttaaacaactttccactgacaacgaaagtaaagtaaagtattggatttttttaaagggaacatgtgaatgaatacacaggacttattatatcagagtgagtaatcggttggttggttgattgattgattgattgatacattcagcttcctgctgctagcaatgccacgatttagatttaatgatgcttcagtggaaatcaatcagaaggtattctgaccttgtgaacatcagaaggtattttttaactcccaagcagtagcaggacgatgatagggctggagggctatggattcccagcccatccctgtgaaggagtaggccactctttaagtgaaggattggatgattgttcataatacataaagttctctgtaattacaactaaattattatgccctcttctcacagtcaaaaggaactgggtggtttggtttttgttgcttttttagatttattgtcccatgtgggatgagtttttaaatgccacaagacataatttaaaataaataaactttgggaaaaggtgtaaaacagtagccccatcacatttgtgatactgacaggtatcaacccagaagcccatgaactgtgtttccatcctttgcatttctctgcgagtagttccacacaggtttgtaagtaagtaagaaagaaggcaaattgattcaaatgttacaaaaaaacccttcttggtggattagacaggttaaatatataaacaaacaaacaaaaattgctcaaaaaagaggagaaaagctcaagaggaaaagctaaggactggtaggaaaaagctttactctttcatgccattttatttctttttgatttttaaatcattcattcaatagataccaccgtgtgacctataattttgcaaatctgttacctctgacatcaagtgtaattagcttttggagagtgggctgacatcaagtgtaattagcttttggagagtgggttttgtccattattaataattaattaattaacatcaaacacggcttctcatgctatttctacctcactttggttttggggtgttcctgataattgtgcacacctgagttcacagcttcaccacttgtccattgcgttattttctttttcctttataattctttctttttccttcataattttcaaaagaaaacccaaagctctaaggtaacaaattaccaaattacatgaagatttggtttttgtcttgcatttttttcctttatgtgacgctggaccttttctttacccaaggatttttaaaactcagatttaaaacaaggggttactttacatcctactaagaagtttaagtaagtaagtttcattctaaaatcagaggtaaatagagtgcataaataattttgttttaatctttttgtttttcttttagacacattagctctggagtgagtctgtcataatatttgaacaaaaattgagagctttattgctgcattttaagcataattaatttggacattatttcgtgttgtgttctttataaccaccaagtattaaactgtaaatcataatgtaactgaagcataaacatcacatggcatgttttgtcattgttttcaggtactgagttcttacttgagtatcataatatattgtgttttaacaccaacactgtaacatttacgaattatttttttaaacttcagttttactgcattttcacaacatatcagacttcaccaaatatatgccttactattgtattatagtactgctttactgtgtatctcaataaagcacgcagttatgttacaaaaaagta

SEQ ID NO: 128813 - DNA, 123 bp, Homo sapiens
  Payload ID: 5193
  Gene Symbol: DMD
  Gene Name: dystrophin
  ENST ID: ENST00000448370
  CDS Start-End: 1-123
atgctttggtgggaagaagtagaggactgttatgaaagagaagatgttcaaaagaaaacattcacaaaatgggtaaatgcacaattttctaaggaataccagaaacacatggaaacttttgac

SEQ ID NO: 128814 - DNA, 375 bp, Homo sapiens
  Payload ID: 5193
  Gene Symbol: DMD
  Gene Name: dystrophin
  ENST ID: ENST00000447523
  CDS Start-End: 1-375
gagaacctcttcagtgacctacaggatgggaggcgcctcctagacctcctcgaaggcctgacagggcaaaaactgccaaaagaaaaaggatccacaagagttcatgccctgaacaatgtcaacaaggcactgcgggttttgcagaacaataatgttgatttagtgaatattggaagtactgacatcgtagatggaaatcataaactgactcttggtttgatttggaatataatcctccactggcaggtattgggagatcgatgggcaaacatctgtagatggacagaagaccgctgggttcttttacaagacatccttctcaaatggcaacgtcttactgaagaacagtgcctttttagtgcatggctttcagaa

SEQ ID NO: 128815 - DNA, 303 bp, Homo sapiens
  Payload ID: 5193
  Gene Symbol: DMD
  Gene Name: dystrophin
  ENST ID: ENST00000420596
  CDS Start-End: 1-303
atgctttggtgggaagaagtagaggactgttatgaaagagaagatgttcaaaagaaaacattcacaaaatgggtaaatgcacaattttctaaggctactcaaaaagagattgagaaacagaaggtgcacctgaagagtatcacagaggtaggagaggccttgaaaacagttttgggcaagaaggagacgttggtggaagataaactcagtcttctgaatagtaactggatagctgtcacctcccgagcagaagagtggttaaatcttttgttggaataccagaaacacatggaaacttttgac

SEQ ID NO: 128816 - DNA, 362 bp, Homo sapiens
  Payload ID: 5193
  Gene Symbol: DMD
  Gene Name: dystrophin
  ENST ID: ENST00000471779
  CDS Start-End: 1-93
gtggaagagattttgtctaaagggcagcatttgtacaaggaaaaaccagccactcagccagtgaagctcctactcagactgttactctggtgacacaacctgtggttactaaggaaactgccatctccaaactagaaatgccatcttccttgatgttggaggtacctgctctggcagatttcaaccgggcttggacagaacttaccgactggctttctctgcttgatcaagttataaaatcacagagggtgatggtgggtgaccttgaggatatcaacgagatgatcatcaagcagaaggcaacaatgcaggatttggaacagaggcgtccccagttggaagaactcattaccgctgcccaa

SEQ ID NO: 128817 - DNA, 5209 bp, Homo sapiens
  Payload ID: 5193
  Gene Symbol: DMD
  Gene Name: dystrophin
  ENST ID: ENST00000474231
  CDS Start-End: 1042-4773
acactagcaatggcaaagctttgtgcggaggcattgctggctgctctgaactaaaagcatccgtggggaccgaaagaggtttttgcacaccttattaaggaactccaggatggcattgggcagcggcaaactgttgtcagaacattgaatgcaactggggaagaaataattcagcaatcctcaaaaacagatgccagtattctacaggaaaaattgggaagcctgaatctgcggtggcaggaggtctgcaaacagctgtcagacagaaaaaagaggctagaagaacaaaagaatatcttgtcagaatttcaaagagatttaaatgaatttgttttatggttggaggaagcagataacattgctagtatcccacttgaacctggaaaagagcagcaactaaaagaaaagcttgagcaagtcaagttactggtggaagagttgcccctgcgccagggaattctcaaacaattaaatgaaactggaggacccgtgcttgtaagtgctcccataagcccagaagagcaagataaacttgaaaataagctcaagcagacaaatctccagtggataaaggtttccagagctttacctgagaaacaaggagaaattgaagctcaaataaaagaccttgggcagcttgaaaaaaagcttgaagaccttgaagagcagttaaatcatctgctgctgtggttatctcctattaggaatcagttggaaatttataaccaaccaaaccaagaaggaccatttgacgttaaggaaactgaaatagcagttcaagctaaacaaccggatgtggaagagattttgtctaaagggcagcatttgtacaaggaaaaaccagccactcagccagtgaagaggaagttagaagatctgagctctgagtggaaggcggtaaaccgtttacttcaagagctgagggcaaagcagcctgacctagctcctggactgaccactattggagcctctcctactcagactgttactctggtgacacaacctgtggttactaaggaaactgccatctccaaactagaaatgccatcttccttgatgttggaggtacctgctctggcagatttcaaccgggcttggacagaacttaccgactggctttctctgcttgatcaagttataaaatcacagagggtgatggtgggtgaccttgaggatatcaacgagatgatcatcaagcagaaggcaacaatgcaggatttggaacagaggcgtccccagttggaagaactcattaccgctgcccaaaatttgaaaaacaagaccagcaatcaagaggctagaacaatcattacggatcgaattgaaagaattcagaatcagtgggatgaagtacaagaacaccttcagaaccggaggcaacagttgaatgaaatgttaaaggattcaacacaatggctggaagctaaggaagaagctgagcaggtcttaggacaggccagagccaagcttgagtcatggaaggagggtccctatacagtagatgcaatccaaaagaaaatcacagaaaccaagcagttggccaaagacctccgccagtggcagacaaatgtagatgtggcaaatgacttggccctgaaacttctccgggattattctgcagatgataccagaaaagtccacatgataacagagaatatcaatgcctcttggagaagcattcataaaagggtgagtgagcgagaggctgctttggaagaaactcatagattactgcaacagttccccctggacctggaaaagtttcttgcctggcttacagaagctgaaacaactgccaatgtcctacaggatgctacccgtaaggaaaggctcctagaagactccaagggagtaaaagagctgatgaaacaatggcaagacctccaaggtgaaattgaagctcacacagatgtttatcacaacctggatgaaaacagccaaaaaatcctgagatccctggaaggttccgatgatgcagtcctgttacaaagacgtttggataacatgaacttcaagtggagtgaacttcggaaaaagtctctcaacattaggtcccatttggaagccagttctgaccagtggaagcgtctgcacctttctctgcaggaacttctggtgtggctacagctgaaagatgatgaattaagccggcaggcacctattggaggcgactttccagcagttcagaagcagaacgatgtacatagggccttcaagagggaattgaaaactaaagaacctgtaatcatgagtactcttgagactgtacgaatatttctgacagagcagcctttggaaggactagagaaactctaccaggagcccagagagctgcctcctgaggagagagcccagaatgtcactcggcttctacgaaagcaggctgaggaggtcaatactgagtgggaaaaattgaacctgcactccgctgactggcagagaaaaatagatgagacccttgaaagactccgggaacttcaagaggccacggatgagctggacctcaagctgcgccaagctgaggtgatcaagggatcctggcagcccgtgggcgatctcctcattgactctctccaagatcacctcgagaaagtcaaggcacttcgaggagaaattgcgcctctgaaagagaacgtgagccacgtcaatgaccttgctcgccagcttaccactttgggcattcagctctcaccgtataacctcagcactctggaagacctgaacaccagatggaagcttctgcaggtggccgtcgaggaccgagtcaggcagctgcatgaagcccacagggactttggtccagcatctcagcactttctttccacgtctgtccagggtccctgggagagagccatctcgccaaacaaagtgccctactatatcaaccacgagactcaaacaacttgctgggaccatcccaaaatgacagagctctaccagtctttagctgacctgaataatgtcagattctcagcttataggactgccatgaaactccgaagactgcagaaggccctttgcttggatctcttgagcctgtcagctgcatgtgatgccttggaccagcacaacctcaagcaaaatgaccagcccatggatatcctgcagattattaattgtttgaccactatttatgaccgcctggagcaagagcacaacaatttggtcaacgtccctctctgcgtggatatgtgtctgaactggctgctgaatgtttatgatacgggacgaacagggaggatccgtgtcctgtcttttaaaactggcatcatttccctgtgtaaagcacatttggaagacaagtacagataccttttcaagcaagtggcaagttcaacaggattttgtgaccagcgcaggctgggcctccttctgcatgattctatccaaattccaagacagttgggtgaagttgcatcctttgggggcagtaacattgagccaagtgtccggagctgcttccaatttgctaataataagccagagatcgaagcggccctcttcctagactggatgagactggaaccccagtccatggtgtggctgcccgtcctgcacagagtggctgctgcagaaactgccaagcatcaggccaaatgtaacatctgcaaagagtgtccaatcattggattcaggtacaggagtctaaagcactttaattatgacatctgccaaagctgctttttttctggtcgagttgcaaaaggccataaaatgcactatcccatggtggaatattgcactccgactacatcaggagaagatgttcgagactttgccaaggtactaaaaaacaaatttcgaaccaaaaggtattttgcgaagcatccccgaatgggctacctgccagtgcagactgtcttagagggggacaacatggaaactcccgttactctgatcaacttctggccagtagattctgcgcctgcctcgtcccctcagctttcacacgatgatactcattcacgcattgaacattatgctagcaggctagcagaaatggaaaacagcaatggatcttatctaaatgatagcatctctcctaatgagagcatagatgatgaacatttgttaatccagcattactgccaaagtttgaaccaggactcccccctgagccagcctcgtagtcctgcccagatcttgatttccttagagagtgaggaaagaggggagctagagagaatcctagcagatcttgaggaagaaaacaggaatctgcaagcagaatatgaccgtctaaagcagcagcacgaacataaaggcctgtccccactgccgtcccctcctgaaatgatgcccacctctccccagagtccccgggatgctgagctcattgctgaggccaagctactgcgtcaacacaaaggccgcctggaagccaggatgcaaatcctggaagaccacaataaacagctggagtcacagttacacaggctaaggcagctgctggagcaaccccaggcagaggccaaagtgaatggcacaacggtgtcctctccttctacctctctacagaggtccgacagcagtcagcctatgctgctccgagtggttggcagtcaaacttcggactccatgggtgaggaagatcttctcagtcctccccaggacacaagcacagggttagaggaggtgatggagcaactcaacaactccttccctagttcaagaggacacaatgtaggaagtcttttccacatggcagatgatttgggcagagcgatggagtccttagtatcagtcatgacagatgaagaaggagcagaataaatgttttacaactcctgattcccgcatggtttttataatattcatacaacaaagaggattagacagtaagagtttacaagaaataaatctatatttttgtgaagggtagtggtattatactgtagatttcagtagtttctaagtctgttattgttttgttaacaatggcaggttttacacgtctatgcaattgtacaaaaaagttataagaaaactacatgtaaaatcttgatagctaaataacttgccatttctttatatggaacgcattttgggttgtttaaaaatttataacagttataaagaaagattgtaaactaaagtgtgctttataaaaaaaagttgtttataaaaacccctaaaaacaaaacaaacacacacacacacacatacacacacacacacaaaactttgaggcagcgcattgttttgcatc

SEQ ID NO: 128818 - DNA, 616 bp, Homo sapiens
  Payload ID: 5193
  Gene Symbol: DMD
  Gene Name: dystrophin
  ENST ID: ENST00000493412
  CDS Start-End: 1-405
gaattggagcagtttaactcagatatacaaaaattgcttgaaccactggaggctgaaattcagcagggggtgaatctgaaagaggaagacttcaataaagatatgaatgaagacaatgagggtactgtaaaagaattgttgcaaagaggagacaacttacaacaaagaatcacagatgagagaaagcgagaggaaataaagataaaacagcagctgttacagacaaaacataatgctctcaaggatttgaggtctcaaagaagaaaaaaggctctagaaatttctcatcagtggtatcagtacaagaggcaggctgatgatctcctgaaatgcttggatgacattgaaaaaaaattagccagcctacctgagcccagagatgaaaggaaaataaagatgaactaatgacttatcggtatatggacgacttcttactcatgttagcccattcatttcatcagagcatcttcacacatcagtgttcactctctatagatttatttgcatattgtctaaatatgtttttttctgttattattttacactttttattttgcttcattctctgttgagttcctcaaacctttaaaaaggaaataaataacttattcactta

SEQ ID NO: 128819 - DNA, 7080 bp, Homo sapiens
  Payload ID: 5193
  Gene Symbol: DMD
  Gene Name: dystrophin
  ENST ID: ENST00000541735
  CDS Start-End: 1042-4389
acactagcaatggcaaagctttgtgcggaggcattgctggctgctctgaactaaaagcatccgtggggaccgaaagaggtttttgcacaccttattaaggaactccaggatggcattgggcagcggcaaactgttgtcagaacattgaatgcaactggggaagaaataattcagcaatcctcaaaaacagatgccagtattctacaggaaaaattgggaagcctgaatctgcggtggcaggaggtctgcaaacagctgtcagacagaaaaaagaggctagaagaacaaaagaatatcttgtcagaatttcaaagagatttaaatgaatttgttttatggttggaggaagcagataacattgctagtatcccacttgaacctggaaaagagcagcaactaaaagaaaagcttgagcaagtcaagttactggtggaagagttgcccctgcgccagggaattctcaaacaattaaatgaaactggaggacccgtgcttgtaagtgctcccataagcccagaagagcaagataaacttgaaaataagctcaagcagacaaatctccagtggataaaggtttccagagctttacctgagaaacaaggagaaattgaagctcaaataaaagaccttgggcagcttgaaaaaaagcttgaagaccttgaagagcagttaaatcatctgctgctgtggttatctcctattaggaatcagttggaaatttataaccaaccaaaccaagaaggaccatttgacgttaaggaaactgaaatagcagttcaagctaaacaaccggatgtggaagagattttgtctaaagggcagcatttgtacaaggaaaaaccagccactcagccagtgaagaggaagttagaagatctgagctctgagtggaaggcggtaaaccgtttacttcaagagctgagggcaaagcagcctgacctagctcctggactgaccactattggagcctctcctactcagactgttactctggtgacacaacctgtggttactaaggaaactgccatctccaaactagaaatgccatcttccttgatgttggaggtacctgctctggcagatttcaaccgggcttggacagaacttaccgactggctttctctgcttgatcaagttataaaatcacagagggtgatggtgggtgaccttgaggatatcaacgagatgatcatcaagcagaaggcaacaatgcaggatttggaacagaggcgtccccagttggaagaactcattaccgctgcccaaaatttgaaaaacaagaccagcaatcaagaggctagaacaatcattacggatcgaattgaaagaattcagaatcagtgggatgaagtacaagaacaccttcagaaccggaggcaacagttgaatgaaatgttaaaggattcaacacaatggctggaagctaaggaagaagctgagcaggtcttaggacaggccagagccaagcttgagtcatggaaggagggtccctatacagtagatgcaatccaaaagaaaatcacagaaaccaagcagttggccaaagacctccgccagtggcagacaaatgtagatgtggcaaatgacttggccctgaaacttctccgggattattctgcagatgataccagaaaagtccacatgataacagagaatatcaatgcctcttggagaagcattcataaaagggtgagtgagcgagaggctgctttggaagaaactcatagattactgcaacagttccccctggacctggaaaagtttcttgcctggcttacagaagctgaaacaactgccaatgtcctacaggatgctacccgtaaggaaaggctcctagaagactccaagggagtaaaagagctgatgaaacaatggcaagacctccaaggtgaaattgaagctcacacagatgtttatcacaacctggatgaaaacagccaaaaaatcctgagatccctggaaggttccgatgatgcagtcctgttacaaagacgtttggataacatgaacttcaagtggagtgaacttcggaaaaagtctctcaacattaggtcccatttggaagccagttctgaccagtggaagcgtctgcacctttctctgcaggaacttctggtgtggctacagctgaaagatgatgaattaagccggcaggcacctattggaggcgactttccagcagttcagaagcagaacgatgtacatagggccttcaagagggaattgaaaactaaagaacctgtaatcatgagtactcttgagactgtacgaatatttctgacagagcagcctttggaaggactagagaaactctaccaggagcccagagagctgcctcctgaggagagagcccagaatgtcactcggcttctacgaaagcaggctgaggaggtcaatactgagtgggaaaaattgaacctgcactccgctgactggcagagaaaaatagatgagacccttgaaagactccgggaacttcaagaggccacggatgagctggacctcaagctgcgccaagctgaggtgatcaagggatcctggcagcccgtgggcgatctcctcattgactctctccaagatcacctcgagaaagtcaaggcacttcgaggagaaattgcgcctctgaaagagaacgtgagccacgtcaatgaccttgctcgccagcttaccactttgggcattcagctctcaccgtataacctcagcactctggaagacctgaacaccagatggaagcttctgcaggtggccgtcgaggaccgagtcaggcagctgcatgaagcccacagggactttggtccagcatctcagcactttctttccacgtctgtccagggtccctgggagagagccatctcgccaaacaaagtgccctactatatcaaccacgagactcaaacaacttgctgggaccatcccaaaatgacagagctctaccagtctttagctgacctgaataatgtcagattctcagcttataggactgccatgaaactccgaagactgcagaaggccctttgcttggatctcttgagcctgtcagctgcatgtgatgccttggaccagcacaacctcaagcaaaatgaccagcccatggatatcctgcagattattaattgtttgaccactatttatgaccgcctggagcaagagcacaacaatttggtcaacgtccctctctgcgtggatatgtgtctgaactggctgctgaatgtttatgatacgggacgaacagggaggatccgtgtcctgtcttttaaaactggcatcatttccctgtgtaaagcacatttggaagacaagtacagataccttttcaagcaagtggcaagttcaacaggattttgtgaccagcgcaggctgggcctccttctgcatgattctatccaaattccaagacagttgggtgaagttgcatcctttgggggcagtaacattgagccaagtgtccggagctgcttccaatttgctaataataagccagagatcgaagcggccctcttcctagactggatgagactggaaccccagtccatggtgtggctgcccgtcctgcacagagtggctgctgcagaaactgccaagcatcaggccaaatgtaacatctgcaaagagtgtccaatcattggattcaggtacaggagtctaaagcactttaattatgacatctgccaaagctgctttttttctggtcgagttgcaaaaggccataaaatgcactatcccatggtggaatattgcactccgactacatcaggagaagatgttcgagactttgccaaggtactaaaaaacaaatttcgaaccaaaaggtattttgcgaagcatccccgaatgggctacctgccagtgcagactgtcttagagggggacaacatggaaacgaatctgcaagcagaatatgaccgtctaaagcagcagcacgaacataaaggcctgtccccactgccgtcccctcctgaaatgatgcccacctctccccagagtccccgggatgctgagctcattgctgaggccaagctactgcgtcaacacaaaggccgcctggaagccaggatgcaaatcctggaagaccacaataaacagctggagtcacagttacacaggctaaggcagctgctggagcaaccccaggcagaggccaaagtgaatggcacaacggtgtcctctccttctacctctctacagaggtccgacagcagtcagcctatgctgctccgagtggttggcagtcaaacttcggactccatgggtgaggaagatcttctcagtcctccccaggacacaagcacagggttagaggaggtgatggagcaactcaacaactccttccctagttcaagaggaagaaatacccctggaaagccaatgagagaggacacaatgtaggaagtcttttccacatggcagatgatttgggcagagcgatggagtccttagtatcagtcatgacagatgaagaaggagcagaataaatgttttacaactcctgattcccgcatggtttttataatattcatacaacaaagaggattagacagtaagagtttacaagaaataaatctatatttttgtgaagggtagtggtattatactgtagatttcagtagtttctaagtctgttattgttttgttaacaatggcaggttttacacgtctatgcaattgtacaaaaaagttataagaaaactacatgtaaaatcttgatagctaaataacttgccatttctttatatggaacgcattttgggttgtttaaaaatttataacagttataaagaaagattgtaaactaaagtgtgctttataaaaaaaagttgtttataaaaacccctaaaaacaaaacaaacacacacacacacacatacacacacacacacaaaactttgaggcagcgcattgttttgcatccttttggcgtgatatccatatgaaattcatggctttttctttttttgcatattaaagataagacttcctctaccaccacaccaaatgactactacacactgctcatttgagaactgtcagctgagtggggcaggcttgagttttcatttcatatatctatatgtctataagtatataaatactatagttatatagataaagagatacgaatttctatagactgactttttccattttttaaatgttcatgtcacatcctaatagaaagaaattacttctagtcagtcatccaggcttacctgcttggtctagaatggatttttcccggagccggaagccaggaggaaactacaccacactaaaacattgtctacagctccagatgtttctcattttaaacaactttccactgacaacgaaagtaaagtaaagtattggatttttttaaagggaacatgtgaatgaatacacaggacttattatatcagagtgagtaatcggttggttggttgattgattgattgattgatacattcagcttcctgctgctagcaatgccacgatttagatttaatgatgcttcagtggaaatcaatcagaaggtattctgaccttgtgaacatcagaaggtattttttaactcccaagcagtagcaggacgatgatagggctggagggctatggattcccagcccatccctgtgaaggagtaggccactctttaagtgaaggattggatgattgttcataatacataaagttctctgtaattacaactaaattattatgccctcttctcacagtcaaaaggaactgggtggtttggtttttgttgcttttttagatttattgtcccatgtgggatgagtttttaaatgccacaagacataatttaaaataaataaactttgggaaaaggtgtaaaacagtagccccatcacatttgtgatactgacaggtatcaacccagaagcccatgaactgtgtttccatcctttgcatttctctgcgagtagttccacacaggtttgtaagtaagtaagaaagaaggcaaattgattcaaatgttacaaaaaaacccttcttggtggattagacaggttaaatatataaacaaacaaacaaaaattgctcaaaaaagaggagaaaagctcaagaggaaaagctaaggactggtaggaaaaagctttactctttcatgccattttatttctttttgatttttaaatcattcattcaatagataccaccgtgtgacctataattttgcaaatctgttacctctgacatcaagtgtaattagcttttggagagtgggctgacatcaagtgtaattagcttttggagagtgggttttgtccattattaataattaattaattaacatcaaacacggcttctcatgctatttctacctcactttggttttggggtgttcctgataattgtgcacacctgagttcacagcttcaccacttgtccattgcgttattttctttttcctttataattctttctttttccttcataattttcaaaagaaaacccaaagctctaaggtaacaaattaccaaattacatgaagatttggtttttgtcttgcatttttttcctttatgtgacgctggaccttttctttacccaaggatttttaaaactcagatttaaaacaaggggttactttacatcctactaagaagtttaagtaagtaagtttcattctaaaatcagaggtaaatagagtgcataaataattttgttttaatctttttgtttttcttttagacacattagctctggagtgagtctgtcataatatttgaacaaaaattgagagctttattgctgcattttaagcataattaatttggacattatttcgtgttgtgttctttataaccaccaagtattaaactgtaaatcataatgtaactgaagcataaacatcacatggcatgttttgtcattgttttcaggtactgagttcttacttgagtatcataatatattgtgttttaacaccaacactgtaacatttacgaattatttttttaaacttcagttttactgcattttcacaacatatcagacttcaccaaatatatgccttactattgtattatagtactgctttactgtgtatctcaataaagcacgcagttatgttac

SEQ ID NO: 128820 - DNA, 13746 bp, Homo sapiens
  Payload ID: 5193
  Gene Symbol: DMD
  Gene Name: dystrophin
  ENST ID: ENST00000620040
  CDS Start-End: 1-11055
atgctttggtgggaagaagtagaggactgttatgaaagagaagatgttcaaaagaaaacattcacaaaatgggtaaatgcacaattttctaagtttgggaagcagcatattgagaacctcttcagtgacctacaggatgggaggcgcctcctagacctcctcgaaggcctgacagggcaaaaactgccaaaagaaaaaggatccacaagagttcatgccctgaacaatgtcaacaaggcactgcgggttttgcagaacaataatgttgatttagtgaatattggaagtactgacatcgtagatggaaatcataaactgactcttggtttgatttggaatataatcctccactggcaggtcaaaaatgtaatgaaaaatatcatggctggattgcaacaaaccaacagtgaaaagattctcctgagctgggtccgacaatcaactcgtaattatccacaggttaatgtaatcaacttcaccaccagctggtctgatggcctggctttgaatgctctcatccatagtcataggccagacctatttgactggaatagtgtggtttgccagcagtcagccacacaacgactggaacatgcattcaacatcgccagatatcaattaggcatagagaaactactcgatcctgaagatgttgataccacctatccagataagaagtccatcttaatgtacatcacatcactcttccaagttttgcctcaacaagtgagcattgaagccatccaggaagtggaaatgttgccaaggccacctaaagtgactaaagaagaacattttcagttacatcatcaaatgcactattctcaacagatcacggtcagtctagcacagggatatgagagaacttcttcccctaagcctcgattcaagagctatgcctacacacaggctgcttatgtcaccacctctgaccctacacggagcccatttccttcacagcatttggaagctcctgaagacaagtcatttggcagttcattgatggagagtgaagtaaacctggaccgttatcaaacagctttagaagaagtattatcgtggcttctttctgctgaggacacattgcaagcacaaggagagatttctaatgatgtggaagtggtgaaagaccagtttcatactcatgaggggtacatgatggatttgacagcccatcagggccgggttggtaatattctacaattgggaagtaagctgattggaacaggaaaattatcagaagatgaagaaactgaagtacaagagcagatgaatctcctaaattcaagatgggaatgcctcagggtagctagcatggaaaaacaaagcaatttacatagagttttaatggatctccagaatcagaaactgaaagagttgaatgactggctaacaaaaacagaagaaagaacaaggaaaatggaggaagagcctcttggacctgatcttgaagacctaaaacgccaagtacaacaacataaggtgcttcaagaagatctagaacaagaacaagtcagggtcaattctctcactcacatggtggtggtagttgatgaatctagtggagatcacgcaactgctgctttggaagaacaacttaaggtattgggagatcgatgggcaaacatctgtagatggacagaagaccgctgggttcttttacaagacatccttctcaaatggcaacgtcttactgaagaacagtgcctttttagtgcatggctttcagaaaaagaagatgcagtgaacaagattcacacaactggctttaaagatcaaaatgaaatgttatcaagtcttcaaaaactggccgttttaaaagcggatctagaaaagaaaaagcaatccatgggcaaactgtattcactcaaacaagatcttctttcaacactgaagaataagtcagtgacccagaagacggaagcatggctggataactttgcccggtgttgggataatttagtccaaaaacttgaaaagagtacagcacagatttcacaggctgtcaccaccactcagccatcactaacacagacaactgtaatggaaacagtaactacggtgaccacaagggaacagatcctggtaaagcatgctcaagaggaacttccaccaccacctccccaaaagaagaggcagattactgtggattctgaaattaggaaaaggttggatgttgatataactgaacttcacagctggattactcgctcagaagctgtgttgcagagtcctgaatttgcaatctttcggaaggaaggcaacttctcagacttaaaagaaaaagtcaatgccatagagcgagaaaaagctgagaagttcagaaaactgcaagatgccagcagatcagctcaggccctggtggaacagatggtgaatgagggtgttaatgcagatagcatcaaacaagcctcagaacaactgaacagccggtggatcgaattctgccagttgctaagtgagagacttaactggctggagtatcagaacaacatcatcgctttctataatcagctacaacaattggagcagatgacaactactgctgaaaactggttgaaaatccaacccaccaccccatcagagccaacagcaattaaaagtcagttaaaaatttgtaaggatgaagtcaaccggctatcagatcttcaacctcaaattgaacgattaaaaattcaaagcatagccctgaaagagaaaggacaaggacccatgttcctggatgcagactttgtggcctttacaaatcattttaagcaagtcttttctgatgtgcaggccagagagaaagagctacagacaatttttgacactttgccaccaatgcgctatcaggagaccatgagtgccatcaggacatgggtccagcagtcagaaaccaaactctccatacctcaacttagtgtcaccgactatgaaatcatggagcagagactcggggaattgcaggctttacaaagttctctgcaagagcaacaaagtggcctatactatctcagcaccactgtgaaagagatgtcgaagaaagcgccctctgaaattagccggaaatatcaatcagaatttgaagaaattgagggacgctggaagaagctctcctcccagctggttgagcattgtcaaaagctagaggagcaaatgaataaactccgaaaaattcagaatcacatacaaaccctgaagaaatggatggctgaagttgatgtttttctgaaggaggaatggcctgcccttggggattcagaaattctaaaaaagcagctgaaacagtgcagacttttagtcagtgatattcagacaattcagcccagtctaaacagtgtcaatgaaggtgggcagaagataaagaatgaagcagagccagagtttgcttcgagacttgagacagaactcaaagaacttaacactcagtgggatcacatgtgccaacaggtctatgccagaaaggaggccttgaagggaggtttggagaaaactgtaagcctccagaaagatctatcagagatgcacgaatggatgacacaagctgaagaagagtatcttgagagagattttgaatataaaactccagatgaattacagaaagcagttgaagagatgaagagagctaaagaagaggcccaacaaaaagaagcgaaagtgaaactccttactgagtctgtaaatagtgtcatagctcaagctccacctgtagcacaagaggccttaaaaaaggaacttgaaactctaaccaccaactaccagtggctctgcactaggctgaatgggaaatgcaagactttggaagaagtttgggcatgttggcatgagttattgtcatacttggagaaagcaaacaagtggctaaatgaagtagaatttaaacttaaaaccactgaaaacattcctggcggagctgaggaaatctctgaggtgctagattcacttgaaaatttgatgcgacattcagaggataacccaaatcagattcgcatattggcacagaccctaacagatggcggagtcatggatgagctaatcaatgaggaacttgagacatttaattctcgttggagggaactacatgaagaggctgtaaggaggcaaaagttgcttgaacagagcatccagtctgcccaggagactgaaaaatccttacacttaatccaggagtccctcacattcattgacaagcagttggcagcttatattgcagacaaggtggacgcagctcaaatgcctcaggaagcccagaaaatccaatctgatttgacaagtcatgagatcagtttagaagaaatgaagaaacataatcaggggaaggaggctgcccaaagagtcctgtctcagattgatgttgcacagaaaaaattacaagatgtctccatgaagtttcgattattccagaaaccagccaattttgagcagcgtctacaagaaagtaagatgattttagatgaagtgaagatgcacttgcctgcattggaaacaaagagtgtggaacaggaagtagtacagtcacagctaaatcattgtgtgaacttgtataaaagtctgagtgaagtgaagtctgaagtggaaatggtgataaagactggacgtcagattgtacagaaaaagcagacggaaaatcccaaagaacttgatgaaagagtaacagctttgaaattgcattataatgagctgggagcaaaggtaacagaaagaaagcaacagttggagaaatgcttgaaattgtcccgtaagatgcgaaaggaaatgaatgtcttgacagaatggctggcagctacagatatggaattgacaaagagatcagcagttgaaggaatgcctagtaatttggattctgaagttgcctggggaaaggctactcaaaaagagattgagaaacagaaggtgcacctgaagagtatcacagaggtaggagaggccttgaaaacagttttgggcaagaaggagacgttggtggaagataaactcagtcttctgaatagtaactggatagctgtcacctcccgagcagaagagtggttaaatcttttgttggaataccagaaacacatggaaacttttgaccagaatgtggaccacatcacaaagtggatcattcaggctgacacacttttggatgaatcagagaaaaagaaaccccagcaaaaagaagacgtgcttaagcgtttaaaggcagaactgaatgacatacgcccaaaggtggactctacacgtgaccaagcagcaaacttgatggcaaaccgcggtgaccactgcaggaaattagtagagccccaaatctcagagctcaaccatcgatttgcagccatttcacacagaattaagactggaaaggcctccattcctttgaaggaattggagcagtttaactcagatatacaaaaattgcttgaaccactggaggctgaaattcagcagggggtgaatctgaaagaggaagacttcaataaagatatgaatgaagacaatgagggtactgtaaaagaattgttgcaaagaggagacaacttacaacaaagaatcacagatgagagaaagcgagaggaaataaagataaaacagcagctgttacagacaaaacataatgctctcaaggatttgaggtctcaaagaagaaaaaaggctctagaaatttctcatcagtggtatcagtacaagaggcaggctgatgatctcctgaaatgcttggatgacattgaaaaaaaattagccagcctacctgagcccagagatgaaaggaaaataaaggaaattgatcgggaattgcagaagaagaaagaggagctgaatgcagtgcgtaggcaagctgagggcttgtctgaggatggggccgcaatggcagtggagccaactcagatccagctcagcaagcgctggcgggaaattgagagcaaatttgctcagtttcgaagactcaactttgcacaaattcacactgtccgtgaagaaacgatgatggtgatgactgaagacatgcctttggaaatttcttatgtgccttctacttatttgactgaaatcactcatgtctcacaagccctattagaagtggaacaacttctcaatgctcctgacctctgtgctaaggactttgaagatctctttaagcaagaggagtctctgaagaatataaaagatagtctacaacaaagctcaggtcggattgacattattcatagcaagaagacagcagcattgcaaagtgcaacgcctgtggaaagggtgaagctacaggaagctctctcccagcttgatttccaatgggaaaaagttaacaaaatgtacaaggaccgacaagggcgatttgacagatctgttgagaaatggcggcgttttcattatgatataaagatatttaatcagtggctaacagaagctgaacagtttctcagaaagacacaaattcctgagaattgggaacatgctaaatacaaatggtatcttaaggtaagtctttttgttttttcgaaacataccttttgcctccagaggcaaaagacgggtgaggaaataattcagcaatcctcaaaaacagatgccagtattctacaggaaaaattgggaagcctgaatctgcggtggcaggaggtctgcaaacagctgtcagacagaaaaaagaggctagaagaacaaaagaatatcttgtcagaatttcaaagagatttaaatgaatttgttttatggttggaggaagcagataacattgctagtatcccacttgaacctggaaaagagcagcaactaaaagaaaagcttgagcaagtcaagttactggtggaagagttgcccctgcgccagggaattctcaaacaattaaatgaaactggaggacccgtgcttgtaagtgctcccataagcccagaagagcaagataaacttgaaaataagctcaagcagacaaatctccagtggataaaggtttccagagctttacctgagaaacaaggagaaattgaagctcaaataaaagaccttgggcagcttgaaaaaaagcttgaagaccttgaagagcagttaaatcatctgctgctgtggttatctcctattaggaatcagttggaaatttataaccaaccaaaccaagaaggaccatttgacgttaaggaaactgaaatagcagttcaagctaaacaaccggatgtggaagagattttgtctaaagggcagcatttgtacaaggaaaaaccagccactcagccagtgaagaggaagttagaagatctgagctctgagtggaaggcggtaaaccgtttacttcaagagctgagggcaaagcagcctgacctagctcctggactgaccactattggagcctctcctactcagactgttactctggtgacacaacctgtggttactaaggaaactgccatctccaaactagaaatgccatcttccttgatgttggaggtacctgctctggcagatttcaaccgggcttggacagaacttaccgactggctttctctgcttgatcaagttataaaatcacagagggtgatggtgggtgaccttgaggatatcaacgagatgatcatcaagcagaaggcaacaatgcaggatttggaacagaggcgtccccagttggaagaactcattaccgctgcccaaaatttgaaaaacaagaccagcaatcaagaggctagaacaatcattacggatcgaattgaaagaattcagaatcagtgggatgaagtacaagaacaccttcagaaccggaggcaacagttgaatgaaatgttaaaggattcaacacaatggctggaagctaaggaagaagctgagcaggtcttaggacaggccagagccaagcttgagtcatggaaggagggtccctatacagtagatgcaatccaaaagaaaatcacagaaaccaagcagttggccaaagacctccgccagtggcagacaaatgtagatgtggcaaatgacttggccctgaaacttctccgggattattctgcagatgataccagaaaagtccacatgataacagagaatatcaatgcctcttggagaagcattcataaaagggtgagtgagcgagaggctgctttggaagaaactcatagattactgcaacagttccccctggacctggaaaagtttcttgcctggcttacagaagctgaaacaactgccaatgtcctacaggatgctacccgtaaggaaaggctcctagaagactccaagggagtaaaagagctgatgaaacaatggcaagacctccaaggtgaaattgaagctcacacagatgtttatcacaacctggatgaaaacagccaaaaaatcctgagatccctggaaggttccgatgatgcagtcctgttacaaagacgtttggataacatgaacttcaagtggagtgaacttcggaaaaagtctctcaacattaggtcccatttggaagccagttctgaccagtggaagcgtctgcacctttctctgcaggaacttctggtgtggctacagctgaaagatgatgaattaagccggcaggcacctattggaggcgactttccagcagttcagaagcagaacgatgtacatagggccttcaagagggaattgaaaactaaagaacctgtaatcatgagtactcttgagactgtacgaatatttctgacagagcagcctttggaaggactagagaaactctaccaggagcccagagagctgcctcctgaggagagagcccagaatgtcactcggcttctacgaaagcaggctgaggaggtcaatactgagtgggaaaaattgaacctgcactccgctgactggcagagaaaaatagatgagacccttgaaagactccgggaacttcaagaggccacggatgagctggacctcaagctgcgccaagctgaggtgatcaagggatcctggcagcccgtgggcgatctcctcattgactctctccaagatcacctcgagaaagtcaaggcacttcgaggagaaattgcgcctctgaaagagaacgtgagccacgtcaatgaccttgctcgccagcttaccactttgggcattcagctctcaccgtataacctcagcactctggaagacctgaacaccagatggaagcttctgcaggtggccgtcgaggaccgagtcaggcagctgcatgaagcccacagggactttggtccagcatctcagcactttctttccacgtctgtccagggtccctgggagagagccatctcgccaaacaaagtgccctactatatcaaccacgagactcaaacaacttgctgggaccatcccaaaatgacagagctctaccagtctttagctgacctgaataatgtcagattctcagcttataggactgccatgaaactccgaagactgcagaaggccctttgcttggatctcttgagcctgtcagctgcatgtgatgccttggaccagcacaacctcaagcaaaatgaccagcccatggatatcctgcagattattaattgtttgaccactatttatgaccgcctggagcaagagcacaacaatttggtcaacgtccctctctgcgtggatatgtgtctgaactggctgctgaatgtttatgatacgggacgaacagggaggatccgtgtcctgtcttttaaaactggcatcatttccctgtgtaaagcacatttggaagacaagtacagataccttttcaagcaagtggcaagttcaacaggattttgtgaccagcgcaggctgggcctccttctgcatgattctatccaaattccaagacagttgggtgaagttgcatcctttgggggcagtaacattgagccaagtgtccggagctgcttccaatttgctaataataagccagagatcgaagcggccctcttcctagactggatgagactggaaccccagtccatggtgtggctgcccgtcctgcacagagtggctgctgcagaaactgccaagcatcaggccaaatgtaacatctgcaaagagtgtccaatcattggattcaggtacaggagtctaaagcactttaattatgacatctgccaaagctgctttttttctggtcgagttgcaaaaggccataaaatgcactatcccatggtggaatattgcactccgactacatcaggagaagatgttcgagactttgccaaggtactaaaaaacaaatttcgaaccaaaaggtattttgcgaagcatccccgaatgggctacctgccagtgcagactgtcttagagggggacaacatggaaactcccgttactctgatcaacttctggccagtagattctgcgcctgcctcgtcccctcagctttcacacgatgatactcattcacgcattgaacattatgctagcaggctagcagaaatggaaaacagcaatggatcttatctaaatgatagcatctctcctaatgagagcatagatgatgaacatttgttaatccagcattactgccaaagtttgaaccaggactcccccctgagccagcctcgtagtcctgcccagatcttgatttccttagagagtgaggaaagaggggagctagagagaatcctagcagatcttgaggaagaaaacaggaatctgcaagcagaatatgaccgtctaaagcagcagcacgaacataaaggcctgtccccactgccgtcccctcctgaaatgatgcccacctctccccagagtccccgggatgctgagctcattgctgaggccaagctactgcgtcaacacaaaggccgcctggaagccaggatgcaaatcctggaagaccacaataaacagctggagtcacagttacacaggctaaggcagctgctggagcaaccccaggcagaggccaaagtgaatggcacaacggtgtcctctccttctacctctctacagaggtccgacagcagtcagcctatgctgctccgagtggttggcagtcaaacttcggactccatgggtgaggaagatcttctcagtcctccccaggacacaagcacagggttagaggaggtgatggagcaactcaacaactccttccctagttcaagaggaagaaatacccctggaaagccaatgagagaggacacaatgtaggaagtcttttccacatggcagatgatttgggcagagcgatggagtccttagtatcagtcatgacagatgaagaaggagcagaataaatgttttacaactcctgattcccgcatggtttttataatattcatacaacaaagaggattagacagtaagagtttacaagaaataaatctatatttttgtgaagggtagtggtattatactgtagatttcagtagtttctaagtctgttattgttttgttaacaatggcaggttttacacgtctatgcaattgtacaaaaaagttataagaaaactacatgtaaaatcttgatagctaaataacttgccatttctttatatggaacgcattttgggttgtttaaaaatttataacagttataaagaaagattgtaaactaaagtgtgctttataaaaaaaagttgtttataaaaacccctaaaaacaaaacaaacacacacacacacacatacacacacacacacaaaactttgaggcagcgcattgttttgcatccttttggcgtgatatccatatgaaattcatggctttttctttttttgcatattaaagataagacttcctctaccaccacaccaaatgactactacacactgctcatttgagaactgtcagctgagtggggcaggcttgagttttcatttcatatatctatatgtctataagtatataaatactatagttatatagataaagagatacgaatttctatagactgactttttccattttttaaatgttcatgtcacatcctaatagaaagaaattacttctagtcagtcatccaggcttacctgcttggtctagaatggatttttcccggagccggaagccaggaggaaactacaccacactaaaacattgtctacagctccagatgtttctcattttaaacaactttccactgacaacgaaagtaaagtaaagtattggatttttttaaagggaacatgtgaatgaatacacaggacttattatatcagagtgagtaatcggttggttggttgattgattgattgattgatacattcagcttcctgctgctagcaatgccacgatttagatttaatgatgcttcagtggaaatcaatcagaaggtattctgaccttgtgaacatcagaaggtattttttaactcccaagcagtagcaggacgatgatagggctggagggctatggattcccagcccatccctgtgaaggagtaggccactctttaagtgaaggattggatgattgttcataatacataaagttctctgtaattacaactaaattattatgccctcttctcacagtcaaaaggaactgggtggtttggtttttgttgcttttttagatttattgtcccatgtgggatgagtttttaaatgccacaagacataatttaaaataaataaactttgggaaaaggtgtaaaacagtagccccatcacatttgtgatactgacaggtatcaacccagaagcccatgaactgtgtttccatcctttgcatttctctgcgagtagttccacacaggtttgtaagtaagtaagaaagaaggcaaattgattcaaatgttacaaaaaaacccttcttggtggattagacaggttaaatatataaacaaacaaacaaaaattgctcaaaaaagaggagaaaagctcaagaggaaaagctaaggactggtaggaaaaagctttactctttcatgccattttatttctttttgatttttaaatcattcattcaatagataccaccgtgtgacctataattttgcaaatctgttacctctgacatcaagtgtaattagcttttggagagtgggctgacatcaagtgtaattagcttttggagagtgggttttgtccattattaataattaattaattaacatcaaacacggcttctcatgctatttctacctcactttggttttggggtgttcctgataattgtgcacacctgagttcacagcttcaccacttgtccattgcgttattttctttttcctttataattctttctttttccttcataattttcaaaagaaaacccaaagctctaaggtaacaaattaccaaattacatgaagatttggtttttgtcttgcatttttttcctttatgtgacgctggaccttttctttacccaaggatttttaaaactcagatttaaaacaaggggttactttacatcctactaagaagtttaagtaagtaagtttcattctaaaatcagaggtaaatagagtgcataaataattttgttttaatctttttgtttttcttttagacacattagctctggagtgagtctgtcataatatttgaacaaaaattgagagctttattgctgcattttaagcataattaatttggacattatttcgtgttgtgttctttataaccaccaagtattaaactgtaaatcataatgtaactgaagcataaacatcacatggcatgttttgtcattgttttcaggtactgagttcttacttgagtatcataatatattgtgttttaacaccaacactgtaacatttacgaattatttttttaaacttcagttttactgcattttcacaacatatcagacttcaccaaatatatgccttactattgtattatagtactgctttactgtgtatctcaataaagcacgcagttatgttac

SEQ ID NO: 128821 - DNA, 13734 bp, Homo sapiens
  Payload ID: 5193
  Gene Symbol: DMD
  Gene Name: dystrophin
  ENST ID: ENST00000619831
  CDS Start-End: 1-11043
atgtctgaggtctcatctgatgaaagagaagatgttcaaaagaaaacattcacaaaatgggtaaatgcacaattttctaagtttgggaagcagcatattgagaacctcttcagtgacctacaggatgggaggcgcctcctagacctcctcgaaggcctgacagggcaaaaactgccaaaagaaaaaggatccacaagagttcatgccctgaacaatgtcaacaaggcactgcgggttttgcagaacaataatgttgatttagtgaatattggaagtactgacatcgtagatggaaatcataaactgactcttggtttgatttggaatataatcctccactggcaggtcaaaaatgtaatgaaaaatatcatggctggattgcaacaaaccaacagtgaaaagattctcctgagctgggtccgacaatcaactcgtaattatccacaggttaatgtaatcaacttcaccaccagctggtctgatggcctggctttgaatgctctcatccatagtcataggccagacctatttgactggaatagtgtggtttgccagcagtcagccacacaacgactggaacatgcattcaacatcgccagatatcaattaggcatagagaaactactcgatcctgaagatgttgataccacctatccagataagaagtccatcttaatgtacatcacatcactcttccaagttttgcctcaacaagtgagcattgaagccatccaggaagtggaaatgttgccaaggccacctaaagtgactaaagaagaacattttcagttacatcatcaaatgcactattctcaacagatcacggtcagtctagcacagggatatgagagaacttcttcccctaagcctcgattcaagagctatgcctacacacaggctgcttatgtcaccacctctgaccctacacggagcccatttccttcacagcatttggaagctcctgaagacaagtcatttggcagttcattgatggagagtgaagtaaacctggaccgttatcaaacagctttagaagaagtattatcgtggcttctttctgctgaggacacattgcaagcacaaggagagatttctaatgatgtggaagtggtgaaagaccagtttcatactcatgaggggtacatgatggatttgacagcccatcagggccgggttggtaatattctacaattgggaagtaagctgattggaacaggaaaattatcagaagatgaagaaactgaagtacaagagcagatgaatctcctaaattcaagatgggaatgcctcagggtagctagcatggaaaaacaaagcaatttacatagagttttaatggatctccagaatcagaaactgaaagagttgaatgactggctaacaaaaacagaagaaagaacaaggaaaatggaggaagagcctcttggacctgatcttgaagacctaaaacgccaagtacaacaacataaggtgcttcaagaagatctagaacaagaacaagtcagggtcaattctctcactcacatggtggtggtagttgatgaatctagtggagatcacgcaactgctgctttggaagaacaacttaaggtattgggagatcgatgggcaaacatctgtagatggacagaagaccgctgggttcttttacaagacatccttctcaaatggcaacgtcttactgaagaacagtgcctttttagtgcatggctttcagaaaaagaagatgcagtgaacaagattcacacaactggctttaaagatcaaaatgaaatgttatcaagtcttcaaaaactggccgttttaaaagcggatctagaaaagaaaaagcaatccatgggcaaactgtattcactcaaacaagatcttctttcaacactgaagaataagtcagtgacccagaagacggaagcatggctggataactttgcccggtgttgggataatttagtccaaaaacttgaaaagagtacagcacagatttcacaggctgtcaccaccactcagccatcactaacacagacaactgtaatggaaacagtaactacggtgaccacaagggaacagatcctggtaaagcatgctcaagaggaacttccaccaccacctccccaaaagaagaggcagattactgtggattctgaaattaggaaaaggttggatgttgatataactgaacttcacagctggattactcgctcagaagctgtgttgcagagtcctgaatttgcaatctttcggaaggaaggcaacttctcagacttaaaagaaaaagtcaatgccatagagcgagaaaaagctgagaagttcagaaaactgcaagatgccagcagatcagctcaggccctggtggaacagatggtgaatgagggtgttaatgcagatagcatcaaacaagcctcagaacaactgaacagccggtggatcgaattctgccagttgctaagtgagagacttaactggctggagtatcagaacaacatcatcgctttctataatcagctacaacaattggagcagatgacaactactgctgaaaactggttgaaaatccaacccaccaccccatcagagccaacagcaattaaaagtcagttaaaaatttgtaaggatgaagtcaaccggctatcagatcttcaacctcaaattgaacgattaaaaattcaaagcatagccctgaaagagaaaggacaaggacccatgttcctggatgcagactttgtggcctttacaaatcattttaagcaagtcttttctgatgtgcaggccagagagaaagagctacagacaatttttgacactttgccaccaatgcgctatcaggagaccatgagtgccatcaggacatgggtccagcagtcagaaaccaaactctccatacctcaacttagtgtcaccgactatgaaatcatggagcagagactcggggaattgcaggctttacaaagttctctgcaagagcaacaaagtggcctatactatctcagcaccactgtgaaagagatgtcgaagaaagcgccctctgaaattagccggaaatatcaatcagaatttgaagaaattgagggacgctggaagaagctctcctcccagctggttgagcattgtcaaaagctagaggagcaaatgaataaactccgaaaaattcagaatcacatacaaaccctgaagaaatggatggctgaagttgatgtttttctgaaggaggaatggcctgcccttggggattcagaaattctaaaaaagcagctgaaacagtgcagacttttagtcagtgatattcagacaattcagcccagtctaaacagtgtcaatgaaggtgggcagaagataaagaatgaagcagagccagagtttgcttcgagacttgagacagaactcaaagaacttaacactcagtgggatcacatgtgccaacaggtctatgccagaaaggaggccttgaagggaggtttggagaaaactgtaagcctccagaaagatctatcagagatgcacgaatggatgacacaagctgaagaagagtatcttgagagagattttgaatataaaactccagatgaattacagaaagcagttgaagagatgaagagagctaaagaagaggcccaacaaaaagaagcgaaagtgaaactccttactgagtctgtaaatagtgtcatagctcaagctccacctgtagcacaagaggccttaaaaaaggaacttgaaactctaaccaccaactaccagtggctctgcactaggctgaatgggaaatgcaagactttggaagaagtttgggcatgttggcatgagttattgtcatacttggagaaagcaaacaagtggctaaatgaagtagaatttaaacttaaaaccactgaaaacattcctggcggagctgaggaaatctctgaggtgctagattcacttgaaaatttgatgcgacattcagaggataacccaaatcagattcgcatattggcacagaccctaacagatggcggagtcatggatgagctaatcaatgaggaacttgagacatttaattctcgttggagggaactacatgaagaggctgtaaggaggcaaaagttgcttgaacagagcatccagtctgcccaggagactgaaaaatccttacacttaatccaggagtccctcacattcattgacaagcagttggcagcttatattgcagacaaggtggacgcagctcaaatgcctcaggaagcccagaaaatccaatctgatttgacaagtcatgagatcagtttagaagaaatgaagaaacataatcaggggaaggaggctgcccaaagagtcctgtctcagattgatgttgcacagaaaaaattacaagatgtctccatgaagtttcgattattccagaaaccagccaattttgagcagcgtctacaagaaagtaagatgattttagatgaagtgaagatgcacttgcctgcattggaaacaaagagtgtggaacaggaagtagtacagtcacagctaaatcattgtgtgaacttgtataaaagtctgagtgaagtgaagtctgaagtggaaatggtgataaagactggacgtcagattgtacagaaaaagcagacggaaaatcccaaagaacttgatgaaagagtaacagctttgaaattgcattataatgagctgggagcaaaggtaacagaaagaaagcaacagttggagaaatgcttgaaattgtcccgtaagatgcgaaaggaaatgaatgtcttgacagaatggctggcagctacagatatggaattgacaaagagatcagcagttgaaggaatgcctagtaatttggattctgaagttgcctggggaaaggctactcaaaaagagattgagaaacagaaggtgcacctgaagagtatcacagaggtaggagaggccttgaaaacagttttgggcaagaaggagacgttggtggaagataaactcagtcttctgaatagtaactggatagctgtcacctcccgagcagaagagtggttaaatcttttgttggaataccagaaacacatggaaacttttgaccagaatgtggaccacatcacaaagtggatcattcaggctgacacacttttggatgaatcagagaaaaagaaaccccagcaaaaagaagacgtgcttaagcgtttaaaggcagaactgaatgacatacgcccaaaggtggactctacacgtgaccaagcagcaaacttgatggcaaaccgcggtgaccactgcaggaaattagtagagccccaaatctcagagctcaaccatcgatttgcagccatttcacacagaattaagactggaaaggcctccattcctttgaaggaattggagcagtttaactcagatatacaaaaattgcttgaaccactggaggctgaaattcagcagggggtgaatctgaaagaggaagacttcaataaagatatgaatgaagacaatgagggtactgtaaaagaattgttgcaaagaggagacaacttacaacaaagaatcacagatgagagaaagcgagaggaaataaagataaaacagcagctgttacagacaaaacataatgctctcaaggatttgaggtctcaaagaagaaaaaaggctctagaaatttctcatcagtggtatcagtacaagaggcaggctgatgatctcctgaaatgcttggatgacattgaaaaaaaattagccagcctacctgagcccagagatgaaaggaaaataaaggaaattgatcgggaattgcagaagaagaaagaggagctgaatgcagtgcgtaggcaagctgagggcttgtctgaggatggggccgcaatggcagtggagccaactcagatccagctcagcaagcgctggcgggaaattgagagcaaatttgctcagtttcgaagactcaactttgcacaaattcacactgtccgtgaagaaacgatgatggtgatgactgaagacatgcctttggaaatttcttatgtgccttctacttatttgactgaaatcactcatgtctcacaagccctattagaagtggaacaacttctcaatgctcctgacctctgtgctaaggactttgaagatctctttaagcaagaggagtctctgaagaatataaaagatagtctacaacaaagctcaggtcggattgacattattcatagcaagaagacagcagcattgcaaagtgcaacgcctgtggaaagggtgaagctacaggaagctctctcccagcttgatttccaatgggaaaaagttaacaaaatgtacaaggaccgacaagggcgatttgacagatctgttgagaaatggcggcgttttcattatgatataaagatatttaatcagtggctaacagaagctgaacagtttctcagaaagacacaaattcctgagaattgggaacatgctaaatacaaatggtatcttaaggtaagtctttttgttttttcgaaacataccttttgcctccagaggcaaaagacgggtgaggaaataattcagcaatcctcaaaaacagatgccagtattctacaggaaaaattgggaagcctgaatctgcggtggcaggaggtctgcaaacagctgtcagacagaaaaaagaggctagaagaacaaaagaatatcttgtcagaatttcaaagagatttaaatgaatttgttttatggttggaggaagcagataacattgctagtatcccacttgaacctggaaaagagcagcaactaaaagaaaagcttgagcaagtcaagttactggtggaagagttgcccctgcgccagggaattctcaaacaattaaatgaaactggaggacccgtgcttgtaagtgctcccataagcccagaagagcaagataaacttgaaaataagctcaagcagacaaatctccagtggataaaggtttccagagctttacctgagaaacaaggagaaattgaagctcaaataaaagaccttgggcagcttgaaaaaaagcttgaagaccttgaagagcagttaaatcatctgctgctgtggttatctcctattaggaatcagttggaaatttataaccaaccaaaccaagaaggaccatttgacgttaaggaaactgaaatagcagttcaagctaaacaaccggatgtggaagagattttgtctaaagggcagcatttgtacaaggaaaaaccagccactcagccagtgaagaggaagttagaagatctgagctctgagtggaaggcggtaaaccgtttacttcaagagctgagggcaaagcagcctgacctagctcctggactgaccactattggagcctctcctactcagactgttactctggtgacacaacctgtggttactaaggaaactgccatctccaaactagaaatgccatcttccttgatgttggaggtacctgctctggcagatttcaaccgggcttggacagaacttaccgactggctttctctgcttgatcaagttataaaatcacagagggtgatggtgggtgaccttgaggatatcaacgagatgatcatcaagcagaaggcaacaatgcaggatttggaacagaggcgtccccagttggaagaactcattaccgctgcccaaaatttgaaaaacaagaccagcaatcaagaggctagaacaatcattacggatcgaattgaaagaattcagaatcagtgggatgaagtacaagaacaccttcagaaccggaggcaacagttgaatgaaatgttaaaggattcaacacaatggctggaagctaaggaagaagctgagcaggtcttaggacaggccagagccaagcttgagtcatggaaggagggtccctatacagtagatgcaatccaaaagaaaatcacagaaaccaagcagttggccaaagacctccgccagtggcagacaaatgtagatgtggcaaatgacttggccctgaaacttctccgggattattctgcagatgataccagaaaagtccacatgataacagagaatatcaatgcctcttggagaagcattcataaaagggtgagtgagcgagaggctgctttggaagaaactcatagattactgcaacagttccccctggacctggaaaagtttcttgcctggcttacagaagctgaaacaactgccaatgtcctacaggatgctacccgtaaggaaaggctcctagaagactccaagggagtaaaagagctgatgaaacaatggcaagacctccaaggtgaaattgaagctcacacagatgtttatcacaacctggatgaaaacagccaaaaaatcctgagatccctggaaggttccgatgatgcagtcctgttacaaagacgtttggataacatgaacttcaagtggagtgaacttcggaaaaagtctctcaacattaggtcccatttggaagccagttctgaccagtggaagcgtctgcacctttctctgcaggaacttctggtgtggctacagctgaaagatgatgaattaagccggcaggcacctattggaggcgactttccagcagttcagaagcagaacgatgtacatagggccttcaagagggaattgaaaactaaagaacctgtaatcatgagtactcttgagactgtacgaatatttctgacagagcagcctttggaaggactagagaaactctaccaggagcccagagagctgcctcctgaggagagagcccagaatgtcactcggcttctacgaaagcaggctgaggaggtcaatactgagtgggaaaaattgaacctgcactccgctgactggcagagaaaaatagatgagacccttgaaagactccgggaacttcaagaggccacggatgagctggacctcaagctgcgccaagctgaggtgatcaagggatcctggcagcccgtgggcgatctcctcattgactctctccaagatcacctcgagaaagtcaaggcacttcgaggagaaattgcgcctctgaaagagaacgtgagccacgtcaatgaccttgctcgccagcttaccactttgggcattcagctctcaccgtataacctcagcactctggaagacctgaacaccagatggaagcttctgcaggtggccgtcgaggaccgagtcaggcagctgcatgaagcccacagggactttggtccagcatctcagcactttctttccacgtctgtccagggtccctgggagagagccatctcgccaaacaaagtgccctactatatcaaccacgagactcaaacaacttgctgggaccatcccaaaatgacagagctctaccagtctttagctgacctgaataatgtcagattctcagcttataggactgccatgaaactccgaagactgcagaaggccctttgcttggatctcttgagcctgtcagctgcatgtgatgccttggaccagcacaacctcaagcaaaatgaccagcccatggatatcctgcagattattaattgtttgaccactatttatgaccgcctggagcaagagcacaacaatttggtcaacgtccctctctgcgtggatatgtgtctgaactggctgctgaatgtttatgatacgggacgaacagggaggatccgtgtcctgtcttttaaaactggcatcatttccctgtgtaaagcacatttggaagacaagtacagataccttttcaagcaagtggcaagttcaacaggattttgtgaccagcgcaggctgggcctccttctgcatgattctatccaaattccaagacagttgggtgaagttgcatcctttgggggcagtaacattgagccaagtgtccggagctgcttccaatttgctaataataagccagagatcgaagcggccctcttcctagactggatgagactggaaccccagtccatggtgtggctgcccgtcctgcacagagtggctgctgcagaaactgccaagcatcaggccaaatgtaacatctgcaaagagtgtccaatcattggattcaggtacaggagtctaaagcactttaattatgacatctgccaaagctgctttttttctggtcgagttgcaaaaggccataaaatgcactatcccatggtggaatattgcactccgactacatcaggagaagatgttcgagactttgccaaggtactaaaaaacaaatttcgaaccaaaaggtattttgcgaagcatccccgaatgggctacctgccagtgcagactgtcttagagggggacaacatggaaactcccgttactctgatcaacttctggccagtagattctgcgcctgcctcgtcccctcagctttcacacgatgatactcattcacgcattgaacattatgctagcaggctagcagaaatggaaaacagcaatggatcttatctaaatgatagcatctctcctaatgagagcatagatgatgaacatttgttaatccagcattactgccaaagtttgaaccaggactcccccctgagccagcctcgtagtcctgcccagatcttgatttccttagagagtgaggaaagaggggagctagagagaatcctagcagatcttgaggaagaaaacaggaatctgcaagcagaatatgaccgtctaaagcagcagcacgaacataaaggcctgtccccactgccgtcccctcctgaaatgatgcccacctctccccagagtccccgggatgctgagctcattgctgaggccaagctactgcgtcaacacaaaggccgcctggaagccaggatgcaaatcctggaagaccacaataaacagctggagtcacagttacacaggctaaggcagctgctggagcaaccccaggcagaggccaaagtgaatggcacaacggtgtcctctccttctacctctctacagaggtccgacagcagtcagcctatgctgctccgagtggttggcagtcaaacttcggactccatgggtgaggaagatcttctcagtcctccccaggacacaagcacagggttagaggaggtgatggagcaactcaacaactccttccctagttcaagaggaagaaatacccctggaaagccaatgagagaggacacaatgtaggaagtcttttccacatggcagatgatttgggcagagcgatggagtccttagtatcagtcatgacagatgaagaaggagcagaataaatgttttacaactcctgattcccgcatggtttttataatattcatacaacaaagaggattagacagtaagagtttacaagaaataaatctatatttttgtgaagggtagtggtattatactgtagatttcagtagtttctaagtctgttattgttttgttaacaatggcaggttttacacgtctatgcaattgtacaaaaaagttataagaaaactacatgtaaaatcttgatagctaaataacttgccatttctttatatggaacgcattttgggttgtttaaaaatttataacagttataaagaaagattgtaaactaaagtgtgctttataaaaaaaagttgtttataaaaacccctaaaaacaaaacaaacacacacacacacacatacacacacacacacaaaactttgaggcagcgcattgttttgcatccttttggcgtgatatccatatgaaattcatggctttttctttttttgcatattaaagataagacttcctctaccaccacaccaaatgactactacacactgctcatttgagaactgtcagctgagtggggcaggcttgagttttcatttcatatatctatatgtctataagtatataaatactatagttatatagataaagagatacgaatttctatagactgactttttccattttttaaatgttcatgtcacatcctaatagaaagaaattacttctagtcagtcatccaggcttacctgcttggtctagaatggatttttcccggagccggaagccaggaggaaactacaccacactaaaacattgtctacagctccagatgtttctcattttaaacaactttccactgacaacgaaagtaaagtaaagtattggatttttttaaagggaacatgtgaatgaatacacaggacttattatatcagagtgagtaatcggttggttggttgattgattgattgattgatacattcagcttcctgctgctagcaatgccacgatttagatttaatgatgcttcagtggaaatcaatcagaaggtattctgaccttgtgaacatcagaaggtattttttaactcccaagcagtagcaggacgatgatagggctggagggctatggattcccagcccatccctgtgaaggagtaggccactctttaagtgaaggattggatgattgttcataatacataaagttctctgtaattacaactaaattattatgccctcttctcacagtcaaaaggaactgggtggtttggtttttgttgcttttttagatttattgtcccatgtgggatgagtttttaaatgccacaagacataatttaaaataaataaactttgggaaaaggtgtaaaacagtagccccatcacatttgtgatactgacaggtatcaacccagaagcccatgaactgtgtttccatcctttgcatttctctgcgagtagttccacacaggtttgtaagtaagtaagaaagaaggcaaattgattcaaatgttacaaaaaaacccttcttggtggattagacaggttaaatatataaacaaacaaacaaaaattgctcaaaaaagaggagaaaagctcaagaggaaaagctaaggactggtaggaaaaagctttactctttcatgccattttatttctttttgatttttaaatcattcattcaatagataccaccgtgtgacctataattttgcaaatctgttacctctgacatcaagtgtaattagcttttggagagtgggctgacatcaagtgtaattagcttttggagagtgggttttgtccattattaataattaattaattaacatcaaacacggcttctcatgctatttctacctcactttggttttggggtgttcctgataattgtgcacacctgagttcacagcttcaccacttgtccattgcgttattttctttttcctttataattctttctttttccttcataattttcaaaagaaaacccaaagctctaaggtaacaaattaccaaattacatgaagatttggtttttgtcttgcatttttttcctttatgtgacgctggaccttttctttacccaaggatttttaaaactcagatttaaaacaaggggttactttacatcctactaagaagtttaagtaagtaagtttcattctaaaatcagaggtaaatagagtgcataaataattttgttttaatctttttgtttttcttttagacacattagctctggagtgagtctgtcataatatttgaacaaaaattgagagctttattgctgcattttaagcataattaatttggacattatttcgtgttgtgttctttataaccaccaagtattaaactgtaaatcataatgtaactgaagcataaacatcacatggcatgttttgtcattgttttcaggtactgagttcttacttgagtatcataatatattgtgttttaacaccaacactgtaacatttacgaattatttttttaaacttcagttttactgcattttcacaacatatcagacttcaccaaatatatgccttactattgtattatagtactgctttactgtgtatctcaataaagcacgcagttatgttac

SEQ ID NO: 128822 - DNA, 3036 bp, Homo sapiens
  Payload ID: 5194
  Gene Symbol: DRP2
  Gene Name: dystrophin related protein 2
  ENST ID: ENST00000372916
  CDS Start-End: 319-1380
agggaagtgggagagacagagggagagtgtgcatacagcagctgtcggcatccctgtctcagggacttctttgctgattcacagaggcagcccagccccggcctcccagcttacagctgccgcctgcttctcagacctgacggaatcagaagctacataatattcgccgtgtgagtggctatcgtaatagataacatttgaatatctactaaatgccagaaactatgaattaactcctctcaacaaagctaagaggtgcttaatgatcaatagttggtgcactgcctatcctcatcccccccatgagccttggtttttatgcaacctatggtcatgcagggatgcccttacaccctcccacgatgtcatgactggcaggcagctgaccagttccatcatagcagcagcctccgaagcacctgcccccaccctcaggttagagctgctgtcaccagccctgcacctcctcaagatggtgctggggttccctgcctaagcctaaagctgttgaacgggtctgttggtgcctctggacccctggaaccaccagccatgaatctgtgttggaatgaaataaaaaagaagtctcacaacctccgcgctcgcctagaggccttctcagaccacagtggaaagcttcagctccctcttcaagagattattgactggctcagccaaaaggatgaggagttgtcagctcagctgcccctacagggggatgtggccctggtgcaacaggagaaggagacacatgcggcctttatggaagaagtcaagtctcggggcccctacatctattctgtgctggagtcagctcaggccttcctgtcccagcacccatttgaggagttagaggagcctcattctgagagcaaagatacctccccgaaacagcggatccagaatctcagccgctttgtatggaagcaggcgacggtggccagtgaactgtgggagaagttgacagcccgctgtgtggaccagcaccgtcacattgagcggactctggagcagctcttggagattcaaggggcaatggaggaactaagcactactctgagccaagctgagggagtccgagccacttgggagcccattggggatctcttcattgattcactcccagagcacatccaggctattaagctgttcaaagaagaattctcccccatgaaagatggagtaaagttggtgaatgatctggcccaccaacttgccatttctgatgtgcacttgtcaatggagaattcccaggccctggaacagatcaacgtccgatggaaacaactacaggcgtcagttagtgagaggcttaagcagctccaggatgcccaccgggactttgggcctgggtcacagcactttctctcctgtacgtgaaccaaactggactccacttagcagaacctcagccatcttcctggagagtctattgttatcccctggggccctggtgggagcccagtataccttgacatccgagaagcacctctgtccaggttccctgggaaagagcaatttcacccaataaagttccctactacatcaaccaccaggctcagaccacatgctgggaccatcccaagatgacagagttataccaaaccctagctgatctgaacaacattaagttctcagcttatcgcactgccatgaaactccgcagagtccagaaagccctgcgcttggacctggtaactttaaccacagccctggaaatcttcaatgagcatgatctgcaggccagtgagcacgtgatggatgtggtagaggtcattcactgcctgactgccttatatgaacgtttggaggaggaaagaggcatcctggtcaacgtgccactctgtgtggacatgagcctcaattggctcctcaatgtttttgatagtggtcgcagcggaaagatgcgggcattgtcttttaagactggcattgcatgcttgtgtggcacggaagtgaaggaaaaacttcagtacctcttcagccaagtggccaactcaggcagccagtgtgaccagcgccaccttggtgtcctgcttcatgaggccattcaggtgccccgtcagctgggtgaagtggcagcctttgggggcagcaatgtggagcccagtgtccgtagttgcttccgttttagcaccgggaagccagtcattgaagcatcccagttcctggagtgggtcaacctggagccccagtccatggtgtggctggctgttctgcatcgggtcaccattgctgagcaagtgaagcatcagaccaagtgctctatctgtaggcagtgccccatcaaggggttcaggtagggaaaacaatacctgctgggatgataataataaatatgtcatgtgacatataactcagatattaaaaaataaagtgtcacctaattattatataattacagctagtctattgtacattattatatactgttataatcctttatattgcagaatgtttaattgtttttaaatgggaagtgaggaaatattttgttttagttgtattataaagtattacagacctacaaaaatgtatagaagaacataggtgtaagagcacctatgtactaaatggtatgccagcaaatggttcacaacctactctctagaaagaaaaaaggaaagctgatctgtagcatttgctaatttctgtgatgtatatactcccactgtgaatgacatcaggctatttacaagaggtctctgagcagagtcagaaacagatcctcagttgcacaccatttatatagtatgtcaaccatgcagatacaatagatgttaagtaacctcaagaacatagagagtagcaaagtaattaggaagtaatgagttttgagtatttattacctttgtttgtaatataatttatttaattgtgagtttatataatttaataatggctagatttaacaactggcttagaaaacccctgaaattttaacagccaactgtcgtgagctggtatgagctggcatcagcacaccacagtatatacctgtgaccaacttaaggaataaaacattactgcaataca

SEQ ID NO: 128823 - DNA, 7277 bp, Homo sapiens
  Payload ID: 5194
  Gene Symbol: DRP2
  Gene Name: dystrophin related protein 2
  Uniprot ID: Q13474
  ENST ID: ENST00000395209
  CDS Start-End: 528-3401
cgctttcctcctctgcttctaatgaattgacatctccaagagccgccacatctctggtagttttacaaaactgtccttgctcttcctgcgtttgcccagtcaagggtatttttgcctgaggtcggaatgatgctgttagtcctggtgatatgattgcatagcaacacagagcagctctgagaggggaggaggaggagaagaaggaagacagggaagtgggagagacagagggagagtgtgcatacagcagctgtcggcatccctgtctcagggacttctttgctgattcacagaggcagcccagccccggcctcccagcttacagctgccgcctgcttctcagacctgacggaatcagaagctacataatattcgccgtgtgagtggctatcgtaatagataacatttgaatatctactaaatgccagaaactatgaattaactcctctcaacaaagctaagaggtgcttaatgatcaatagttggtgcactgcctatcctcatcccccccatgagccttggtttttatgcaacctatggtcatgcagggatgcccttacaccctcccacgatgtcatgactggcaggcagctgaccagttccatcatagcagcagcctccgaagcacctgcccccaccctcaggttagagctgctgtcaccagccctgcacctcctcaagatggtgctggggttccctgcctaagcctaaagctgttgaacgggtctgttggtgcctctggacccctggaaccaccagccatgaatctgtgttggaatgaaataaaaaagaagtctcacaacctccgcgctcgcctagaggccttctcagaccacagtggaaagcttcagctccctcttcaagagattattgactggctcagccaaaaggatgaggagttgtcagctcagctgcccctacagggggatgtggccctggtgcaacaggagaaggagacacatgcggcctttatggaagaagtcaagtctcggggcccctacatctattctgtgctggagtcagctcaggccttcctgtcccagcacccatttgaggagttagaggagcctcattctgagagcaaagatacctccccgaaacagcggatccagaatctcagccgctttgtatggaagcaggcgacggtggccagtgaactgtgggagaagttgacagcccgctgtgtggaccagcaccgtcacattgagcggactctggagcagctcttggagattcaaggggcaatggaggaactaagcactactctgagccaagctgagggagtccgagccacttgggagcccattggggatctcttcattgattcactcccagagcacatccaggctattaagctgttcaaagaagaattctcccccatgaaagatggagtaaagttggtgaatgatctggcccaccaacttgccatttctgatgtgcacttgtcaatggagaattcccaggccctggaacagatcaacgtccgatggaaacaactacaggcgtcagttagtgagaggcttaagcagctccaggatgcccaccgggactttgggcctgggtcacagcactttctctcctcctctgtccaggttccctgggaaagagcaatttcacccaataaagttccctactacatcaaccaccaggctcagaccacatgctgggaccatcccaagatgacagagttataccaaaccctagctgatctgaacaacattaagttctcagcttatcgcactgccatgaaactccgcagagtccagaaagccctgcgcttggacctggtaactttaaccacagccctggaaatcttcaatgagcatgatctgcaggccagtgagcacgtgatggatgtggtagaggtcattcactgcctgactgccttatatgaacgtttggaggaggaaagaggcatcctggtcaacgtgccactctgtgtggacatgagcctcaattggctcctcaatgtttttgatagtggtcgcagcggaaagatgcgggcattgtcttttaagactggcattgcatgcttgtgtggcacggaagtgaaggaaaaacttcagtacctcttcagccaagtggccaactcaggcagccagtgtgaccagcgccaccttggtgtcctgcttcatgaggccattcaggtgccccgtcagctgggtgaagtggcagcctttgggggcagcaatgtggagcccagtgtccgtagttgcttccgttttagcaccgggaagccagtcattgaagcatcccagttcctggagtgggtcaacctggagccccagtccatggtgtggctggctgttctgcatcgggtcaccattgctgagcaagtgaagcatcagaccaagtgctctatctgtaggcagtgccccatcaaggggttcaggtaccggagtctgaagcaattcaacgttgacatctgccagacctgcttcttgacaggcagggccagcaaaggcaataagctgcactaccccatcatggagtattacacaccgaccacatccagtgagaacatgagggactttgccacaaccttaaagaacaaattccgctccaagcattatttcagcaaacaccctcagcgaggttatctgcctgtgcaatcagtgctggaggctgactacagtgagacgccggcttcttccccgatgtggccacacgccgacacacactcccgaattgagcattttgccagcaggcttgctgagatggaaagtcaaaattgctccttctttaatgacagcttgtccccagatgacagcatagacgaggaccagtacctgctgcggcactccagccccatcacagaccgggagccagcctttggacagcaggctccatgcagtgtggccacagaaagcaaaggggagctacagaagatcctggcccacttggaagatgagaaccggattctccagggagagctgaggcgcctgaagtggcagcatgaggaggcagctgaggcacccagtctggctgacggctccactgaggcagcaacagaccaccgcaatgaggagcttctggccgaggcccgtatccttcggcaacataagagccgcctggagacgcgcatgcagatcctcgaagatcacaacaagcagctagagtcccagctgcagcgtctgagggagcttctcctgcagccacccaccgaatcagatggcagtggctctgcaggctcgtccctagcttcctctccacagcagtcagaaggcagtcacccccgggagaagggacagactactccagataccgaggctgcagatgatgtggggtcaaagagccaggatgtcagcctgtgcttggaggacatcatggagaaactccgtcatgccttccccagtgtgcgaagttctgatgtgactgccaacaccctgctggcctcttgatggagccagatccccatcctatagttcatagtcctctcctggttccggtcaaagcctttcctcagccttcacccaacctttccagtttccactggccccacattcctcaactagtattatttgggctctgggcagcagcagggatctggtggtatgtgaggtgcatgcgggcagtgatgggagaaggggaggcatgattcttctgaccctagaaatgttccctttaatcttcaagttcgagatcagccctttaagtacctttctgttgcagcccaggcaaatatcacttggccattcagatggggagcagagaagctgccttgcagagctaagcggtacatgttggcccctcttccttctccgtggaattatggaaagagagaagcctaattaccccaaggttccatccagcattatgaatccacagggtttacccctactctctggcgcaactcagggaggcaaaagggtatccccgagacaccttccccaccccaagtgcccctgaaaaagtctgggcagtgtgtgttctattacttcagctccaggacagattgctagccatcctaatgctacctaggtattggtttctcctcaaatatcttcattttctttagcctcagtccctgacagaccttccttaaggggagaacagttcattctggttcttctacgttatatttggaagcattaaatccatacttatgggtttagattttttttttgccccacatcttcctatttcttaaagtcctcagcattttgagagacccactgagttgcgagttgctctggaaacctggctgaagccaccctttgctcctctgagtctgtcctcacagacctgaggacacagtggcagcttgctgagcaagggagtgttgctttccttgggtaaggaagaggaagcccacctcaagtctggagtagtatgactgccatccaacacccttccaggctgtgacccttctagctctcaggctgaatcaggtgaggtggctgattgtccccagctaatcataaggcatttgcaactggctaccgtgtgtagtggcccctccataggagccacaggccacaaatcaggaagctggccactttccacccagacaacaacagcaaggccttcctgtgcctaaaattgttatttctaactctggaaggtgaatccaatcctcaaactgaactagctcttcctaggcgacatataccatgatctctttatccagaaactgttcagaatagatagtaggggtgggggagtgggcttgggaatgttgaatagattcagagcccacttaggcagctttctcccaagaggagctttataacctagagccctgcagttgacttcatttgcctaagtttatatacatacatatctattctacatatctactgtacatcagtgctctcctggcctcactcacacattaaattctaatacctcttgaagtattaatgttctgccttgctctttgttagccccagcctctggttggaaagatagatgtatcctggctgttcccctaggatatctctctccattgatgtttggggtgggctgtcctcaagaccaaagcaacagaaacctgtggtcacagagaatctaacaggaagagtcactgttctcttcactcattccaaatcttgttcccttgagacctgggccttgggtgaattttcctgggctcccctaaatggttcaggtgccaaaatagagcaaacccaagctctgcccaccccatgcagaaaaggacaaacaggcctttattagcctttgccagctaagacacagagaacattctctggtcccttccagctcttatggtctcactcagggctaaagaaagcaacagttgccaccacaatcaggagggagtgacggttggggtgttgtattataatccagcagtgggccagtgggtagaactgctaggaacctagtttgatctgctgcaggggaggcagggcagtggcttgggtccagaagcttagggttgcctcctccaccactaagtcacaggtccagggtgtcagacttcacagcataacatctgccttagtgttcatgaggtctctgggcaggagaactgggtatctggatagatggttgagcaggtggtaggcgggcatcaatcatagaacctgggcatcagtcagagtgggagcatatttgtagaagcctagattgtgggcgggaatgtgggacggagggctcaaggactttggaggcatatgcctgcctaagccttaggcgggtacatgttatggagcaattttttaccaggaaagtcctggaaaatcttttctgttatccccaccccacctgagagctcttgggctgctgagggcctgtggcaactgcagtgggccaggcatggtagaaaagatgtagatcttgttatgtaggatttgcgttgtaggtggactgaagcagcaggtcaagagttgaattctcactaaggggtcactgacattttgtggtcctgtgtttaccttaatgcctaaggtgagtgtattgttcaagggtccagggacagtcactgcagtatgtgtggggaattttcccacagtaaggtaaatggatccttgggtactatgaatccaacttggggttggatttaccaaaatgtgttgtatgttgttagacatcttgttgtgtattagtcttctaaggatattgtgcatggcactgtgtagtttatagccctacactggaaggatggtgaagggagttgctagattgatagcctaaagaaaaccttctgactgtgggattagcatcaatgataaggaatgtgagcatttgctggggttgttgtcaaatagtatcagagaacagttaggactgagaggtgatttcttcttgacagaatttgatagaggccaaaaagccattacgaggatacctctgcttccagtgacagcagagtggattcacattgattgggcattgtcacggaaggctgactagctggaggacatcaggctgtgctatgcttccctagggaggacatgtgcccttccctccagattagaaaggctagaatcaagagtttcaagtgctcattttcttcaaggtccaaggttgggaactatttccctacagagaaatctgtttgagtttctggtgctccaggaaatgggttggcaggacacagaaatgagaaaccctgaggccaggaagaggccaatcctaggagatgttttccctccagattcattttaaggaatatctgtgcttcctgatgtgtgtgcttgagatttgggctctatatccagcatttgaactcacattctcagtggcagagtcatggtctgtggcaccatttcaaggccaaaaatcccatccaatttcccttcacatagatgacagaaaagcaagaaagtagctgccttaactcgaacagttctgggaaaaaaactgggggccttgtcctgaggctgtggagacttaattcttcagctgggtggttcccgtaggaacaaggaacactttagctacttcttactcttttaacaccaatggctgtgggagaaggaaaggctcaaggccagggctcagctcgcagagtccatcttctcccacagttgccacatttgagagggggcctgctgaatgcccttgctgtcccctatggcagtattgaggcctgaccgaagtctggtatgctgcttgctggctacaagaactggtcacaggatgaaaattggggaaaggatttgggggaggtgacaagggtggcatggaagtctaggggacaaagggacagggttgggaacaaattggttaactttgattgccactcactgtggtgctttccccctttcccttgaattctgctttgaaaagaataaatttgtacttgttta

SEQ ID NO: 128824 - DNA, 7018 bp, Homo sapiens
  Payload ID: 5194
  Gene Symbol: DRP2
  Gene Name: dystrophin related protein 2
  Uniprot ID: Q13474
  ENST ID: ENST00000402866
  CDS Start-End: 269-3142
tgcttctcaggctcttccgctttcctcctctgcttctaatgaattgacatctccaagagccgccacatctctggtagttttacaaaactgtccttgctcttcctgcgtttgcccagtcaagggtatttttgcctgagaggcagcccagccccggcctcccagcttacagctgccgcctgcttctcagacctgacggaatcagaaggtgcttaatgatcaatagttggtgcactgcctatcctcatcccccccatgagccttggtttttatgcaacctatggtcatgcagggatgcccttacaccctcccacgatgtcatgactggcaggcagctgaccagttccatcatagcagcagcctccgaagcacctgcccccaccctcaggttagagctgctgtcaccagccctgcacctcctcaagatggtgctggggttccctgcctaagcctaaagctgttgaacgggtctgttggtgcctctggacccctggaaccaccagccatgaatctgtgttggaatgaaataaaaaagaagtctcacaacctccgcgctcgcctagaggccttctcagaccacagtggaaagcttcagctccctcttcaagagattattgactggctcagccaaaaggatgaggagttgtcagctcagctgcccctacagggggatgtggccctggtgcaacaggagaaggagacacatgcggcctttatggaagaagtcaagtctcggggcccctacatctattctgtgctggagtcagctcaggccttcctgtcccagcacccatttgaggagttagaggagcctcattctgagagcaaagatacctccccgaaacagcggatccagaatctcagccgctttgtatggaagcaggcgacggtggccagtgaactgtgggagaagttgacagcccgctgtgtggaccagcaccgtcacattgagcggactctggagcagctcttggagattcaaggggcaatggaggaactaagcactactctgagccaagctgagggagtccgagccacttgggagcccattggggatctcttcattgattcactcccagagcacatccaggctattaagctgttcaaagaagaattctcccccatgaaagatggagtaaagttggtgaatgatctggcccaccaacttgccatttctgatgtgcacttgtcaatggagaattcccaggccctggaacagatcaacgtccgatggaaacaactacaggcgtcagttagtgagaggcttaagcagctccaggatgcccaccgggactttgggcctgggtcacagcactttctctcctcctctgtccaggttccctgggaaagagcaatttcacccaataaagttccctactacatcaaccaccaggctcagaccacatgctgggaccatcccaagatgacagagttataccaaaccctagctgatctgaacaacattaagttctcagcttatcgcactgccatgaaactccgcagagtccagaaagccctgcgcttggacctggtaactttaaccacagccctggaaatcttcaatgagcatgatctgcaggccagtgagcacgtgatggatgtggtagaggtcattcactgcctgactgccttatatgaacgtttggaggaggaaagaggcatcctggtcaacgtgccactctgtgtggacatgagcctcaattggctcctcaatgtttttgatagtggtcgcagcggaaagatgcgggcattgtcttttaagactggcattgcatgcttgtgtggcacggaagtgaaggaaaaacttcagtacctcttcagccaagtggccaactcaggcagccagtgtgaccagcgccaccttggtgtcctgcttcatgaggccattcaggtgccccgtcagctgggtgaagtggcagcctttgggggcagcaatgtggagcccagtgtccgtagttgcttccgttttagcaccgggaagccagtcattgaagcatcccagttcctggagtgggtcaacctggagccccagtccatggtgtggctggctgttctgcatcgggtcaccattgctgagcaagtgaagcatcagaccaagtgctctatctgtaggcagtgccccatcaaggggttcaggtaccggagtctgaagcaattcaacgttgacatctgccagacctgcttcttgacaggcagggccagcaaaggcaataagctgcactaccccatcatggagtattacacaccgaccacatccagtgagaacatgagggactttgccacaaccttaaagaacaaattccgctccaagcattatttcagcaaacaccctcagcgaggttatctgcctgtgcaatcagtgctggaggctgactacagtgagacgccggcttcttccccgatgtggccacacgccgacacacactcccgaattgagcattttgccagcaggcttgctgagatggaaagtcaaaattgctccttctttaatgacagcttgtccccagatgacagcatagacgaggaccagtacctgctgcggcactccagccccatcacagaccgggagccagcctttggacagcaggctccatgcagtgtggccacagaaagcaaaggggagctacagaagatcctggcccacttggaagatgagaaccggattctccagggagagctgaggcgcctgaagtggcagcatgaggaggcagctgaggcacccagtctggctgacggctccactgaggcagcaacagaccaccgcaatgaggagcttctggccgaggcccgtatccttcggcaacataagagccgcctggagacgcgcatgcagatcctcgaagatcacaacaagcagctagagtcccagctgcagcgtctgagggagcttctcctgcagccacccaccgaatcagatggcagtggctctgcaggctcgtccctagcttcctctccacagcagtcagaaggcagtcacccccgggagaagggacagactactccagataccgaggctgcagatgatgtggggtcaaagagccaggatgtcagcctgtgcttggaggacatcatggagaaactccgtcatgccttccccagtgtgcgaagttctgatgtgactgccaacaccctgctggcctcttgatggagccagatccccatcctatagttcatagtcctctcctggttccggtcaaagcctttcctcagccttcacccaacctttccagtttccactggccccacattcctcaactagtattatttgggctctgggcagcagcagggatctggtggtatgtgaggtgcatgcgggcagtgatgggagaaggggaggcatgattcttctgaccctagaaatgttccctttaatcttcaagttcgagatcagccctttaagtacctttctgttgcagcccaggcaaatatcacttggccattcagatggggagcagagaagctgccttgcagagctaagcggtacatgttggcccctcttccttctccgtggaattatggaaagagagaagcctaattaccccaaggttccatccagcattatgaatccacagggtttacccctactctctggcgcaactcagggaggcaaaagggtatccccgagacaccttccccaccccaagtgcccctgaaaaagtctgggcagtgtgtgttctattacttcagctccaggacagattgctagccatcctaatgctacctaggtattggtttctcctcaaatatcttcattttctttagcctcagtccctgacagaccttccttaaggggagaacagttcattctggttcttctacgttatatttggaagcattaaatccatacttatgggtttagattttttttttgccccacatcttcctatttcttaaagtcctcagcattttgagagacccactgagttgcgagttgctctggaaacctggctgaagccaccctttgctcctctgagtctgtcctcacagacctgaggacacagtggcagcttgctgagcaagggagtgttgctttccttgggtaaggaagaggaagcccacctcaagtctggagtagtatgactgccatccaacacccttccaggctgtgacccttctagctctcaggctgaatcaggtgaggtggctgattgtccccagctaatcataaggcatttgcaactggctaccgtgtgtagtggcccctccataggagccacaggccacaaatcaggaagctggccactttccacccagacaacaacagcaaggccttcctgtgcctaaaattgttatttctaactctggaaggtgaatccaatcctcaaactgaactagctcttcctaggcgacatataccatgatctctttatccagaaactgttcagaatagatagtaggggtgggggagtgggcttgggaatgttgaatagattcagagcccacttaggcagctttctcccaagaggagctttataacctagagccctgcagttgacttcatttgcctaagtttatatacatacatatctattctacatatctactgtacatcagtgctctcctggcctcactcacacattaaattctaatacctcttgaagtattaatgttctgccttgctctttgttagccccagcctctggttggaaagatagatgtatcctggctgttcccctaggatatctctctccattgatgtttggggtgggctgtcctcaagaccaaagcaacagaaacctgtggtcacagagaatctaacaggaagagtcactgttctcttcactcattccaaatcttgttcccttgagacctgggccttgggtgaattttcctgggctcccctaaatggttcaggtgccaaaatagagcaaacccaagctctgcccaccccatgcagaaaaggacaaacaggcctttattagcctttgccagctaagacacagagaacattctctggtcccttccagctcttatggtctcactcagggctaaagaaagcaacagttgccaccacaatcaggagggagtgacggttggggtgttgtattataatccagcagtgggccagtgggtagaactgctaggaacctagtttgatctgctgcaggggaggcagggcagtggcttgggtccagaagcttagggttgcctcctccaccactaagtcacaggtccagggtgtcagacttcacagcataacatctgccttagtgttcatgaggtctctgggcaggagaactgggtatctggatagatggttgagcaggtggtaggcgggcatcaatcatagaacctgggcatcagtcagagtgggagcatatttgtagaagcctagattgtgggcgggaatgtgggacggagggctcaaggactttggaggcatatgcctgcctaagccttaggcgggtacatgttatggagcaattttttaccaggaaagtcctggaaaatcttttctgttatccccaccccacctgagagctcttgggctgctgagggcctgtggcaactgcagtgggccaggcatggtagaaaagatgtagatcttgttatgtaggatttgcgttgtaggtggactgaagcagcaggtcaagagttgaattctcactaaggggtcactgacattttgtggtcctgtgtttaccttaatgcctaaggtgagtgtattgttcaagggtccagggacagtcactgcagtatgtgtggggaattttcccacagtaaggtaaatggatccttgggtactatgaatccaacttggggttggatttaccaaaatgtgttgtatgttgttagacatcttgttgtgtattagtcttctaaggatattgtgcatggcactgtgtagtttatagccctacactggaaggatggtgaagggagttgctagattgatagcctaaagaaaaccttctgactgtgggattagcatcaatgataaggaatgtgagcatttgctggggttgttgtcaaatagtatcagagaacagttaggactgagaggtgatttcttcttgacagaatttgatagaggccaaaaagccattacgaggatacctctgcttccagtgacagcagagtggattcacattgattgggcattgtcacggaaggctgactagctggaggacatcaggctgtgctatgcttccctagggaggacatgtgcccttccctccagattagaaaggctagaatcaagagtttcaagtgctcattttcttcaaggtccaaggttgggaactatttccctacagagaaatctgtttgagtttctggtgctccaggaaatgggttggcaggacacagaaatgagaaaccctgaggccaggaagaggccaatcctaggagatgttttccctccagattcattttaaggaatatctgtgcttcctgatgtgtgtgcttgagatttgggctctatatccagcatttgaactcacattctcagtggcagagtcatggtctgtggcaccatttcaaggccaaaaatcccatccaatttcccttcacatagatgacagaaaagcaagaaagtagctgccttaactcgaacagttctgggaaaaaaactgggggccttgtcctgaggctgtggagacttaattcttcagctgggtggttcccgtaggaacaaggaacactttagctacttcttactcttttaacaccaatggctgtgggagaaggaaaggctcaaggccagggctcagctcgcagagtccatcttctcccacagttgccacatttgagagggggcctgctgaatgcccttgctgtcccctatggcagtattgaggcctgaccgaagtctggtatgctgcttgctggctacaagaactggtcacaggatgaaaattggggaaaggatttgggggaggtgacaagggtggcatggaagtctaggggacaaagggacagggttgggaacaaattggttaactttgattgccactcactgtggtgctttccccctttcccttgaattctgctttgaaaagaataaatttgtacttgttta

SEQ ID NO: 128825 - DNA, 6852 bp, Homo sapiens
  Payload ID: 5194
  Gene Symbol: DRP2
  Gene Name: dystrophin related protein 2
  Uniprot ID: Q13474
  ENST ID: ENST00000538510
  CDS Start-End: 104-2977
ctaggtcttgactcgaaatctctctgtattgcttttccaggtgcttaatgatcaatagttggtgcactgcctatcctcatcccccccatgagccttggtttttatgcaacctatggtcatgcagggatgcccttacaccctcccacgatgtcatgactggcaggcagctgaccagttccatcatagcagcagcctccgaagcacctgcccccaccctcaggttagagctgctgtcaccagccctgcacctcctcaagatggtgctggggttccctgcctaagcctaaagctgttgaacgggtctgttggtgcctctggacccctggaaccaccagccatgaatctgtgttggaatgaaataaaaaagaagtctcacaacctccgcgctcgcctagaggccttctcagaccacagtggaaagcttcagctccctcttcaagagattattgactggctcagccaaaaggatgaggagttgtcagctcagctgcccctacagggggatgtggccctggtgcaacaggagaaggagacacatgcggcctttatggaagaagtcaagtctcggggcccctacatctattctgtgctggagtcagctcaggccttcctgtcccagcacccatttgaggagttagaggagcctcattctgagagcaaagatacctccccgaaacagcggatccagaatctcagccgctttgtatggaagcaggcgacggtggccagtgaactgtgggagaagttgacagcccgctgtgtggaccagcaccgtcacattgagcggactctggagcagctcttggagattcaaggggcaatggaggaactaagcactactctgagccaagctgagggagtccgagccacttgggagcccattggggatctcttcattgattcactcccagagcacatccaggctattaagctgttcaaagaagaattctcccccatgaaagatggagtaaagttggtgaatgatctggcccaccaacttgccatttctgatgtgcacttgtcaatggagaattcccaggccctggaacagatcaacgtccgatggaaacaactacaggcgtcagttagtgagaggcttaagcagctccaggatgcccaccgggactttgggcctgggtcacagcactttctctcctcctctgtccaggttccctgggaaagagcaatttcacccaataaagttccctactacatcaaccaccaggctcagaccacatgctgggaccatcccaagatgacagagttataccaaaccctagctgatctgaacaacattaagttctcagcttatcgcactgccatgaaactccgcagagtccagaaagccctgcgcttggacctggtaactttaaccacagccctggaaatcttcaatgagcatgatctgcaggccagtgagcacgtgatggatgtggtagaggtcattcactgcctgactgccttatatgaacgtttggaggaggaaagaggcatcctggtcaacgtgccactctgtgtggacatgagcctcaattggctcctcaatgtttttgatagtggtcgcagcggaaagatgcgggcattgtcttttaagactggcattgcatgcttgtgtggcacggaagtgaaggaaaaacttcagtacctcttcagccaagtggccaactcaggcagccagtgtgaccagcgccaccttggtgtcctgcttcatgaggccattcaggtgccccgtcagctgggtgaagtggcagcctttgggggcagcaatgtggagcccagtgtccgtagttgcttccgttttagcaccgggaagccagtcattgaagcatcccagttcctggagtgggtcaacctggagccccagtccatggtgtggctggctgttctgcatcgggtcaccattgctgagcaagtgaagcatcagaccaagtgctctatctgtaggcagtgccccatcaaggggttcaggtaccggagtctgaagcaattcaacgttgacatctgccagacctgcttcttgacaggcagggccagcaaaggcaataagctgcactaccccatcatggagtattacacaccgaccacatccagtgagaacatgagggactttgccacaaccttaaagaacaaattccgctccaagcattatttcagcaaacaccctcagcgaggttatctgcctgtgcaatcagtgctggaggctgactacagtgagacgccggcttcttccccgatgtggccacacgccgacacacactcccgaattgagcattttgccagcaggcttgctgagatggaaagtcaaaattgctccttctttaatgacagcttgtccccagatgacagcatagacgaggaccagtacctgctgcggcactccagccccatcacagaccgggagccagcctttggacagcaggctccatgcagtgtggccacagaaagcaaaggggagctacagaagatcctggcccacttggaagatgagaaccggattctccagggagagctgaggcgcctgaagtggcagcatgaggaggcagctgaggcacccagtctggctgacggctccactgaggcagcaacagaccaccgcaatgaggagcttctggccgaggcccgtatccttcggcaacataagagccgcctggagacgcgcatgcagatcctcgaagatcacaacaagcagctagagtcccagctgcagcgtctgagggagcttctcctgcagccacccaccgaatcagatggcagtggctctgcaggctcgtccctagcttcctctccacagcagtcagaaggcagtcacccccgggagaagggacagactactccagataccgaggctgcagatgatgtggggtcaaagagccaggatgtcagcctgtgcttggaggacatcatggagaaactccgtcatgccttccccagtgtgcgaagttctgatgtgactgccaacaccctgctggcctcttgatggagccagatccccatcctatagttcatagtcctctcctggttccggtcaaagcctttcctcagccttcacccaacctttccagtttccactggccccacattcctcaactagtattatttgggctctgggcagcagcagggatctggtggtatgtgaggtgcatgcgggcagtgatgggagaaggggaggcatgattcttctgaccctagaaatgttccctttaatcttcaagttcgagatcagccctttaagtacctttctgttgcagcccaggcaaatatcacttggccattcagatggggagcagagaagctgccttgcagagctaagcggtacatgttggcccctcttccttctccgtggaattatggaaagagagaagcctaattaccccaaggttccatccagcattatgaatccacagggtttacccctactctctggcgcaactcagggaggcaaaagggtatccccgagacaccttccccaccccaagtgcccctgaaaaagtctgggcagtgtgtgttctattacttcagctccaggacagattgctagccatcctaatgctacctaggtattggtttctcctcaaatatcttcattttctttagcctcagtccctgacagaccttccttaaggggagaacagttcattctggttcttctacgttatatttggaagcattaaatccatacttatgggtttagattttttttttgccccacatcttcctatttcttaaagtcctcagcattttgagagacccactgagttgcgagttgctctggaaacctggctgaagccaccctttgctcctctgagtctgtcctcacagacctgaggacacagtggcagcttgctgagcaagggagtgttgctttccttgggtaaggaagaggaagcccacctcaagtctggagtagtatgactgccatccaacacccttccaggctgtgacccttctagctctcaggctgaatcaggtgaggtggctgattgtccccagctaatcataaggcatttgcaactggctaccgtgtgtagtggcccctccataggagccacaggccacaaatcaggaagctggccactttccacccagacaacaacagcaaggccttcctgtgcctaaaattgttatttctaactctggaaggtgaatccaatcctcaaactgaactagctcttcctaggcgacatataccatgatctctttatccagaaactgttcagaatagatagtaggggtgggggagtgggcttgggaatgttgaatagattcagagcccacttaggcagctttctcccaagaggagctttataacctagagccctgcagttgacttcatttgcctaagtttatatacatacatatctattctacatatctactgtacatcagtgctctcctggcctcactcacacattaaattctaatacctcttgaagtattaatgttctgccttgctctttgttagccccagcctctggttggaaagatagatgtatcctggctgttcccctaggatatctctctccattgatgtttggggtgggctgtcctcaagaccaaagcaacagaaacctgtggtcacagagaatctaacaggaagagtcactgttctcttcactcattccaaatcttgttcccttgagacctgggccttgggtgaattttcctgggctcccctaaatggttcaggtgccaaaatagagcaaacccaagctctgcccaccccatgcagaaaaggacaaacaggcctttattagcctttgccagctaagacacagagaacattctctggtcccttccagctcttatggtctcactcagggctaaagaaagcaacagttgccaccacaatcaggagggagtgacggttggggtgttgtattataatccagcagtgggccagtgggtagaactgctaggaacctagtttgatctgctgcaggggaggcagggcagtggcttgggtccagaagcttagggttgcctcctccaccactaagtcacaggtccagggtgtcagacttcacagcataacatctgccttagtgttcatgaggtctctgggcaggagaactgggtatctggatagatggttgagcaggtggtaggcgggcatcaatcatagaacctgggcatcagtcagagtgggagcatatttgtagaagcctagattgtgggcgggaatgtgggacggagggctcaaggactttggaggcatatgcctgcctaagccttaggcgggtacatgttatggagcaattttttaccaggaaagtcctggaaaatcttttctgttatccccaccccacctgagagctcttgggctgctgagggcctgtggcaactgcagtgggccaggcatggtagaaaagatgtagatcttgttatgtaggatttgcgttgtaggtggactgaagcagcaggtcaagagttgaattctcactaaggggtcactgacattttgtggtcctgtgtttaccttaatgcctaaggtgagtgtattgttcaagggtccagggacagtcactgcagtatgtgtggggaattttcccacagtaaggtaaatggatccttgggtactatgaatccaacttggggttggatttaccaaaatgtgttgtatgttgttagacatcttgttgtgtattagtcttctaaggatattgtgcatggcactgtgtagtttatagccctacactggaaggatggtgaagggagttgctagattgatagcctaaagaaaaccttctgactgtgggattagcatcaatgataaggaatgtgagcatttgctggggttgttgtcaaatagtatcagagaacagttaggactgagaggtgatttcttcttgacagaatttgatagaggccaaaaagccattacgaggatacctctgcttccagtgacagcagagtggattcacattgattgggcattgtcacggaaggctgactagctggaggacatcaggctgtgctatgcttccctagggaggacatgtgcccttccctccagattagaaaggctagaatcaagagtttcaagtgctcattttcttcaaggtccaaggttgggaactatttccctacagagaaatctgtttgagtttctggtgctccaggaaatgggttggcaggacacagaaatgagaaaccctgaggccaggaagaggccaatcctaggagatgttttccctccagattcattttaaggaatatctgtgcttcctgatgtgtgtgcttgagatttgggctctatatccagcatttgaactcacattctcagtggcagagtcatggtctgtggcaccatttcaaggccaaaaatcccatccaatttcccttcacatagatgacagaaaagcaagaaagtagctgccttaactcgaacagttctgggaaaaaaactgggggccttgtcctgaggctgtggagacttaattcttcagctgggtggttcccgtaggaacaaggaacactttagctacttcttactcttttaacaccaatggctgtgggagaaggaaaggctcaaggccagggctcagctcgcagagtccatcttctcccacagttgccacatttgagagggggcctgctgaatgcccttgctgtcccctatggcagtattgaggcctgaccgaagtctggtatgctgcttgctggctacaagaactggtcacaggatgaaaattggggaaaggatttgggggaggtgacaagggtggcatggaagtctaggggacaaagggacagggttgggaacaaattggttaactttgattgccactcactgtggtgctttccccctttcccttgaattctgctttgaaaagaataaatttgtacttgttt

SEQ ID NO: 128826 - DNA, 6835 bp, Homo sapiens
  Payload ID: 5194
  Gene Symbol: DRP2
  Gene Name: dystrophin related protein 2
  Uniprot ID: Q13474
  ENST ID: ENST00000541709
  CDS Start-End: 321-2960
tagcaacacagagcagctctgagaggggaggaggaggagaagaaggaagacagggaagtgggagagacagagggagagtgtgcatacagcagctgtcggcatccctgtctcagggacttctttgctgattcacagaggcagcccagccccggcctcccagcttacagctgccgcctgcttctcagacctgacggaatcagaaggttagagctgctgtcaccagccctgcacctcctcaagatggtgctggggttccctgcctaagcctaaagctgttgaacgggtctgttggtgcctctggacccctggaaccaccagccatgaatctgtgttggaatgaaataaaaaagaagtctcacaacctccgcgctcgcctagaggccttctcagaccacagtggaaagcttcagctccctcttcaagagattattgactggctcagccaaaaggatgaggagttgtcagctcagctgcccctacagggggatgtggccctggtgcaacaggagaaggagacacatgcggcctttatggaagaagtcaagtctcggggcccctacatctattctgtgctggagtcagctcaggccttcctgtcccagcacccatttgaggagttagaggagcctcattctgagagcaaagatacctccccgaaacagcggatccagaatctcagccgctttgtatggaagcaggcgacggtggccagtgaactgtgggagaagttgacagcccgctgtgtggaccagcaccgtcacattgagcggactctggagcagctcttggagattcaaggggcaatggaggaactaagcactactctgagccaagctgagggagtccgagccacttgggagcccattggggatctcttcattgattcactcccagagcacatccaggctattaagctgttcaaagaagaattctcccccatgaaagatggagtaaagttggtgaatgatctggcccaccaacttgccatttctgatgtgcacttgtcaatggagaattcccaggccctggaacagatcaacgtccgatggaaacaactacaggcgtcagttagtgagaggcttaagcagctccaggatgcccaccgggactttgggcctgggtcacagcactttctctcctcctctgtccaggttccctgggaaagagcaatttcacccaataaagttccctactacatcaaccaccaggctcagaccacatgctgggaccatcccaagatgacagagttataccaaaccctagctgatctgaacaacattaagttctcagcttatcgcactgccatgaaactccgcagagtccagaaagccctgcgcttggacctggtaactttaaccacagccctggaaatcttcaatgagcatgatctgcaggccagtgagcacgtgatggatgtggtagaggtcattcactgcctgactgccttatatgaacgtttggaggaggaaagaggcatcctggtcaacgtgccactctgtgtggacatgagcctcaattggctcctcaatgtttttgatagtggtcgcagcggaaagatgcgggcattgtcttttaagactggcattgcatgcttgtgtggcacggaagtgaaggaaaaacttcagtacctcttcagccaagtggccaactcaggcagccagtgtgaccagcgccaccttggtgtcctgcttcatgaggccattcaggtgccccgtcagctgggtgaagtggcagcctttgggggcagcaatgtggagcccagtgtccgtagttgcttccgttttagcaccgggaagccagtcattgaagcatcccagttcctggagtgggtcaacctggagccccagtccatggtgtggctggctgttctgcatcgggtcaccattgctgagcaagtgaagcatcagaccaagtgctctatctgtaggcagtgccccatcaaggggttcaggtaccggagtctgaagcaattcaacgttgacatctgccagacctgcttcttgacaggcagggccagcaaaggcaataagctgcactaccccatcatggagtattacacaccgaccacatccagtgagaacatgagggactttgccacaaccttaaagaacaaattccgctccaagcattatttcagcaaacaccctcagcgaggttatctgcctgtgcaatcagtgctggaggctgactacagtgagacgccggcttcttccccgatgtggccacacgccgacacacactcccgaattgagcattttgccagcaggcttgctgagatggaaagtcaaaattgctccttctttaatgacagcttgtccccagatgacagcatagacgaggaccagtacctgctgcggcactccagccccatcacagaccgggagccagcctttggacagcaggctccatgcagtgtggccacagaaagcaaaggggagctacagaagatcctggcccacttggaagatgagaaccggattctccagggagagctgaggcgcctgaagtggcagcatgaggaggcagctgaggcacccagtctggctgacggctccactgaggcagcaacagaccaccgcaatgaggagcttctggccgaggcccgtatccttcggcaacataagagccgcctggagacgcgcatgcagatcctcgaagatcacaacaagcagctagagtcccagctgcagcgtctgagggagcttctcctgcagccacccaccgaatcagatggcagtggctctgcaggctcgtccctagcttcctctccacagcagtcagaaggcagtcacccccgggagaagggacagactactccagataccgaggctgcagatgatgtggggtcaaagagccaggatgtcagcctgtgcttggaggacatcatggagaaactccgtcatgccttccccagtgtgcgaagttctgatgtgactgccaacaccctgctggcctcttgatggagccagatccccatcctatagttcatagtcctctcctggttccggtcaaagcctttcctcagccttcacccaacctttccagtttccactggccccacattcctcaactagtattatttgggctctgggcagcagcagggatctggtggtatgtgaggtgcatgcgggcagtgatgggagaaggggaggcatgattcttctgaccctagaaatgttccctttaatcttcaagttcgagatcagccctttaagtacctttctgttgcagcccaggcaaatatcacttggccattcagatggggagcagagaagctgccttgcagagctaagcggtacatgttggcccctcttccttctccgtggaattatggaaagagagaagcctaattaccccaaggttccatccagcattatgaatccacagggtttacccctactctctggcgcaactcagggaggcaaaagggtatccccgagacaccttccccaccccaagtgcccctgaaaaagtctgggcagtgtgtgttctattacttcagctccaggacagattgctagccatcctaatgctacctaggtattggtttctcctcaaatatcttcattttctttagcctcagtccctgacagaccttccttaaggggagaacagttcattctggttcttctacgttatatttggaagcattaaatccatacttatgggtttagattttttttttgccccacatcttcctatttcttaaagtcctcagcattttgagagacccactgagttgcgagttgctctggaaacctggctgaagccaccctttgctcctctgagtctgtcctcacagacctgaggacacagtggcagcttgctgagcaagggagtgttgctttccttgggtaaggaagaggaagcccacctcaagtctggagtagtatgactgccatccaacacccttccaggctgtgacccttctagctctcaggctgaatcaggtgaggtggctgattgtccccagctaatcataaggcatttgcaactggctaccgtgtgtagtggcccctccataggagccacaggccacaaatcaggaagctggccactttccacccagacaacaacagcaaggccttcctgtgcctaaaattgttatttctaactctggaaggtgaatccaatcctcaaactgaactagctcttcctaggcgacatataccatgatctctttatccagaaactgttcagaatagatagtaggggtgggggagtgggcttgggaatgttgaatagattcagagcccacttaggcagctttctcccaagaggagctttataacctagagccctgcagttgacttcatttgcctaagtttatatacatacatatctattctacatatctactgtacatcagtgctctcctggcctcactcacacattaaattctaatacctcttgaagtattaatgttctgccttgctctttgttagccccagcctctggttggaaagatagatgtatcctggctgttcccctaggatatctctctccattgatgtttggggtgggctgtcctcaagaccaaagcaacagaaacctgtggtcacagagaatctaacaggaagagtcactgttctcttcactcattccaaatcttgttcccttgagacctgggccttgggtgaattttcctgggctcccctaaatggttcaggtgccaaaatagagcaaacccaagctctgcccaccccatgcagaaaaggacaaacaggcctttattagcctttgccagctaagacacagagaacattctctggtcccttccagctcttatggtctcactcagggctaaagaaagcaacagttgccaccacaatcaggagggagtgacggttggggtgttgtattataatccagcagtgggccagtgggtagaactgctaggaacctagtttgatctgctgcaggggaggcagggcagtggcttgggtccagaagcttagggttgcctcctccaccactaagtcacaggtccagggtgtcagacttcacagcataacatctgccttagtgttcatgaggtctctgggcaggagaactgggtatctggatagatggttgagcaggtggtaggcgggcatcaatcatagaacctgggcatcagtcagagtgggagcatatttgtagaagcctagattgtgggcgggaatgtgggacggagggctcaaggactttggaggcatatgcctgcctaagccttaggcgggtacatgttatggagcaattttttaccaggaaagtcctggaaaatcttttctgttatccccaccccacctgagagctcttgggctgctgagggcctgtggcaactgcagtgggccaggcatggtagaaaagatgtagatcttgttatgtaggatttgcgttgtaggtggactgaagcagcaggtcaagagttgaattctcactaaggggtcactgacattttgtggtcctgtgtttaccttaatgcctaaggtgagtgtattgttcaagggtccagggacagtcactgcagtatgtgtggggaattttcccacagtaaggtaaatggatccttgggtactatgaatccaacttggggttggatttaccaaaatgtgttgtatgttgttagacatcttgttgtgtattagtcttctaaggatattgtgcatggcactgtgtagtttatagccctacactggaaggatggtgaagggagttgctagattgatagcctaaagaaaaccttctgactgtgggattagcatcaatgataaggaatgtgagcatttgctggggttgttgtcaaatagtatcagagaacagttaggactgagaggtgatttcttcttgacagaatttgatagaggccaaaaagccattacgaggatacctctgcttccagtgacagcagagtggattcacattgattgggcattgtcacggaaggctgactagctggaggacatcaggctgtgctatgcttccctagggaggacatgtgcccttccctccagattagaaaggctagaatcaagagtttcaagtgctcattttcttcaaggtccaaggttgggaactatttccctacagagaaatctgtttgagtttctggtgctccaggaaatgggttggcaggacacagaaatgagaaaccctgaggccaggaagaggccaatcctaggagatgttttccctccagattcattttaaggaatatctgtgcttcctgatgtgtgtgcttgagatttgggctctatatccagcatttgaactcacattctcagtggcagagtcatggtctgtggcaccatttcaaggccaaaaatcccatccaatttcccttcacatagatgacagaaaagcaagaaagtagctgccttaactcgaacagttctgggaaaaaaactgggggccttgtcctgaggctgtggagacttaattcttcagctgggtggttcccgtaggaacaaggaacactttagctacttcttactcttttaacaccaatggctgtgggagaaggaaaggctcaaggccagggctcagctcgcagagtccatcttctcccacagttgccacatttgagagggggcctgctgaatgcccttgctgtcccctatggcagtattgaggcctgaccgaagtctggtatgctgcttgctggctacaagaactggtcacaggatgaaaattggggaaaggatttgggggaggtgacaagggtggcatggaagtctaggggacaaagggacagggttgggaacaaattggttaactttgattgccactcactgtggtgctttccccctttcccttgaattctgctttgaaaagaataaatttgtacttgttt

SEQ ID NO: 128827 - DNA, 2051 bp, Homo sapiens
  Payload ID: 5195
  Gene Symbol: DYTN
  Gene Name: dystrotelin
  Uniprot ID: A2CJ06
  ENST ID: ENST00000452335
  CDS Start-End: 118-1854
ttgcctttttgttcccctgtcctcattcctctgctgcaaaaccttctgcttaaaatactggttcatttctagttacagggacccacttgccatctgtcattccaggaaatttgtgaaatggatccagataaacaagatgctcttaatagtattgagaattccatttatagaacagccttcaaattacaatcagtgcaaactctgtgccagttggacttgattgacagctccctgattcagcaggtcctactgcgtccaagtttctgggaagctcgcaagcactccctttctgtgcagcaactttctcaggcactccaagagctgtttcagaaggccagggaggaaaacccaggacaagtgcatcccagagctccggaactcactctgagccttctcacgacaatgtacaacagcaaaggaacaggttttctccagcttatgcctgcggccgctgccctaataaccctctcaggagacagccctctttcaaaataccgagctctttttcaactctatgcagaaaatagcaggggaggctatgattctgggccacgcatgactcgaagggttttgagaaaactactaacagatctacagcagatcccaactttcgtgggagagagtcgtgctctgtgccctgtggaaagtgccacccgcagctgtttccaaggggtgttgagcccagcaatcaaagaagaaaaattcctgtcttgggtccaatctgagcctcccatcctcctgtggctcccgacctgccaccggttatcagctgctgaaagggtcactcaccctgctcggtgcactctctgcaggactttcccaatcacgggactcagataccgctgtctgaagtgtctcaactttgacatctgccagatgtgtttcttatctggtcttcacagcaagtcccatcagaagtctcatcctgtcattgagcactgcattcagatgtcagcaatgcagaatacaaaacttctcttcaggaccctcagaaacaaccttcttcaggggcgctgtaggaagaaagaagcagcgagaaggcagcagctgctggaccaggtgaatccaaagggtgtgcctcaccatgcgcaggccaggctccttaaaaaacagttaaaccaatacaaagacaagttgcaagctatatacacctcccaggaagaaagaatttgtcgatttgaaacaaggattcacaaactcaaaaccaaccaggatagtctatggaccaagctacaacagataagacgggacctacaggcaaggttgcagccacccggtccttcatcttcttcctttcaaaatgtggggaacaaggttgaccattcttcaactgaaaaggttccaaagggaggggattatttgcagatcaagaatgccactgaagatgcttcaacaggggaacctcttcctaagcttgatgaggttgacagaagtcacagaagtcacacaaatgcagagcatgctctgcgaaatccagaatcaccagagaccactttgcacagcaccagggcacaaagccaaacacaaaagatgccacagaaagtcattagtgccctacccagttatcaggagggactgaagcaggacatccccaaaatggttcctgctgaaatgagcagtcctgctctggcagccgtggaaaagaaagaggcaggtaacatcaaggagagaaaggatgagctggaggaagaggaactgcaagaactattgtcaaaacttatggatgccttcaatctagaaacgccatcaggcccggagtcttcagtaaacatggacctgtacagtggagctcagcgagtgtgcagggccttctctgcccttgttgatcaaattgccttgcccaatttgaagtgaaatggagtccaggctcaaaggcctcttggtgtgatgacaaaatgcagttgcacaactgtattaaaagaattaagacttctacctttcttttaatagtttagtgtgaactatgaagaaaacaggttttgttttttgatctccctccctacttatgtatcttagttctgcagttcagagtgaaggttgggggttagcag

SEQ ID NO: 128828 - DNA, 9587 bp, Homo sapiens
  Payload ID: 5196
  Gene Symbol: EP300
  Gene Name: E1A binding protein p300
  Uniprot ID: Q09472
  ENST ID: ENST00000263253
  CDS Start-End: 1220-8464
cttgtttgtgtgctaggctgggggggagagagggcgagagagagcgggcgagagtgggcaagcaggacgccgggctgagtgctaactgcgggagccagagagtgcggaggggagtcgggtcggagagaggcggcaggggccgagacagtggcagggggcccggggcgcacgggctgaggcgacccccagccccctcccgtccgcacacacccccaccgcggtccagcagccgggccggcgtcgacgcctaggggggaccattacataaccccgcgccccgcggcgtcttctcccgccgccgcgggcggccccgaacggagccccggggggcgggcgctcccagcacctggccgccggcggtgggggccgtagcagcggccgtatttatttattttccgcgggaaaggaaggcgaaggaggggagcgcggcgcgaggaggggccgcctgcgccgccgccggagcggggcctcctcggtgggctccgcgtcggcgcgggcgtgcgggcggcgctgctcggcccggccccctcggccctctggtccggccagctccgctcccggcgtccttgccgcgcctccgccggccgccgcgcgatgtgaggcggcggcgccagcctggctctcggctcgggcgagttctctgcggccattaggggccggtgcggcggcggcggcgcggagcgcggcggcaggaggagggttcggagggtgggggcgcaggcccgggagggggcaccgggaggaggtgagtgtctcttgtcgcctcctcctctccccccttttcgcccccgcctccttgtggcgatgagaaggaggaggacagcgccgaggaggaagaggttgatggcggcggcggagctccgagagacctcggctgggcaggggccggccgtggcgggccggggactgcgcctctagagccgcgagttctcgggaattcgccgcagcggacgcgctcggcgaatttgtgctcttgtgccctcctccgggcttgggcccaggcccggcccctcgcacttgcccttaccttttctatcgagtccgcatccctctccagccactgcgacccggcgaagagaaaaaggaacttcccccaccccctcgggtgccgtcggagccccccagcccacccctgggtgcggcgcggggaccccgggccgaagaagagatttcctgaggattctggttttcctcgcttgtatctccgaaagaattaaaaatggccgagaatgtggtggaaccggggccgccttcagccaagcggcctaaactctcatctccggccctctcggcgtccgccagcgatggcacagattttggctctctatttgacttggagcacgacttaccagatgaattaatcaactctacagaattgggactaaccaatggtggtgatattaatcagcttcagacaagtcttggcatggtacaagatgcagcttctaaacataaacagctgtcagaattgctgcgatctggtagttcccctaacctcaatatgggagttggtggcccaggtcaagtcatggccagccaggcccaacagagcagtcctggattaggtttgataaatagcatggtcaaaagcccaatgacacaggcaggcttgacttctcccaacatggggatgggcactagtggaccaaatcagggtcctacgcagtcaacaggtatgatgaacagtccagtaaatcagcctgccatgggaatgaacacagggatgaatgcgggcatgaatcctggaatgttggctgcaggcaatggacaagggataatgcctaatcaagtcatgaacggttcaattggagcaggccgagggcgacagaatatgcagtacccaaacccaggcatgggaagtgctggcaacttactgactgagcctcttcagcagggctctccccagatgggaggacaaacaggattgagaggcccccagcctcttaagatgggaatgatgaacaaccccaatccttatggttcaccatatactcagaatcctggacagcagattggagccagtggccttggtctccagattcagacaaaaactgtactatcaaataacttatctccatttgctatggacaaaaaggcagttcctggtggaggaatgcccaacatgggtcaacagccagccccgcaggtccagcagccaggcctggtgactccagttgcccaagggatgggttctggagcacatacagctgatccagagaagcgcaagctcatccagcagcagcttgttctccttttgcatgctcacaagtgccagcgccgggaacaggccaatggggaagtgaggcagtgcaaccttccccactgtcgcacaatgaagaatgtcctaaaccacatgacacactgccagtcaggcaagtcttgccaagtggcacactgtgcatcttctcgacaaatcatttcacactggaagaattgtacaagacatgattgtcctgtgtgtctccccctcaaaaatgctggtgataagagaaatcaacagccaattttgactggagcacccgttggacttggaaatcctagctctctaggggtgggtcaacagtctgcccccaacctaagcactgttagtcagattgatcccagctccatagaaagagcctatgcagctcttggactaccctatcaagtaaatcagatgccgacacaaccccaggtgcaagcaaagaaccagcagaatcagcagcctgggcagtctccccaaggcatgcggcccatgagcaacatgagtgctagtcctatgggagtaaatggaggtgtaggagttcaaacgccgagtcttctttctgactcaatgttgcattcagccataaattctcaaaacccaatgatgagtgaaaatgccagtgtgccctccctgggtcctatgccaacagcagctcaaccatccactactggaattcggaaacagtggcacgaagatattactcaggatcttcgaaatcatcttgttcacaaactcgtccaagccatatttcctacgccggatcctgctgctttaaaagacagacggatggaaaacctagttgcatatgctcggaaagttgaaggggacatgtatgaatctgcaaacaatcgagcggaatactaccaccttctagctgagaaaatctataagatccagaaagaactagaagaaaaacgaaggaccagactacagaagcagaacatgctaccaaatgctgcaggcatggttccagtttccatgaatccagggcctaacatgggacagccgcaaccaggaatgacttctaatggccctctacctgacccaagtatgatccgtggcagtgtgccaaaccagatgatgcctcgaataactccacaatctggtttgaatcaatttggccagatgagcatggcccagccccctattgtaccccggcaaacccctcctcttcagcaccatggacagttggctcaacctggagctctcaacccgcctatgggctatgggcctcgtatgcaacagccttccaaccagggccagttccttcctcagactcagttcccatcacagggaatgaatgtaacaaatatccctttggctccgtccagcggtcaagctccagtgtctcaagcacaaatgtctagttcttcctgcccggtgaactctcctataatgcctccagggtctcaggggagccacattcactgtccccagcttcctcaaccagctcttcatcagaattcaccctcgcctgtacctagtcgtacccccacccctcaccatactcccccaagcataggggctcagcagccaccagcaacaacaattccagcccctgttcctacacctcctgccatgccacctgggccacagtcccaggctctacatccccctccaaggcagacacctacaccaccaacaacacaacttccccaacaagtgcagccttcacttcctgctgcaccttctgctgaccagccccagcagcagcctcgctcacagcagagcacagcagcgtctgttcctaccccaacagcaccgctgcttcctccgcagcctgcaactccactttcccagccagctgtaagcattgaaggacaggtatcaaatcctccatctactagtagcacagaagtgaattctcaggccattgctgagaagcagccttcccaggaagtgaagatggaggccaaaatggaagtggatcaaccagaaccagcagatactcagccggaggatatttcagagtctaaagtggaagactgtaaaatggaatctaccgaaacagaagagagaagcactgagttaaaaactgaaataaaagaggaggaagaccagccaagtacttcagctacccagtcatctccggctccaggacagtcaaagaaaaagattttcaaaccagaagaactacgacaggcactgatgccaactttggaggcactttaccgtcaggatccagaatcccttccctttcgtcaacctgtggaccctcagcttttaggaatccctgattactttgatattgtgaagagccccatggatctttctaccattaagaggaagttagacactggacagtatcaggagccctggcagtatgtcgatgatatttggcttatgttcaataatgcctggttatataaccggaaaacatcacgggtatacaaatactgctccaagctctctgaggtctttgaacaagaaattgacccagtgatgcaaagccttggatactgttgtggcagaaagttggagttctctccacagacactgtgttgctacggcaaacagttgtgcacaatacctcgtgatgccacttattacagttaccagaacaggtatcatttctgtgagaagtgtttcaatgagatccaaggggagagcgtttctttgggggatgacccttcccagcctcaaactacaataaataaagaacaattttccaagagaaaaaatgacacactggatcctgaactgtttgttgaatgtacagagtgcggaagaaagatgcatcagatctgtgtccttcaccatgagatcatctggcctgctggattcgtctgtgatggctgtttaaagaaaagtgcacgaactaggaaagaaaataagttttctgctaaaaggttgccatctaccagacttggcacctttctagagaatcgtgtgaatgactttctgaggcgacagaatcaccctgagtcaggagaggtcactgttagagtagttcatgcttctgacaaaaccgtggaagtaaaaccaggcatgaaagcaaggtttgtggacagtggagagatggcagaatcctttccataccgaaccaaagccctctttgcctttgaagaaattgatggtgttgacctgtgcttctttggcatgcatgttcaagagtatggctctgactgccctccacccaaccagaggagagtatacatatcttacctcgatagtgttcatttcttccgtcctaaatgcttgaggactgcagtctatcatgaaatcctaattggatatttagaatatgtcaagaaattaggttacacaacagggcatatttgggcatgtccaccaagtgagggagatgattatatcttccattgccatcctcctgaccagaagatacccaagcccaagcgactgcaggaatggtacaaaaaaatgcttgacaaggctgtatcagagcgtattgtccatgactacaaggatatttttaaacaagctactgaagatagattaacaagtgcaaaggaattgccttatttcgagggtgatttctggcccaatgttctggaagaaagcattaaggaactggaacaggaggaagaagagagaaaacgagaggaaaacaccagcaatgaaagcacagatgtgaccaagggagacagcaaaaatgctaaaaagaagaataataagaaaaccagcaaaaataagagcagcctgagtaggggcaacaagaagaaacccgggatgcccaatgtatctaacgacctctcacagaaactatatgccaccatggagaagcataaagaggtcttctttgtgatccgcctcattgctggccctgctgccaactccctgcctcccattgttgatcctgatcctctcatcccctgcgatctgatggatggtcgggatgcgtttctcacgctggcaagggacaagcacctggagttctcttcactccgaagagcccagtggtccaccatgtgcatgctggtggagctgcacacgcagagccaggaccgctttgtctacacctgcaatgaatgcaagcaccatgtggagacacgctggcactgtactgtctgtgaggattatgacttgtgtatcacctgctataacactaaaaaccatgaccacaaaatggagaaactaggccttggcttagatgatgagagcaacaaccagcaggctgcagccacccagagcccaggcgattctcgccgcctgagtatccagcgctgcatccagtctctggtccatgcttgccagtgtcggaatgccaattgctcactgccatcctgccagaagatgaagcgggttgtgcagcataccaagggttgcaaacggaaaaccaatggcgggtgccccatctgcaagcagctcattgccctctgctgctaccatgccaagcactgccaggagaacaaatgcccggtgccgttctgcctaaacatcaagcagaagctccggcagcaacagctgcagcaccgactacagcaggcccaaatgcttcgcaggaggatggccagcatgcagcggactggtgtggttgggcagcaacagggcctcccttcccccactcctgccactccaacgacaccaactggccaacagccaaccaccccgcagacgccccagcccacttctcagcctcagcctacccctcccaatagcatgccaccctacttgcccaggactcaagctgctggccctgtgtcccagggtaaggcagcaggccaggtgacccctccaacccctcctcagactgctcagccaccccttccagggcccccacctgcagcagtggaaatggcaatgcagattcagagagcagcggagacgcagcgccagatggcccacgtgcaaatttttcaaaggccaatccaacaccagatgcccccgatgactcccatggcccccatgggtatgaacccacctcccatgaccagaggtcccagtgggcatttggagccagggatgggaccgacagggatgcagcaacagccaccctggagccaaggaggattgcctcagccccagcaactacagtctgggatgccaaggccagccatgatgtcagtggcccagcatggtcaacctttgaacatggctccacaaccaggattgggccaggtaggtatcagcccactcaaaccaggcactgtgtctcaacaagccttacaaaaccttttgcggactctcaggtctcccagctctcccctgcagcagcaacaggtgcttagtatccttcacgccaacccccagctgttggctgcattcatcaagcagcgggctgccaagtatgccaactctaatccacaacccatccctgggcagcctggcatgccccaggggcagccagggctacagccacctaccatgccaggtcagcagggggtccactccaatccagccatgcagaacatgaatccaatgcaggcgggcgttcagagggctggcctgccccagcagcaaccacagcagcaactccagccacccatgggagggatgagcccccaggctcagcagatgaacatgaaccacaacaccatgccttcacaattccgagacatcttgagacgacagcaaatgatgcaacagcagcagcaacagggagcagggccaggaataggccctggaatggccaaccataaccagttccagcaaccccaaggagttggctacccaccacagcagcagcagcggatgcagcatcacatgcaacagatgcaacaaggaaatatgggacagataggccagcttccccaggccttgggagcagaggcaggtgccagtctacaggcctatcagcagcgactccttcagcaacagatggggtcccctgttcagcccaaccccatgagcccccagcagcatatgctcccaaatcaggcccagtccccacacctacaaggccagcagatccctaattctctctccaatcaagtgcgctctccccagcctgtcccttctccacggccacagtcccagcccccccactccagtccttccccaaggatgcagcctcagccttctccacaccacgtttccccacagacaagttccccacatcctggactggtagctgcccaggccaaccccatggaacaagggcattttgccagcccggaccagaattcaatgctttctcagcttgctagcaatccaggcatggcaaacctccatggtgcaagcgccacggacctgggactcagcaccgataactcagacttgaattcaaacctctcacagagtacactagacatacactagagacaccttgtagtattttgggagcaaaaaaattattttctcttaacaagactttttgtactgaaaacaatttttttgaatctttcgtagcctaaaagacaattttccttggaacacataagaactgtgcagtagccgtttgtggtttaaagcaaacatgcaagatgaacctgagggatgatagaatacaaagaatatatttttgttatggctggttaccaccagcctttcttcccctttgtgtgtgtggttcaagtgtgcactgggaggaggctgaggcctgtgaagccaaacaatatgctcctgccttgcacctccaataggttttattattttttttaaattaatgaacatatgtaatattaatagttattatttactggtgcagatggttgacatttttccctattttcctcactttatggaagagttaaaacatttctaaaccagaggacaaaaggggttaatgttactttaaaattacattctatatatatataaatatatataaatatatattaaaataccagttttttttctctgggtgcaaagatgttcattcttttaaaaaatgtttaaaaaaaaaaaaaaactgcctttcttcccctcaagtcaacttttgtgctccagaaaattttctattctgtaagtctgagcgtaaaacttcaagtattaaaataatttgtacatgtagagagaaaaatgactttttcaaaaatatacaggggcagctgccaaattgatgtattatatattgtggtttctgtttcttgaaagaatttttttcgttatttttacatctaacaaagtaaaaaaattaaaaagagggtaagaaacgattccggtgggatgattttaacatgcaaaatgtccctgggggtttcttctttgcttgctttcttcctccttaccctaccccccactcacacacacacacacacacacacacacacacacacacacacactttctataaaacttgaaaatagcaaaaaccctcaactgttgtaaatcatgcaattaaagttgattacttataaatatgaactttggatcactgtatagactgttaaatttgatttcttattacctattgttaaataaactgtgtgagacagacacc

SEQ ID NO: 128829 - DNA, 401 bp, Homo sapiens
  Payload ID: 5196
  Gene Symbol: EP300
  Gene Name: E1A binding protein p300
  ENST ID: ENST00000634728
  CDS Start-End: 1-401
gcggaatactaccaccttctagctgagaaaatctataagatccagaaagaactagaagaaaaacgaaggaccagactacagaagcagaacatgctaccaaatgctgcaggcatggttccagtttccatgaatccagggcctaacatgggacagccgcaaccaggaatgacttctagtttgaatcaatttggccagatgagcatggcccagccccctattgtaccccggcaaacccctcctcttcagcaccatggacagttggctcaacctggagctctcaacccgcctatgggctatgggcctcgtatgcaacagccttccaaccagggccagttccttcctcagactcagttcccatcacagggaatgaatgtaacaaatatccctttggctccgtccag

SEQ ID NO: 128830 - DNA, 559 bp, Homo sapiens
  Payload ID: 5196
  Gene Symbol: EP300
  Gene Name: E1A binding protein p300
  ENST ID: ENST00000634690
  CDS Start-End: 1-559
agtaaatcagatgccgacacaaccccaggtgcaagcaaagaaccagcagaatcagcagcctgggcagtctccccaaggcatgcggcccatgagcaacatgagtgctagtcctatgggagtaaatggaggtgtaggagttcaaacgccgagtcttctttctgactcaatgttgcattcagccataaattctcaaaacgtccaagccatatttcctacgccggatcctgctgctttaaaagacagacggatggaaaacctagttgcatatgctcggaaagttgaaggggacatgtatgaatctgcaaacaatcgagcggaatactaccaccttctagctgagaaaatctataagatccagaaagaactagaagaaaaacgaaggaccagactacagaagcagaacatgctaccaaatgctgcaggcatggttccagtttccatgaatccagggcctaacatgggacagccgcaaccaggaatgacttctaatggccctctacctgacccaagtatgatccgtggcagtgtgccaaaccagatgatgcctcgaataactcca

SEQ ID NO: 128831 - DNA, 3908 bp, Homo sapiens
  Payload ID: 5197
  Gene Symbol: EP400
  Gene Name: E1A binding protein p400
  ENST ID: ENST00000330386
  CDS Start-End: 1-1124
agcagcagcagcaacagacgacgacgacctctcaggtgcaagttccacagatccagggccaggcccagtccccagcacagatcaaagctgtgggcaagctgacgccggaacacctcatcaaaatgcagaagcagaaactgcagatgcccccgcagcccccaccgccacaggcccagtctgcgcccccgcagccaacagcccaagtgcaagtgcagacctcgcagccgccgcagcagcagagcccccagctcacgacggtcacggccccaaggcctggtgccctgctgacgggcaccaccgtggccaacctccaggtggcccggctcctgcaggcgcaagggcagatgcagacccaggcaccccagccagcccaggtggccttggcgaagcctccggtggtgtccgtcccggcagctgtggtctcctcaccgggagtcaccaccctgcccatgaacgtcgcggggatcagcgtggcgatcggtcagccacagaaggcagcaggacagaccgtggtggcccagcccgtgcacatgcagcagctgctgaagctgaagcagcaggccgtccagcagcagaaggccatccagccccaggctgcacagggcccggcagccgtccagcagaagatcaccgcacagcagatcaccacccctggcgcgcagcagaaggttgcctacgccgcgcagccggcccttaagacccagtttcttaccacacccatctcccaggcccagaaactggccggggcccagcaagtgcagacccagatccaggttgcaaaacttcctcaagttgttcaacagcaaacacccgtggccagcatccagcaagttgcctctgcttcccagcaggcttctccacagactgtggcgctcacgcaggcgacggcggccgggcagcaggtgcagatgatccctgcagtgaccgcgactgcccaggtggttcagcagaaactcattcagcagcaggtggtgaccacggcgtcggccccgctccagactccaggcgctcccaacccagcccaggtgcccgccagctccgacagcccaagccagcagcccaagttacagatgagggtccctgctgtcaggctaaagacacctactaagcctccgtgccagtagtcagggcagcagggctgcctctcatctaaagcaaaactaccttcctcacagaaaacgctttattagtgaaccttgggaccatgtcacgcaagagattcagcactgggaaagatataattgaaacaaaatagtgtaatcattttattaaaatgcatcccacactgcaggacaaatggtccttatggagtgccgcgttctctgtactacgtggctcatggaaaaagtgacaacatggcttcctctaaatcatttcacctttcagtccccacccgcacccgtcccctagagccatagtactgtgttctgaaagccatttagaatttctttgtgagcatgtagtgctttgcacgccacagaagccgtctgccgtgtgtgaggagcatacaatggactttctaaagataaggcgtgggcttccacagtgtctgccagagtttagttctttataccttactgaaaaatgcctcgtggtcttcgcagaggggaaggcctgtctaaagtcaatcatccgagatgggttttccattccaaagaaaggcaatatggttccttccttccctcctaaaatatgacttaacttttaagagaaatgttctgacacccacctaaacacacaaggcacgttcctggcctgtgttcaagggaaatgatcagtcattgcattgttattccaaagagcagccaacagtggcctcccccaggccctaccctgcaatgggattcgctttcatttaatggaaacttctgggactgatgcccaactcagtgcactcaagacgcatctccagttttcgggggaagctggtatttgacatagtgtgttaaacagctcctgagaacctttgggacactctgccatggctggcgtgaggcccagaggaccacgcagaggcaatggtagtacagatgtcacagctgagggtacgatgaggcctgggctcagtgagccaggacgaatgtgacagacaccccttgctgccacagtcagccctttgacgaaggtgggctggtgattctggaagtattggctatagcggtgggcccagtcaactcttccttgtggacttacgacagcagattttctctaggataagcttgtgtggttctgccagtgaagcagagaaccacctgtgctgttgtggaaggcgtgccgttgagggggaaaacgaagcccagtatttgctactgtttttcctttttttactatgacaggaaaataaatgcaattttagtggaattgattgacagtgtctccttactttgaagttttcaccaaagcaaaaaggtccatatccaatagtatcctttgtgctgtggcttgattttggcctattttacattatttggtccaggaaattaggttatattaggttttttgtatactaaaaatcagttatggcacaataaagattttctgtttttaaattgtatttcatctgcttcctccccattctctcactttaagtgacattgaggaaggtattctgtcccacaggtttctgtggacagcgatacagcaggagtcagtgaaatcaactggggagctcacttgagctcttgataagaaatgtggagaaaagtaaaaaccaagctttgaagaaacagaagaaattaatcttttagttagttgaacataccaaagcagaggactggaatctgtttgttctaaccaacccgttctccctggcttggcacgtgccgtgagagcgcagcttgccggagggagggccgctgtgtgcgcctcacatctggctcccagtggaaacttttactcctcctcatccgcagatgtgatagaactgaagtatctaggaattctgcctttgtcatttgttttaatttgtgtgccctgttcattttttttgtctttcccaaatcttggtagtctccttatagttgaagataaaatgttgagtgcacttattttagaatatcctagacataactgtctaagtaaaagcgctctattaatctaaaacactacaagagaatttaacaccatctctcaaatgcttttttggagagcttaatgggattctgaatatttgcaatgtggagtttccgccccgatctcacgtcagtgagggtctcctgtctctcaagtgtgtttcctttggctgttccctaatacaaaacacggacatatttttactcgtagcactcaatttagtaacttctagatgctaccgttgacctgagttaaattcatttagtcgtgtacgtaaaaactctccttttagtgtgttattttcttggccttcccttttaaaggttaaagtttctaacctaagaattaagtacgcgttcaggaagctgttgtctaggccttccccttgtgaatctgggttcattccaatacggcaagtaagagttggaaactttgagaacacagactataaaggcagcagcccgaacactgtcagactctaattggcgaccctgggaaacagttgccctgctattctttaaagaaagacgtttattctgatgataaaaacagttagccagactgtttttaaagcacctggcgggaagcagaaggttggatccaagcccttgttcagatttggtgcctgataagacaggggtttctctttttgtgacctttattattattattttgttaactgttgtaaccagttagctgttgtgttttaagatagaaaggaacaagactaaaattgtaaatactttgtaaacatcagcatttgtacttgaatagtaggattttaaagggcattgatagcataccaaacaaaaggcaaaataaagtgacctttttat

SEQ ID NO: 128832 - DNA, 2588 bp, Homo sapiens
  Payload ID: 5197
  Gene Symbol: EP400
  Gene Name: E1A binding protein p400
  ENST ID: ENST00000332482
  CDS Start-End: 110-2588
cactgagcggctgcggcgcggcttccatcctcccgccctcctgacgcggccggagcgcagccctgaggcccagggagaacgacacattggatacagaagggaggtgatcatgcaccatggcactggcccccagaacgtccagcatcagctgcagaggtccagggcctgccctggcagcgagggtgaggagcagccggcccaccccaacccacccccgtcccccgcagctcccttcgctccctcagcaagcccgtcggcaccccagtctcccagttatcaaatacagcagctgatgaataggagccctgcaaccgggcagaacgtgaacatcaccctgcagagcgtgggccctgtcgtcgggggaaaccagcagatcacactggccccactgccgctccccagccccacctctccaggcttccagttcagcgctcagcctcggcggtttgagcatgggtctccatcatacattcaggtcacgtcccccttgtcccagcaggtccagacccagagtcccacgcagcccagtccggggccggggcaggccttgcagaatgtgcgtgcaggtgcccctggccctgggctgggcctctgcagcagcagccctacagggggcttcgtggatgccagcgtgctggtgaggcagatcagcttgagcccctccagtggtggacactttgtgtttcaggatgggtcagggctcacccagatcgcccagggagcccaggttcagctccagcacccgggtacgcccatcacagtccgagagcggagaccctcccagccccacacacagtcagggggcaccatccaccacctgggaccccagagccctgcagccgcgggtggggccggcctgcagcccctggccagcccaagccacatcaccacggctaacttgccaccgcagatcagcagcatcatccagggccagctggttcagcagcagcaggtgctgcaggggccgccgctgccccggcccctgggcttcgagaggacacccggcgtgctgctccccggggctgggggcgcagcggggtttgggatgacgtccccacccccgcccaccagcccttccaggactgccgtgcccccaggcctttccagcctcccactcacgtctgtggggaacacgggaatgaagaaggttcccaagaagttagaggagattcccccagcctctccggagatggcacagatgaggaagcagtgcctggactatcattaccaggagatgcaggctctgaaggaggtcttcaaggagtatttgattgaactgtttttcttgcaacactttcaagggaacatgatggatttcttagctttcaagaagaaacattatgccccattacaagcatatcttaggcagaatgatttggacattgaagaagaggaggaggaggaggaagaggaggaagaaaaatctgaggttatcaatgacgagcaagccctcgcagggagcctggtagcaggggccggaagcacagtagagacggacctgtttaagaggcagcaggcgatgccctccacaggtatggcaggaggaatgccccccacgccgcaggccgcgcagctcgctggacagaggcagagtcagcagcagtatgacccctccacggggcctcccgtgcagaacgctgccagcttgcacaccccactgccgcagctgcccgggaggctgcccccagccggtgttcccactgcagccctctcctctgcgctgcagtttgcacagcagccgcaagtggtagaggcccagacacagctccaaatcccggtgaagactcagcagcccaatgttcccatccctgcaccgcccagcagccaactccccatccctccctcgcagcctgcacagctggccctccacgttcccacacctggaaaggtgcaggtgcaggcctctcagctttcctccctgccacagatggtagcatcgacaaggctccctgtggaccctgccccgccctgcccacggcctctgcccacctcttctacctcgtccctcgcgcctgtgagtggctccggcccaggaccctcccctgctcgatcctctccagtaaatagaccttcctcagccaccaataaggcactatctccagtcacttcccggaccccaggggtggtggcatctgcccccaccaaaccacagagtcctgctcagaatgccacctcgtcccaagacagttctcaggatacgctgacagaacaaataactctggagaaccaggtgcatcagcgcattgcggagctgaggaaagcaggtctgtggtcccagaggcgtctgccaaagctgcaggaggccccacgccccaagtcccactgggactatctgctggaggagatgcagtggatggccacagactttgcccaggagaggaggtggaaggtggctgctgcgaagaagctcgttagaactgtggtgcgccatcacgaggagaagcagctccgtgaagaaagggggaagaaggaagagcagagcagactgaggcggatagccgcctccacggcccgggagatagagtgcttttggtcgaatattgaacaggttgtggaaataaaactacgagtagaattagaagaaaaaa

SEQ ID NO: 128833 - DNA, 3092 bp, Homo sapiens
  Payload ID: 5197
  Gene Symbol: EP400
  Gene Name: E1A binding protein p400
  ENST ID: ENST00000333577
  CDS Start-End: 102-3059
ggctgcggcgcggcttccatcctcccgccctcctgacgcggccggagcgcagccctgaggcccagggagaacgacacattggatacagaagggaggtgatcatgcaccatggcactggcccccagaacgtccagcatcagctgcagaggtccagggcctgccctggcagcgagggtgaggagcagccggcccaccccaacccacccccgtcccccgcagctcccttcgctccctcagcaagcccgtcggcaccccagtctcccagttatcaaatacagcagctgatgaataggagccctgcaaccgggcagaacgtgaacatcaccctgcagagcgtgggccctgtcgtcgggggaaaccagcagatcacactggccccactgccgctccccagccccacctctccaggcttccagttcagcgctcagcctcggcggtttgagcatgggtctccatcatacattcaggtcacgtcccccttgtcccagcaggtccagacccagagtcccacgcagcccagtccggggccggggcaggccttgcagaatgtgcgtgcaggtgcccctggccctgggctgggcctctgcagcagcagccctacagggggcttcgtggatgccagcgtgctggtgaggcagatcagcttgagcccctccagtggtggacactttgtgtttcaggatgggtcagggctcacccagatcgcccagggagcccaggttcagctccagcacccgggtacgcccatcacagtccgagagcggagaccctcccagccccacacacagtcagggggcaccatccaccacctgggaccccagagccctgcagccgcgggtggggccggcctgcagcccctggccagcccaagccacatcaccacggctaacttgccaccgcagatcagcagcatcatccagggccagctggttcagcagcagcaggtgctgcaggggccgccgctgccccggcccctgggcttcgagaggacacccggcgtgctgctccccggggctgggggcgcagcggggtttgggatgacgtccccacccccgcccaccagcccttccaggactgccgtgcccccaggcctttccagcctcccactcacgtctgtggggaacacgggaatgaagaaggttcccaagaagttagaggagattcccccagcctctccggagatggcacagatgaggaagcagtgcctggactatcattaccaggagatgcaggctctgaaggaggtcttcaaggagtatttgattgaactgtttttcttgcaacactttcaagggaacatgatggatttcttagctttcaagaagaaacattatgccccattacaagcatatcttaggcagaatgatttggacattgaagaagaggaggaggaggaggaagaggaggaagaaaaatctgaggttatcaatgacgaggtaaaggttgtgacaggaaaggatgggcagactgggactcccgttgctatagcaacccagcttccgccaaaggtttctgctgctttttcatcccagcagcaaccatttcagcaagccctcgcagggagcctggtagcaggggccggaagcacagtagagacggacctgtttaagaggcagcaggcgatgccctccacaggtatggcagagcagtctaagaggcctcgccttgaagtgggtcaccaaggggtagttttccagcacccaggggcggacgcaggcgttcctctccagcaactaatgccgaccgcacaaggaggaatgccccccacgccgcaggccgcgcagctcgctggacagaggcagagtcagcagcagtatgacccctccacggggcctcccgtgcagaacgctgccagcttgcacaccccactgccgcagctgcccgggaggctgcccccagccggtgttcccactgcagccctctcctctgcgctgcagtttgcacagcagccgcaagtggtagaggcccagacacagctccaaatcccggtgaagactcagcagcccaatgttcccatccctgcaccgcccagcagccaactccccatccctccctcgcagcctgcacagctggccctccacgttcccacacctggaaaggtgcaggtgcaggcctctcagctttcctccctgccacagatggtagcatcgacaaggctccctgtggaccctgccccgccctgcccacggcctctgcccacctcttctacctcgtccctcgcgcctgtgagtggctccggcccaggaccctcccctgctcgatcctctccagtaaatagaccttcctcagccaccaataaggcactatctccagtcacttcccggaccccaggggtggtggcatctgcccccaccaaaccacagagtcctgctcagaatgccacctcgtcccaagacagttctcaggatacgctgacagaacaaataactctggagaaccaggtgcatcagcgcattgcggagctgaggaaagcaggtctgtggtcccagaggcgtctgccaaagctgcaggaggccccacgccccaagtcccactgggactatctgctggaggagatgcagtggatggccacagactttgcccaggagaggaggtggaaggtggctgctgcgaagaagctcgttagaactgtggtgcgccatcacgaggagaagcagctccgtgaagaaagggggaagaaggaagagcagagcagactgaggcggatagccgcctccacggcccgggagatagagtgcttttggtcgaatattgaacaggttgtggaaataaaactacgagtagaattagaagaaaaaaggaagaaggccttaaatttacagaaagtttccaggagagggaaagaattgagacctaaaggatttgacgcattacaggaaagttctctggattcaggaatgtctggaagaaaaagaaaagctagcatatctttgactgatgacgaagtggacgatgaagaggaaacaattgaagaggaggaagcaaatgaaggcgttgtggaccaccaaacagaactttctaatttagccaaggaaggtaggctgttgctaccttattaaacattcagtaagtaaaaagaaacatttaaaaca

SEQ ID NO: 128834 - DNA, 12317 bp, Homo sapiens
  Payload ID: 5197
  Gene Symbol: EP400
  Gene Name: E1A binding protein p400
  Uniprot ID: Q96L91
  ENST ID: ENST00000389561
  CDS Start-End: 153-9524
gtagcagccgcgccgccgcttcctcccgccggggccccggatgcactgagcggctgcggcgcggcttccatcctcccgccctcctgacgcggccggagcgcagccctgaggcccagggagaacgacacattggatacagaagggaggtgatcatgcaccatggcactggcccccagaacgtccagcatcagctgcagaggtccagggcctgccctggcagcgagggtgaggagcagccggcccaccccaacccacccccgtcccccgcagctcccttcgctccctcagcaagcccgtcggcaccccagtctcccagttatcaaatacagcagctgatgaataggagccctgcaaccgggcagaacgtgaacatcaccctgcagagcgtgggccctgtcgtcgggggaaaccagcagatcacactggccccactgccgctccccagccccacctctccaggcttccagttcagcgctcagcctcggcggtttgagcatgggtctccatcatacattcaggtcacgtcccccttgtcccagcaggtccagacccagagtcccacgcagcccagtccggggccggggcaggccttgcagaatgtgcgtgcaggtgcccctggccctgggctgggcctctgcagcagcagccctacagggggcttcgtggatgccagcgtgctggtgaggcagatcagcttgagcccctccagtggtggacactttgtgtttcaggatgggtcagggctcacccagatcgcccagggagcccaggttcagctccagcacccgggtacgcccatcacagtccgagagcggagaccctcccagccccacacacagtcagggggcaccatccaccacctgggaccccagagccctgcagccgcgggtggggccggcctgcagcccctggccagcccaagccacatcaccacggctaacttgccaccgcagatcagcagcatcatccagggccagctggttcagcagcagcaggtgctgcaggggccgccgctgccccggcccctgggcttcgagaggacacccggcgtgctgctccccggggctgggggcgcagcggggtttgggatgacgtccccacccccgcccaccagcccttccaggactgccgtgcccccaggcctttccagcctcccactcacgtctgtggggaacacgggaatgaagaaggttcccaagaagttagaggagattcccccagcctctccggagatggcacagatgaggaagcagtgcctggactatcattaccaggagatgcaggctctgaaggaggtcttcaaggagtatttgattgaactgtttttcttgcaacactttcaagggaacatgatggatttcttagctttcaagaagaaacattatgccccattacaagcatatcttaggcagaatgatttggacattgaagaagaggaggaggaggaggaagaggaggaagaaaaatctgaggttatcaatgacgagcagcaagccctcgcagggagcctggtagcaggggccggaagcacagtagagacggacctgtttaagaggcagcaggcgatgccctccacaggtatggcagagcagtctaagaggcctcgccttgaagtgggtcaccaaggggtagttttccagcacccaggggcggacgcaggcgttcctctccagcaactaatgccgaccgcacaaggaggaatgccccccacgccgcaggccgcgcagctcgctggacagaggcagagtcagcagcagtatgacccctccacggggcctcccgtgcagaacgctgccagcttgcacaccccactgccgcagctgcccgggaggctgcccccagccggtgttcccactgcagccctctcctctgcgctgcagtttgcacagcagccgcaagtggtagaggcccagacacagctccaaatcccggtgaagactcagcagcccaatgttcccatccctgcaccgcccagcagccaactccccatccctccctcgcagcctgcacagctggccctccacgttcccacacctggaaaggtgcaggtgcaggcctctcagctttcctccctgccacagatggtagcatcgacaaggctccctgtggaccctgccccgccctgcccacggcctctgcccacctcttctacctcgtccctcgcgcctgtgagtggctccggcccaggaccctcccctgctcgatcctctccagtaaatagaccttcctcagccaccaataaggcactatctccagtcacttcccggaccccaggggtggtggcatctgcccccaccaaaccacagagtcctgctcagaatgccacctcgtcccaagacagttctcaggatacgctgacagaacaaataactctggagaaccaggtgcatcagcgcattgcggagctgaggaaagcaggtctgtggtcccagaggcgtctgccaaagctgcaggaggccccacgccccaagtcccactgggactatctgctggaggagatgcagtggatggccacagactttgcccaggagaggaggtggaaggtggctgctgcgaagaagctcgttagaactgtggtgcgccatcacgaggagaagcagctccgtgaagaaagggggaagaaggaagagcagagcagactgaggcggatagccgcctccacggcccgggagatagagtgcttttggtcgaatattgaacaggttgtggaaataaaactacgagtagaattagaagaaaaaaggaagaaggccttaaatttacagaaagtttccaggagagggaaagaattgagacctaaaggatttgacgcattacaggaaagttctctggattcaggaatgtctggaagaaaaagaaaagctagcatatctttgactgatgacgaagtggacgatgaagaggaaacaattgaagaggaggaagcaaatgaaggcgttgtggaccaccaaacagaactttctaatttagccaaggaagctgagctgcccctcctggacctgatgaagctgtacgaaggcgccttcctgccgagttctcagtggccccggccgaagcctgatggggaggacacaagcggagaggaagatgcagatgactgtccaggcgacagggagagtcgcaaggacttggttctcatcgactcgcttttcatcatggatcagttcaaagctgccgagaggatgaatatcgggaagccaaacgccaaggacattgcggacgtcactgcggtggctgaagccatcctgccgaagggcagtgctcgggtcacaacctcggtcaagtttaatgctccatctttgttgtatggggctctcagagattatcagaagattggcctggactggctggccaaactttacaggaagaatctcaatggcatattggcagatgaagctgggctgggtaaaacagtgcagatcattgctttttttgcccacctagcttgtaacgaaggtaattggggcccccatcttgttgttgtgagaagttgtaacatactcaagtgggagcttgaattgaaacgttggtgtcccggactcaaaatcctctcatatattggcagccacagagaactcaaagcaaagagacaggagtgggccgaacccaacagcttccacgtctgcatcacgtcctacactcagttcttccggggcctcaccgccttcacacgagtgcgctggaagtgcctggtcattgatgagatgcagcgcgtgaagggcatgaccgagaggcactgggaagcggttttcaccctgcagagccaacaacgtctgcttctgatcgactcgccgctgcacaataccttcctggagctctggaccatggtgcacttcctggtcccagggatctccaggccctacctgagctcccctctgagggcccccagtgaagagagccaggattactaccataaagtggtcataaggttacacagggtgacacagccatttattttgaggagaactaagagagatgtggaaaagcaactaacaaagaaatatgagcatgttttgaagtgtcgcctttctaaccgacaaaaagccttatacgaggacgttatcctgcaacctggcactcaggaggccttgaagagcgggcactttgtcaacgtcctgagcatccttgtgcggctgcagcgcatctgcaaccaccctgggctcgtcgagccccggcacccaggctcttcctacgtggcggggccactggagtatccgtccgcatctctaatcctgaaggcactggagagagatttctggaaggaagcagatctttctatgtttgatctcatcggcttagaaaataaaatcactcgtcacgaggcagagttgctgtctaagaaaaagataccgcggaaactcatggaggaaatctccacttcagcagccccagcagcccgaccagcagcagcaaagctgaaggccagcaggttgtttcagcctgtgcagtatggccagaagcccgagggtcgcaccgtggctttccccagcactcacccgccccggacggcagcccccaccacggcctctgctgctccacagggcccgcttcgaggacggccgcccatcgccacgttctctgccaatccggaggcaaaagcagcagcagccccgtttcagacctctcaggcttccgccagtgctccacgacaccagcccgcctcggcctccagcacagccgctagcccggcccatcctgcgaaactgcgggcccagaccacagcacaggcctccaccccaggccagcccccgccccagccccaggccccctcgcacgcggccgggcagagcgcgctgcctcagaggctggtgctcccctcgcaggcccaggcccgcttgcccagtggagaggtagtgaaaatagctcagctggcatccatcacaggaccacagagccgcgtggctcagccagagacgccggtgacactgcagttccagggcagcaagttcaccctgtcacacagccagctccggcagctcacagcgggccagccgctgcagctgcaaggcagcgtcctccagatcgtgtccgcccccgggcagccctaccttcgagcccctggccctgtggtgatgcagaccgtgtctcaggcgggcgctgtgcacggcgccctgggaagcaagcccccggccggcggtcccagccctgcacccttgaccccacaagttggcgttccgggccgcgtggcggtgaatgccttggctgtaggagaacccggaacggcctccaaaccagcttctcccattggagggccgacccaggaggaaaagaccagactcttgaaagagcgcctggatcagatttatttagtcaacgagcggcgctgttctcaagctccagtctatggcagagacttgctaaggatttgtgccctgcctagccatggaagggtacagtggcgtgggtccctggatggccgtcgtgggaaggaggccgggccagcgcacagttacacttcatcctcagaaagtccaagtgagctgatgttgacgctttgtcggtgtggagagtctctgcaggatgttattgacagggtggcctttgtgattcctccggtggtggcagcacccccgtccctacgggtgccgcggccgccacccctgtacagccacagaatgaggatcttgaggcagggcctgagagagcacgctgcgccgtacttccagcagctgcggcagaccacggctccacgcctgctgcagttccctgagctgaggctggtgcagttcgactcagggaagttggaagctttagctatcttgcttcagaaattgaaatctgaaggacgtcgggtgctgattttatcacagatgattcttatgttggacattttagagatgttcttgaacttccattacctcacctatgtaagaatcgatgaaaatgccagcagtgagcaacggcaggaactgatgaggagtttcaacagagacaggcggattttttgtgccattctctccactcacagccgtaccacaggtataaaccttgtagaggcggacaccgtcgtgttttatgacaatgacctgaatccagtgatggatgccaaagctcaggagtggtgcgataggatcgggagatgcaaagacatccacatatacaggcttgtgagtggcaattccattgaagagaaattgttgaaaaatggaactaaagatctgatccgagaagtggctgctcagggaaatgactactccatggctttcttaactcagcgaaccatccaggagctgtttgaagtttattctcccatggatgatgctggcttcccggtcaaagctgaggagtttgtggtgctttctcaggaaccttctgtcacggaaaccattgcacccaaaattgcaagacctttcatagaggccctcaagagtattgagtatctggaggaggatgcccagaagtccgcacaggagggggtgctgggaccacacactgatgctctgtcatcagactctgagaacatgccgtgtgatgaagaaccatcccaattagaggagctagctgacttcatggagcagcttacaccaattgaaaaatatgctttaaattacctggaattattccatacttctattgagcaagaaaaggagagaaacagtgaggacgcagtgatgactgcagtgagggcatgggagttctggaacctgaagaccctgcaggagagggaggcccggctgcggctggagcaggaggaggcggagctcctgacctacacgcgagaggatgcctacagcatggagtatgtctacgaagatgtcgatgggcagacagaagtcatgccgctctggaccccacccaccccgccgcaggacgacagcgacatctacctcgactcggtcatgtgtctcatgtatgaagccactcccatcccagaggctaagctgccccctgtgtacgtgaggaaggagcggaagcgacacaaaacagacccctcagctgcaggcaggaagaagaagcagcgtcacggggaggcggtcgtccctcctcggtccctgtttgaccgcgcaacaccaggacttctgaaaattcgcagagagggcaaggagcagaagaagaatattctgctgaagcagcaggtgccattcgccaagcccctgccaacttttgccaaacccacagctgagcctggtcaagacaaccccgagtggctcatcagtgaggactgggcgctgctgcaggctgtaaagcagttactggagctgcctttgaacctcacaatcgtgtcacctgctcacacacctaattgggatcttgtcagtgacgttgttaactcctgtagccgaatctaccgctcttccaaacagtgccggaatcgctacgagaatgtcatcattccacgagaggaggggaagagtaaaaacaaccgtcctctccgtacgagccagatctatgcccaggatgagaatgccacacacacccagctgtacacgagccactttgacttaatgaaaatgactgctggcaagaggagtcccccaatcaaacctctgcttggcatgaatccctttcagaagaaccccaagcacgcgtctgtgttggcagaaagtggaatcaactatgacaagccgctgcctcccatccaggtggcatctctccgtgcagagcgaatcgcaaaagagaaaaaggctctggctgatcagcagaaggcacagcagccggccgtggcccagccacccccgccccagccgcagcccccaccacccccgcagcagccaccgccaccgctgccacaaccacaggcagcgggcagccagccgccagcagggccaccagctgtccagccccaaccccagccacagccccagacccagccacagcctgtgcaggccccagcgaaggcgcagcccgcaatcacgacggggggcagtgcagccgtactggcaggaaccattaaaacatcagttactgggacgagcatgcccactggtgccgtgagtggaaatgtgatcgtgaacaccatcgcaggggtcccagctgccaccttccagtccatcaacaagcgcctggcgtcgccagtggctcctggggccttgactacgccgggaggctctgctcccgcccaggtggtgcacacccagcccccgccacgggcagtcggctccccagccacggcgacccctgacctggtgtccatggcaacgactcagggtgttcgagcggtcacttctgtgacagcctcggccgtggtcactaccaacctgaccccagtgcagaccccggcacggtctttggtgccccaagtgtcccaagccacaggagttcagctccctggaaaaaccatcacacctgcacatttccagcttctcaggcagcagcagcagcagcagcaacaacagcagcagcagcagcagcagcagcagcagcagcagcagcagcaacagcagcagcagcaacagacgacgacgacctctcaggtgcaagttccacagatccagggccaggcccagtccccagcacagatcaaagctgtgggcaagctgacgccggaacacctcatcaaaatgcagaagcagaaactgcagatgcccccgcagcccccaccgccacaggcccagtctgcgcccccgcagccaacagcccaagtgcaagtgcagacctcgcagccgccgcagcagcagagcccccagctcacgacggtcacggccccaaggcctggtgccctgctgacgggcaccaccgtggccaacctccaggtggcccggctcacccgggttcccacttctcagctgcaggcgcaagggcagatgcagacccaggcaccccagccagcccaggtggccttggcgaagcctccggtggtgtccgtcccggcagctgtggtctcctcaccgggagtcaccaccctgcccatgaacgtcgcggggatcagcgtggcgatcggtcagccacagaaggcagcaggacagaccgtggtggcccagcccgtgcacatgcagcagctgctgaagctgaagcagcaggccgtccagcagcagaaggccatccagccccaggctgcacagggcccggcagccgtccagcagaagatcaccgcacagcagatcaccacccctggcgcgcagcagaaggttgcctacgccgcgcagccggcccttaagacccagtttcttaccacacccatctcccaggcccagaaactggccggggcccagcaagtgcagacccagatccaggttgcaaaacttcctcaagttgttcaacagcaaacacccgtggccagcatccagcaagttgcctctgcttcccagcaggcttctccacagactgtggcgctcacgcaggcgacggcggccgggcagcaggtgcagatgatccctgcagtgaccgcgactgcccaggtggttcagcagaaactcattcagcagcaggtggtgaccacggcgtcggccccgctccagactccaggcgctcccaacccagcccaggtgcccgccagctccgacagcccaagccagcagcccaagttacagatgagggtccctgctgtcaggctaaagacacctactaagcctccgtgccagtagtcagggcagcagggctgcctctcatctaaagcaaaactaccttcctcacagaaaacgctttattagtgaaccttgggaccatgtcacgcaagagattcagcactgggaaagatataattgaaacaaaatagtgtaatcattttattaaaatgcatcccacactgcaggacaaatggtccttatggagtgccgcgttctctgtactacgtggctcatggaaaaagtgacaacatggcttcctctaaatcatttcacctttcagtccccacccgcacccgtcccctagagccatagtactgtgttctgaaagccatttagaatttctttgtgagcatgtagtgctttgcacgccacagaagccgtctgccgtgtgtgaggagcatacaatggactttctaaagataaggcgtgggcttccacagtgtctgccagagtttagttctttataccttactgaaaaatgcctcgtggtcttcgcagaggggaaggcctgtctaaagtcaatcatccgagatgggttttccattccaaagaaaggcaatatggttccttccttccctcctaaaatatgacttaacttttaagagaaatgttctgacacccacctaaacacacaaggcacgttcctggcctgtgttcaagggaaatgatcagtcattgcattgttattccaaagagcagccaacagtggcctcccccaggccctaccctgcaatgggattcgctttcatttaatggaaacttctgggactgatgcccaactcagtgcactcaagacgcatctccagttttcgggggaagctggtatttgacatagtgtgttaaacagctcctgagaacctttgggacactctgccatggctggcgtgaggcccagaggaccacgcagaggcaatggtagtacagatgtcacagctgagggtacgatgaggcctgggctcagtgagccaggacgaatgtgacagacaccccttgctgccacagtcagccctttgacgaaggtgggctggtgattctggaagtattggctatagcggtgggcccagtcaactcttccttgtggacttacgacagcagattttctctaggataagcttgtgtggttctgccagtgaagcagagaaccacctgtgctgttgtggaaggcgtgccgttgagggggaaaacgaagcccagtatttgctactgtttttcctttttttactatgacaggaaaataaatgcaattttagtggaattgattgacagtgtctccttactttgaagttttcaccaaagcaaaaaggtccatatccaatagtatcctttgtgctgtggcttgattttggcctattttacattatttggtccaggaaattaggttatattaggttttttgtatactaaaaatcagttatggcacaataaagattttctgtttttaaattgtatttcatctgcttcctccccattctctcactttaagtgacattgaggaaggtattctgtcccacaggtttctgtggacagcgatacagcaggagtcagtgaaatcaactggggagctcacttgagctcttgataagaaatgtggagaaaagtaaaaaccaagctttgaagaaacagaagaaattaatcttttagttagttgaacataccaaagcagaggactggaatctgtttgttctaaccaacccgttctccctggcttggcacgtgccgtgagagcgcagcttgccggagggagggccgctgtgtgcgcctcacatctggctcccagtggaaacttttactcctcctcatccgcagatgtgatagaactgaagtatctaggaattctgcctttgtcatttgttttaatttgtgtgccctgttcattttttttgtctttcccaaatcttggtagtctccttatagttgaagataaaatgttgagtgcacttattttagaatatcctagacataactgtctaagtaaaagcgctctattaatctaaaacactacaagagaatttaacaccatctctcaaatgcttttttggagagcttaatgggattctgaatatttgcaatgtggagtttccgccccgatctcacgtcagtgagggtctcctgtctctcaagtgtgtttcctttggctgttccctaatacaaaacacggacatatttttactcgtagcactcaatttagtaacttctagatgctaccgttgacctgagttaaattcatttagtcgtgtacgtaaaaactctccttttagtgtgttattttcttggccttcccttttaaaggttaaagtttctaacctaagaattaagtacgcgttcaggaagctgttgtctaggccttccccttgtgaatctgggttcattccaatacggcaagtaagagttggaaactttgagaacacagactataaaggcagcagcccgaacactgtcagactctaattggcgaccctgggaaacagttgccctgctattctttaaagaaagacgtttattctgatgataaaaacagttagccagactgtttttaaagcacctggcgggaagcagaaggttggatccaagcccttgttcagatttggtgcctgataagacaggggtttctctttttgtgacctttattattattattttgttaactgttgtaaccagttagctgttgtgttttaagatagaaaggaacaagactaaaattgtaaatactttgtaaacatcagcatttgtacttgaatagtaggattttaaagggcattgatagcataccaaacaaaaggcaaaataaagtgacctttttatatatttttt

SEQ ID NO: 128835 - DNA, 12836 bp, Homo sapiens
  Payload ID: 5197
  Gene Symbol: EP400
  Gene Name: E1A binding protein p400
  Uniprot ID: Q96L91
  ENST ID: ENST00000389562
  CDS Start-End: 36-9407
gagaacgacacattggatacagaagggaggtgatcatgcaccatggcactggcccccagaacgtccagcatcagctgcagaggtccagggcctgccctggcagcgagggtgaggagcagccggcccaccccaacccacccccgtcccccgcagctcccttcgctccctcagcaagcccgtcggcaccccagtctcccagttatcaaatacagcagctgatgaataggagccctgcaaccgggcagaacgtgaacatcaccctgcagagcgtgggccctgtcgtcgggggaaaccagcagatcacactggccccactgccgctccccagccccacctctccaggcttccagttcagcgctcagcctcggcggtttgagcatgggtctccatcatacattcaggtcacgtcccccttgtcccagcaggtccagacccagagtcccacgcagcccagtccggggccggggcaggccttgcagaatgtgcgtgcaggtgcccctggccctgggctgggcctctgcagcagcagccctacagggggcttcgtggatgccagcgtgctggtgaggcagatcagcttgagcccctccagtggtggacactttgtgtttcaggatgggtcagggctcacccagatcgcccagggagcccaggttcagctccagcacccgggtacgcccatcacagtccgagagcggagaccctcccagccccacacacagtcagggggcaccatccaccacctgggaccccagagccctgcagccgcgggtggggccggcctgcagcccctggccagcccaagccacatcaccacggctaacttgccaccgcagatcagcagcatcatccagggccagctggttcagcagcagcaggtgctgcaggggccgccgctgccccggcccctgggcttcgagaggacacccggcgtgctgctccccggggctgggggcgcagcggggtttgggatgacgtccccacccccgcccaccagcccttccaggactgccgtgcccccaggcctttccagcctcccactcacgtctgtggggaacacgggaatgaagaaggttcccaagaagttagaggagattcccccagcctctccggagatggcacagatgaggaagcagtgcctggactatcattaccaggagatgcaggctctgaaggaggtcttcaaggagtatttgattgaactgtttttcttgcaacactttcaagggaacatgatggatttcttagctttcaagaagaaacattatgccccattacaagcatatcttaggcagaatgatttggacattgaagaagaggaggaggaggaggaagaggaggaagaaaaatctgaggttatcaatgacgagcagcaagccctcgcagggagcctggtagcaggggccggaagcacagtagagacggacctgtttaagaggcagcaggcgatgccctccacaggtatggcagagcagtctaagaggcctcgccttgaagtgggtcaccaaggggtagttttccagcacccaggggcggacgcaggcgttcctctccagcaactaatgccgaccgcacaaggaggaatgccccccacgccgcaggccgcgcagctcgctggacagaggcagagtcagcagcagtatgacccctccacggggcctcccgtgcagaacgctgccagcttgcacaccccactgccgcagctgcccgggaggctgcccccagccggtgttcccactgcagccctctcctctgcgctgcagtttgcacagcagccgcaagtggtagaggcccagacacagctccaaatcccggtgaagactcagcagcccaatgttcccatccctgcaccgcccagcagccaactccccatccctccctcgcagcctgcacagctggccctccacgttcccacacctggaaaggtgcaggtgcaggcctctcagctttcctccctgccacagatggtagcatcgacaaggctccctgtggaccctgccccgccctgcccacggcctctgcccacctcttctacctcgtccctcgcgcctgtgagtggctccggcccaggaccctcccctgctcgatcctctccagtaaatagaccttcctcagccaccaataaggcactatctccagtcacttcccggaccccaggggtggtggcatctgcccccaccaaaccacagagtcctgctcagaatgccacctcgtcccaagacagttctcaggatacgctgacagaacaaataactctggagaaccaggtgcatcagcgcattgcggagctgaggaaagcaggtctgtggtcccagaggcgtctgccaaagctgcaggaggccccacgccccaagtcccactgggactatctgctggaggagatgcagtggatggccacagactttgcccaggagaggaggtggaaggtggctgctgcgaagaagctcgttagaactgtggtgcgccatcacgaggagaagcagctccgtgaagaaagggggaagaaggaagagcagagcagactgaggcggatagccgcctccacggcccgggagatagagtgcttttggtcgaatattgaacaggttgtggaaataaaactacgagtagaattagaagaaaaaaggaagaaggccttaaatttacagaaagtttccaggagagggaaagaattgagacctaaaggatttgacgcattacaggaaagttctctggattcaggaatgtctggaagaaaaagaaaagctagcatatctttgactgatgacgaagtggacgatgaagaggaaacaattgaagaggaggaagcaaatgaaggcgttgtggaccaccaaacagaactttctaatttagccaaggaagctgagctgcccctcctggacctgatgaagctgtacgaaggcgccttcctgccgagttctcagtggccccggccgaagcctgatggggaggacacaagcggagaggaagatgcagatgactgtccaggcgacagggagagtcgcaaggacttggttctcatcgactcgcttttcatcatggatcagttcaaagctgccgagaggatgaatatcgggaagccaaacgccaaggacattgcggacgtcactgcggtggctgaagccatcctgccgaagggcagtgctcgggtcacaacctcggtcaagtttaatgctccatctttgttgtatggggctctcagagattatcagaagattggcctggactggctggccaaactttacaggaagaatctcaatggcatattggcagatgaagctgggctgggtaaaacagtgcagatcattgctttttttgcccacctagcttgtaacgaaggtaattggggcccccatcttgttgttgtgagaagttgtaacatactcaagtgggagcttgaattgaaacgttggtgtcccggactcaaaatcctctcatatattggcagccacagagaactcaaagcaaagagacaggagtgggccgaacccaacagcttccacgtctgcatcacgtcctacactcagttcttccggggcctcaccgccttcacacgagtgcgctggaagtgcctggtcattgatgagatgcagcgcgtgaagggcatgaccgagaggcactgggaagcggttttcaccctgcagagccaacaacgtctgcttctgatcgactcgccgctgcacaataccttcctggagctctggaccatggtgcacttcctggtcccagggatctccaggccctacctgagctcccctctgagggcccccagtgaagagagccaggattactaccataaagtggtcataaggttacacagggtgacacagccatttattttgaggagaactaagagagatgtggaaaagcaactaacaaagaaatatgagcatgttttgaagtgtcgcctttctaaccgacaaaaagccttatacgaggacgttatcctgcaacctggcactcaggaggccttgaagagcgggcactttgtcaacgtcctgagcatccttgtgcggctgcagcgcatctgcaaccaccctgggctcgtcgagccccggcacccaggctcttcctacgtggcggggccactggagtatccgtccgcatctctaatcctgaaggcactggagagagatttctggaaggaagcagatctttctatgtttgatctcatcggcttagaaaataaaatcactcgtcacgaggcagagttgctgtctaagaaaaagataccgcggaaactcatggaggaaatctccacttcagcagccccagcagcccgaccagcagcagcaaagctgaaggccagcaggttgtttcagcctgtgcagtatggccagaagcccgagggtcgcaccgtggctttccccagcactcacccgccccggacggcagcccccaccacggcctctgctgctccacagggcccgcttcgaggacggccgcccatcgccacgttctctgccaatccggaggcaaaagcagcagcagccccgtttcagacctctcaggcttccgccagtgctccacgacaccagcccgcctcggcctccagcacagccgctagcccggcccatcctgcgaaactgcgggcccagaccacagcacaggcctccaccccaggccagcccccgccccagccccaggccccctcgcacgcggccgggcagagcgcgctgcctcagaggctggtgctcccctcgcaggcccaggcccgcttgcccagtggagaggtagtgaaaatagctcagctggcatccatcacaggaccacagagccgcgtggctcagccagagacgccggtgacactgcagttccagggcagcaagttcaccctgtcacacagccagctccggcagctcacagcgggccagccgctgcagctgcaaggcagcgtcctccagatcgtgtccgcccccgggcagccctaccttcgagcccctggccctgtggtgatgcagaccgtgtctcaggcgggcgctgtgcacggcgccctgggaagcaagcccccggccggcggtcccagccctgcacccttgaccccacaagttggcgttccgggccgcgtggcggtgaatgccttggctgtaggagaacccggaacggcctccaaaccagcttctcccattggagggccgacccaggaggaaaagaccagactcttgaaagagcgcctggatcagatttatttagtcaacgagcggcgctgttctcaagctccagtctatggcagagacttgctaaggatttgtgccctgcctagccatggaagggtacagtggcgtgggtccctggatggccgtcgtgggaaggaggccgggccagcgcacagttacacttcatcctcagaaagtccaagtgagctgatgttgacgctttgtcggtgtggagagtctctgcaggatgttattgacagggtggcctttgtgattcctccggtggtggcagcacccccgtccctacgggtgccgcggccgccacccctgtacagccacagaatgaggatcttgaggcagggcctgagagagcacgctgcgccgtacttccagcagctgcggcagaccacggctccacgcctgctgcagttccctgagctgaggctggtgcagttcgactcagggaagttggaagctttagctatcttgcttcagaaattgaaatctgaaggacgtcgggtgctgattttatcacagatgattcttatgttggacattttagagatgttcttgaacttccattacctcacctatgtaagaatcgatgaaaatgccagcagtgagcaacggcaggaactgatgaggagtttcaacagagacaggcggattttttgtgccattctctccactcacagccgtaccacaggtataaaccttgtagaggcggacaccgtcgtgttttatgacaatgacctgaatccagtgatggatgccaaagctcaggagtggtgcgataggatcgggagatgcaaagacatccacatatacaggcttgtgagtggcaattccattgaagagaaattgttgaaaaatggaactaaagatctgatccgagaagtggctgctcagggaaatgactactccatggctttcttaactcagcgaaccatccaggagctgtttgaagtttattctcccatggatgatgctggcttcccggtcaaagctgaggagtttgtggtgctttctcaggaaccttctgtcacggaaaccattgcacccaaaattgcaagacctttcatagaggccctcaagagtattgagtatctggaggaggatgcccagaagtccgcacaggagggggtgctgggaccacacactgatgctctgtcatcagactctgagaacatgccgtgtgatgaagaaccatcccaattagaggagctagctgacttcatggagcagcttacaccaattgaaaaatatgctttaaattacctggaattattccatacttctattgagcaagaaaaggagagaaacagtgaggacgcagtgatgactgcagtgagggcatgggagttctggaacctgaagaccctgcaggagagggaggcccggctgcggctggagcaggaggaggcggagctcctgacctacacgcgagaggatgcctacagcatggagtatgtctacgaagatgtcgatgggcagacagaagtcatgccgctctggaccccacccaccccgccgcaggacgacagcgacatctacctcgactcggtcatgtgtctcatgtatgaagccactcccatcccagaggctaagctgccccctgtgtacgtgaggaaggagcggaagcgacacaaaacagacccctcagctgcaggcaggaagaagaagcagcgtcacggggaggcggtcgtccctcctcggtccctgtttgaccgcgcaacaccaggacttctgaaaattcgcagagagggcaaggagcagaagaagaatattctgctgaagcagcaggtgccattcgccaagcccctgccaacttttgccaaacccacagctgagcctggtcaagacaaccccgagtggctcatcagtgaggactgggcgctgctgcaggctgtaaagcagttactggagctgcctttgaacctcacaatcgtgtcacctgctcacacacctaattgggatcttgtcagtgacgttgttaactcctgtagccgaatctaccgctcttccaaacagtgccggaatcgctacgagaatgtcatcattccacgagaggaggggaagagtaaaaacaaccgtcctctccgtacgagccagatctatgcccaggatgagaatgccacacacacccagctgtacacgagccactttgacttaatgaaaatgactgctggcaagaggagtcccccaatcaaacctctgcttggcatgaatccctttcagaagaaccccaagcacgcgtctgtgttggcagaaagtggaatcaactatgacaagccgctgcctcccatccaggtggcatctctccgtgcagagcgaatcgcaaaagagaaaaaggctctggctgatcagcagaaggcacagcagccggccgtggcccagccacccccgccccagccgcagcccccaccacccccgcagcagccaccgccaccgctgccacaaccacaggcagcgggcagccagccgccagcagggccaccagctgtccagccccaaccccagccacagccccagacccagccacagcctgtgcaggccccagcgaaggcgcagcccgcaatcacgacggggggcagtgcagccgtactggcaggaaccattaaaacatcagttactgggacgagcatgcccactggtgccgtgagtggaaatgtgatcgtgaacaccatcgcaggggtcccagctgccaccttccagtccatcaacaagcgcctggcgtcgccagtggctcctggggccttgactacgccgggaggctctgctcccgcccaggtggtgcacacccagcccccgccacgggcagtcggctccccagccacggcgacccctgacctggtgtccatggcaacgactcagggtgttcgagcggtcacttctgtgacagcctcggccgtggtcactaccaacctgaccccagtgcagaccccggcacggtctttggtgccccaagtgtcccaagccacaggagttcagctccctggaaaaaccatcacacctgcacatttccagcttctcaggcagcagcagcagcagcagcaacaacagcagcagcagcagcagcagcagcagcagcagcagcagcagcaacagcagcagcagcaacagacgacgacgacctctcaggtgcaagttccacagatccagggccaggcccagtccccagcacagatcaaagctgtgggcaagctgacgccggaacacctcatcaaaatgcagaagcagaaactgcagatgcccccgcagcccccaccgccacaggcccagtctgcgcccccgcagccaacagcccaagtgcaagtgcagacctcgcagccgccgcagcagcagagcccccagctcacgacggtcacggccccaaggcctggtgccctgctgacgggcaccaccgtggccaacctccaggtggcccggctcacccgggttcccacttctcagctgcaggcgcaagggcagatgcagacccaggcaccccagccagcccaggtggccttggcgaagcctccggtggtgtccgtcccggcagctgtggtctcctcaccgggagtcaccaccctgcccatgaacgtcgcggggatcagcgtggcgatcggtcagccacagaaggcagcaggacagaccgtggtggcccagcccgtgcacatgcagcagctgctgaagctgaagcagcaggccgtccagcagcagaaggccatccagccccaggctgcacagggcccggcagccgtccagcagaagatcaccgcacagcagatcaccacccctggcgcgcagcagaaggttgcctacgccgcgcagccggcccttaagacccagtttcttaccacacccatctcccaggcccagaaactggccggggcccagcaagtgcagacccagatccaggttgcaaaacttcctcaagttgttcaacagcaaacacccgtggccagcatccagcaagttgcctctgcttcccagcaggcttctccacagactgtggcgctcacgcaggcgacggcggccgggcagcaggtgcagatgatccctgcagtgaccgcgactgcccaggtggttcagcagaaactcattcagcagcaggtggtgaccacggcgtcggccccgctccagactccaggcgctcccaacccagcccaggtgcccgccagctccgacagcccaagccagcagcccaagttacagatgagggtccctgctgtcaggctaaagacacctactaagcctccgtgccagtagtcagggcagcagggctgcctctcatctaaagcaaaactaccttcctcacagaaaacgctttattagtgaaccttgggaccatgtcacgcaagagattcagcactgggaaagatataattgaaacaaaatagtgtaatcattttattaaaatgcatcccacactgcaggacaaatggtccttatggagtgccgcgttctctgtactacgtggctcatggaaaaagtgacaacatggcttcctctaaatcatttcacctttcagtccccacccgcacccgtcccctagagccatagtactgtgttctgaaagccatttagaatttctttgtgagcatgtagtgctttgcacgccacagaagccgtctgccgtgtgtgaggagcatacaatggactttctaaagataaggcgtgggcttccacagtgtctgccagagtttagttctttataccttactgaaaaatgcctcgtggtcttcgcagaggggaaggcctgtctaaagtcaatcatccgagatgggttttccattccaaagaaaggcaatatggttccttccttccctcctaaaatatgacttaacttttaagagaaatgttctgacacccacctaaacacacaaggcacgttcctggcctgtgttcaagggaaatgatcagtcattgcattgttattccaaagagcagccaacagtggcctcccccaggccctaccctgcaatgggattcgctttcatttaatggaaacttctgggactgatgcccaactcagtgcactcaagacgcatctccagttttcgggggaagctggtatttgacatagtgtgttaaacagctcctgagaacctttgggacactctgccatggctggcgtgaggcccagaggaccacgcagaggcaatggtagtacagatgtcacagctgagggtacgatgaggcctgggctcagtgagccaggacgaatgtgacagacaccccttgctgccacagtcagccctttgacgaaggtgggctggtgattctggaagtattggctatagcggtgggcccagtcaactcttccttgtggacttacgacagcagattttctctaggataagcttgtgtggttctgccagtgaagcagagaaccacctgtgctgttgtggaaggcgtgccgttgagggggaaaacgaagcccagtatttgctactgtttttcctttttttactatgacaggaaaataaatgcaattttagtggaattgattgacagtgtctccttactttgaagttttcaccaaagcaaaaaggtccatatccaatagtatcctttgtgctgtggcttgattttggcctattttacattatttggtccaggaaattaggttatattaggttttttgtatactaaaaatcagttatggcacaataaagattttctgtttttaaattgtatttcatctgcttcctccccattctctcactttaagtgacattgaggaaggtattctgtcccacaggtttctgtggacagcgatacagcaggagtcagtgaaatcaactggggagctcacttgagctcttgataagaaatgtggagaaaagtaaaaaccaagctttgaagaaacagaagaaattaatcttttagttagttgaacataccaaagcagaggactggaatctgtttgttctaaccaacccgttctccctggcttggcacgtgccgtgagagcgcagcttgccggagggagggccgctgtgtgcgcctcacatctggctcccagtggaaacttttactcctcctcatccgcagatgtgatagaactgaagtatctaggaattctgcctttgtcatttgttttaatttgtgtgccctgttcattttttttgtctttcccaaatcttggtagtctccttatagttgaagataaaatgttgagtgcacttattttagaatatcctagacataactgtctaagtaaaagcgctctattaatctaaaacactacaagagaatttaacaccatctctcaaatgcttttttggagagcttaatgggattctgaatatttgcaatgtggagtttccgccccgatctcacgtcagtgagggtctcctgtctctcaagtgtgtttcctttggctgttccctaatacaaaacacggacatatttttactcgtagcactcaatttagtaacttctagatgctaccgttgacctgagttaaattcatttagtcgtgtacgtaaaaactctccttttagtgtgttattttcttggccttcccttttaaaggttaaagtttctaacctaagaattaagtacgcgttcaggaagctgttgtctaggccttccccttgtgaatctgggttcattccaatacggcaagtaagagttggaaactttgagaacacagactataaaggcagcagcccgaacactgtcagactctaattggcgaccctgggaaacagttgccctgctattctttaaagaaagacgtttattctgatgataaaaacagttagccagactgtttttaaagcacctggcgggaagcagaaggttggatccaagcccttgttcagatttggtgcctgataagacaggggtttctctttttgtgacctttattattattattttgttaactgttgtaaccagttagctgttgtgttttaagatagaaaggaacaagactaaaattgtaaatactttgtaaacatcagcatttgtacttgaatagtaggattttaaagggcattgatagcataccaaacaaaaggcaaaataaagtgacctttttatatattttttcattttgtctttcatagaaaactggtatttaagttaaatgagatgctgaatttttcatttgtgtgaagaaaaaaccaacaagtaatgttggagccagaggtgttcccctcacccactcttccgtggccatagaaggacctggaaggaacagaaatcacattcaccaagtccaccaggcagccgcttcccaaagccgcacgtggaggaaagagctggcaccgccctgccccatgtggcctgccaccctcacagcacccgtcgtcaatgtcctgggggccacactggcaccagtgtccttccacacccagtctgtgtgcccaactggcaccagtgtccttccacacccagtctgtgtgcccaactggcaccagtgtccttccacacccagtctgtgtgcccaactggcaccagtgtccttccacacccagtctgtgtgcccaagtaagggcagggacaccggctcacaggtgctcaccaccgaaaacgcctgtgagcagatggcctgcgagttgttgcttctctttttcttctgcttttagacttttcttcgtttcgttttaaatctgattacaaaaatcaacgtacacttttaattgaaaacgcacacattacgcaaagtaaagaagcatcccagaa

SEQ ID NO: 128836 - DNA, 2503 bp, Homo sapiens
  Payload ID: 5198
  Gene Symbol: E2F1
  Gene Name: E2F transcription factor 1
  Uniprot ID: Q01094
  ENST ID: ENST00000343380
  CDS Start-End: 141-1454
ttggcgcgtaaaagtggccgggactttgcaggcagcggcggccgggggcggagcgggatcgagccctcgccgaggcctgccgccatgggcccgcgccgccgccgccgcctgtcacccgggccgcgcgggccgtgagcgtcatggccttggccggggcccctgcgggcggcccatgcgcgccggcgctggaggccctgctcggggccggcgcgctgcggctgctcgactcctcgcagatcgtcatcatctccgccgcgcaggacgccagcgccccgccggctcccaccggccccgcggcgcccgccgccggcccctgcgaccctgacctgctgctcttcgccacaccgcaggcgccccggcccacacccagtgcgccgcggcccgcgctcggccgcccgccggtgaagcggaggctggacctggaaactgaccatcagtacctggccgagagcagtgggccagctcggggcagaggccgccatccaggaaaaggtgtgaaatccccgggggagaagtcacgctatgagacctcactgaatctgaccaccaagcgcttcctggagctgctgagccactcggctgacggtgtcgtcgacctgaactgggctgccgaggtgctgaaggtgcagaagcggcgcatctatgacatcaccaacgtccttgagggcatccagctcattgccaagaagtccaagaaccacatccagtggctgggcagccacaccacagtgggcgtcggcggacggcttgaggggttgacccaggacctccgacagctgcaggagagcgagcagcagctggaccacctgatgaatatctgtactacgcagctgcgcctgctctccgaggacactgacagccagcgcctggcctacgtgacgtgtcaggaccttcgtagcattgcagaccctgcagagcagatggttatggtgatcaaagcccctcctgagacccagctccaagccgtggactcttcggagaactttcagatctcccttaagagcaaacaaggcccgatcgatgttttcctgtgccctgaggagaccgtaggtgggatcagccctgggaagaccccatcccaggaggtcacttctgaggaggagaacagggccactgactctgccaccatagtgtcaccaccaccatcatctcccccctcatccctcaccacagatcccagccagtctctactcagcctggagcaagaaccgctgttgtcccggatgggcagcctgcgggctcccgtggacgaggaccgcctgtccccgctggtggcggccgactcgctcctggagcatgtgcgggaggacttctccggcctcctccctgaggagttcatcagcctttccccaccccacgaggccctcgactaccacttcggcctcgaggagggcgagggcatcagagacctcttcgactgtgactttggggacctcacccccctggatttctgacagggcttggagggaccagggtttccagagatgctcaccttgtctctgcagccctggagccccctgtccctggccgtcctcccagcctgtttggaaacatttaatttatacccctctcctctgtctccagaagcttctagctctggggtctggctaccgctaggaggctgagcaagccaggaagggaaggagtctgtgtggtgtgtatgtgcatgcagcctacacccacacgtgtgtaccgggggtgaatgtgtgtgagcatgtgtgtgtgcatgtaccggggaatgaaggtgaacatacacctctgtgtgtgcactgcagacacgccccagtgtgtccacatgtgtgtgcatgagtccatgtgtgcgcgtgggggggctctaactgcactttcggcccttttgctctgggggtcccacaaggcccagggcagtgcctgctcccagaatctggtgctctgaccaggccaggtggggaggctttggctggctgggcgtgtaggacggtgagagcacttctgtcttaaaggttttttctgattgaagctttaatggagcgttatttatttatcgaggcctctttggtgagcctggggaatcagcaaaggggaggaggggtgtggggttgataccccaactccctctacccttgagcaagggcaggggtccctgagctgttcttctgccccatactgaaggaactgaggcctgggtgatttatttattgggaaagtgagggagggagacagactgactgacagccatgggtggtcagatggtggggtgggccctctccagggggccagttcagggccccagctgccccccaggatggatatgagatgggagaggtgagtgggggaccttcactgatgtgggcaggaggggtggtgaaggcctcccccagcccagaccctgtggtccctcctgcagtgtctgaagcgcctgcctccccactgctctgccccaccctccaatctgcactttgatttgcttcctaacagctctgttccctcctgctttggttttaataaatattttgatgacgtt

SEQ ID NO: 128837 - DNA, 5191 bp, Homo sapiens
  Payload ID: 5199
  Gene Symbol: E2F2
  Gene Name: E2F transcription factor 2
  Uniprot ID: Q14209
  ENST ID: ENST00000361729
  CDS Start-End: 428-1741
aggactagagagcgagccgcaaggaagtcggtgcagtcgagacccccctccccatcccagcgcatcgcgtctccgccgagcttgagggcacgccggggacccctccccagagccggccggaccccaggtgccgaggccttggggagcgcggggcgtcccgggtcgcggtgccctcgggacgagacagcccctggcagtgccaccaccgcagccgccgggcgatctccaagcggcgatctctaagcgctgctctctgctcggccgcgggccaggaggggagggtccggccttgccccgcaggcgtccattggcggcttcccccggcctccgcgccatgccgcgggccgtgtgaaaggcggcagcaccggaacccgcaggtgtccgcgggcgcgccaagcccttttgggtagggggcgccttactcgctatgctgcaagggccccgggccttggcttcggccgctgggcagaccccgaaggtggtgcccgcgatgagccccacagagctgtggccatccggcctcagcagcccccagctctgcccagctactgctacctactacacaccgctgtacccgcagacggcgcctcccgcagcggcgccaggcacctgcctcgacgccactccccacggacccgagggccaagttgtgcgatgcctgccggcaggccggctgccggccaaaaggaagctggatctggaggggattgggaggcccgtcgtccctgagttcccaacccccaaggggaagtgcatcagagtggatggcctccccagccccaaaacccccaaatcccccggggagaagactcggtatgacacttcgctggggctgctcaccaagaagttcatttacctcctgagcgagtcagaggatggggtcctggacctgaactgggccgctgaggtgctggacgtgcagaagcggcgcatctatgacatcaccaacgtgctggaaggcatccagctcatccgcaagaaggccaagaacaacatccagtgggtaggcaggggaatgtttgaagaccccaccagacctgggaagcagcaacagctggggcaggagctgaaggagctgatgaacacggagcaggccttggaccagctcatccagagctgctctctgagcttcaagcacctgactgaggacaaggccaacaagaggctggcctatgtgacttaccaggatatccgtgctgttggcaactttaaggagcagacagtgattgccgtcaaggcccctccgcagacgagactggaagtgcccgacaggactgaggacaacctgcagatatatctcaagagcacccaagggcccatcgaagtctacctgtgcccagaggaggtgcaggagccggacagtccttccgaggagcctctcccctctacctccaccctctgccccagccctgactctgcccagcccagcagcagcaccgaccctagcatcatggagcccacagcatcctcagtgccagcaccagcgccaaccccccagcaggccccaccgcctccatccctggtccccttggaggctactgacagcctgctggagctgccgcacccactcctgcagcagactgaggaccagttcctgtccccgaccctggcgtgcagctcccctctgatcagcttctccccatccttggaccaggacgactacctgtggggcttggaggcgggtgagggcatcagcgatctcttcgactcctacgaccttggggacctgttgattaattgagtggccctgcctgcccccagcagcctgcccccgactctacctcctcacagacaggctgacagcccctctgcctgcacagggacattggacactaggtgctgccctcagggcatggggtctcctcgcctttcctgccccagccggcagaagctgtgtggggagatatgaatggtacgggtgaggagtggataaggggtggtcctcaccttcctaatggaagctgggcctagggaggcccatccagtcttctgacttctgacctctcacaagaaggctgcaggtgaggtggccaagtccagggaaaggccctgctacctccttttgaggggtaattaggaccctcgacgtaccaagaagcacataatgcctttgtatttatttcaggttgagttgtttgtttgtcctccctgagttttagcagggaggttgttctagtttttagtgagacctctgcagacaggcccatcactgtccatgttccagggcaggtctgggtttccaagggaggggcccaggctacatccttggtttccccactgtggtgggggctgggactctgaggggctgtccagtctgctagaatgctaattgcacttaggcctcatggttctagtaaacggcagctgtgggcccttttgcctcttcccctgttcttggcctcacatctccagctgagctgccggtcttggcttcctggtcgcctctgtcccagagatggtcccagggagccatcctagggcaggtagcactgaggctcctgtggaaacaggagccacctgctcaggagacccctttcctgaggaagtccttacctctccccttgagatgtaaaaatggtccagcagagacaagctcccgtggaaaacagacaggagcatgggggcagctgtcatggctgtggcgggcacttttcctcagagtttctgccttgcgctggtccaggagccattttgcaccaaggacttggtaggcagaggcagccccactgtaaagaagggtcagattaaaacaaaaaactgccaaaagcatcccctctgccccccatgtggcactggcatcattctctgcttccctgggaggaattttttcaccatgttattgaaggggatggttcattaaggactccacccctcagagctcactcagaccccaaggacagaggtgactggggcttggtgacttgttcactccttttttcccaggtatactgaaggggtgacagagagaggtcttcatggcagaccaggccttcacagctaatggggagaggaactcatgttacctctgcaggcctggggtcctgagggggtcttttggcttcagcctgttcccccagaggcttgatcatcccacattgtcccttcagctcagctgctcttctcccccacccaccctgggatgtgggtgctctgggctgaaccaaggctatgacttctggagagaggctcaggggttggtctgagaggcctgccatccacccctcagggagctaggttttctcagaggctcagctggacagcactttttagaaaagtttgtagcattaagctggtttaaaatatgaagttggttttgttggatggctcctgagctgactgactgatgtctgaagtttgagacgagggattatttcagggtggggcccaatgtgatctaatgcccagctggggacaattgtgcctcatcatttgctcaaattcctgggcccccaagttagccccctcccaggagtggtcagcgggtcacagctgcccccactctataagcagggctaattgtgtaccctttgcagaaatgcttttggtctcctacccaaatactcacaagggtcttatcagacgcccgtcttaaagtccagcatgctcagggaccctgtgtaggatctcgtttgtggtgagtgggctgctctgaggtctccactgggctgccatttagccatgtgccatctctgaagtcagaggtgtttgactcccattccttgggctctggagctttccccaagaattacatcagagaaaaggaagaaggggcctgcaggacccattgggaatgagtttaatactgaagtctggaatgtaagctcatgccctagaggcctctccatatggctggtcaggggagctgccttcaggcttgtgccccgtgtgctcagcagctgcctctgtccccctctactgtccctttcacaccttgcctggccaaggggctagacctcccaggctaagcctcagattcagtgcaggacacaagctcatgcccccgtcttgccagtgacacttgaagcctcccgacttccacagagtgcttcaggacacattttgagtggtattttcttttctttttttcttctttttttttttttttgagatggagtctcgctctgttgcccaggctggagtgcagtggcctgatctcggctcactgcaacctctgcctcccaggttcaagcgattcttctgcctcagcctccagagtagctgggactatagacatgcaccaccacgcccggctaattttgtatttttggtcgagacggggttttgccatgttagtcaggctggtcttgaactcctgacctcaagtgatccaccacctcggcctcccaaagtgttgagatgacaggcacgagccaccaggcccagcctgagtggtattttctttagggaccaggtagactttaaaacgagggtaagagaaaagccagtgtctttctgaggtaaataatttctgccaggaaacttcccagccccaccagcagcccccctaaaaaaatcactcgtgtccccagggacttctaaagcttggggctccaggaaatcatccagtagagttggagattcagagatttcttgaagccagggacatgctcctaactcctttcccattaaaggtgttagaatagaccagagggtgtcccttttccacagtaatgggatcggctggtgtgccttcagggaggaagagggaggtggtcaagcttgaaaaactggctttaggatggttctgactttgttctccctccccaagtgttctcaacctccattctgcagtgttcagagttttagggaaagggtttgggtgccccagcatccaggtgttgtgtggcttagcgcatgtgaagtgaaaaccttctggggttgtttggaagcagctttctggttcttgtgattgtatcctgaggtcccagaaccctattctcccacgaggatcctcagtgaccatggtggccacacgcctggccagcctgctggctcctgggtgagctgaagaaccttgcctgtggcacttttcgagggtgagctggaaccgagagaacatggtccccgtgctgggactcatgcgggtcatttcctgccggcctggtttcgcctggtcgtgtctttatgagcaccatgtaagcctccttgtattgagataattgggcattaaacattaaactgcagctctggg

SEQ ID NO: 128838 - DNA, 5191 bp, Homo sapiens; identical to SEQ ID NO: 128837
  Payload ID: 5199
  Gene Symbol: E2F2
  Gene Name: E2F transcription factor 2
  ENST ID: ENST00000634683
  CDS Start-End: 428-1741

SEQ ID NO: 128839 - DNA, 4749 bp, Homo sapiens
  Payload ID: 5200
  Gene Symbol: E2F3
  Gene Name: E2F transcription factor 3
  Uniprot ID: O00716
  ENST ID: ENST00000346618
  CDS Start-End: 67-1464
aaataataaagaaattgaaaacaatacattaatataccataacactaaaaagagcaggagcgagagatgagaaagggaatccagcccgctctggagcagtacctggtgaccgccgggggtggggagggggcggctgtcgtcgccgccgccgctgcagcctccatggacaaaagggcactgctagccagccccggcttcgccgccgccgccgccgctgccgccgccccgggcgcgtacatccagatcctcaccacgaacacttccaccacctcctgttcctcctccctccaaagcggcgccgtagccgccggccccctcctccccagtgcccccggcgcggagcagaccgccggcagcctcctctacaccacgccgcacggaccctccagcagagccgggctgctgcagcagccaccagcgctgggacgcggcggcagcggcggcggcggcggccctccggcaaagcgaaggctggagctaggagaaagcggtcatcagtacctctcagatggtttaaaaacccccaagggcaaaggaagagctgcactacgaagtccagatagtccaaaaactccaaaatctccctcagaaaaaacgcggtatgatacgtctcttggtctgctcaccaagaagttcattcagctcctgagccagtcacccgatggggtattggatttgaacaaggcagcagaagtgctaaaagtgcaaaagagaaggatttatgatatcaccaacgttctggaaggcatccacctcattaagaagaagtctaaaaacaacgtccaatggatgggctgcagtctgtctgaggatgggggcatgctggcccagtgtcaaggcctgtcaaaagaagtgaccgagctcagtcaggaagagaagaaattagatgaactgatccaaagctgcaccctggacctcaaactgttaaccgaggattcagagaatcaaaggttagcttatgttacatatcaagatattcgaaaaattagtggccttaaagaccaaactgttatagttgtgaaagcccctccagaaacaagacttgaagtgcctgactcaatagagagcctacaaatacatttggcaagtacccaagggcccattgaggtttacttatgtccagaagagactgaaacacacagtccaatgaaaacaaacaaccaagaccacaatgggaatatccctaaacccgcttccaaagacttggcttcaaccaactcaggacatagcgattgctcagtttctatgggaaacctttctcctctggcctccccagccaacctcttacagcagactgaggaccaaattccttccaacctagaaggaccgtttgtgaacttactgcctcccctgctgcaagaggactatctcctgagcctcggggaggaggaaggcatcagcgatctcttcgatgcttacgatttggaaaagctcccactggtggaagacttcatgtgtagttgattatgcttcgtgtgaactctccttaaaaaccgatatttttttatcatggaaccagaacatctgtcatgcagtgttgtcccttcctaccttcttcctccaagagagtatcatgaagtaaactacaaacttcagaagaaagctgacattttaatgaattttttaaaaaattaataaacaaattgtctaaacgcacagttgcaggctcccttgggaaagccctgctttgctccaggctccaagatctcctggctaagtcagcaagtgagaaaatgtgcaatcaggtgtctctcaccccgaattgtccttcctccttcctccccggattggcttgctgtgcctgacggatgggctgtagaatggggtctggccacctggcctgctgggaaacagcaatcttccttaatagcatttcaagccgtgccttctccgcagaatgcatgtctttgaggtctgctaatatggaatggaactgcagcaaatgcaaacttgaagtcatgcaaaagtatgaaatggatttcttcagctcttcttaggaatatttaaattactgtcataattcagtttaagctatgaactgtgtgtcccagtaggaggtcaagaaaacctccacagccttctggatgaagaacctgttttcaaatatacttgttgcagatacagaagactagtagagttctgccactctaagctgttgtggattttcctgtctccatgaaccactcccattcccccgtccccaatgtgtttgtgagtttccagttgatttgtagcaaatgcctacttagttctttgtggattgttctagacttttaatttttttagctgccatttaagcattcctgtggcacccatcaccatttcaatttaattgtttactttgaagcggtttttgcaaattcatattacttaagcagagggagagaacctctactgatcagagcatctaaacctgtgtgatctaaggtttatcagcctctgcaaggagctttgtcccatcgtgcttccattcccaggagggggagcttggagcgagtcagtcctggggcttgctgacatgggtggcccattggaaaggagaaccaggtcagatgatgtaacagccccaaggagcagcaggcatgggtccctccatccttgggcttcccgggcccctgtgacaggggaaagggctctcttacaccgcactcagggagaccacttctcaggatggggtcagatggagagacctctagggagaaagacatccccattgtgtgagtggcatttccttaagctggcaggaacagggagcagccctgtgtcgggggctggaatagttctggccagaccccgttccccttcctctatgaaggaataagttggaccaagggaagtcggggacgtaaaaaatgaagcaaaacaatgccagggtgtctcccgctttactcttcaggaatggtgtcccaagttggaggctttgtgtcagctgcaaatcctaccagttatgtccaagaatggctttccctcgggcaggtggcagcggccatctcccactgggaatatggcgtagtatctccggtccattccttggatgctaaggactgcgggaatgagggagtcagataaagaacaaacctcgaaacgaacagttaaattgaaatgctatgtgcctgacccaatggtaggcacatagtaggcactcaactcatatgtttaattgaattgaaaatatcccttaggaaaaaaaaaaaacacacaaaaaaccacaagagccccagccagtttactccaggtagatttccacaatatgcaaagtggtggtggggtcaagacagatgacaccagcactttaaactctttgtgtgggtatgcgtgggtgtatgtttgggaagaaaaacaaaggtgcagactatcttcctttttttcttcttcagcctccatccctggcctcctcccctcacacacactggacttggtacaaaatgtcggtgtggtcctagatgaagcattggggtgggggagggagagggagctttgtgttaagtgcctactggaaatgcactgtggggttttttcctgtatgggaaaccatttatgccaagcttttccccatttcccatatttatctcatctggttagctgcctctgcttccagctttgtgtaattctctttgccagctgcacaaagctgattttttccaaagtctaaagactgagctcacctggctagattgttgtgtgttttgttgaattttttcataatgtaatgccgtatttattgtttttaaaatgaaaggaatactaataagtcttaaaagttccttcatgcataagatttttttccagttactgggtttaactggtgtacattaattagatgtccatactgtattttgtttgcattaagtaattttctttttgacttagtatccggcacacaaagtgggttagtactacagtatttgcgttactttaagtactaagtatgcaggtttcctggtaccattgagttgctgctattaaagctcacacacgaaatggctaaaagttacaagtgtgcaaattatgactgcgtgagccttagaaaataaaatgtataaagggcaacacatgagctgtcaaacagtgttaggagtgtgtttatatgtacagagttgtgcatagcaatcgttttatttaagttgatatgtagtctactcacattttcattatttagcaattttgtacaaaaatagcaattaatttgtaaacactgccagaatactttctagctgctttgtaattttttaagagtgttattttgtttttgtttttctgttctttgttgtggctcttgttttcatttttgttgtacgtgtagatctgtaaataaaattgcagtatttaaagcttaagctttcaggaaaaagaaaataagaattcagtgtgtgcatgacaactcgtgtgtatgagaaggagggatatgaaggaagatggcttgcagagtaagtcgggtggcaattgtcagggtgtgggaatttcttttcctacggggtacgtgattttgtaaaaaggaagtatttctcccaaaattgggagtaggcaaactactaatcagtttagctttgtgttgtatgctagtttaaaaaagaaaatatgtaatataatgtaaaaaaaaacaaaaaaaagcttttatgatggattttgtaaatagatttgttacagggtgacctgttctctagctgtgatcttaccacttcaaatgggtgtaatttgaataaattttgtatggtaaaggatcaataaaatgattttttttaagagttc

SEQ ID NO: 128840 - DNA, 4425 bp, Homo sapiens
  Payload ID: 5200
  Gene Symbol: E2F3
  Gene Name: E2F transcription factor 3
  Uniprot ID: O00716
  ENST ID: ENST00000535432
  CDS Start-End: 137-1141
accgccaccctccctctcctctccccacccccccaccggcgcccgccctcgccctgcgccgccggtctgttcggccctccgggccccctctccagccggccccccacctccccccggagccaggctggtttcggaaatgcccttacagcagcaggcaaagcgaaggctggagctaggagaaagcggtcatcagtacctctcagatggtttaaaaacccccaagggcaaaggaagagctgcactacgaagtccagatagtccaaaaaaaaaaacgcggtatgatacgtctcttggtctgctcaccaagaagttcattcagctcctgagccagtcacccgatggggtattggatttgaacaaggcagcagaagtgctaaaagtgcaaaagagaaggatttatgatatcaccaacgttctggaaggcatccacctcattaagaagaagtctaaaaacaacgtccaatggatgggctgcagtctgtctgaggatgggggcatgctggcccagtgtcaaggcctgtcaaaagaagtgaccgagctcagtcaggaagagaagaaattagatgaactgatccaaagctgcaccctggacctcaaactgttaaccgaggattcagagaatcaaaggttagcttatgttacatatcaagatattcgaaaaattagtggccttaaagaccaaactgttatagttgtgaaagcccctccagaaacaagacttgaagtgcctgactcaatagagagcctacaaatacatttggcaagtacccaagggcccattgaggtttacttatgtccagaagagactgaaacacacagtccaatgaaaacaaacaaccaagaccacaatgggaatatccctaaacccgcttccaaagacttggcttcaaccaactcaggacatagcgattgctcagtttctatgggaaacctttctcctctggcctccccagccaacctcttacagcagactgaggaccaaattccttccaacctagaaggaccgtttgtgaacttactgcctcccctgctgcaagaggactatctcctgagcctcggggaggaggaaggcatcagcgatctcttcgatgcttacgatttggaaaagctcccactggtggaagacttcatgtgtagttgattatgcttcgtgtgaactctccttaaaaaccgatatttttttatcatggaaccagaacatctgtcatgcagtgttgtcccttcctaccttcttcctccaagagagtatcatgaagtaaactacaaacttcagaagaaagctgacattttaatgaattttttaaaaaattaataaacaaattgtctaaacgcacagttgcaggctcccttgggaaagccctgctttgctccaggctccaagatctcctggctaagtcagcaagtgagaaaatgtgcaatcaggtgtctctcaccccgaattgtccttcctccttcctccccggattggcttgctgtgcctgacggatgggctgtagaatggggtctggccacctggcctgctgggaaacagcaatcttccttaatagcatttcaagccgtgccttctccgcagaatgcatgtctttgaggtctgctaatatggaatggaactgcagcaaatgcaaacttgaagtcatgcaaaagtatgaaatggatttcttcagctcttcttaggaatatttaaattactgtcataattcagtttaagctatgaactgtgtgtcccagtaggaggtcaagaaaacctccacagccttctggatgaagaacctgttttcaaatatacttgttgcagatacagaagactagtagagttctgccactctaagctgttgtggattttcctgtctccatgaaccactcccattcccccgtccccaatgtgtttgtgagtttccagttgatttgtagcaaatgcctacttagttctttgtggattgttctagacttttaatttttttagctgccatttaagcattcctgtggcacccatcaccatttcaatttaattgtttactttgaagcggtttttgcaaattcatattacttaagcagagggagagaacctctactgatcagagcatctaaacctgtgtgatctaaggtttatcagcctctgcaaggagctttgtcccatcgtgcttccattcccaggagggggagcttggagcgagtcagtcctggggcttgctgacatgggtggcccattggaaaggagaaccaggtcagatgatgtaacagccccaaggagcagcaggcatgggtccctccatccttgggcttcccgggcccctgtgacaggggaaagggctctcttacaccgcactcagggagaccacttctcaggatggggtcagatggagagacctctagggagaaagacatccccattgtgtgagtggcatttccttaagctggcaggaacagggagcagccctgtgtcgggggctggaatagttctggccagaccccgttccccttcctctatgaaggaataagttggaccaagggaagtcggggacgtaaaaaatgaagcaaaacaatgccagggtgtctcccgctttactcttcaggaatggtgtcccaagttggaggctttgtgtcagctgcaaatcctaccagttatgtccaagaatggctttccctcgggcaggtggcagcggccatctcccactgggaatatggcgtagtatctccggtccattccttggatgctaaggactgcgggaatgagggagtcagataaagaacaaacctcgaaacgaacagttaaattgaaatgctatgtgcctgacccaatggtaggcacatagtaggcactcaactcatatgtttaattgaattgaaaatatcccttaggaaaaaaaaaaaacacacaaaaaaccacaagagccccagccagtttactccaggtagatttccacaatatgcaaagtggtggtggggtcaagacagatgacaccagcactttaaactctttgtgtgggtatgcgtgggtgtatgtttgggaagaaaaacaaaggtgcagactatcttcctttttttcttcttcagcctccatccctggcctcctcccctcacacacactggacttggtacaaaatgtcggtgtggtcctagatgaagcattggggtgggggagggagagggagctttgtgttaagtgcctactggaaatgcactgtggggttttttcctgtatgggaaaccatttatgccaagcttttccccatttcccatatttatctcatctggttagctgcctctgcttccagctttgtgtaattctctttgccagctgcacaaagctgattttttccaaagtctaaagactgagctcacctggctagattgttgtgtgttttgttgaattttttcataatgtaatgccgtatttattgtttttaaaatgaaaggaatactaataagtcttaaaagttccttcatgcataagatttttttccagttactgggtttaactggtgtacattaattagatgtccatactgtattttgtttgcattaagtaattttctttttgacttagtatccggcacacaaagtgggttagtactacagtatttgcgttactttaagtactaagtatgcaggtttcctggtaccattgagttgctgctattaaagctcacacacgaaatggctaaaagttacaagtgtgcaaattatgactgcgtgagccttagaaaataaaatgtataaagggcaacacatgagctgtcaaacagtgttaggagtgtgtttatatgtacagagttgtgcatagcaatcgttttatttaagttgatatgtagtctactcacattttcattatttagcaattttgtacaaaaatagcaattaatttgtaaacactgccagaatactttctagctgctttgtaattttttaagagtgttattttgtttttgtttttctgttctttgttgtggctcttgttttcatttttgttgtacgtgtagatctgtaaataaaattgcagtatttaaagcttaagctttcaggaaaaagaaaataagaattcagtgtgtgcatgacaactcgtgtgtatgagaaggagggatatgaaggaagatggcttgcagagtaagtcgggtggcaattgtcagggtgtgggaatttcttttcctacggggtacgtgattttgtaaaaaggaagtatttctcccaaaattgggagtaggcaaactactaatcagtttagctttgtgttgtatgctagtttaaaaaagaaaatatgtaatataatgtaaaaaaaaacaaaaaaaagcttttatgatggattttgtaaatagatttgttacagggtgacctgttctctagctgtgatcttaccacttcaaatgggtgtaatttgaataaattttgtatggtaaaggatcaataaaatgattttttttaagagtt

SEQ ID NO: 128841 - DNA, 4094 bp, Homo sapiens
  Payload ID: 5200
  Gene Symbol: E2F3
  Gene Name: E2F transcription factor 3
  ENST ID: ENST00000613242
  CDS Start-End: 424-810
gccatttttcagctgccggccgcagcacccgggctgccgccgccgcctcgcaatccgttgcatcggccgcccccgacgcctccatccccgcttggggcccgatatccgtgcggccgggaccctcctctctccagagccccgattatttttggcccccggggcctgtgcggtgcggaaaaataaaaagaaaagagagagagggggctcggaagcgccgggcggggaggagagaaggaggagagacttggaaactccgactgcaaataataaagaaattgaaaacaatacattaatataccataacactaaaaagagcaggagcgagagatgagaaagggaatccagcccgctctggagcagtacctggtgaccgccgggggtggggagggggcggctgtcgtcgccgccgccgctgcagcctccatggacaaaagggcactgctagccagccccggcttcgccgccccgccggcaaagcgaaggctggagctaggagaaagcggtcatcagtacctctcagatggtttaaaaacccccaagggcaaaggaagagctgcactacgaagtccagatagtccaaaaaaaaaaacgcggtatgatacgtctcttggtctgctcaccaagaagttcattcagctcctgagccagtcacccgatggggtattggatttgaacaaggcagcagaagtgctaaaagtgcaaaagagaaggatttatgatatcaccaacgttctggaaggcatcagcgatctcttcgatgcttacgatttggaaaagctcccactggtggaagacttcatgtgtagttgattatgcttcgtgtgaactctccttaaaaaccgatatttttttatcatggaaccagaacatctgtcatgcagtgttgtcccttcctaccttcttcctccaagagagtatcatgaagtaaactacaaacttcagaagaaagctgacattttaatgaattttttaaaaaattaataaacaaattgtctaaacgcacagttgcaggctcccttgggaaagccctgctttgctccaggctccaagatctcctggctaagtcagcaagtgagaaaatgtgcaatcaggtgtctctcaccccgaattgtccttcctccttcctccccggattggcttgctgtgcctgacggatgggctgtagaatggggtctggccacctggcctgctgggaaacagcaatcttccttaatagcatttcaagccgtgccttctccgcagaatgcatgtctttgaggtctgctaatatggaatggaactgcagcaaatgcaaacttgaagtcatgcaaaagtatgaaatggatttcttcagctcttcttaggaatatttaaattactgtcataattcagtttaagctatgaactgtgtgtcccagtaggaggtcaagaaaacctccacagccttctggatgaagaacctgttttcaaatatacttgttgcagatacagaagactagtagagttctgccactctaagctgttgtggattttcctgtctccatgaaccactcccattcccccgtccccaatgtgtttgtgagtttccagttgatttgtagcaaatgcctacttagttctttgtggattgttctagacttttaatttttttagctgccatttaagcattcctgtggcacccatcaccatttcaatttaattgtttactttgaagcggtttttgcaaattcatattacttaagcagagggagagaacctctactgatcagagcatctaaacctgtgtgatctaaggtttatcagcctctgcaaggagctttgtcccatcgtgcttccattcccaggagggggagcttggagcgagtcagtcctggggcttgctgacatgggtggcccattggaaaggagaaccaggtcagatgatgtaacagccccaaggagcagcaggcatgggtccctccatccttgggcttcccgggcccctgtgacaggggaaagggctctcttacaccgcactcagggagaccacttctcaggatggggtcagatggagagacctctagggagaaagacatccccattgtgtgagtggcatttccttaagctggcaggaacagggagcagccctgtgtcgggggctggaatagttctggccagaccccgttccccttcctctatgaaggaataagttggaccaagggaagtcggggacgtaaaaaatgaagcaaaacaatgccagggtgtctcccgctttactcttcaggaatggtgtcccaagttggaggctttgtgtcagctgcaaatcctaccagttatgtccaagaatggctttccctcgggcaggtggcagcggccatctcccactgggaatatggcgtagtatctccggtccattccttggatgctaaggactgcgggaatgagggagtcagataaagaacaaacctcgaaacgaacagttaaattgaaatgctatgtgcctgacccaatggtaggcacatagtaggcactcaactcatatgtttaattgaattgaaaatatcccttaggaaaaaaaaaaaacacacaaaaaaccacaagagccccagccagtttactccaggtagatttccacaatatgcaaagtggtggtggggtcaagacagatgacaccagcactttaaactctttgtgtgggtatgcgtgggtgtatgtttgggaagaaaaacaaaggtgcagactatcttcctttttttcttcttcagcctccatccctggcctcctcccctcacacacactggacttggtacaaaatgtcggtgtggtcctagatgaagcattggggtgggggagggagagggagctttgtgttaagtgcctactggaaatgcactgtggggttttttcctgtatgggaaaccatttatgccaagcttttccccatttcccatatttatctcatctggttagctgcctctgcttccagctttgtgtaattctctttgccagctgcacaaagctgattttttccaaagtctaaagactgagctcacctggctagattgttgtgtgttttgttgaattttttcataatgtaatgccgtatttattgtttttaaaatgaaaggaatactaataagtcttaaaagttccttcatgcataagatttttttccagttactgggtttaactggtgtacattaattagatgtccatactgtattttgtttgcattaagtaattttctttttgacttagtatccggcacacaaagtgggttagtactacagtatttgcgttactttaagtactaagtatgcaggtttcctggtaccattgagttgctgctattaaagctcacacacgaaatggctaaaagttacaagtgtgcaaattatgactgcgtgagccttagaaaataaaatgtataaagggcaacacatgagctgtcaaacagtgttaggagtgtgtttatatgtacagagttgtgcatagcaatcgttttatttaagttgatatgtagtctactcacattttcattatttagcaattttgtacaaaaatagcaattaatttgtaaacactgccagaatactttctagctgctttgtaattttttaagagtgttattttgtttttgtttttctgttctttgttgtggctcttgttttcatttttgttgtacgtgtagatctgtaaataaaattgcagtatttaaagcttaagctttcaggaaaaagaaaataagaattcagtgtgtgcatgacaactcgtgtgtatgagaaggagggatatgaaggaagatggcttgcagagtaagtcgggtggcaattgtcagggtgtgggaatttcttttcctacggggtacgtgattttgtaaaaaggaagtatttctcccaaaattgggagtaggcaaactactaatcagtttagctttgtgttgtatgctagtttaaaaaagaaaatatgtaatataatgtaaaaaaaaacaaaaaaaagcttttatgatggattttgtaaatagatttgttacagggtgacctgttctctagctgtgatcttaccacttcaaatgggtgtaatttgaataaattttgtatggtaaaggatcaataaaatgattttttttaagagtt

SEQ ID NO: 128842 - DNA, 2096 bp, Homo sapiens
  Payload ID: 5201
  Gene Symbol: E2F4
  Gene Name: E2F transcription factor 4, p107/p130-binding
  Uniprot ID: Q16254
  ENST ID: ENST00000379378
  CDS Start-End: 60-1301
aagtggcggcggcgccggcctggcctggcctggctgaggggaggcggcgggcgggcgcgatggcggaggccgggccacaggcgccgccgcccccgggcactccaagccggcacgaaaagagcctgggactgctcaccaccaagttcgtgtcccttctgcaggaggccaaggacggcgtgcttgacctcaagctggcagctgacaccctagctgtacgccagaagcggcggatttacgacattaccaatgttttggaaggtatcgggctaatcgagaaaaagtccaagaacagcatccagtggaagggtgtggggcctggctgcaatacccgggagattgctgacaaactgattgagctcaaggcagagatcgaggagctgcagcagcgggagcaagaactagaccagcacaaggtgtgggtgcagcagagcatccggaacgtcacagaggacgtgcagaacagctgtttggcctacgtcactcatgaggacatctgcagatgctttgctggagataccctcttggccatccgggccccatcaggcaccagcctggaggtgcccatcccagagggtctcaatgggcagaagaagtaccagattcacctgaagagtgtgagtggtcccattgaggttctgctggtgaacaaggaggcatggagctcaccccctgtggctgtgcctgtgccaccacctgaagatttgctccagagcccatctgctgtttctacacctccacctctgcccaagcctgccctagcccagtcccaggaagcctcacgtccaaatagtcctcagctcactcccactgctgtccctggcagtgcagaagtccagggaatggctggcccagcagctgagatcacagtgagtggcggccctgggactgatagcaaggacagtggtgagctcagttcactcccactgggcccaacaacactggacacccggccactgcagtcttctgccctgctggacagcagcagcagcagcagcagcagcagcagcagcagcagcaacagtaacagcagcagttcgtccggacccaacccttctacctcctttgagcccatcaaggcagaccccacaggtgttttggaactccccaaagagctgtcagaaatctttgatcccacacgagagtgcatgagctcggagctgctggaggagttgatgtcctcagaagtgtttgcccctctgcttcgtctttctccacccccgggagaccacgattatatctacaacctggacgagagtgaaggtgtctgtgacctctttgatgtgcctgttctcaacctctgactgacagggacatgccctgtgtggctgggacccagactgtctgacctgggggttgcctggggacctctcccacccgacccctacagagcttgagagccacagacgcctggcttctccggcctcccctcaccgcacagttctggccacagctcccgctcctgtgctggcacttctgtgctcgcagagcaggggaacaggactcagcccccatcaccgtggagccaaagtgtttgcttctccctttctgcggccttcgccagcccaggctcggctgccacccagtggcacagaaccgaggagctgccattaccccccatagggggcagtgtcttgttcctgccagcctcagtgtcttgcttctgccagctccttcccctaggagggaagggtggggtggaactgggcacatgccagcaccacttctagcttccttcgctatcccccaccccctgaccctccagctcctcctggccctctcacgtgcccacttctgctgggcctttagccctagaacctgcaggtggtgggggcggctaccaagaaggaacagaggtctctggggaggagtctgggtggtccagccctgatgattggccccacctcctgctgccccataaccctctcttcatttcggctttttcatttaccctcatttagagccatttgcagagatttagaaagatttacagtaacgaatggattcctatataaagattatttttatactttttgcagcaaaaggaaattgtaatatttgtacagtgttcaagtgaataaaaaccatgcctaaggcta

SEQ ID NO: 128843 - DNA, 639 bp, Homo sapiens
  Payload ID: 5201
  Gene Symbol: E2F4
  Gene Name: E2F transcription factor 4, p107/p130-binding
  ENST ID: ENST00000565849
  CDS Start-End: 39-284
ggcctggcctggctgaggggaggcggcgggcgggcgcgatggcggaggccgggccacaggcgccgccgcccccgggcactccaagccggcacgaaaagagcctgggactgctcaccaccaagttcgtgtcccttctgcaggaggccaaggacggcgtgcttgacctcaagctggcagctgacaccctagctgtacgccagaagcggcggatttacgacattaccaatgttttggaaggggtgtggggcctggctgcaatacccgggagattgctgacaaactgattgagctcaaggcagagatcgaggagctgcagcagcgggagcaagaactagaccagcacaaggtgtgggtgcagcagagcatccggaacgtcacagaggacgtgcagaacagctgtttggcctacgtcactcatgaggacatctgcagatgctttgctggagataccctcttggccatccgggccccatcaggcaccagcctggaggtgcccatcccagagggtctcaatgggcagaagaagtaccagattcacctgaagagtgtgagtggtcccattgaggttctgctggtgaacaaggaggcatggagctcaccccctgtggctgtgcctgtgccaccacctgaagatttgct

SEQ ID NO: 128844 - DNA, 849 bp, Homo sapiens
  Payload ID: 5201
  Gene Symbol: E2F4
  Gene Name: E2F transcription factor 4, p107/p130-binding
  ENST ID: ENST00000569573
  CDS Start-End: 21-386
ggaggcggcgggcgggcgcgatggcggaggccgggccacaggcgccgccgcccccgggcactccaagccggcacgaaaagagcctgggactgctcaccaccaagttcgtgtcccttctgcaggaggccaaggacggcgtgcttgacctcaagctggcagctgacaccctagctgtacgccagaagcggcggatttacgacattaccaatgttttggaaggtatcgggctaatcgagaaaaagtccaagaacagcatccagtggaagagataccctcttggccatccgggccccatcaggcaccagcctggaggtgcccatcccagagggtctcaatgggcagaagaagtaccagattcacctgaagagtgtgagtggtcccattgaggttctgctggtgaacaaggaggcatggagctcaccccctgtggctgtgcctgtgccaccacctgaagatttgctccagagcccatctgctgtttctacacctccacctctgcccaagcctgccctagcccagtcccaggaagcctcacgtccaaatagtcctcagctcactcccactgctgtccctggcagtgcagaagtccagggaatggctggcccagcagctgagatcacagtgagtggcggccctgggactgatagcaaggacagtggtgagctcagttcactcccactgggcccaacaacactggacacccggccactgcagtcttctgccctgctggacagcagcagcagcagcagcagcagcagcagcagcagcagcaacagtaacagcagcagttcgtccggacccaacccttctacctcctttgagcccatcaaggcagaccccacaggtggt

SEQ ID NO: 128845 - DNA, 944 bp, Homo sapiens
  Payload ID: 5201
  Gene Symbol: E2F4
  Gene Name: E2F transcription factor 4, p107/p130-binding
  ENST ID: ENST00000568839
  CDS Start-End: 22-459
gggaggcggcgggcgggcgcgatggcggaggccgggccacaggcgccgccgcccccgggcactccaagccggcacgaaaagagcctgggactgctcaccaccaagttcgtgtcccttctgcaggaggccaaggacggcgtgcttgacctcaagctggcagctgacaccctagctgtacgccagaagcggcggatttacgacattaccaatgttttggaaggtatcgggctaatcgagaaaaagtccaagaacagcatccagtggaatctgccatctgtcaccatagggcatcagccattctccttaaccctcacactttggcctacgtcactcatgaggacatctgcagatgctttgctggagataccctcttggccatccgggccccatcaggcaccagcctggaggtgcccatcccagagggtctcaatgggcagaagaagtaccagattcacctgaagagtgtgagtggtcccattgaggttctgctggtgaacaaggaggcatggagctcaccccctgtggctgtgcctgtgccaccacctgaagatttgctccagagcccatctgctgtttctacacctccacctctgcccaagcctgccctagcccagtcccaggaagcctcacgtccaaatagtcctcagctcactcccactgctgtccctggcagtgcagaagtccagggaatggctggcccagcagctgagatcacagtgagtggcggccctgggactgatagcaaggacagtggtgagctcagttcactcccactgggcccaacaacactggacacccggccactgcagtcttctgccctgctggacagcagcagcagcagcagcagcagcagcagcagcagcagcaacagtaacagcagcagttcgtccggacccaacccttctacctcctttgagcccatcaaggcagaccccacaggtggt

SEQ ID NO: 128846 - DNA, 446 bp, Homo sapiens
  Payload ID: 5201
  Gene Symbol: E2F4
  Gene Name: E2F transcription factor 4, p107/p130-binding
  ENST ID: ENST00000565226
  CDS Start-End: 1-433
aatggctggcccagcagctgagatcacagtgagtggcggccctgggactgatagcaaggacagtggtgagctcagttcactcccactgggcccaacaacactggacacccggccactgcagtcttctgccctgctggacagcagcagcagcagcagcagcagcagcagcagcagcagcaacagtaacagcagcagttcgtccggacccaacccttctacctcctttgagcccatcaaggcagaccccacaggtgttttggaactccccaaagagctgtcagaaatctttgatcccacacgagagtgcatgagctcggagctgctggaggagttgatgtcctcagaagggacatgccctgtgtggctgggacccagactgtctgacctgggggttgcctggggacctctcccacccgacccctacagagcttgagagccacagacgc

SEQ ID NO: 128847 - DNA, 5042 bp, Homo sapiens
  Payload ID: 5202
  Gene Symbol: E2F5
  Gene Name: E2F transcription factor 5, p130-binding
  ENST ID: ENST00000256117
  CDS Start-End: 1-748
gctgctgcaggaggccaaggacggcgttctggatctcaaagcggctgctgatactttggctgtgaggcaaaaaaggagaatttatgatatcaccaatgtcttagagggaattgacttgattgaaaaaaagtcaaaaaacagtatccagtggaaaggtgtaggtgctggctgtaatactaaagaagtcatagatagattaagatatcttaaagctgaaattgaagatctagaactgaaggaaagagaacttgatcagcagaagttgtggctacagcaaagcatcaaaaatgtgatggacgattccattaataatagattttcctatgtaactcatgaagacatctgtaattgctttaatggtgatacacttttggccattcaggcaccttctggtacacaactggaggtacccattccagaaatgggtcagaatggacaaaagaaataccagatcaatctaaagagtcattcaggacctatccatgtgctgcttataaataaagagtcgagttcatctaagcccgtggtttttcctgttcccccacctgatgacctcacacagccttcctcccagtccttgactccagtgactccacagaaatccagcatggcaactcaaaatctgcctgagcaacatgtctctgaaagaagccaggctctgcagcagacatcagctacagatatatcttcagcaggatctattagtggagatatcattgatgagttaatgtcttctgacggtaagtaggttaaaattttactaactcacttatcagtaatgcttctgtggaatttataagtgaaacatgatttaaaagaaatgaacatatatttgctacctgctttactatgaagattcatgaaaattctcccttaacacttacagtaagtaataggcaaccttcagaatttatttttctttgcttgcattttgagggaaaggaatccatatggggatacttctcaccttcattgaaaataaactgttagccctttccactcctgaaggatctggtccaagaagagtaaaataacttgtctaaatcaagcaactgatctgaacacctgcctttgtaaatacccctacccaggccaatttcaagctgccaatgggaagtcactgaattagtattaatattaaccatgttgtcatctaacctgaaaaattattaaatatcagttagctacaatatgctaattactttaataatttctctccttctgtaagttcttggatcagagtcctactacctaacaaataaagtagaaacctacgaagtggtagcagttaagttagcaaatgttatagtaactagagatgtactaaacatgtatgtagaagcagagaacatcagcaaactttgtaagtccagttcattcttctgtttgcaaagtggaaaacaaaacactttcattagtgttctgttttttttttttaaggcagagtctccctctgtcatccaggctggagtgtcatccaggctggagtgcagtggcatgatagctcactgcaacctccacctcctaggttcaaatgattctcctggctcagcctcccgagtagctgggatgacaggcacctgccaccacacctggctactttttgtatttttagtagagacggggtttcaccatgttggccaggctggtctcaaactcctggcctcaggtgatccacctgcctcagcctcccaaagtgttgggattacaggcatgagccactgcacctggcctcgttagtgccttttagttatattaccttagtgataagttcaaccaataaaaaatttaatttctaggccgggcacaatggctcatgcctgtaatcccagcactttgggaggccaaggcgggcgaatcacgtcaggagatcgagaccatcctggctaacatggtgaaaccccatctctataaaaaaataaaaaaaatgagccggtcgtggtggcaggcacctgtagtcccagctactcgggaggctgaggcaggagaatggcgtgaacccgggagtcgggagcttgcagtgggccgagatcgagctactgcactccagcctggacgaaacagggagactccatcttaaaaaaaaaaaaaaaaaaagaaaaaattaacttctgtttctcaatctaatatcaatattcaatgtacaaattgttactaaatgagaatatttcaaaatacacattacacaagactttaatttggaatgatgtatttgagagtattttgttaaagatcattaaccgtatgtagaaaccatctttaacactaaatttgttttttgttcgcagtgtttcctctcttaaggctttctcctaccccggcagatgactacaactttaatttagatgataacgaaggagtttgtgatctgtttgatgtccagatactaaattattagattccatggaaacttgggactgttatctacctctaactgtgtaacattttagacttcttaataacctaaatatttaaaataatgaatgtaacaccttttttagttcactgattctgaagtgttcttccctaatactttctttacttcacaaaacttcaaccataaaaacaaagggctctgattgctttaggggataagtgatttaatatccacaaacgtccccactcccaaaagtaactatattctggatttcaacttttcttctaattgtgaatccttctgttttttcttcttaaggaggaaagttaaaggacactacaggtcatcaaaaacaagttggccaaggactcattacttgtcttatatttttactgccactaaactgcctgtatttctgtatgtccttctatccaaacagacgttcactgccacttgtaaagtgaaggatgtaaacgaggatatataactgtttcagtgaacagattttgtgaagtgccttctgttttagcactttaagtttatcacattttgttgacttctgacattccactttcctaggttataggaaagatctgtttatgtagtttgtttttaaaatgtgccaatgcctgtacattaacaagatttttaaaaataaaattgtataaaacattcaatttattggtctttgtggagaattagatgcatcaccagtatattacaacagagccattaatcttgtagcttcatcaacattaactggtttgctttcatgacgctgctgaggaatctgaaaggagaaagtattatatttaaaaacacagacaacaatagcagacaaatgacttatataagctgttattcaatttaatttttctagtcatatctttggaagtagaacaatctgtatattctgacaatgttttagagtctgaatatgctatttatactatagagcctagtactagagagccaagtactaaaaattacactcaacttacaggctttgaaaacttgggagtttaatttattagcctcaatttgttagccataaaaaaaagcaaatgatttctgcttaccagttctttctgcagaggttcaagtgaaatgctttttgcgaaatgtgcaagttccttttgtacatttacaaaagctttatttactctgttaactttttcctcattcataatgtttatcttttaaaaagaaaaaaagcattaatctatgatctcataaccattaaagataagatatattcaaccttaacctgttaaatctaaaatctaaaaactcttaccaacaaattagggataattcactcaaaaattcttatagtcttattgggaaattacagacaaaaagttttggtttttaaaaaatgggatttatgtggctatgcctcacacttatggttcagaaggctaaaatatgtgactgtgatattgtgattcataataagatatatatatatatttggtctttgtcctcatttcctgtcatacagctttttaaatcattgtattaagagggataagagtgtcttttgaatgctaataagatggctggtagctgggagtctctagatagcttcaggaggagggctagtcagataaaaacacagggttagaggattaggactttctgctccagaggagtggggataaaggttaagcccatcactaatggccaatgatttaatgaattatgcctacataatgaagcctccggaaatctacaaaagaactgggttcaaagagcttctggatagctgaacacatgggggctcctagaaagtggcatgcccagagagagcagggaagctccatgccccttcccatgtaccttgccctctgcacctcttccatctggctacgcatctgtcccctttgtaatatcctttataataaactggtaaaagtattttcctgggttctgtgagctgctctagcaaattaatcaaacccaaggagggggtcatgggaacacttatttataactggttggtgagaagcacaggtaaaacatctgggacttgtgattgtcactggaagttggggagaggcttaggactcaactctcaacctgtggaatctgacgctatctccaggtcagcagtgtcagattttaattaaaggacacccagctgctgcctgctgaagattcatctgcagaattgttaggtgtgggggaactgccccacaaatctagtattggaagtgttgagtgaccgtatgagagtgagagtaagagaaactgagttgcttttttcctgtatccttacagtgaccaaaatctttctaggctacagtgctgtcatcccgcatctatacaagaaacctggatcaaatacttttagtcccttctaacataacaatacgtctctgaatccttcctggaccttcttgtcttaatggaagacccctgatgacagcttccctcgcagtcctcctcttgagtttaacagaggtttttgtttgaattgcagatgtcttcaaagatacaagaattactgaggagaaaaagaatgggtgctcactgacatcccatgtcttgcctctattaatacattcttacatttgagtttagagataagaactgtttcccatactatggtttttaaatgagttctatggttcagtaaaactattaaattgaagcttcacac

SEQ ID NO: 128848 - DNA, 1728 bp, Homo sapiens
  Payload ID: 5202
  Gene Symbol: E2F5
  Gene Name: E2F transcription factor 5, p130-binding
  Uniprot ID: Q15329
  ENST ID: ENST00000416274
  CDS Start-End: 35-1075
cgcgggggcccgaccaccgcggggccgggacgcgatggcggcggcagagcccgcgagctcgggccagcaggcgccggcagggcaggggcagggccagcggccgccgccgcagcctccgcaggcgcaagccccgcagccgcccccgccgccgcagctcgggggcgccgggggcggcagcagcaggcacgagaagagcctggggctgctcactaccaagttcgtgtcgctgctgcaggaggccaaggacggcgttctggatctcaaagcggctgctgatactttggctgtgaggcaaaaaaggagaatttatgatatcaccaatgtcttagagggaattgacttgattgaaaaaaagtcaaaaaacagtatccagtggaaaggtgtaggtgctggctgtaatactaaagaagtcatagatagattaagatatcttaaagctgaaattgaagatctagaactgaaggaaagagaacttgatcagcagaagttgtggctacagcaaagcatcaaaaatgtgatggacgattccattaataatagattttcctatgtaactcatgaagacatctgtaattgctttaatggtgatacacttttggccattcaggcaccttctggtacacaactggaggtacccattccagaaatgggtcagaatggacaaaagaaataccagatcaatctaaagagtcattcaggacctatccatgtgctgcttataaataaagagtcgagttcatctaagcccgtggtttttcctgttcccccacctgatgacctcacacagccttcctcccagtccttgactccagtgactccacagaaatccagcatggcaactcaaaatctgcctgagcaacatgtctctgaaagaagccaggctctgcagcagacatcagctacagatatatcttcagcaggatctattagtggagatatcattgatgagttaatgtcttctgacgtgtttcctctcttaaggctttctcctaccccggcagatgactacaactttaatttagatgataacgaaggagtttgtgatctgtttgatgtccagatactaaattattagattccatggaaacttgggactgttatctacctctaactgtgtaacattttagacttcttaataacctaaatatttaaaataatgaatgtaacaccttttttagttcactgattctgaagtgttcttccctaatactttctttacttcacaaaacttcaaccataaaaacaaagggctctgattgctttaggggataagtgatttaatatccacaaacgtccccactcccaaaagtaactatattctggatttcaacttttcttctaattgtgaatccttctgttttttcttcttaaggaggaaagttaaaggacactacaggtcatcaaaaacaagttggccaaggactcattacttgtcttatatttttactgccactaaactgcctgtatttctgtatgtccttctatccaaacagacgttcactgccacttgtaaagtgaaggatgtaaacgaggatatataactgtttcagtgaacagattttgtgaagtgccttctgttttagcactttaagtttatcacattttgttgacttctgacattccactttcctaggttataggaaagatctgtttatgtagtttgtttttaaaatgtgccaatgcctgtacattaacaagatttttaaaaataaaattgtataaaacatt

SEQ ID NO: 128849 - DNA, 1890 bp, Homo sapiens
  Payload ID: 5202
  Gene Symbol: E2F5
  Gene Name: E2F transcription factor 5, p130-binding
  Uniprot ID: Q15329
  ENST ID: ENST00000418930
  CDS Start-End: 197-1234
gcggaggcccggcgtgacaagcggcccagactcccgtgggcgccgcacacctgttgtttgcagcagccagcgacccgcactaccgctctcggcgggcggggaagcggccgcagcggagccgacccggcaggtggccgcgggcggggccggcgagcgaaagtgcgcgggggcccgaccaccgcggggccgggacgcgatggcggcggcagagcccgcgagctcgggccagcaggcgccggcagggcaggggcagggccagcggccgccgccgcagcctccgcaggcgcaagccccgcagccgcccccgccgccgcagctcgggggcgccgggggcggcagcagcaggcacgagaagagcctggggctgctcactaccaagttcgtgtcgctgctgcaggaggccaaggacggcgttctggatctcaaagcggctgctgatactttggctgtgaggcaaaaaaggagaatttatgatatcaccaatgtcttagagggaattgacttgattgaaaaaaagtcaaaaaacagtatccagtggaaaggtgtaggtgctggctgtaatactaaagaagtcatagatagattaagatatcttaaagctgaaattgaagatctagaactgaaggaaagagaacttgatcagcagaagttgtggctacagcaaagcatcaaaaatgtgatggacgattccattaataatagattttcctatgtaactcatgaagacatctgtaattgctttaatggtgatacacttttggccattcaggcaccttctggtacacaactggaggtacccattccagaaatgggtcagaatggacaaaagaaataccagatcaatctaaagagtcattcaggacctatccatgtgctgcttataaataaagagtcgagttcatctaagcccgtggtttttcctgttcccccacctgatgacctcacacagccttcctcccagtccttgactccagtgactccacagaaatccagcatggcaactcaaaatctgcctgagcaacatgtctctgaaagaagccaggctctgcagcagacatcagctacagatatatcttcaggatctattagtggagatatcattgatgagttaatgtcttctgacgtgtttcctctcttaaggctttctcctaccccggcagatgactacaactttaatttagatgataacgaaggagtttgtgatctgtttgatgtccagatactaaattattagattccatggaaacttgggactgttatctacctctaactgtgtaacattttagacttcttaataacctaaatatttaaaataatgaatgtaacaccttttttagttcactgattctgaagtgttcttccctaatactttctttacttcacaaaacttcaaccataaaaacaaagggctctgattgctttaggggataagtgatttaatatccacaaacgtccccactcccaaaagtaactatattctggatttcaacttttcttctaattgtgaatccttctgttttttcttcttaaggaggaaagttaaaggacactacaggtcatcaaaaacaagttggccaaggactcattacttgtcttatatttttactgccactaaactgcctgtatttctgtatgtccttctatccaaacagacgttcactgccacttgtaaagtgaaggatgtaaacgaggatatataactgtttcagtgaacagattttgtgaagtgccttctgttttagcactttaagtttatcacattttgttgacttctgacattccactttcctaggttataggaaagatctgtttatgtagtttgtttttaaaatgtgccaatgcctgtacattaacaagatttttaaaaataaaattgtataaaacattcaa

SEQ ID NO: 128850 - DNA, 1551 bp, Homo sapiens
  Payload ID: 5202
  Gene Symbol: E2F5
  Gene Name: E2F transcription factor 5, p130-binding
  ENST ID: ENST00000521429
  CDS Start-End: 402-923
aagcaagcctcttataggcagcataagttgagtgtttttaaaaatccatttaactactttgcctttttattggagaacttaatccacttacgttcagggttatcattcataggctgctgatactttggctgtgaggcaaaaaaggagaatttatgatatcaccaatgtcttagagggaattgacttgattgaaaaaaagtcaaaaaacagtatccagtggaaaggtgtaggtgctggctgtaatactaaagaagtcatagatagattaagatatcttaaagctgaaattgaagatctagaactgaaggaaagagaacttgatcagcagaagttgtggctacagcaaagcatcaaaaatgtgatggacgattccattaataatagattttcctatgtaactcatgaagacatctgtaattgctttaatggtaagtgatacacttttggccattcaggcaccttctggtacacaactggaggtacccattccagaaatgggtcagaatggacaaaagaaataccagatcaatctaaagagtcattcaggacctatccatgtgctgcttataaataaagagtcgagttcatctaagcccgtggtttttcctgttcccccacctgatgacctcacacagccttcctcccagtccttgactccagtgactccacagaaatccagcatggcaactcaaaatctgcctgagcaacatgtctctgaaagaagccaggctctgcagcagacatcagctacagatatatcttcagcaggatctattagtggagatatcattgatgagttaatgtcttctgacgtgtttcctctcttaaggctttctcctaccccggcagatgactacaactttaatttagatgataacgaaggagtttgtgatctgtttgatgtccagatactaaattattagattccatggaaacttgggactgttatctacctctaactgtgtaacattttagacttcttaataacctaaatatttaaaataatgaatgtaacaccttttttagttcactgattctgaagtgttcttccctaatactttctttacttcacaaaacttcaaccataaaaacaaagggctctgattgctttaggggataagtgatttaatatccacaaacgtccccactcccaaaagtaactatattctggatttcaacttttcttctaattgtgaatccttctgttttttcttcttaaggaggaaagttaaaggacactacaggtcatcaaaaacaagttggccaaggactcattacttgtcttatatttttactgccactaaactgcctgtatttctgtatgtccttctatccaaacagacgttcactgccacttgtaaagtgaaggatgtaaacgaggatatataactgtttcagtgaacagattttgtgaagtgccttctgttttagcactttaagtttatcacattttgttgacttctgacattccactttcctaggttataggaaagatctgtttatgtagtttgtttttaaaatgtgccaatgcctgtacattaacaagatttt

SEQ ID NO: 128851 - DNA, 1094 bp, Homo sapiens
  Payload ID: 5202
  Gene Symbol: E2F5
  Gene Name: E2F transcription factor 5, p130-binding
  Uniprot ID: Q15329
  ENST ID: ENST00000517476
  CDS Start-End: 362-919
aagcaagcctcttataggcagcataagttgagtgtttttaaaaatccatttaactactttgcctttttattggagaacttaatccacttacgttcagggttatcattcataggctgctgatactttggctgtgaggcaaaaaaggagaatttatgatatcaccaatgtcttagagggaattgacttgattgaaaaaaagtcaaaaaacagtatccagtggaaaggtgtaggtgctggctgtaatactaaagaagtcatagatagattaagatatcttaaagctgaaattgaagatctagaactgaaggaaagagaacttgatcagcagaagttgtggctacagcaaagcatcaaaaatgtgatggacgattccattaataatagattttcctatgtaactcatgaagacatctgtaattgctttaatggtgatacacttttggccattcaggcaccttctggtacacaactggaggtacccattccagaaatgggtcagaatggacaaaagaaataccagatcaatctaaagagtcattcaggacctatccatgtgctgcttataaataaagagtcgagttcatctaagcccgtggtttttcctgttcccccacctgatgacctcacacagccttcctcccagtccttgactccagtgactccacagaaatccagcatggcaactcaaaatctgcctgagcaacatgtctctgaaagaagccaggctctgcagcagacatcagctacagatatatcttcagcaggatctattagtggagatatcattgatgagttaatgtcttctgacgtgtttcctctcttaaggctttctcctaccccggcagatgactacaactttaatttagatgataacgaaggagtttgtgatctgtttgatgtccagatactaaattattagattccatggaaacttgggactgttatctacctctaactgtgtaacattttagacttcttaataacctaaatatttaaaataatgaatgtaacaccttttttagttcactgattctgaagtgttcttccctaatactttctttacttcacaaaacttcaaccataaaaacaaaggg

SEQ ID NO: 128852 - DNA, 674 bp, Homo sapiens
  Payload ID: 5202
  Gene Symbol: E2F5
  Gene Name: E2F transcription factor 5, p130-binding
  ENST ID: ENST00000518234
  CDS Start-End: 1-549
tcctatgacagtacattttcctatgtaactcatgaagacatctgtaattgctttaatggtgatacacttttggccattcaggcaccttctggtacacaactggaggtacccattccagaaatgggtcagaatggacaaaagaaataccagatcaatctaaagagtcattcaggacctatccatgtgctgcttataaataaagagtcgagttcatctaagcccgtggtttttcctgttcccccacctgatgacctcacacagccttcctcccagtccttgactccagtgactccacagaaatccagcatggcaactcaaaatctgcctgagcaacatgtctctgaaagaagccaggctctgcagcagacatcagctacagatatatcttcagcaggatctattagtggagatatcattgatgagttaatgtcttctgacgtgtttcctctcttaaggctttctcctaccccggcagatgactacaactttaatttagatgataacgaaggagtttgtgatctgtttgatgtccagatactaaattattagattccatggaaacttgggactgttatctacctctaactgttgaccaaaatctttctaggctacagtgctgtcatcccgcatctatacaagaaacctggatcaaatacttttagtcccttctaaca

SEQ ID NO: 128853 - DNA, 604 bp, Homo sapiens
  Payload ID: 5202
  Gene Symbol: E2F5
  Gene Name: E2F transcription factor 5, p130-binding
  ENST ID: ENST00000520225
  CDS Start-End: 1-391
aaataaagagtcgagttcatctaagcccgtggtttttcctgttcccccacctgatgacctcacacagccttcctcccagtccttgactccagtgactccacagaaatccagcatggcaactcaaaatctgcctgagcaacatgtctctgaaagaagccaggctctgcagcagacatcagctacagatatatcttcagcaggatctattagtggagatatcattgatgagttaatgtcttctgacggaggaaagttaaaggacactacaggtcatcaaaaacaagttggccaaggactcattacttgtcttatatttttactgccactaaactgcctgtatttctgtatgtccttctatccaaacagacgttcactgccacttgtaaagtgaaggatgtaaacgaggatatataactgtttcagtgaacagattttgtgaagtgccttctgttttagcactttaagtttatcacattttgttgacttctgacattccactttcctaggttataggaaagatctgtttatgtagtttgtttttaaaatgtgccaatgcctgtacattaacaagatttttaaaaataaaattgtataaaacattcaa

SEQ ID NO: 128854 - DNA, 3317 bp, Homo sapiens
  Payload ID: 5203
  Gene Symbol: E2F6
  Gene Name: E2F transcription factor 6
  Uniprot ID: O75461
  ENST ID: ENST00000307236
  CDS Start-End: 466-1215
atgcgcagaggggggcggtgtactgcgcatgcgggaagatggcgggccgggcgacttgagatccgcgggtctccctcctctttttccgtctgcgtcgggagctcccgggcacgtgaggccgtgccgcgtttactggcgggcgggacggcctagccgggcggcgcctcggaggaagccgcggaccccttaggtgctgggcccttggaaatcggcgcgtggggggcggtgctcgagctgagcgcgagagggcgggagagctcgtggggtgcgaggggagcaggacgcccggccgggcagcatgagtcagcagcggccggcgaggaagttacccagtctcctcctggacccgacggaggagacggttcgccgtcggtgccgagaccccatcaacgtggagggcctgctgttgtttattcaggcaaatctggcttgctgggctaggctcagctgagggctgccttcgccatgaatccttctccatcaaaaataaggattaatttagaagataatgtacaatatgtgtccatgagaaaagctctaaaagtgaagagacctcgttttgatgtatcgctggtttatttaactcgaaaatttatggatcttgtcagatctgctcccgggggtattcttgacttaaacaaggttgcaacgaaactgggagtccgaaagcggagagtgtatgacatcaccaatgtcttagatggaatcgacctcgttgaaaagaaatccaagaaccatattagatggataggatctgatcttagcaattttggagcagttccccaacaaaagaagctacaggaggaactttctgacttatcagcaatggaagatgctttggatgagttaattaaggattgtgctcagcagctgtttgagttaacagatgacaaagaaaatgaaagactagcatatgtgacctatcaagacattcatagcattcaggccttccatgaacagatcgtcattgcagttaaagctccagcagaaaccagattggatgttccagctcccagagaagactctatcacagtgcacataaggagcaccaacggacctatcgatgtctatttgtgtgaagtggagcagggtcagaccagtaacaaaaggtctgaaggtgtcgggacctcttcatctgagagcactcatccagaaggccctgaggaagaagaaaatcctcagcaaagtgaagaattgcttgaagtaagcaactgatggcatttgagaatttatgtatcactgagttttttgggaatatcttcgtggagaattacgcatcaaatttgattctcagagcaataaattatccatgaagtgctctcgttctcagtagcggcatcatggccagtagtgtctttgaggagttcaccacttagattactgagtaattgtggtttccacatttgaaaacaactccttttataattattcactgctttttgtcagtgaaatagacatcttgcctcctgaagtagcttcatcacagagtgtcatgaagacagacagtcaggctgaaatggacagttctttgtggactctacccttcccttcaaggagtatgtcatatatcacaaaagaaattgccttacactggttcatgtttgcagttactgttgtacattgcatagatgtacacacgaatttaaatgtgatgtctttgtatatatctgtataatgttgagattacttacgaaatatgtctgagtgacacttttcacccttgtacagccaaaataatgtatatatggaaagtgacagacaaattctctaatctctttggtacctataacttattagaatcctctggatgagggttagaagagactttttccaaacttctacatgtagaagtatcataaatgtgctacacatttatgtttgtggatttaattaaagtattttaatatggttttcagtgctaaaattggagtcagatacttcttggttttaagctgtctacctaattgctgtctcccagcagactggtggcatgcccagtggctttgggggcaaggatagaaatgccatcaggaaatagctgaattcattgtgaaacatgaattcagtcatggtgataattggaaactcctttcaggtttttgcaagtagattttgtaatgtttgtgtatgcagccttgctgttgagtcagtccaaggggttttacttaggacaagttgtaccttgccctctctccagctctgctcccacattttcacatacctagctgtttctacctcattgggtaagtcatttaccactctgtgcctcagtttactctgtagtttaccattagactgtgagctccttgagggactttgtcataatcactgttacatcccagtgcctcacaccatgcctggcccttaagaagtgctcaataaatgtctgaacaaataagtgagtggagtgagtgaattgtaagatcagaataataatatttggtttgtctatcgtacaagattcctgtatcgtttgaatattgcttttaaagaaatatttgaagcgacttcaaattcagactgtgtttaaaaagatttaaaatcggaatccaaaatcaaagtattaaaaaataatgctgagtgtttaggattcacatacctctgagctctggtggcttttgccagtcctgtccctctgctgagcaccagcccttcctgcagcagtcctgccggtgtgtttctgtgcacctggggatgaagtgtgctcctcccccagcggttagcctcaatgcttttcctccctctgttttattatttgaaattagccaaagaaaagctgcagggggcactgctgatcatcactggactggtgggtcgtactgtttgacagaatagggaatacaggaggaggagcaagcctagggtaaaacttaggtttgggacatgcttgatgaaagcaagagttgagcaggttgttgtgtgtatgtaggtcaggtgctcagcggaaaagtctgagctgtgtagtacgtcaggcagatgtcagtttagatgcgatagtttaagccacaagagtaggagaggtcatctaaagagtacagcaggcctaagggcatctatatttaaggagaaatacagaagaagtctcctgagaaggaataatggggcgggtggggagggagaaggcagtgtcccaaaaaccaacaaaggttttaccaaaggtaataccatcatttctgagcagcagttccttaacttgtgaatgtggcaaatgttctcctttacaaattgttctgaaggtaaaatgagatcatgtaaacgaaaatcctttgtaaattacagatgtgtgttataaatgaagtatctctcgagtcactcca

SEQ ID NO: 128855 - DNA, 3218 bp, Homo sapiens
  Payload ID: 5203
  Gene Symbol: E2F6
  Gene Name: E2F transcription factor 6
  Uniprot ID: O75461
  ENST ID: ENST00000381525
  CDS Start-End: 271-1116
atgcgggaagatggcgggccgggcgacttgagatccgcgggtctccctcctctttttccgtctgcgtcgggagctcccgggcacgtgaggccgtgccgcgtttactggcgggcgggacggcctagccgggcggcgcctcggaggaagccgcggaccccttaggtgctgggcccttggaaatcggcgcgtggggggcggtgctcgagctgagcgcgagagggcgggagagctcgtggggtgcgaggggagcaggacgcccggccgggcagcatgagtcagcagcggccggcgaggaagttacccagtctcctcctggacccgacggaggagacggttcgccgtcggtgccgagaccccatcaacgtggagggcctgctgccatcaaaaataaggattaatttagaagataatgtacaatatgtgtccatgagaaaagctctaaaagtgaagagacctcgttttgatgtatcgctggtttatttaactcgaaaatttatggatcttgtcagatctgctcccgggggtattcttgacttaaacaaggttgcaacgaaactgggagtccgaaagcggagagtgtatgacatcaccaatgtcttagatggaatcgacctcgttgaaaagaaatccaagaaccatattagatggataggatctgatcttagcaattttggagcagttccccaacaaaagaagctacaggaggaactttctgacttatcagcaatggaagatgctttggatgagttaattaaggattgtgctcagcagctgtttgagttaacagatgacaaagaaaatgaaagactagcatatgtgacctatcaagacattcatagcattcaggccttccatgaacagatcgtcattgcagttaaagctccagcagaaaccagattggatgttccagctcccagagaagactctatcacagtgcacataaggagcaccaacggacctatcgatgtctatttgtgtgaagtggagcagggtcagaccagtaacaaaaggtctgaaggtgtcgggacctcttcatctgagagcactcatccagaaggccctgaggaagaagaaaatcctcagcaaagtgaagaattgcttgaagtaagcaactgatggcatttgagaatttatgtatcactgagttttttgggaatatcttcgtggagaattacgcatcaaatttgattctcagagcaataaattatccatgaagtgctctcgttctcagtagcggcatcatggccagtagtgtctttgaggagttcaccacttagattactgagtaattgtggtttccacatttgaaaacaactccttttataattattcactgctttttgtcagtgaaatagacatcttgcctcctgaagtagcttcatcacagagtgtcatgaagacagacagtcaggctgaaatggacagttctttgtggactctacccttcccttcaaggagtatgtcatatatcacaaaagaaattgccttacactggttcatgtttgcagttactgttgtacattgcatagatgtacacacgaatttaaatgtgatgtctttgtatatatctgtataatgttgagattacttacgaaatatgtctgagtgacacttttcacccttgtacagccaaaataatgtatatatggaaagtgacagacaaattctctaatctctttggtacctataacttattagaatcctctggatgagggttagaagagactttttccaaacttctacatgtagaagtatcataaatgtgctacacatttatgtttgtggatttaattaaagtattttaatatggttttcagtgctaaaattggagtcagatacttcttggttttaagctgtctacctaattgctgtctcccagcagactggtggcatgcccagtggctttgggggcaaggatagaaatgccatcaggaaatagctgaattcattgtgaaacatgaattcagtcatggtgataattggaaactcctttcaggtttttgcaagtagattttgtaatgtttgtgtatgcagccttgctgttgagtcagtccaaggggttttacttaggacaagttgtaccttgccctctctccagctctgctcccacattttcacatacctagctgtttctacctcattgggtaagtcatttaccactctgtgcctcagtttactctgtagtttaccattagactgtgagctccttgagggactttgtcataatcactgttacatcccagtgcctcacaccatgcctggcccttaagaagtgctcaataaatgtctgaacaaataagtgagtggagtgagtgaattgtaagatcagaataataatatttggtttgtctatcgtacaagattcctgtatcgtttgaatattgcttttaaagaaatatttgaagcgacttcaaattcagactgtgtttaaaaagatttaaaatcggaatccaaaatcaaagtattaaaaaataatgctgagtgtttaggattcacatacctctgagctctggtggcttttgccagtcctgtccctctgctgagcaccagcccttcctgcagcagtcctgccggtgtgtttctgtgcacctggggatgaagtgtgctcctcccccagcggttagcctcaatgcttttcctccctctgttttattatttgaaattagccaaagaaaagctgcagggggcactgctgatcatcactggactggtgggtcgtactgtttgacagaatagggaatacaggaggaggagcaagcctagggtaaaacttaggtttgggacatgcttgatgaaagcaagagttgagcaggttgttgtgtgtatgtaggtcaggtgctcagcggaaaagtctgagctgtgtagtacgtcaggcagatgtcagtttagatgcgatagtttaagccacaagagtaggagaggtcatctaaagagtacagcaggcctaagggcatctatatttaaggagaaatacagaagaagtctcctgagaaggaataatggggcgggtggggagggagaaggcagtgtcccaaaaaccaacaaaggttttaccaaaggtaataccatcatttctgagcagcagttccttaacttgtgaatgtggcaaatgttctcctttacaaattgttctgaaggtaaaatgagatcatgtaaacgaaaatcctttgtaaattacagatgtgtgttataaatgaagtatctctcgagtcactcca

SEQ ID NO: 128856 - DNA, 907 bp, Homo sapiens
  Payload ID: 5203
  Gene Symbol: E2F6
  Gene Name: E2F transcription factor 6
  ENST ID: ENST00000421117
  CDS Start-End: 293-409
agaggggggcggtgtactgcgcatgcgggaagatggcgggccgggcgacttgagatccgcgggtctccctcctctttttccgtctgcgtcgggagctcccgggcacgtgaggccgtgccgcgtttactggcgggcgggacggcctagccgggcggcgcctcggaggaagccgcggaccccttaggtgctgggcccttggaaatcggcgcgtggggggcggtgctcgagctgagcgcgagagggcgggagagctcgtggggtgcgaggggagcaggacgcccggccgggcagcatgagtcagcagcggccggcgaggaagttacccagtctcctcctggacccgacggaggagacggttcgccgtcggtgccgagaccccatcaacgtggagggcctgctgaagctctaaaagtgaagagacctcgttttgatgtatcgctggtttatttaactcgaaaatttatggatcttgtcagatctgctcccgggggtattcttgacttaaacaaggttgcaacgaaactgggagtccgaaagcggagagtgtatgacatcaccaatgtcttagatggaatcgacctcgttgaaaagaaatccaagaaccatattagatggataggatctgatcttagcaattttggagcagttccccaacaaaagaagctacaggaggaactttctgacttatcagcaatggaagatgctttggatgagttaattaaggattgtgctcagcagctgtttgagttaacagatgacaaagaaaatgaaagactagcatatgtgacctatcaagacattcatagcattcaggccttccatgaacagatcgtcattgcagttaaagctccagcagaaaccagattggatgttccagctcccagagaagactctatcacagtgcaca

SEQ ID NO: 128857 - DNA, 2227 bp, Homo sapiens
  Payload ID: 5203
  Gene Symbol: E2F6
  Gene Name: E2F transcription factor 6
  ENST ID: ENST00000455198
  CDS Start-End: 1-153
atgagtcagcagcggccggcgaggaagttacccagtctcctcctggacccgacggaggagacggttcgccgtcggtgccgagaccccatcaacgtggagggcctgctgttgtttattcaggcaaatctggcttgctgggctaggctcagctgagggctgccttcgccatgaatccttctccatcaaaaataaggattaatttagaagataatgtacaatatgtgtccatgagaatgtaggaatgggctccagagagaagacatttatattatgaaatatgtacctttgttcctgaagtaaccgccagtggtctttaaactaaatgtgacattgtggaggttctgagtaaggacatttctgactgaagaagctctaaaagtgaagagacctcgttttgatgtatcgctggtttatttaactcgaaaatttatggatcttgtcagatctgctcccgggggtattcttgacttaaacaaggttgcaacgaaactgggagtccgaaagcggagagtgtatgacatcaccaatgtcttagatggaatcgacctcgttgaaaagaaatccaagaaccatattagatggataggatctgatcttagcaattttggagcagttccccaacaaaagaagctacaggaggaactttctgacttatcagcaatggaagatgctttggatgagttaattaaggattgtgctcagcagctgtttgagttaacagatgacaaagaaaatgaaagactagcatatgtgacctatcaagacattcatagcattcaggccttccatgaacagatcgtcattgcagttaaagctccagcagaaaccagattggatgttccagctcccagagaagactctatcacagtgcacataaggagcaccaacggacctatcgatgtctatttgtgtgaagtggagcagggtcagaccagtaacaaaaggtctgaaggtgtcgggacctcttcatctgagagcactcatccagaaggccctgaggaagaagaaaatcctcagcaaagtgaagaattgcttgaagtaagcaactgatggcatttgagaatttatgtatcactgagttttttgggaatatcttcgtggagaattacgcatcaaatttgattctcagagcaataaattatccatgaagtgctctcgttctcagtagcggcatcatggccagtagtgtctttgaggagttcaccacttagattactgagtaattgtggtttccacatttgaaaacaactccttttataattattcactgctttttgtcagtgaaatagacatcttgcctcctgaagtagcttcatcacagagtgtcatgaagacagacagtcaggctgaaatggacagttctttgtggactctacccttcccttcaaggagtatgtcatatatcacaaaagaaattgccttacactggttcatgtttgcagttactgttgtacattgcatagatgtacacacgaatttaaatgtgatgtctttgtatatatctgtataatgttgagattacttacgaaatatgtctgagtgacacttttcacccttgtacagccaaaataatgtatatatggaaagtgacagacaaattctctaatctctttggtacctataacttattagaatcctctggatgagggttagaagagactttttccaaacttctacatgtagaagtatcataaatgtgctacacatttatgtttgtggatttaattaaagtattttaatatggttttcagtgctaaaattggagtcagatacttcttggttttaagctgtctacctaattgctgtctcccagcagactggtggcatgcccagtggctttgggggcaaggatagaaatgccatcaggaaatagctgaattcattgtgaaacatgaattcagtcatggtgataattggaaactcctttcaggtttttgcaagtagattttgtaatgtttgtgtatgcagccttgctgttgagtcagtccaaggggttttacttaggacaagttgtaccttgccctctctccagctctgctcccacattttcacatacctagctgtttctacctcattgggtaagtcatttaccactctgtgcctcagtttactctgtagtttaccattagactgtgagctccttgagggactttgtcataatcactgttacatcccagtgcctcacaccatgcctggcccttaagaagtgctcaataaatgtctgaac

SEQ ID NO: 128858 - DNA, 1253 bp, Homo sapiens
  Payload ID: 5203
  Gene Symbol: E2F6
  Gene Name: E2F transcription factor 6
  ENST ID: ENST00000437573
  CDS Start-End: 275-442
gcgcatgcgggaagatggcgggccgggcgacttgagatccgcgggtctccctcctctttttccgtctgcgtcgggagctcccgggcacgtgaggccgtgccgcgtttactggcgggcgggacggcctagccgggcggcgcctcggaggaagccgcggaccccttaggtgctgggcccttggaaatcggcgcgtggggggcggtgctcgagctgagcgcgagagggcgggagagctcgtggggtgcgaggggagcaggacgcccggccgggcagcatgagtcagcagcggccggcgaggaagttacccagtctcctcctggacccgacggaggagacggttcgccgtcggtgccgagaccccatcaacgtggagggcctgctgccatcaaaaataaggattaatttagaagataatgtacaatatgtgtccatgagaatgtaggaatgggctccagagagaagacatttatattatgaaatatgtacctttgttcctgaagtaaccgccagtggtctttaaactaaatgtgacattgtggaggttctgagtaaggacatttctgactgaagaagctctaaaagtgaagagacctcgttttgatgtatcgctggtttatttaactcgaaaatttatggatcttgtcagatctgctcccgggggtattcttgacttaaacaaggttgcaacgaaactgggagtccgaaagcggagagtgtatgacatcaccaatgtcttagatggaatcgacctcgttgaaaagaaatccaagaaccatattagatggataggatctgatcttagcaattttggagcagttccccaacaaaagaagctacaggaggaactttctgacttatcagcaatggaagatgctttggatgagttaattaaggattgtgctcagcagctgtttgagttaacagatgacaaagaaaatgaaagactagcatatgtgacctatcaagacattcatagcattcaggccttccatgaacagatcgtcattgcagttaaagctccagcagaaaccagattggatgttccagctcccagagaagactctatcacagtgcacataaggagcaccaacggacctatcgatgtctatttgtgtgaagtggagcagggtcagaccagtaacaaaaggtctgaaggtgtcgggacctcttcatctgagagcactcatccagaaggccctgaggaagaagaaaatcctcagcaaagtgaagaattgcttgaagtaagcaactga

SEQ ID NO: 128859 - DNA, 3139 bp, Homo sapiens
  Payload ID: 5203
  Gene Symbol: E2F6
  Gene Name: E2F transcription factor 6
  ENST ID: ENST00000428221
  CDS Start-End: 268-459
cgggaagatggcgggccgggcgacttgagatccgcgggtctccctcctctttttccgtctgcgtcgggagctcccgggcacgtgaggccgtgccgcgtttactggcgggcgggacggcctagccgggcggcgcctcggaggaagccgcggaccccttaggtgctgggcccttggaaatcggcgcgtggggggcggtgctcgagctgagcgcgagagggcgggagagctcgtggggtgcgaggggagcaggacgcccggccgggcagcatgagtcagcagcggccggcgaggaagttacccagtctcctcctggacccgacggaggagacggttcgccgtcggtgccgagaccccatcaacgtggagggcctgctgccatcaaaaataaggattaatttagaagataatgtacaatatgtgtccatgagaaatctgctcccgggggtattcttgacttaaacaaggttgcaacgaaactgggagtccgaaagcggagagtgtatgacatcaccaatgtcttagatggaatcgacctcgttgaaaagaaatccaagaaccatattagatggataggatctgatcttagcaattttggagcagttccccaacaaaagaagctacaggaggaactttctgacttatcagcaatggaagatgctttggatgagttaattaaggattgtgctcagcagctgtttgagttaacagatgacaaagaaaatgaaagactagcatatgtgacctatcaagacattcatagcattcaggccttccatgaacagatcgtcattgcagttaaagctccagcagaaaccagattggatgttccagctcccagagaagactctatcacagtgcacataaggagcaccaacggacctatcgatgtctatttgtgtgaagtggagcagggtcagaccagtaacaaaaggtctgaaggtgtcgggacctcttcatctgagagcactcatccagaaggccctgaggaagaagaaaatcctcagcaaagtgaagaattgcttgaagtaagcaactgatggcatttgagaatttatgtatcactgagttttttgggaatatcttcgtggagaattacgcatcaaatttgattctcagagcaataaattatccatgaagtgctctcgttctcagtagcggcatcatggccagtagtgtctttgaggagttcaccacttagattactgagtaattgtggtttccacatttgaaaacaactccttttataattattcactgctttttgtcagtgaaatagacatcttgcctcctgaagtagcttcatcacagagtgtcatgaagacagacagtcaggctgaaatggacagttctttgtggactctacccttcccttcaaggagtatgtcatatatcacaaaagaaattgccttacactggttcatgtttgcagttactgttgtacattgcatagatgtacacacgaatttaaatgtgatgtctttgtatatatctgtataatgttgagattacttacgaaatatgtctgagtgacacttttcacccttgtacagccaaaataatgtatatatggaaagtgacagacaaattctctaatctctttggtacctataacttattagaatcctctggatgagggttagaagagactttttccaaacttctacatgtagaagtatcataaatgtgctacacatttatgtttgtggatttaattaaagtattttaatatggttttcagtgctaaaattggagtcagatacttcttggttttaagctgtctacctaattgctgtctcccagcagactggtggcatgcccagtggctttgggggcaaggatagaaatgccatcaggaaatagctgaattcattgtgaaacatgaattcagtcatggtgataattggaaactcctttcaggtttttgcaagtagattttgtaatgtttgtgtatgcagccttgctgttgagtcagtccaaggggttttacttaggacaagttgtaccttgccctctctccagctctgctcccacattttcacatacctagctgtttctacctcattgggtaagtcatttaccactctgtgcctcagtttactctgtagtttaccattagactgtgagctccttgagggactttgtcataatcactgttacatcccagtgcctcacaccatgcctggcccttaagaagtgctcaataaatgtctgaacaaataagtgagtggagtgagtgaattgtaagatcagaataataatatttggtttgtctatcgtacaagattcctgtatcgtttgaatattgcttttaaagaaatatttgaagcgacttcaaattcagactgtgtttaaaaagatttaaaatcggaatccaaaatcaaagtattaaaaaataatgctgagtgtttaggattcacatacctctgagctctggtggcttttgccagtcctgtccctctgctgagcaccagcccttcctgcagcagtcctgccggtgtgtttctgtgcacctggggatgaagtgtgctcctcccccagcggttagcctcaatgcttttcctccctctgttttattatttgaaattagccaaagaaaagctgcagggggcactgctgatcatcactggactggtgggtcgtactgtttgacagaatagggaatacaggaggaggagcaagcctagggtaaaacttaggtttgggacatgcttgatgaaagcaagagttgagcaggttgttgtgtgtatgtaggtcaggtgctcagcggaaaagtctgagctgtgtagtacgtcaggcagatgtcagtttagatgcgatagtttaagccacaagagtaggagaggtcatctaaagagtacagcaggcctaagggcatctatatttaaggagaaatacagaagaagtctcctgagaaggaataatggggcgggtggggagggagaaggcagtgtcccaaaaaccaacaaaggttttaccaaaggtaataccatcatttctgagcagcagttccttaacttgtgaatgtggcaaatgttctcctttacaaattgttctgaaggtaaaatgagatcatgtaaacgaaaatcctttgtaaattacagatgtgtgttataaatgaagtatctctcgagtcactcca

SEQ ID NO: 128860 - DNA, 3296 bp, Homo sapiens
  Payload ID: 5203
  Gene Symbol: E2F6
  Gene Name: E2F transcription factor 6
  ENST ID: ENST00000444832
  CDS Start-End: 278-430
actgcgcatgcgggaagatggcgggccgggcgacttgagatccgcgggtctccctcctctttttccgtctgcgtcgggagctcccgggcacgtgaggccgtgccgcgtttactggcgggcgggacggcctagccgggcggcgcctcggaggaagccgcggaccccttaggtgctgggcccttggaaatcggcgcgtggggggcggtgctcgagctgagcgcgagagggcgggagagctcgtggggtgcgaggggagcaggacgcccggccgggcagcatgagtcagcagcggccggcgaggaagttacccagtctcctcctggacccgacggaggagacggttcgccgtcggtgccgagaccccatcaacgtggagggcctgctgttgtttattcaggcaaatctggcttgctgggctaggctcagctgagggctgccttcgccatgaatccttctccatcaaaaataaggattaatttagaagataatgtacaatatgtgtccatgagaaaagctctaaaagtgaagagacctcgttttgatgtatcgctggtttatttaactcgaaaatttatggatcttgtcagatctgctcccgggggtattcttgacttaaacaaggttgcaacgaaactgggagtccgaaagcggagagtgtatgacatcaccaatgtcttagatggaatcgacctcgttgaaaagaaatccaagaaccatattagatggataggatctgatcttagcaattttggagcagttccccaacaaaagaagctacaggaggaactttctgacttatcagcaatggaagatgctttggatgagttaattaaggattgtgctcagcagctgtttgagttaacagatgacaaagaaaatgaaagactagcatatgtgacctatcaagacattcatagcattcaggccttccatgaacagatcgtcattgcagttaaagctccagcagaaaccagattggatgttccagctcccagagaagactctatcacagtgcacataaggagcaccaacggacctatcgatgtctatttgtgtgaagtggagcagggtcagaccagtaacaaaaggtctgaaggtgtcgggacctcttcatctgagagcactcatccagaaggccctgaggaagaagaaaatcctcagcaaagtgaagaattgcttgaagtaagcaactgatggcatttgagaatttatgtatcactgagttttttgggaatatcttcgtggagaattacgcatcaaatttgattctcagagcaataaattatccatgaagtgctctcgttctcagtagcggcatcatggccagtagtgtctttgaggagttcaccacttagattactgagtaattgtggtttccacatttgaaaacaactccttttataattattcactgctttttgtcagtgaaatagacatcttgcctcctgaagtagcttcatcacagagtgtcatgaagacagacagtcaggctgaaatggacagttctttgtggactctacccttcccttcaaggagtatgtcatatatcacaaaagaaattgccttacactggttcatgtttgcagttactgttgtacattgcatagatgtacacacgaatttaaatgtgatgtctttgtatatatctgtataatgttgagattacttacgaaatatgtctgagtgacacttttcacccttgtacagccaaaataatgtatatatggaaagtgacagacaaattctctaatctctttggtacctataacttattagaatcctctggatgagggttagaagagactttttccaaacttctacatgtagaagtatcataaatgtgctacacatttatgtttgtggatttaattaaagtattttaatatggttttcagtgctaaaattggagtcagatacttcttggttttaagctgtctacctaattgctgtctcccagcagactggtggcatgcccagtggctttgggggcaaggatagaaatgccatcaggaaatagctgaattcattgtgaaacatgaattcagtcatggtgataattggaaactcctttcaggtttttgcaagtagattttgtaatgtttgtgtatgcagccttgctgttgagtcagtccaaggggttttacttaggacaagttgtaccttgccctctctccagctctgctcccacattttcacatacctagctgtttctacctcattgggtaagtcatttaccactctgtgcctcagtttactctgtagtttaccattagactgtgagctccttgagggactttgtcataatcactgttacatcccagtgcctcacaccatgcctggcccttaagaagtgctcaataaatgtctgaacaaataagtgagtggagtgagtgaattgtaagatcagaataataatatttggtttgtctatcgtacaagattcctgtatcgtttgaatattgcttttaaagaaatatttgaagcgacttcaaattcagactgtgtttaaaaagatttaaaatcggaatccaaaatcaaagtattaaaaaataatgctgagtgtttaggattcacatacctctgagctctggtggcttttgccagtcctgtccctctgctgagcaccagcccttcctgcagcagtcctgccggtgtgtttctgtgcacctggggatgaagtgtgctcctcccccagcggttagcctcaatgcttttcctccctctgttttattatttgaaattagccaaagaaaagctgcagggggcactgctgatcatcactggactggtgggtcgtactgtttgacagaatagggaatacaggaggaggagcaagcctagggtaaaacttaggtttgggacatgcttgatgaaagcaagagttgagcaggttgttgtgtgtatgtaggtcaggtgctcagcggaaaagtctgagctgtgtagtacgtcaggcagatgtcagtttagatgcgatagtttaagccacaagagtaggagaggtcatctaaagagtacagcaggcctaagggcatctatatttaaggagaaatacagaagaagtctcctgagaaggaataatggggcgggtggggagggagaaggcagtgtcccaaaaaccaacaaaggttttaccaaaggtaataccatcatttctgagcagcagttccttaacttgtgaatgtggcaaatgttctcctttacaaattgttctgaaggtaaaatgagatcatgtaaacgaaaatcctttgtaaattacagatgtgtgttataaatgaagtatctctcgagtcactcca

SEQ ID NO: 128861 - DNA, 3191 bp, Homo sapiens
  Payload ID: 5203
  Gene Symbol: E2F6
  Gene Name: E2F transcription factor 6
  Uniprot ID: O75461
  ENST ID: ENST00000546212
  CDS Start-End: 469-1089
atgcgcagaggggggcggtgtactgcgcatgcgggaagatggcgggccgggcgacttgagatccgcgggtctccctcctctttttccgtctgcgtcgggagctcccgggcacgtgaggccgtgccgcgtttactggcgggcgggacggcctagccgggcggcgcctcggaggaagccgcggaccccttaggtgctgggcccttggaaatcggcgcgtggggggcggtgctcgagctgagcgcgagagggcgggagagctcgtggggtgcgaggggagcaggacgcccggccgggcagcatgagtcagcagcggccggcgaggaagttacccagtctcctcctggacccgacggaggagacggttcgccgtcggtgccgagaccccatcaacgtggagggcctgctgaagctctaaaagtgaagagacctcgttttgatgtatcgctggtttatttaactcgaaaatttatggatcttgtcagatctgctcccgggggtattcttgacttaaacaaggttgcaacgaaactgggagtccgaaagcggagagtgtatgacatcaccaatgtcttagatggaatcgacctcgttgaaaagaaatccaagaaccatattagatggataggatctgatcttagcaattttggagcagttccccaacaaaagaagctacaggaggaactttctgacttatcagcaatggaagatgctttggatgagttaattaaggattgtgctcagcagctgtttgagttaacagatgacaaagaaaatgaaagactagcatatgtgacctatcaagacattcatagcattcaggccttccatgaacagatcgtcattgcagttaaagctccagcagaaaccagattggatgttccagctcccagagaagactctatcacagtgcacataaggagcaccaacggacctatcgatgtctatttgtgtgaagtggagcagggtcagaccagtaacaaaaggtctgaaggtgtcgggacctcttcatctgagagcactcatccagaaggccctgaggaagaagaaaatcctcagcaaagtgaagaattgcttgaagtaagcaactgatggcatttgagaatttatgtatcactgagttttttgggaatatcttcgtggagaattacgcatcaaatttgattctcagagcaataaattatccatgaagtgctctcgttctcagtagcggcatcatggccagtagtgtctttgaggagttcaccacttagattactgagtaattgtggtttccacatttgaaaacaactccttttataattattcactgctttttgtcagtgaaatagacatcttgcctcctgaagtagcttcatcacagagtgtcatgaagacagacagtcaggctgaaatggacagttctttgtggactctacccttcccttcaaggagtatgtcatatatcacaaaagaaattgccttacactggttcatgtttgcagttactgttgtacattgcatagatgtacacacgaatttaaatgtgatgtctttgtatatatctgtataatgttgagattacttacgaaatatgtctgagtgacacttttcacccttgtacagccaaaataatgtatatatggaaagtgacagacaaattctctaatctctttggtacctataacttattagaatcctctggatgagggttagaagagactttttccaaacttctacatgtagaagtatcataaatgtgctacacatttatgtttgtggatttaattaaagtattttaatatggttttcagtgctaaaattggagtcagatacttcttggttttaagctgtctacctaattgctgtctcccagcagactggtggcatgcccagtggctttgggggcaaggatagaaatgccatcaggaaatagctgaattcattgtgaaacatgaattcagtcatggtgataattggaaactcctttcaggtttttgcaagtagattttgtaatgtttgtgtatgcagccttgctgttgagtcagtccaaggggttttacttaggacaagttgtaccttgccctctctccagctctgctcccacattttcacatacctagctgtttctacctcattgggtaagtcatttaccactctgtgcctcagtttactctgtagtttaccattagactgtgagctccttgagggactttgtcataatcactgttacatcccagtgcctcacaccatgcctggcccttaagaagtgctcaataaatgtctgaacaaataagtgagtggagtgagtgaattgtaagatcagaataataatatttggtttgtctatcgtacaagattcctgtatcgtttgaatattgcttttaaagaaatatttgaagcgacttcaaattcagactgtgtttaaaaagatttaaaatcggaatccaaaatcaaagtattaaaaaataatgctgagtgtttaggattcacatacctctgagctctggtggcttttgccagtcctgtccctctgctgagcaccagcccttcctgcagcagtcctgccggtgtgtttctgtgcacctggggatgaagtgtgctcctcccccagcggttagcctcaatgcttttcctccctctgttttattatttgaaattagccaaagaaaagctgcagggggcactgctgatcatcactggactggtgggtcgtactgtttgacagaatagggaatacaggaggaggagcaagcctagggtaaaacttaggtttgggacatgcttgatgaaagcaagagttgagcaggttgttgtgtgtatgtaggtcaggtgctcagcggaaaagtctgagctgtgtagtacgtcaggcagatgtcagtttagatgcgatagtttaagccacaagagtaggagaggtcatctaaagagtacagcaggcctaagggcatctatatttaaggagaaatacagaagaagtctcctgagaaggaataatggggcgggtggggagggagaaggcagtgtcccaaaaaccaacaaaggttttaccaaaggtaataccatcatttctgagcagcagttccttaacttgtgaatgtggcaaatgttctcctttacaaattgttctgaaggtaaaatgagatcatgtaaacgaaaatcctttgtaaattacagatgtgtgttataaatgaagtatctctcgagtcactcca

SEQ ID NO: 128862 - DNA, 3450 bp, Homo sapiens
  Payload ID: 5203
  Gene Symbol: E2F6
  Gene Name: E2F transcription factor 6
  Uniprot ID: O75461
  ENST ID: ENST00000542100
  CDS Start-End: 728-1348
atgcgcagaggggggcggtgtactgcgcatgcgggaagatggcgggccgggcgacttgagatccgcgggtctccctcctctttttccgtctgcgtcgggagctcccgggcacgtgaggccgtgccgcgtttactggcgggcgggacggcctagccgggcggcgcctcggaggaagccgcggaccccttaggtgctgggcccttggaaatcggcgcgtggggggcggtgctcgagctgagcgcgagagggcgggagagctcgtggggtgcgaggggagcaggacgcccggccgggcagcatgagtcagcagcggccggcgaggaagttacccagtctcctcctggacccgacggaggagacggttcgccgtcggtgccgagaccccatcaacgtggagggcctgctgttgtttattcaggcaaatctggcttgctgggctaggctcagctgagggctgccttcgccatgaatccttctccatcaaaaataaggattaatttagaagataatgtacaatatgtgtccatgagaatgtaggaatgggctccagagagaagacatttatattatgaaatatgtacctttgttcctgaagtaaccgccagtggtctttaaactaaatgtgacattgtggaggttctgagtaaggacatttctgactgaagaagctctaaaagtgaagagacctcgttttgatgtatcgctggtttatttaactcgaaaatttatggatcttgtcagatctgctcccgggggtattcttgacttaaacaaggttgcaacgaaactgggagtccgaaagcggagagtgtatgacatcaccaatgtcttagatggaatcgacctcgttgaaaagaaatccaagaaccatattagatggataggatctgatcttagcaattttggagcagttccccaacaaaagaagctacaggaggaactttctgacttatcagcaatggaagatgctttggatgagttaattaaggattgtgctcagcagctgtttgagttaacagatgacaaagaaaatgaaagactagcatatgtgacctatcaagacattcatagcattcaggccttccatgaacagatcgtcattgcagttaaagctccagcagaaaccagattggatgttccagctcccagagaagactctatcacagtgcacataaggagcaccaacggacctatcgatgtctatttgtgtgaagtggagcagggtcagaccagtaacaaaaggtctgaaggtgtcgggacctcttcatctgagagcactcatccagaaggccctgaggaagaagaaaatcctcagcaaagtgaagaattgcttgaagtaagcaactgatggcatttgagaatttatgtatcactgagttttttgggaatatcttcgtggagaattacgcatcaaatttgattctcagagcaataaattatccatgaagtgctctcgttctcagtagcggcatcatggccagtagtgtctttgaggagttcaccacttagattactgagtaattgtggtttccacatttgaaaacaactccttttataattattcactgctttttgtcagtgaaatagacatcttgcctcctgaagtagcttcatcacagagtgtcatgaagacagacagtcaggctgaaatggacagttctttgtggactctacccttcccttcaaggagtatgtcatatatcacaaaagaaattgccttacactggttcatgtttgcagttactgttgtacattgcatagatgtacacacgaatttaaatgtgatgtctttgtatatatctgtataatgttgagattacttacgaaatatgtctgagtgacacttttcacccttgtacagccaaaataatgtatatatggaaagtgacagacaaattctctaatctctttggtacctataacttattagaatcctctggatgagggttagaagagactttttccaaacttctacatgtagaagtatcataaatgtgctacacatttatgtttgtggatttaattaaagtattttaatatggttttcagtgctaaaattggagtcagatacttcttggttttaagctgtctacctaattgctgtctcccagcagactggtggcatgcccagtggctttgggggcaaggatagaaatgccatcaggaaatagctgaattcattgtgaaacatgaattcagtcatggtgataattggaaactcctttcaggtttttgcaagtagattttgtaatgtttgtgtatgcagccttgctgttgagtcagtccaaggggttttacttaggacaagttgtaccttgccctctctccagctctgctcccacattttcacatacctagctgtttctacctcattgggtaagtcatttaccactctgtgcctcagtttactctgtagtttaccattagactgtgagctccttgagggactttgtcataatcactgttacatcccagtgcctcacaccatgcctggcccttaagaagtgctcaataaatgtctgaacaaataagtgagtggagtgagtgaattgtaagatcagaataataatatttggtttgtctatcgtacaagattcctgtatcgtttgaatattgcttttaaagaaatatttgaagcgacttcaaattcagactgtgtttaaaaagatttaaaatcggaatccaaaatcaaagtattaaaaaataatgctgagtgtttaggattcacatacctctgagctctggtggcttttgccagtcctgtccctctgctgagcaccagcccttcctgcagcagtcctgccggtgtgtttctgtgcacctggggatgaagtgtgctcctcccccagcggttagcctcaatgcttttcctccctctgttttattatttgaaattagccaaagaaaagctgcagggggcactgctgatcatcactggactggtgggtcgtactgtttgacagaatagggaatacaggaggaggagcaagcctagggtaaaacttaggtttgggacatgcttgatgaaagcaagagttgagcaggttgttgtgtgtatgtaggtcaggtgctcagcggaaaagtctgagctgtgtagtacgtcaggcagatgtcagtttagatgcgatagtttaagccacaagagtaggagaggtcatctaaagagtacagcaggcctaagggcatctatatttaaggagaaatacagaagaagtctcctgagaaggaataatggggcgggtggggagggagaaggcagtgtcccaaaaaccaacaaaggttttaccaaaggtaataccatcatttctgagcagcagttccttaacttgtgaatgtggcaaatgttctcctttacaaattgttctgaaggtaaaatgagatcatgtaaacgaaaatcctttgtaaattacagatgtgtgttataaatgaagtatctctcgagtcactcca

SEQ ID NO: 128863 - DNA, 5740 bp, Homo sapiens
  Payload ID: 5204
  Gene Symbol: E2F7
  Gene Name: E2F transcription factor 7
  Uniprot ID: Q96AV8
  ENST ID: ENST00000322886
  CDS Start-End: 237-2972
gttttagcggggactacgatccaggctggagttgcgctcggccggtctgagcgctggcgctgcccggacgccgcggggtccccgccagcccagggcactcggcgcggggatctgcgcgcctcgctctcccttcccgatgccgccgcccggctgctgatcgccgcaccaccttccctcatcggcttgggtccgtggaggtccctgcagaggcaggaagcctccttaggaaagcagggatggaggtaaattgtttaacactaaaagacctgatcagccccaggcagcccagactagattttgcagttgaagatggggaaaatgcacaaaaggaaaatatatttgttgatcgatcaaggatggccccgaagactccaataaaaaatgaaccaattgatttatcgaagcaaaaaaaatttactccagaaagaaatcccattactccagttaagtttgttgacagacagcaagcggaaccatggacacccacagctaacctgaagatgctcattagtgctgccagcccagatataagggaccgggagaagaaaaagggactattccgacccattgaaaacaaggacgatgcatttacagattctctacagcttgatgttgttggggacagtgctgtggacgaatttgaaaagcaaaggccaagcagaaaacagaaaagtttaggactcctgtgccagaagtttctagctcgctatccaagttatcccttgtcaactgagaaaactaccatctccctagatgaagttgctgtcagtcttggtgtggaaaggagacgcatctatgacattgtaaatgtgctggagtcgctgcatctggtcagccgggtggctaagaatcagtatggctggcatggacggcacagcctgccaaaaaccctgaggaacctccagagactaggagaggagcagaaatatgaagagcaaatggcctacctccaacagaaagagctggacctgatagattataaatttggagaacgtaaaaaagatggtgatccagattcccaggaacaacagttactggatttctctgaacccgactgtccctcttcatctgcaaacagtagaaaagacaagtctctgagaattatgagccagaagtttgtcatgctgttcctcgtctccaaaaccaagattgtcactctggatgtggctgccaaaatactgatagaagaaagccaagatgccccagaccatagtaaatttaaaacaaaggtacgacgcctctatgacatagccaatgttctgaccagcttggctctgataaagaaagtgcatgtaacagaagagcgaggtcgtaaaccagccttcaagtggatcgggcctgtggacttcagctcaagtgatgaagaactggtggatgtttctgcatctgtcttaccagaattgaaaagagaaacatatggccagattcaagtctgtgcaaaacagaagctggctcgccatggttcttttaacacagttcaggcttctgagaggatccagaggaaagtgaactcagaaccgagcagcccgtacagagaagaacaaggatcaggtggctactctttagaaattggaagcctggcagctgtctatagacagaaaatagaagacaattcacagggaaaagcctttgccagtaagagagtggtgcctccatcaagcagcttggaccctgttgctcctttccctgtcctctctgttgacccagaatattgtgttaatcctttagcccacccagtattttctgttgctcagacggacctgcaggcattctccatgcagaacggtctgaatggacaagtggatgtctcacttgcttctgcagcctctgctgtggagagcctgaagccagcactccttgctggccagcctctagtgtatgtgccctctgcctcactgttcatgctgtatggaagtctgcaggagggaccagcgtcagggtcagggtcagagagggatgacagaagctcagaagccccagccacagtagagctgtcatctgcaccctcagctcagaagcgcctctgtgaggagaggaaacctcaggaggaggatgagccagccactaaaaggcaaagtagggaatatgaagacggcccgctgtcgcttgtcatgcccaagaaaccctcagattccacagaccttgcctctcccaagactatgggtaacagggcatctatacccctcaaagacattcatgtgaatggccaactccctgctgcagaagagatttcaggaaaggcaacagcaaactctcttgtttcttctgagtggggaaatccttcaagaaatacagatgttgaaaagccttcaaaagaaaatgaaagcaccaaagagccttctttgctacaatatctttgtgtgcagtctcctgcaggattaaatggtttcaatgtacttttatctggcagtcaaaccccccctactgtgggcccgtcctcaggtcagctgccgtctttcagtgtcccttgcatggtcttaccatctccacctctgggcccttttcctgttctctattctcctgcaatgccgggcccggtttcttctactcttggtgctctcccaaacacaggacctgtgaatttcagcttgcctggccttggatcaatagcccagcttctcgtcggccccacagctgtggttaatccaaagtcgtccacactcccttctgcagaccctcagcttcagagtcagccctcactaaacctaagtccagtgatgtcaaggtcacacagtgtcgtccaacaacctgagtcccccgtttacgtgggacatccagtctcagtagtaaaattacatcagtcaccagttccagtgacccccaagagcatccaacgcacacatcgtgagacgtttttcaagacacccggcagccttggagaccctgtcctgaagagaagagaaaggaaccagtcacgaaacaccagctcggcccagaggagactagaaatccccagcggcggcgctgactaacctgccgctttgccaggtgggggtgggatcaaacgccctgagagtcccggatgtccgaggcgggatgcaaaccatcccgtcctgagcacgggtccttcctctctctttcatccacacttctgttaacttcccaccaccatcaatcatctgatttcctgaaagtaattaattgtgcatttaataccagttagagttccgactctgcatggtgtcacagtgaaagcgccgactgacttatggttttgattcaagaatcgtcttattctggaagtagatctgaataggctaccggagccttgtttttctaaaggggggcgctgtctagcacttaactagggtaagcattcttaacatgtatttccacttgccctgagtaaatctgtggtgagagaagcttcctttctgcagtttaaaaaagctactgcttccttaggcttcatcaggaagccaccttcagttgtgaatcctatggtgttatttattttgttcctgaaatgggatttagtgcaaaaagtttacaactacagtctttaacacatttttttcagggtatgacgacttgaatgtttatacttttattctataatttgccctgcacttattttacaacctagtaataatgtggataaatgtatctacatgacacatgtcaagaccaaaataactgtgaatgacacaccttgctgtaaatgaactgtgctaaccctgactgtgggcttgagaacaaagatgaactctagaactctagcagcctaactgctgcttctcaaataactgtgtgaacagtgagatattactgtttgtttctaaaaatcctactgtgcccagtttccttcactacatgccctgcattttttatttaaatatttagctgtagcgccatcagatatggatgccttctaacaattgctgtttgtaaaataaatcaggatggtagaaagtgattatatggaaaattggaacctggatgagaccttttcgttgaattctgaagagtaatgatgtgaaaattgatacagggcaagagatgattcttttgtttttcttctacttcatgtccagaagagtaagagggaaaatggacatatgtttcatatccaagggtattcaaactgtagttagttggtacctctgaaaaatgagaatggtgagcgcacgggttggttgttctagcatgaatacaattctggaaactgttatgcaatttcccttttttaacccacattactttaggggtgcattaagtcgccaaactatactagttctttgtattcctagacttgctgatatttacctctctcttgtctcttcagagtaaatggttcccttctttccttcctactttccttcattctctcttccttccctccttcctacttcttttcttccttcctcttcctctcttaaaactatcttagatgtagaatcctggtgtagggttttattttatttttattttttgacccaataaaatgttatatgaaagaatgaaaatattaatttaagagactctgggagtctgaataaagtagctttatattaactacaggataatattagccttattacccccacaagattttttaaaacttgaggtaggtagctacattaaataaatttgctacttatataaaaatttttatcaacactaaacttttaaagtttacaagttttttttttcttttttacagtcttctatagagttaggttaaaaatgtggttctaaccatcaacaattgcatggttaaatgaccctgaactaaaactgatgggttccctatcaaaacaaataaaaatatacctttttcaggtttcaatctgtgcagggtatatgcatgttaattctaccatgcttaagaacttccacaaaatatttcatggagaggtctgcatttagacggaaacagaaattgcttttcccctcactgttcctgaatgctctatacttgttttaacatttttgctatctttttttattattctgatcatgatatgaccatttaacctcagaattcataattcctgaggggtgttaagaagcagtcccattggtgaggatattatgacttggtgaccattcttaggagtagaaaaccaaggacaattgcttctgtattcagtatccacttcttaatgtggctttatatgtaaaaataataatgcagtggttgtttctgtcaggaaaataaatcttacagaacaactggtggaattgaagctgctgcgctagacttggatattttgggtagtgaagaagcaatggcaatcttgagtctattattgtataatttagtaaaagaaaaaaataatcgttggtggtcctactaagagaatgcagcttttttgagttgtcacagaggctgtgtgtgccctacactgaccagggtttgtaaaaccctttcattctggtacaagagtcgggggtataacttttatacttgaatctacctaccaagtttacatttctcaattcctttttgtaaggtgctatttctgtatttaaataactttcttttaacgtaaagctgctttctgcttatcttattgcactgctagttgtatgtaggtattaattttattgctgcttactgcttttgttttcttattatttagctctgctctttttcctaatggctatattatctatagctatttacttgtaactgtactacatgtaaactgattttttgttctgattttttttctaatatttttaggaaaatattaagctttataaaatagcaataaaaaataattcatttaagaag

SEQ ID NO: 128864 - DNA, 5297 bp, Homo sapiens
  Payload ID: 5204
  Gene Symbol: E2F7
  Gene Name: E2F transcription factor 7
  Uniprot ID: Q96AV8
  ENST ID: ENST00000416496
  CDS Start-End: 220-2406
gatccaggctggagttgcgctcggccggtctgagcgctggcgctgcccggacgccgcggggtccccgccagcccagggcactcggcgcggggatctgcgcgcctcgctctcccttcccgatgccgccgcccggctgctgatcgccgcaccaccttccctcatcggcttgggtccgtggaggtccctgcagaggcaggaagcctccttaggaaagcagggatggaggtaaattgtttaacactaaaagacctgatcagccccaggcagcccagactagattttgcagttgaagatggggaaaatgcacaaaaggaaaatatatttgttgatcgatcaaggatggccccgaagactccaataaaaaatgaaccaattgatttatcgaagcaaaaaaaatttactccagaaagaaatcccattactccagttaagtttgttgacagacagcaagcggaaccatggacacccacagctaacctgaagatgctcattagtgctgccagcccagatataagggaccgggagaagaaaaagggactattccgacccattgaaaacaaggacgatgcatttacagattctctacagcttgatgttgttggggacagtgctgtggacgaatttgaaaagcaaaggccaagcagaaaacagaaaagtttaggactcctgtgccagaagtttctagctcgctatccaagttatcccttgtcaactgagaaaactaccatctccctagatgaagttgctgtcagtcttggtgtggaaaggagacgcatctatgacattgtaaatgtgctggagtcgctgcatctggtcagccgggtggctaagaatcagtatggctggcatggacggcacagcctgccaaaaaccctgaggaacctccagagactaggagaggagcagaaatatgaagagcaaatggcctacctccaacagaaagagctggacctgatagattataaatttggagaacgtaaaaaagatggtgatccagattcccaggaacaacagttactggatttctctgaacccgactgtccctcttcatctgcaaacagtagaaaagacaagtctctgagaattatgagccagaagtttgtcatgctgttcctcgtctccaaaaccaagattgtcactctggatgtggctgccaaaatactgatagaagaaagccaagatgccccagaccatagtaaatttaaaacaaaggtacgacgcctctatgacatagccaatgttctgaccagcttggctctgataaagaaagtgcatgtaacagaagagcgaggtcgtaaaccagccttcaagtggatcgggcctgtggacttcagctcaagtgatgaagaactggtggatgtttctgcatctgtcttaccagaattgaaaagagaaacatatggccagattcaagtctgtgcaaaacagaagctggctcgccatggttcttttaacacagttcaggcttctgagaggatccagaggaaagtgaactcagaaccgagcagcccgtacagagaagaacaaggatcaggtggctactctttagaaattggaagcctggcagctgtctatagacagaaaatagaagacaattcacagggaaaagcctttgccagtaagagagtggtgcctccatcaagcagcttggaccctgttgctcctttccctgtcctctctgttgacccagaatattgtgttaatcctttagcccacccagtattttctgttgctcagacggacctgcaggcattctccatgcagaacggtctgaatggacaagtggatgtctcacttgcttctgcagcctctgctgtggagagcctgaagccagcactccttgctggccagcctctagtgtatgtgccctctgcctcactgttcatgctgtatggaagtctgcaggagggaccagcgtcagggtcagggtcagagagggatgacagaagctcagaagccccagccacagtagagctgtcatctgcaccctcagctcagaagcgcctctgtgaggagaggaaacctcaggaggaggatgagccagccactaaaaggcaaagtagggaatatgaagacggcccgctgtcgcttgtcatgcccaagaaaccctcagattccacagaccttgcctctcccaagactatgggtaacagggcatctatacccctcaaagacattcatgtgaatggccaactccctgctgcagaagagatttcaggaaaggcaacagcaaactctcttgtttcttctgagtggggaaatccttcaagaaatacagatgttgaaaagccttcaaaagaaaatgaaagcaccaaagagccttctttgctacaatatctttgtgtgcagtctcctgcagtcaccagttccagtgacccccaagagcatccaacgcacacatcgtgagacgtttttcaagacacccggcagccttggagaccctgtcctgaagagaagagaaaggaaccagtcacgaaacaccagctcggcccagaggagactagaaatccccagcggcggcgctgactaacctgccgctttgccaggtgggggtgggatcaaacgccctgagagtcccggatgtccgaggcgggatgcaaaccatcccgtcctgagcacgggtccttcctctctctttcatccacacttctgttaacttcccaccaccatcaatcatctgatttcctgaaagtaattaattgtgcatttaataccagttagagttccgactctgcatggtgtcacagtgaaagcgccgactgacttatggttttgattcaagaatcgtcttattctggaagtagatctgaataggctaccggagccttgtttttctaaaggggggcgctgtctagcacttaactagggtaagcattcttaacatgtatttccacttgccctgagtaaatctgtggtgagagaagcttcctttctgcagtttaaaaaagctactgcttccttaggcttcatcaggaagccaccttcagttgtgaatcctatggtgttatttattttgttcctgaaatgggatttagtgcaaaaagtttacaactacagtctttaacacatttttttcagggtatgacgacttgaatgtttatacttttattctataatttgccctgcacttattttacaacctagtaataatgtggataaatgtatctacatgacacatgtcaagaccaaaataactgtgaatgacacaccttgctgtaaatgaactgtgctaaccctgactgtgggcttgagaacaaagatgaactctagaactctagcagcctaactgctgcttctcaaataactgtgtgaacagtgagatattactgtttgtttctaaaaatcctactgtgcccagtttccttcactacatgccctgcattttttatttaaatatttagctgtagcgccatcagatatggatgccttctaacaattgctgtttgtaaaataaatcaggatggtagaaagtgattatatggaaaattggaacctggatgagaccttttcgttgaattctgaagagtaatgatgtgaaaattgatacagggcaagagatgattcttttgtttttcttctacttcatgtccagaagagtaagagggaaaatggacatatgtttcatatccaagggtattcaaactgtagttagttggtacctctgaaaaatgagaatggtgagcgcacgggttggttgttctagcatgaatacaattctggaaactgttatgcaatttcccttttttaacccacattactttaggggtgcattaagtcgccaaactatactagttctttgtattcctagacttgctgatatttacctctctcttgtctcttcagagtaaatggttcccttctttccttcctactttccttcattctctcttccttccctccttcctacttcttttcttccttcctcttcctctcttaaaactatcttagatgtagaatcctggtgtagggttttattttatttttattttttgacccaataaaatgttatatgaaagaatgaaaatattaatttaagagactctgggagtctgaataaagtagctttatattaactacaggataatattagccttattacccccacaagattttttaaaacttgaggtaggtagctacattaaataaatttgctacttatataaaaatttttatcaacactaaacttttaaagtttacaagttttttttttcttttttacagtcttctatagagttaggttaaaaatgtggttctaaccatcaacaattgcatggttaaatgaccctgaactaaaactgatgggttccctatcaaaacaaataaaaatatacctttttcaggtttcaatctgtgcagggtatatgcatgttaattctaccatgcttaagaacttccacaaaatatttcatggagaggtctgcatttagacggaaacagaaattgcttttcccctcactgttcctgaatgctctatacttgttttaacatttttgctatctttttttattattctgatcatgatatgaccatttaacctcagaattcataattcctgaggggtgttaagaagcagtcccattggtgaggatattatgacttggtgaccattcttaggagtagaaaaccaaggacaattgcttctgtattcagtatccacttcttaatgtggctttatatgtaaaaataataatgcagtggttgtttctgtcaggaaaataaatcttacagaacaactggtggaattgaagctgctgcgctagacttggatattttgggtagtgaagaagcaatggcaatcttgagtctattattgtataatttagtaaaagaaaaaaataatcgttggtggtcctactaagagaatgcagcttttttgagttgtcacagaggctgtgtgtgccctacactgaccagggtttgtaaaaccctttcattctggtacaagagtcgggggtataacttttatacttgaatctacctaccaagtttacatttctcaattcctttttgtaaggtgctatttctgtatttaaataactttcttttaacgtaaagctgctttctgcttatcttattgcactgctagttgtatgtaggtattaattttattgctgcttactgcttttgttttcttattatttagctctgctctttttcctaatggctatattatctatagctatttacttgtaactgtactacatgtaaactgattttttgttctgattttttttctaatatttttaggaaaatattaagctttataaaatagcaataaaaaataattcatttaagaa

SEQ ID NO: 128865 - DNA, 812 bp, Homo sapiens
  Payload ID: 5204
  Gene Symbol: E2F7
  Gene Name: E2F transcription factor 7
  ENST ID: ENST00000552907
  CDS Start-End: 1-627
gatgttgttggggacagtgctgtggacgaatttgaaaagcaaaggccaagcagaaaacagaaaagtttaggactcctgtgccagaagtttctagctcgctatccaagttatcccttgtcaactgagaaaactaccatctccctagatgaagttgctgtcagtcttggtgtggaaaggagacgcatctatgacattgtaaatgtgctggagtcgctgcatctggtcagccgggtggctaagaatcagtatggctggcatggacggcacagcctgccaaaaaccctgaggaacctccagagactaggagaggagcagaaatatgaagagcaaatggcctacctccaacagaaagagctggacctgatagattataaatttggagaacgtaaaaaagatggtgatccagattcccaggaacaacagttactggatttctctgaacccgactgtccctcttcatctgcaaacagtagaaaagacaagtctctgagaattatgagccagaagtttgtcatgctgttcctcgtctccaaaaccaagattgtcactctggatgtggctgccaaaatactgatagaagaaagccaagatgccccagaccatagtaaatttaaaaggtggagatgaaaattgtctacagcaaaggtacgacgcctctatgacatagccaatgttctgaccagcttggctctgataaagaaagtgcatgtaacagaagagcgaggtcgtaaaccagccttcaagtggatcgggcctgtggacttcagctcaagtgatgaagaactggtggatgtttctgcatctgtcttacc

SEQ ID NO: 128866 - DNA, 2302 bp, Homo sapiens
  Payload ID: 5204
  Gene Symbol: E2F7
  Gene Name: E2F transcription factor 7
  ENST ID: ENST00000550669
  CDS Start-End: 224-2302
ctacgatccaggctggagttgcgctcggccggtctgagcgctggcgctgcccggacgccgcggggtccccgccagcccagggcactcggcgcggggatctgcgcgcctcgctctcccttcccgatgccgccgcccggctgctgatcgccgcaccaccttccctcatcggcttgggtccgtggaggtccctgcagaggcaggaagcctccttaggaaagcagggatggaggtaaattgtttaacactaaaagacctgatcagccccaggcagcccagactagattttgcagttgaagatggggaaaatgcacaaaaggaaaatatatttgttgatcgatcaaggatggccccgaagactccaataaaaaatgaaccaattgatttatcgaagcaaaaaaaatttactccagaaagaaatcccattactccagttaagtttgttgacagacagcaagcggaaccatggacacccacagctaacctgaagatgctcattagtgctgccagcccagatataagggaccgggagaagaaaaagggactattccgacccattgaaaacaaggacgatgcatttacagattctctacagcttgatgttgttggggacagtgctgtggacgaatttgaaaagcaaaggccaagcagaaaacagaaaagtttaggactcctgtgccagaagtttctagctcgctatccaagttatcccttgtcaactgagaaaactaccatctccctagatgaagttgctgtcagtcttggtgtggaaaggagacgcatctatgacattgtaaatgtgctggagtcgctgcatctggtcagccgggtggctaagaatcagtatggctggcatggacggcacagcctgccaaaaaccctgaggaacctccagagactaggagaggagcagaaatatgaagagcaaatggcctacctccaacagaaagagctggacctgatagattataaatttggagaacgtaaaaaagatggtgatccagattcccaggaacaacagttactggatttctctgaacccgactgtccctcttcatctgcaaacagtagaaaagacaagtctctgagaattatgagccagaagtttgtcatgctgttcctcgtctccaaaaccaagattgtcactctggatgtggctgccaaaatactgatagaagaaagccaagatgccccagaccatagtaaatttaaaacaaaggtacgacgcctctatgacatagccaatgttctgaccagcttggctctgataaagaaagtgcatgtaacagaagagcgaggtcgtaaaccagccttcaagtggatcgggcctgtggacttcagctcaagtgatgaagaactggtggatgtttctgcatctgtcttaccagaattgaaaagagaaacatatggccagattcaagtctgtgcaaaacagaagctggctcgccatggttcttttaacacagttcaggcttctgagaggatccagaggaaagtgaactcagaaccgagcagcccgtacagagaagaacaaggatcaggtggctactctttagaaattggaagcctggcagctgtctatagacagaaaatagaagacaattcacagggaaaagcctttgccagtaagagagtggtgcctccatcaagcagcttggaccctgttgctcctttccctgtcctctctgttgacccagaatattgtgttaatcctttagcccacccagtattttctgttgctcagacggacctgcaggcattctccatgcagaacggtctgaatggacaagtggatgtctcacttgcttctgcagcctctgctgtggagagcctgaagccagcactccttgctggccagcctctagtgtatgtgccctctgcctcactgttcatgctgtatggaagtctgcaggagggaccagcgtcagggtcagggtcagagagggatgacagaagctcagaagccccagccacagtagagctgtcatctgcaccctcagctcagaagcgcctctgtgaggagaggaaacctcaggaggaggatgagccagccactaaaaggcaaagtagggaatatgaagacggcccgctgtcgcttgtcatgcccaagaaaccctcagattccacagaccttgcctctcccaagactatgggtaacagggcatctatacccctcaaagacattcatgtgaatggccaactccctgctgcagaagagatttcaggaaaggcaacagcaaactctcttgtttcttctgagtggggaaatccttcaagaaatacagatgttgaaaagccttcaaaa

SEQ ID NO: 128867 - DNA, 570 bp, Homo sapiens
  Payload ID: 5204
  Gene Symbol: E2F7
  Gene Name: E2F transcription factor 7
  ENST ID: ENST00000547316
  CDS Start-End: 225-570
gttgcgctcggccggtctgagcgctggcgctgcccggacgccgcggggtccccgccagcccagggcactcggcgcggggatctgcgcgcctcgctctcccttcccgatgccgccgcccggctgctgatcgccgcaccaccttccctcatcggcttgggtccgtggaggtccctgcagaggcaggaagcctccttaggaaagcagggtgtaattgtgcattacagatggaggtaaattgtttaacactaaaagacctgatcagccccaggcagcccagactagattttgcagttgaagatggggaaaatgcacaaaaggaaaatatatttgttgatcgatcaaggatggccccgaagactccaataaaaaatgaaccaattgatttatcgaagcaaaaaaaatttactccagaaagaaatcccattactccagttaagtttgttgacagacagcaagcggaaccatggacacccacagctaacctgaagatgctcattagtgctgccagcccagatataagggaccgggagaagaaaaagggactattccgacccattgaaaacaaggacg

SEQ ID NO: 128868 - DNA, 724 bp, Homo sapiens
  Payload ID: 5204
  Gene Symbol: E2F7
  Gene Name: E2F transcription factor 7
  ENST ID: ENST00000551058
  CDS Start-End: 1-659
agcttgatgttgttggggacagtgctgtggacgaatttgaaaagcaaaggccaagcagaaaacagaaaagtttaggactcctgtgccagaagtttctagctcgctatccaagttatcccttgtcaactgagaaaactaccatctccctagatgaagttgctgtcagtcttggtgtggaaaggagacgcatctatgacattgtaaatgtgctggagtcgctgcatctggtcagccgggtggctaagaatcagtatggctggcatggacggcacagcctgccaaaaaccctgaggaacctccagagactaggagaggagcagaaatatgaagagcaaatggcctacctccaacagaaagagctggacctgatagattataaatttggagaacgtaaaaaagatggtgatccagattcccaggaacaacagttactggatttctctgaacccgactgtccctcttcatctgcaaacagtagaaaagacaagtctctgagaattatgagccagaagtttgtcatgctgttcctcgtctccaaaaccaagattgtcactctggatgtggctgccaaaatactgatagaagaaagccaagatgccccagaccatagtaaatttaaaagtaagaatcttcacctccatcaacttactagcacataaagggtgggatttcatgtgttgatattttctgcttccaagattaaaaatatatatattgtttttga

SEQ ID NO: 128869 - DNA, 3240 bp, Homo sapiens
  Payload ID: 5205
  Gene Symbol: E2F8
  Gene Name: E2F transcription factor 8
  Uniprot ID: A0AVK6
  ENST ID: ENST00000250024
  CDS Start-End: 514-3117
aagtgcactgagcgagtggcggccgggggacagtacctgcttgccttattgggcaaatacagccttccaaggtggagtctaacgccgtggtgtgaactggccacccgaacagggagtaaatagtgctttgtatctttaaggaagcccttttttaaatttaaaaaaaaagtcttaattataagactctttaaatgcccaactgcatacttggagctttgggactgaatttggaactttcctgtcaagcgacctcccacgactttactgctgagcctgtgcacgtgtgtgtaaggggagaaatccaggcatctagatgcagacttgtacccagttacttggggtcgcgtgcgctcagctgggacctgggctcgtgcgcttagtccggagccctgatctgcgaacaggatattaaaacttttagtacaattgattggactacttgaaccatcgggatttggggaggaactccagatttttcatttttaaactctaaatgtatgaggaatttacagaatggagaacgaaaaggaaaatctcttttgtgagccacataaaaggggactaatgaaaacacctctgaaagaatccaccacagcaaatatcgtgttggcagagatccagcctgactttggccctttaaccacacctaccaagcccaaggaaggctctcagggagagccgtggacaccgacagccaacctgaaaatgctcatcagtgctgtgagccctgagatccgcaacagagatcagaaaaggggtttgtttgacaacagaagtggattacctgaggccaaagactgtatacacgaacacttatctggagatgaatttgagaaatcccaaccaagtcgaaaagagaaaagtttaggattattgtgtcataagttcttagcacgatatcctaattatcccaaccctgctgtgaataatgacatctgccttgacgaagtggcagaggaacttaatgttgaacgtcgacgcatttacgatatcgtgaacgtcctagagagtttacatatggtgagccgcctcgccaaaaacaggtacacttggcacgggcgacacaatctcaacaaaacccttggcaccttgaagagcatcggggaggagaataagtacgccgagcagattatgatgatcaaaaagaaagaatatgagcaagagtttgactttattaagagttacagtatagaggatcatatcatcaaatcaaacactggcccaaatggacacccagacatgtgttttgtggaactccctggagtggaatttcgggcagcttctgtaaacagccgcaaagacaagtctttaagggtaatgagccagaaatttgtgatgctgtttttggtgtcaacgcctcagatagtaagcctagaagttgctgccaagattttaattggggaggaccatgtggaagatttggataaaagcaagtttaaaacaaaaattaggaggttgtatgatatagctaatgttctgagtagcctggatcttatcaagaaagttcatgttacagaggaaagaggccgaaaaccagctttcaaatggaccggcccagaaatcagtccaaataccagtggctccagcccagtcattcattttactccctctgatttggaggtgagacggtcttcaaaagagaactgtgccaaaaacctcttttccacacgtgggaaaccaaactttactcgacacccatctcttatcaaattggtaaagagtatagaaagtgatcggagaaagataaattctgcgcccagtagccctatcaagaccaacaaagctgagagttctcagaattctgcacccttcccaagtaaaatggctcagctcgcagctatttgtaaaatgcagttagaagagcaatcaagtgaatccagacagaaagtgaaagtacagctggcaagatctggaccctgcaaaccagtagcccctctggaccccccagtgaatgctgagatggagctgacagcaccgtccctcatccagcccctgggaatggttcccctgatccccagccccttgtcatcagcagtgcccctgatcctacctcaggccccttcaggcccatcctatgccatctacctgcagcccactcaagcccaccaaagtgtgacgccaccccaaggcctgagcccaacggtgtgcaccacccactcttctaaagctactggctcaaaagactccacagatgccaccactgagaaggcagccaatgatacctcaaaggccagtgcctctaccaggcctggaagcttgctgccagcaccagagaggcaaggggcaaagagccgaaccagggagccagctggagaaagaggctcaaagagggcaagcatgctcgaggacagtggttccaaaaagaaatttaaagaggacctaaaaggacttgaaaatgtctccgcaaccttgttcccatcaggatacctaatccctctcacgcagtgctcatccctgggggcagagtccattttgtctggtaaagaaaactcaagtgctctttccccaaaccacaggatttacagctccccaattgcaggtgttattccagtgacatcatctgaactcactgctgttaattttccctcttttcatgtaacaccgttgaagctaatggtctcaccaacttccgtggcagccgtacctgtcgggaacagcccggctctcgcttcaagccaccctgttcccatccagaacccaagctcagccattgtaaacttcaccctgcagcacctgggactcatctcacccaatgtgcagttgtctgccagccctgggtctggaatcgttcctgtgtctccaagaatagagtctgttaatgtcgcaccagaaaatgcaggcactcagcaaggaagggccaccaactatgactcaccagtcccaggccagagccagccaaatggacaatcagttgctgtgacaggggcacaacagcctgttcctgtgacacccaaagggtcacaattagtggccgaaagtttcttccgtaccccaggtggacccaccaagccaaccagctcatcctgcatggattttgagggtgctaataaaacctccttaggaactctctttgtcccacagcgaaaactggaagtctcaacagaggatgtccattaatcaacagatgttggcttagtttaattttctaaagagttgtttaatagagaaaatgtacacagactgatttggagaacacattctctgaaaatactgtaaatacgttggggatttgttcaatgt

SEQ ID NO: 128870 - DNA, 3432 bp, Homo sapiens
  Payload ID: 5205
  Gene Symbol: E2F8
  Gene Name: E2F transcription factor 8
  Uniprot ID: A0AVK6
  ENST ID: ENST00000527884
  CDS Start-End: 234-2837
aaatcgggggcttggctgctcctggacggtcacgctccctctgcccgccagccggcccgccagtcccggtcccggcgtctctctccggcacccacctcggcgctgcggaaagactgactgccaggatattaaaacttttagtacaattgattggactacttgaaccatcgggatttggggaggaactccagatttttcatttttaaactctaaatgtatgaggaatttacagaatggagaacgaaaaggaaaatctcttttgtgagccacataaaaggggactaatgaaaacacctctgaaagaatccaccacagcaaatatcgtgttggcagagatccagcctgactttggccctttaaccacacctaccaagcccaaggaaggctctcagggagagccgtggacaccgacagccaacctgaaaatgctcatcagtgctgtgagccctgagatccgcaacagagatcagaaaaggggtttgtttgacaacagaagtggattacctgaggccaaagactgtatacacgaacacttatctggagatgaatttgagaaatcccaaccaagtcgaaaagagaaaagtttaggattattgtgtcataagttcttagcacgatatcctaattatcccaaccctgctgtgaataatgacatctgccttgacgaagtggcagaggaacttaatgttgaacgtcgacgcatttacgatatcgtgaacgtcctagagagtttacatatggtgagccgcctcgccaaaaacaggtacacttggcacgggcgacacaatctcaacaaaacccttggcaccttgaagagcatcggggaggagaataagtacgccgagcagattatgatgatcaaaaagaaagaatatgagcaagagtttgactttattaagagttacagtatagaggatcatatcatcaaatcaaacactggcccaaatggacacccagacatgtgttttgtggaactccctggagtggaatttcgggcagcttctgtaaacagccgcaaagacaagtctttaagggtaatgagccagaaatttgtgatgctgtttttggtgtcaacgcctcagatagtaagcctagaagttgctgccaagattttaattggggaggaccatgtggaagatttggataaaagcaagtttaaaacaaaaattaggaggttgtatgatatagctaatgttctgagtagcctggatcttatcaagaaagttcatgttacagaggaaagaggccgaaaaccagctttcaaatggaccggcccagaaatcagtccaaataccagtggctccagcccagtcattcattttactccctctgatttggaggtgagacggtcttcaaaagagaactgtgccaaaaacctcttttccacacgtgggaaaccaaactttactcgacacccatctcttatcaaattggtaaagagtatagaaagtgatcggagaaagataaattctgcgcccagtagccctatcaagaccaacaaagctgagagttctcagaattctgcacccttcccaagtaaaatggctcagctcgcagctatttgtaaaatgcagttagaagagcaatcaagtgaatccagacagaaagtgaaagtacagctggcaagatctggaccctgcaaaccagtagcccctctggaccccccagtgaatgctgagatggagctgacagcaccgtccctcatccagcccctgggaatggttcccctgatccccagccccttgtcatcagcagtgcccctgatcctacctcaggccccttcaggcccatcctatgccatctacctgcagcccactcaagcccaccaaagtgtgacgccaccccaaggcctgagcccaacggtgtgcaccacccactcttctaaagctactggctcaaaagactccacagatgccaccactgagaaggcagccaatgatacctcaaaggccagtgcctctaccaggcctggaagcttgctgccagcaccagagaggcaaggggcaaagagccgaaccagggagccagctggagaaagaggctcaaagagggcaagcatgctcgaggacagtggttccaaaaagaaatttaaagaggacctaaaaggacttgaaaatgtctccgcaaccttgttcccatcaggatacctaatccctctcacgcagtgctcatccctgggggcagagtccattttgtctggtaaagaaaactcaagtgctctttccccaaaccacaggatttacagctccccaattgcaggtgttattccagtgacatcatctgaactcactgctgttaattttccctcttttcatgtaacaccgttgaagctaatggtctcaccaacttccgtggcagccgtacctgtcgggaacagcccggctctcgcttcaagccaccctgttcccatccagaacccaagctcagccattgtaaacttcaccctgcagcacctgggactcatctcacccaatgtgcagttgtctgccagccctgggtctggaatcgttcctgtgtctccaagaatagagtctgttaatgtcgcaccagaaaatgcaggcactcagcaaggaagggccaccaactatgactcaccagtcccaggccagagccagccaaatggacaatcagttgctgtgacaggggcacaacagcctgttcctgtgacacccaaagggtcacaattagtggccgaaagtttcttccgtaccccaggtggacccaccaagccaaccagctcatcctgcatggattttgagggtgctaataaaacctccttaggaactctctttgtcccacagcgaaaactggaagtctcaacagaggatgtccattaatcaacagatgttggcttagtttaattttctaaagagttgtttaatagagaaaatgtacacagactgatttggagaacacattctctgaaaatactgtaaatacgttggggatttgttcaatgtgaaatcagatagttgttttcatacatatatatatatacacacacacacacacacacacacacacatatatttgtataaagctaagtttagctttcaatcctacaaaataaaagtaaaatgttgaactctaagatatattaacttctagggggaaaaatccattattttagctatgcctatactattatgcaaagtaactgtattaaagtttacttccctctaagcaaatatgcttgacatgcctaacacagcattcccttaaacattttgcacaaagaaaatgctgtgtgatgtataatgttgtatttttaaataggggtatagctatattttttgtaatttctttaatctgttgttgcagtgtatctttttgtaaagtttgcaacaatcctcaatcaagtctatggaaaaattatttataaaatgtatttttaatcataagttgttcaaattaaaacttttctaaaatata

SEQ ID NO: 128871 - DNA, 719 bp, Homo sapiens
  Payload ID: 5205
  Gene Symbol: E2F8
  Gene Name: E2F transcription factor 8
  ENST ID: ENST00000532666
  CDS Start-End: 302-719
tggacggtcacgctccctctgcccgccagccggcccgccagtcccggtcccggcgtctctctccggcacccacctcggcgctgcggaaagactgactgccaggtacgcgggctcccgggcctgagaggggcagcggtgctgacgagtcccggctcagcccccgccggctcccgccgtgaggtggactgacaggatattaaaacttttagtacaattgattggactacttgaaccatcgggatttggggaggaactccagatttttcatttttaaactctaaatgtatgaggaatttacagaatggagaacgaaaaggaaaatctcttttgtgagccacataaaaggggactaatgaaaacacctctgaaagaatccaccacagcaaatatcgtgttggcagagatccagcctgactttggccctttaaccacacctaccaagcccaaggaaggctctcagggagagccgtggacaccgacagccaacctgaaaatgctcatcagtgctgtgagccctgagatccgcaacagagatcagaaaaggggtttgtttgacaacagaagtggattacctgaggccaaagactgtatacacgaacacttatctggagatgaatttgagaaatcccaaccaagtcgaaaagagaaaagtttaggattattgtgtcataagttcttagcacgatatcctaattatcccaaccctgctgtgaataatg

SEQ ID NO: 128872 - DNA, 3519 bp, Homo sapiens
  Payload ID: 5205
  Gene Symbol: E2F8
  Gene Name: E2F transcription factor 8
  Uniprot ID: A0AVK6
  ENST ID: ENST00000620009
  CDS Start-End: 324-2927
aaatcgggggcttggctgctcctggacggtcacgctccctctgcccgccagccggcccgccagtcccggtcccggcgtctctctccggcacccacctcggcgctgcggaaagactgactgccaggtacgcgggctcccgggcctgagaggggcagcggtgctgacgagtcccggctcagcccccgccggctcccgccgtgaggtggactgacaggatattaaaacttttagtacaattgattggactacttgaaccatcgggatttggggaggaactccagatttttcatttttaaactctaaatgtatgaggaatttacagaatggagaacgaaaaggaaaatctcttttgtgagccacataaaaggggactaatgaaaacacctctgaaagaatccaccacagcaaatatcgtgttggcagagatccagcctgactttggccctttaaccacacctaccaagcccaaggaaggctctcagggagagccgtggacaccgacagccaacctgaaaatgctcatcagtgctgtgagccctgagatccgcaacagagatcagaaaaggggtttgtttgacaacagaagtggattacctgaggccaaagactgtatacacgaacacttatctggagatgaatttgagaaatcccaaccaagtcgaaaagagaaaagtttaggattattgtgtcataagttcttagcacgatatcctaattatcccaaccctgctgtgaataatgacatctgccttgacgaagtggcagaggaacttaatgttgaacgtcgacgcatttacgatatcgtgaacgtcctagagagtttacatatggtgagccgcctcgccaaaaacaggtacacttggcacgggcgacacaatctcaacaaaacccttggcaccttgaagagcatcggggaggagaataagtacgccgagcagattatgatgatcaaaaagaaagaatatgagcaagagtttgactttattaagagttacagtatagaggatcatatcatcaaatcaaacactggcccaaatggacacccagacatgtgttttgtggaactccctggagtggaatttcgggcagcttctgtaaacagccgcaaagacaagtctttaagggtaatgagccagaaatttgtgatgctgtttttggtgtcaacgcctcagatagtaagcctagaagttgctgccaagattttaattggggaggaccatgtggaagatttggataaaagcaagtttaaaacaaaaattaggaggttgtatgatatagctaatgttctgagtagcctggatcttatcaagaaagttcatgttacagaggaaagaggccgaaaaccagctttcaaatggaccggcccagaaatcagtccaaataccagtggctccagcccagtcattcattttactccctctgatttggaggtgagacggtcttcaaaagagaactgtgccaaaaacctcttttccacacgtgggaaaccaaactttactcgacacccatctcttatcaaattggtaaagagtatagaaagtgatcggagaaagataaattctgcgcccagtagccctatcaagaccaacaaagctgagagttctcagaattctgcacccttcccaagtaaaatggctcagctcgcagctatttgtaaaatgcagttagaagagcaatcaagtgaatccagacagaaagtgaaagtacagctggcaagatctggaccctgcaaaccagtagcccctctggaccccccagtgaatgctgagatggagctgacagcaccgtccctcatccagcccctgggaatggttcccctgatccccagccccttgtcatcagcagtgcccctgatcctacctcaggccccttcaggcccatcctatgccatctacctgcagcccactcaagcccaccaaagtgtgacgccaccccaaggcctgagcccaacggtgtgcaccacccactcttctaaagctactggctcaaaagactccacagatgccaccactgagaaggcagccaatgatacctcaaaggccagtgcctctaccaggcctggaagcttgctgccagcaccagagaggcaaggggcaaagagccgaaccagggagccagctggagaaagaggctcaaagagggcaagcatgctcgaggacagtggttccaaaaagaaatttaaagaggacctaaaaggacttgaaaatgtctccgcaaccttgttcccatcaggatacctaatccctctcacgcagtgctcatccctgggggcagagtccattttgtctggtaaagaaaactcaagtgctctttccccaaaccacaggatttacagctccccaattgcaggtgttattccagtgacatcatctgaactcactgctgttaattttccctcttttcatgtaacaccgttgaagctaatggtctcaccaacttccgtggcagccgtacctgtcgggaacagcccggctctcgcttcaagccaccctgttcccatccagaacccaagctcagccattgtaaacttcaccctgcagcacctgggactcatctcacccaatgtgcagttgtctgccagccctgggtctggaatcgttcctgtgtctccaagaatagagtctgttaatgtcgcaccagaaaatgcaggcactcagcaaggaagggccaccaactatgactcaccagtcccaggccagagccagccaaatggacaatcagttgctgtgacaggggcacaacagcctgttcctgtgacacccaaagggtcacaattagtggccgaaagtttcttccgtaccccaggtggacccaccaagccaaccagctcatcctgcatggattttgagggtgctaataaaacctccttaggaactctctttgtcccacagcgaaaactggaagtctcaacagaggatgtccattaatcaacagatgttggcttagtttaattttctaaagagttgtttaatagagaaaatgtacacagactgatttggagaacacattctctgaaaatactgtaaatacgttggggatttgttcaatgtgaaatcagatagttgttttcatacatatatatatatacacacacacacacacacacacacacacatatatttgtataaagctaagtttagctttcaatcctacaaaataaaagtaaaatgttgaactctaagatatattaacttctagggggaaaaatccattattttagctatgcctatactattatgcaaagtaactgtattaaagtttacttccctctaagcaaatatgcttgacatgcctaacacagcattcccttaaacattttgcacaaagaaaatgctgtgtgatgtataatgttgtatttttaaataggggtatagctatattttttgtaatttctttaatctgttgttgcagtgtatctttttgtaaagtttgcaacaatcctcaatcaagtctatggaaaaattatttataaaatgtatttttaatcataagttgttcaaattaaaacttttctaaaat

SEQ ID NO: 128873 - DNA, 1321 bp, Homo sapiens
  Payload ID: 5206
  Gene Symbol: EAPP
  Gene Name: E2F-associated phosphoprotein
  Uniprot ID: Q56P03
  ENST ID: ENST00000250454
  CDS Start-End: 83-940
gggcgctttagggactggacttgcagtgtaaacagagacgctgcaaattgcttgtggacggtgtaggccgctgcaggccaccatgaaccggcttccggatgactacgacccctacgcggttgaagagcctagcgacgaggagccggctttgagcagctctgaggatgaagtggatgtgcttttacatggaactcctgaccaaaaacgaaaactcatcagagaatgtcttaccggagaaagtgaatcatctagtgaagatgaatttgaaaaggagatggaagctgaattaaattctaccatgaaaacaatggaggacaagttatcctctctgggaactggatcttcctcaggaaatggaaaagttgcaacagctccgacaaggtactacgatgatatatattttgattctgattccgaggatgaagacagagcagtacaggtgaccaagaaaaaaaagaagaaacaacacaagattccaacaaatgacgaattactgtatgatcctgaaaaagataacagagatcaggcctgggttgatgcacagagaaggggttaccatggtttgggaccacagagatcacgtcaacaacagcctgttccaaatagtgatgctgtcttgaattgtcctgcctgcatgaccacactttgccttgattgccaaaggcatgaatcatacaaaactcaatatagagcaatgtttgtaatgaattgttctattaacaaagaggaggttctaagatataaagcctcagagaacaggaagaaaaggcgggtccataagaagatgaggtctaaccgggaagatgctgccgagaaggcagagacagatgtggaagaaatctatcacccagtcatgtgcactgaatgttccactgaagtggcagtctacgacaaggatgaagtctttcattttttcaatgttttagcaagccattcctaaacagcccaactggcatttaattacccaatactgtatataaggcaaatatggacagttactttcctcttgcctgttcatatccttcagtgacattgaggaagcagtgtttctctttttaaaggagaatagttgtcaaccttcattcatctcttacatctctcaccctctccttttttttttctttgattttcccccttattgatgggactgatattcattctgtttttgatgaacatttggaaactgtcgggctttttattaaagctctgtagaattaaaatgttctggaattataagcaatctttgtttctgagtgttatttttattttggatatagctttgatgtaattaaactggaaactctttcctgaattgtctgta

SEQ ID NO: 128874 - DNA, 774 bp, Homo sapiens
  Payload ID: 5206
  Gene Symbol: EAPP
  Gene Name: E2F-associated phosphoprotein
  ENST ID: ENST00000554792
  CDS Start-End: 160-774
gaaatatgcagaactggcttattaagtgagaatagctatatgtaatgtataagtacatcaaatgtaaccatgtaatacttaaaattgttgttggacagtgagatgctgggagtttaaaattattttaatttttaaatattcatattctttttgatttaaatgtatgctagctctgaggatgaagtggatgtgcttttacatggaactcctgaccaaaaacgaaaactcatcagagaatgtcttaccggagaaagtgaatcatctagtgaagatgaatttgaaaaggagatggaagctgaattaaattctaccatgaaaacaatggaggacaagttatcctctctgggaactggatcttcctcaggaaatggaaaagttgcaacagctccgacaaggtactacgatgatatatattttgattctgattccgaggatgaagacagagcagtacaggtgaccaagaaaaaaaagaagaaacaacacaagattccaacaaatgacgaattactgtatgatcctgaaaaagataacagagatcaggcctgggttgatgcacagagaaggggttaccatggtttgggaccacagagatcacgtcaacaacagcctgttccaaatagtgatgctgtcttgaattgtcctgcctgcatgaccacactttgccttgattgccaaaggcatgaatcatacaaaactcaatatagagcaatgtttgtaatgaattgttctattaacaaagaggaggttctaagatataaagcctcagagaacagg

SEQ ID NO: 128875 - DNA, 841 bp, Homo sapiens
  Payload ID: 5206
  Gene Symbol: EAPP
  Gene Name: E2F-associated phosphoprotein
  ENST ID: ENST00000555705
  CDS Start-End: 71-400
gactggacttgcagtgtaaacagagacgctgcaaattgcttgtggacggtgtaggccgctgcaggccaccatgaaccggcttccggatgactacgacccctacgcggttgaagagcctagcgacgaggagccggctttgagcaggtgggctcccgccccaccctggcccccgaggatttgggtcgaggcctggctttggtcgcctccattcgttgcgcctgccgagcctacgcagaccctagcggctcgggagcctgtcgtgcctgttacttgtgcgaagccaaagggctttcctgatggggtcgcgcagtcccggggggaggcggtgccgatgtcgcctgtaggaagagggatattccggaatcacgggggaccgcgtgtaaatcttcaaaagcaatgagatcgaaacctgtctctacaccttagtagcagagtgacggaagctctgaggatgaagtggatgtgcttttacatggaactcctgaccaaaaacgaaaactcatcagagaatgtcttaccggagaaagtgaatcatctagtgaagatgaatttgaaaaggagatggaagctgaattaaattctaccatgaaaacaatggaggacaagttatcctctctgggaactggatcttcctcaggaaatggaaaagttgcaacagctccgacaaggtactacgatgatatatattttgattctgattccgaggatgaagacagagcagtacaggtgaccaagaaaaaaaagaagaaacaacacaagattccaacaaatgacgaattactgtatgatcctgaaaaagataacagagatcaggcctgggttgatgcacagagaagggggt

SEQ ID NO: 128876 - DNA, 1237 bp, Homo sapiens
  Payload ID: 5206
  Gene Symbol: EAPP
  Gene Name: E2F-associated phosphoprotein
  ENST ID: ENST00000618169
  CDS Start-End: 84-779
ggggcgctttagggactggacttgcagtgtaaacagagacgctgcaaattgcttgtggacggtgtaggccgctgcaggccaccatgaaccggcttccggatgactacgacccctacgcggttgaagagcctagcgacgaggagccggctttgagcagctctgaggatgaagtggatgtgcttttacatggaactcctgaccaaaaacgaaaactcatcagagaatgtcttaccggagaaagtgaatcatctagtgaagatgaatttgaaaaggagatggaagctgaattaaattctaccatgaaaacaatggaggacaagttatcctctctgggaactggatcttcctcaggaaatggaaaagttgcaacagctccgacaaggtactacgatgatatatattttgattctgattccgaggatgaagacagagcagtacaggtgaccaagaaaaaaaagaagaaacaacacaagattccaacaaatgacgaattactgtatgatcctgaaaaagataacagagatcaggcctgggttgatgcacagagaaggggttaccatggtttgggaccacagagatcacgtcaacaacagcctgttccaaatagtgatgctgtcttgtcctgcctgcatgaccactttgccttgattgccaaaggtatgaagcatgaatcatacaaaactcaatatagagcaatgtttgtaatgaattgttctattaacaaagaggaggttctaagatataaagcctcagagaacagggaaaaggcgggtccataagaagatgaggtctaaccgggaagatgctgccgagaaggcagagacagatgtggaagaaatctatcacccagtcatgtgcactgaatgttccactgaagtggcagtctacgacaaggatgaagtctttcattttttcaatgttttagcaagccattcctaaacagcccaactggcatttaattacccaatactgtatataaggcaaatatggacagttactttcctcttgcctgttcatatccttcagtgacattgaggaagcagtgtttctctttttaaaggagaatagttgtcaaccttcattcatctcttacatctctcaccctctccttttttttttctttgattttcccccttattgatgggactgatattcattctgtttttgatgaacatttggaaactgtcgggctttttattaaagctctgtagaattaaaatgttctggaattataagc

SEQ ID NO: 128877 - DNA, 2573 bp, Homo sapiens
  Payload ID: 5207
  Gene Symbol: E4F1
  Gene Name: E4F transcription factor 1
  Uniprot ID: Q66K89
  ENST ID: ENST00000301727
  CDS Start-End: 49-2403
atgacgacatggtcgtaaatccgccatcttcctgcggcgcgttgcgacatggagggcgcgatggcagtgcgggtgacggccgctcatacggcagaagcccaggccgaagccgggcgggaagcgggcgagggtgcagttgcggcggtggcggcggccttggcccccagcggcttcctcggcctcccggcgcccttcagcgaggaagatgaggacgatgtgcacagatgcggccgctgccaggcagagttcaccgccttggaggattttgttcagcacaagattcagaaggcctgccagcgggcccctccggaggccctgcctgccacccctgccaccacagcgttgctgggccaggaggtggtgccggcagcaccaggcccagaggagcccatcactgtggcccacatcgtggtggaggcggcctctctggcagcagacatcagccacgcatctgaccttgttggtggtgggcacatcaaagaggtcatcgtggctgctgaggcggagctgggagacggtgagatggccgaggccccgggcagcccccgccagcaggggctggggctcgcaggggagggtgagcaggcccaggtgaagctactggtgaacaaggatggccgctatgtgtgtgcgctgtgccacaagaccttcaagacgggcagcatcctcaaggcccacatggtcactcacagcagccgcaaggaccacgagtgcaagctctgtggggcctccttccgcaccaagggctcactcatccggcaccaccggcggcacacggatgagcgcccctacaagtgctccaagtgtggaaagagcttccgggagtcgggtgcactgacccggcacctcaagtctctcaccccctgcacagagaaaatccgcttcagtgtgagcaaggacgtggttgtcagcaaagaggacgcacgtgcaggttctggagctggagctgccggcttggggacagccacatcatcggtgacaggcgagcctatagagacttcacccgtgattcacctggtgacagatgccaagggcaccgtcatccacgaagtccacgtccagatgcaggagctgtccctgggcatgaaagccctggccccagagccccccgtctcccaggagctcccctgctccagcgagggcagccgtgagaacctgctgcaccaggccatgcagaactccggcatcgtccttgagcgcgctgctggggaggagggtgccctggagccagctcctgctgccgggtccagtccccagcccctggcagtggcagccccgcagctgccggtactggaagtgcagccgctggagacacaggtggccagcgaggcctcagcggtgcccaggacccacccatgtcctcagtgcagtgagaccttcccgacagcagccaccctggaggcccacaagaggggccacaccgggccgaggccgttcgcctgcgcgcagtgtggcaaggccttccccaaggcctacctgctcaagaagcaccaggaggtgcacgtgcgtgagcgccgcttccgctgtggcgactgcgggaagctctacaagaccattgcccatgtgcgtggccaccggcgcgtccactcagacgagcggccctacccttgtcccaagtgtggcaagcgctacaagactaagaacgcacagcaggtgcacttcaggacacacctggaggagaagccgcacgtgtgccagttctgcagccgtggcttccgagagaagggctcactggtgcggcacgtgcgacaccacacaggcgagaagccgttcaagtgctacaagtgcggccgtggcttcgccgagcacggcacgctgaaccggcacctgcgcaccaaagggggctgcctgctggaggtggaggagttgctggtgtctgaggacagccccgcggcagccaccaccgtcctcacggaagacccgcacacagtgttggtggagttctcgtccgtggtagctgacacccaggagtatatcatcgaggccactgcggacgatgcggagaccagtgaggccacggagatcatcgagggcacccagacagaggtggacagccacatcatgaaggtggtgcagcagatcgtgcaccaggctagcgccggccaccagatcatcgtgcagaacgtcaccatggacgaggagacggcgctgggcccagaggcggctgccgccgacaccatcaccatcgccacccccgagagcctgacagagcaggtggccatgacgctggcctcggccatcagcgagggcactgtgcttgccgcccgggcagggacaagtggcactgaacaggccactgtgaccatggtgtcatcagaggacatcgagatcctggagcatgcaggcgagctggtcatcgcctcgccggagggccagctggaggtgcagacggtcatcgtctagcatgaggtctgcggggtcctggccgggcagggacagggcagaggactctgagcgccccacccatgcctgcctggcctggtagagaagatggcacaggatggaggcgccccaagacggacagtgtacataagagtttcttgttgctttacaataaaacatgagaacctgca

SEQ ID NO: 128878 - DNA, 940 bp, Homo sapiens
  Payload ID: 5207
  Gene Symbol: E4F1
  Gene Name: E4F transcription factor 1
  ENST ID: ENST00000565413
  CDS Start-End: 124-940
gcggccttggcccccagcggcttcctcggcctcccggcgcccttcagcgaggaaggtaaccgggccgacccggagggtgcggccggggtgcgggcagttcatcccgggctggcagaggcccggatggcccgagctgcgggctcgaccgaccctcccagacccagacacctcgcggatctcgcgggaccctcacagccctccacgaaacccccagatgaggacgatgtgcacagatgcggccgctgccaggcagagttcaccgccttggaggattttgttcagcacaagattcagaaggcctgccagcgggcccctccggaggccctgcctgccacccctgccaccacagcgttgctgggccaggaggtggtgccggcagcaccaggcccagaggagcccatcactgtggcccacatcgtggtggaggcggcctctctggcagcagacatcagccacgcatctgaccttgttggtggtgggcacatcaaagaggtcatcgtggctgctgaggcggagctgggagacggtgagatggccgaggccccgggcagcccccgccagcaggggctggggctcgcaggggagggtgagcaggcccaggtgaagctactggtgaacaaggatggccgctatgtgtgtgcgctgtgccacaagaccttcaagacgggcagcatcctcaaggcccacatggtcactcacagcagccgcaaggaccacgagtgcaagctctgtggggcctccttccgcaccaagggctcactcatccggcaccaccggcggcacacggatgagcgcccctacaagtgctccaagtgtggaaagagcttccgggagtcgggtgcactgacccggcacctcaagtctctcaccccctgcacagagaaaatccgcttcagtgtgagcaaggacgtggttgtcagcaaagaggacgcacgtgcag

SEQ ID NO: 128879 - DNA, 817 bp, Homo sapiens
  Payload ID: 5207
  Gene Symbol: E4F1
  Gene Name: E4F transcription factor 1
  ENST ID: ENST00000562589
  CDS Start-End: 1-626
tggagggcgcgatggcagtgcgggtgacggccgctcatacggcagaagcccaggccgaagccgggcgggaagcgggcgagggtgcagttgcggcggtggcggcggccttggcccccagcggcttcctcggcctcccggcgcccttcagcgaggaagggctggaggaaaagccagacggagccctggctgcccagcctccgccttcccaggccctgctgacagcaggctcgttgcagatgaggacgatgtgcacagatgcggccgctgccaggcagagttcaccgccttggaggattttgttcagcacaagattcagaaggcctgccagcgggcccctccggaggccctgcctgccacccctgccaccacagcgttgctgggccaggaggtggtgccggcagcaccaggcccagaggagcccatcactgtggcccacatcgtggtggaggcggcctctctggcagcagacatcagccacgcatctgaccttgttggtggtgggcacatcaaagaggtcatcgtggctgctgaggcggagctgggagacggtgagatggccgaggccccgggcagcccccgccagcaggggctggggctcgcaggggagggtgagcaggcccaggtgaagctactggtgaacaaggatggccgctatgtgtgtgcgctgtgccacaagaccttcaagacgggcagcatcctcaaggcccacatggtcactcacagcagccgcaaggaccacgagtgcaagctctgtggggcctccttccgcaccaagggctcactcatccggcaccaccggcggcacacggatgagcgc

SEQ ID NO: 128880 - DNA, 2028 bp, Homo sapiens
  Payload ID: 5207
  Gene Symbol: E4F1
  Gene Name: E4F transcription factor 1
  ENST ID: ENST00000565090
  CDS Start-End: 35-1858
gtaaatccgccatcttcctgcggcgcgttgcgacatggagggcgcgatggcagtgcgggtgacggccgctcatacggcagaagcccaggccgaagccgggcgggaagcgggcgagggtgcagttgcggcggtggcggcggccttggcccccagcggcttcctcggcctcccggcgcccttcagcgaggaagatgaggacgatgtgcacagatgcggccgctgccaggcagagttcaccgccttggaggattttgttcagcacaagattcagaaggcctgccagcgggcccctccggaggccctgcctgccacccctgccaccacagcgttgctgggccaggaggtggtgccggcagcaccaggcccagaggagcccatcactgtggcccacatcgtggtggaggcggcctctctggcagcagacatcagccacgcatctgaccttgttggtggtgggcacatcaaagaggtcatcgtggctgctgaggcggagctgggagacggtgagatggccgaggccccgggcagcccccgccagcaggggctggggctcgcaggggagggtgagcaggcccaggtgaagctactggtgaacaaggatggccgctatgtgtgtgcgctgtgccacaagaccttcaagacgggcagcatcctcaaggcccacatggtcactcacagcagccgcaaggaccacgagtgcaagctctgtggggcctccttccgcaccaagggctcactcatccggcaccaccggcggcacacggatgagcgcccctacaagtgctccaagtgtggaaagagcttccgggagtcgggtgcactgacccggcacctcaagtctctcaccccctgcacagagaaaatccgcttcagtgtgagcaaggacgtggttgtcagcaaagaggacgcacgtgcaggttctggagctggagctgccggcttggggacagccacatcatcggtgacaggcgagcctatagagacttcacccgtgattcacctggtgacagatgccaagggcaccgtcatccacgaagtccacgtccagatgcaggagctgtccctgggcatgaaagccctggccccagagccccccgtctcccaggagctcccctgctccagcgagggcagccgtgagaacctgctgcaccagttctgcagccgtggcttccgagagaagggctcactggtgcggcacgtgcgacaccacacaggcgagaagccgttcaagtgctacaagtgcggccgtggcttcgccgagcacggcacgctgaaccggcacctgcgcaccaaagggggctgcctgctggaggtggaggagttgctggtgtctgaggacagccccgcggcagccaccaccgtcctcacggaagacccgcacacagtgttggtggagttctcgtccgtggtagctgacacccaggagtatatcatcgaggccactgcggacgatgcggagaccagtgaggccacggagatcatcgagggcacccagacagaggtggacagccacatcatgaaggtggtgcagcagatcgtgcaccaggctagcgccggccaccagatcatcgtgcagaacgtcaccatggacgaggagacggcgctgggcccagaggcggctgccgccgacaccatcaccatcgccacccccgagagcctgacagagcaggtggccatgacgctggcctcggccatcagcgagggcactgtgcttgccgcccgggcagggacaagtggcactgaacaggccactgtgaccatggtgtcatcagaggacatcgagatcctggagcatgcaggcgagctggtcatcgcctcgccggagggccagctggaggtgcagacggtcatcgtctagcatgaggtctgcggggtcctggccgggcagggacagggcagaggactctgagcgccccacccatgcctgcctggcctggtagagaagatggcacaggatggaggcgccccaagacggacagtgtacataagagtttcttgttgctttacaataaaacatgagaacctgca

SEQ ID NO: 128881 - DNA, 2493 bp, Homo sapiens
  Payload ID: 5207
  Gene Symbol: E4F1
  Gene Name: E4F transcription factor 1
  ENST ID: ENST00000564139
  CDS Start-End: 21-1985
ttcctgcggcgcgttgcgacatggagggcgcgatggcagtgcgggtgacggccgctcatacggcagaagcccaggccgaagccgggcgggaagcgggcgagggtgcagttgcggcggtggcggcggccttggcccccagcggcttcctcggcctcccggcgcccttcagcgaggaagatgaggacgatgtgcacagatgcggccgctgccaggcagagttcaccgccttggaggattttgttcagcacaagattcagaaggcctgccagcgggcccctccggaggccctgcctgccacccctgccaccacagcgttgctgggccaggaggtggtgccggcagcaccaggcccagaggagcccatcactgtggcccacatcgtggtggaggcggcctctctggcagcagacatcagccacgcatctgaccttgttggtggtgggcacatcaaagaggtcatcgtggctgctgaggcggagctgggagacggtgagatggccgaggccccgggcagcccccgccagcaggggctggggctcgcaggggagggtgagcaggcccaggtgaagctactggtgaacaaggatggccgctatgtgtgtgcgctgtgccacaagaccttcaagacgggcagcatcctcaaggcccacatggtcactcacagcagccgcaaggaccacgagtgcaagctctgtggggcctccttccgcaccaagggctcactcatccggcaccaccggcggcacacggatgagcgcccctacaagtgctccaagtgtggaaagagcttccgggagtcgggtgcactgacccggcacctcaagtctctcaccccctgcacagagaaaatccgcttcagtgtgagcaaggacgtggttgtcagcaaagaggacgcacgtgcaggttctggagctggagctgccggcttggggacagccacatcatcggtgacaggcgagcctatagagacttcacccgtgattcacctggtgacagatgccaagggcaccgtcatccacgaagtccacgtccagatgcaggagctgtccctgggcatgaaagccctggccccagagccccccgtctcccaggagctcccctgctccagcgagggcagccgtgagaacctgctgcaccaggccatgcagaactccggcatcgtccttgagcgcgctgctggggaggagggtgccctggagccagctcctgctgccgggtccagtccccagcccctggcagtggcagccccgcagctgccggtactggaagtgcagccgctggagacacaggtggccagcgaggcctcagcggtgcccaggacccacccatgtcctcagtgcagtgagaccttcccgacagcagccaccctggaggcccacaagaggggccacaccgggccgaggccgttcgcctgcgcgcagtgtggcaaggccttccccaaggcctacctgctcaagaagcaccaggaggtgcacgtgcgtgagcgccgcttccgctgtggcgactgcgggaagctctacaagaccattgcccatgtgcgtggccaccggcgcgtccactcagacgagcggccctacccttgtcccaagtgtggcaagcgctacaagactaagaacgcacagcaggtgcacttcaggacacacctggaggagaagccgcacgtgtgccagttctgcagccgtggcttccgagagaagggctcactggtgcggcacgtgcgacaccacacaggcgagaagccgttcaagtgctacaagtgcggccgtggcttcgccgagcacggcacgctgaaccggcacctgcgcaccaaagggggctgcctgctggaggtggaggagttgctggtgtctgaggacagccccgcggcagccaccaccgtcctcacggaagacccgcacacagtgccactgcggacgatgcggagaccagtgaggccacggagatcatcgagggcacccagacagaggtggacagccacatcatgaaggtggtgcagcagatcgtgcaccaggctagcgccggccaccagatcatcgtgcagaacgtcaccatggacgaggagacggcgctgggcccagaggcggctgccgccgacaccatcaccatcgccacccccgagagcctgacagagcaggtggccatgacgctggcctcggccatcagcgagggcactgtgcttgccgcccgggcagggacaagtggcactgaacaggccactgtgaccatggtgtcatcagaggacatcgagatcctggagcatgcaggcgagctggtcatcgcctcgccggagggccagctggaggtgcagacggtcatcgtctagcatgaggtctgcggggtcctggccgggcagggacagggcagaggactctgagcgccccacccatgcctgcctggcctggtagagaagatggcacaggatggaggcgccccaagacggacagtgtacataagagtttcttgttgctttacaataaaacatgagaacctgca

SEQ ID NO: 128882 - DNA, 3566 bp, Homo sapiens
  Payload ID: 5208
  Gene Symbol: ELF1
  Gene Name: E74-like factor 1 (ets domain transcription factor)
  Uniprot ID: P32519
  ENST ID: ENST00000239882
  CDS Start-End: 316-2175
tctacaggagccattttaacagctaaaacttgtcggattgctttttattttcaagctcaaaagacgatagagaaagaatacttgaaggccaagaagcttgagagaagaaaaatttcagaaaaattgtctcaatttgactagaatatcaatgaaccaggaaaactgaagcaccttccctaaagaaaacttgggtatacaattactccacagacagagctgagggttttttacccaaatcagtcactggattttgctgcctgatacgtgaatcttcttggaatttttctcatgtggatctaaggggaatgctttattatggctgctgttgtccaacagaacgacctagtatttgaatttgctagtaacgtcatggaggatgaacgacagcttggtgatccagctatttttcctgccgtaattgtggaacatgttcctggtgctgatattctcaatagttatgccggtctagcctgtgtggaagagcccaatgacatgattactgagagttcactggatgttgctgaagaagaaatcatagacgatgatgatgatgacatcacccttacagttgaagcttcttgtcatgacggggatgaaacaattgaaactattgaggctgctgaggcactcctcaatatggattcccctggccctatgctggatgaaaaacgaataaataataatatatttagttcacctgaagatgacatggttgttgccccagtcacccatgtgtccgtcacattagatgggattcctgaagtgatggaaacacagcaggtgcaagaaaaatatgcagactcaccgggagcctcatcaccagaacagcctaagaggaaaaaaggaagaaaaactaaaccaccacgaccagattccccagccactacgccaaatatatctgtgaagaagaaaaacaaagatggaaagggaaacacaatttatctttgggagtttttactggcactgctccaggacaaggctacttgtcctaaatacatcaagtggacccagcgagagaaaggcatttttaaattggtggattctaaagcagtgtccaggttgtgggggaagcacaaaaacaaacctgatatgaattatgagaccatgggaagagcactcaggtactattaccaaaggggtattctggcaaaagtggaaggtcagcgcttggtgtatcagtttaaagaaatgccaaaagatcttatatatataaatgatgaggatccaagttccagcatagagtcttcagatccatcgctatcttcatcagccacttcaaataggaatcaaaccagccggtcgagagtatcttcaagtccaggggtaaaaggaggagccactacagttctaaaaccagggaattctaaagctgcaaaacccaaagatcctgtggaagttgcacaaccatcagaagttttgaggacagtgcagcccacgcagtctccatatcctacccagctcttccggactgttcatgtagtacagccagtacaggctgtcccagagggagaagcagctagaaccagtaccatgcaggatgaaacattaaattcttccgttcagagtattaggactatacaggctccaacccaagttccagtggttgtgtctcctaggaatcagcagttgcatacagtaacactccaaacagtgccactcacaacagttatagccagcacagatccatcagcaggtactggatctcagaagtttattttacaagccattccatcatcacagcccatgacagtactgaaagaaaatgtcatgctgcagtcacaaaaggcgggctctcctccttcaattgtcttgggccctgcccaggttcagcaggtccttactagcaatgttcagaccatttgcaatggaaccgtcagtgtggcttcctctccatccttcagtgctactgcacctgtggtgaccttttctcctcgcagttcacagctggttgctcacccacctggcactgtaatcacttcagttatcaaaactcaagaaacaaaaactcttacacaggaagtagagaaaaaggaatctgaagatcatttgaaagagaacactgagaaaacggagcagcagccacagccttatgtgatggtagtgtccagttccaatggatttacttctcaggtagctatgaaacaaaacgaactgctggaacccaactctttttagttaatataccaaagcttatgaataattgtttgttaattgaacattttcaattatatgcagactgactgattctaagataaattctaaggaggtttctaattttgtaattgttaaaaatagagttaattttgactttgttagatgagggaggaaaactcaactgtttctctttgttatctaaatgtttcagaattcaatcgtgaaggaacaggcattttacactatgaagacattcttttgagatttttatttcagttgctatatcataagcatttttaaagtttcttttctaattttacattgtattagattttctgattcttttgtaaatacagaacttaaatagaaggcaacaggaaatttatataggaactattttcattccacttgtgtaagttaagtcttgactctttcaaatgcaaaaaacctattttatgctttgttaaaattatggtgtcacttagattgactttagttgactgcactatataatatagaactatgaatatgtagaataacatgaaaaattggaggtgctggtggtatggctgaccctgtttcagaagcaggatagtataaaagcatcagcctaagaatggcactcccactaactagctatgtaatcttgacctctttgggctttagttcctctcataaaaggaagagatgtattggattagactagatgatcaccactttctcttctagttctaatttttttaattctaatacctatattttcaagttatgtcaattaaatcattatcaggttatttcctaatgtaagaatagctaaaatgttgcagagaaataagtgacccaacaaaatttattcatctgttatgggtaagatctgccataaattcttcctaaataatttgtttactaactctttaggccactgtgctttgcggtccattagtaaacttgtgttgctaagtgctaaacagaatactgctattttgagagagtcaagactctttcttaagggccaagaaagcaacttgagccttgggctaatctggctgagtagtcagttataaaagcataattgctttatattttggatcattttttactgggggcggacttggggggggttgcatacaaagataacatatatatccaactttctgaaatgaaatgtttttagattactttttcaactgtaaataatgtacatttaatgtcacaagaaaaaaatgtcttctgcaaattttctagtataacagaaatttttgtagatgaaaaaaatcattatgtttagaggtctaatgctatgttttcatattacagagtgaatttgtatttaaacaaaaatttaaattttggaatcctctaaacatttttgtatctttaattggtttattattaaataaatcatataaaaa

SEQ ID NO: 128883 - DNA, 903 bp, Homo sapiens
  Payload ID: 5208
  Gene Symbol: ELF1
  Gene Name: E74-like factor 1 (ets domain transcription factor)
  ENST ID: ENST00000405737
  CDS Start-End: 832-903
cccggctccaaagaggtggggtcggtataaaggggttgaggtcaccgggaaggggtaaaagcgcgacgggacctgagctgaaggacgggatctcaagcctcaagtccctgcgccatcccgccgtctctgtgtcctcccctggggcccaaaacctccatcctccttctaggctcgctggctcaaggccaaggagctcagcgcgccgcctccgcccggaacgcaaacagctgttcccagagacgtctccgctctcaactttgccaactactccgcacgcactttgaccagcggagcaaccgggacctgtgggtcggggtcctctggcggagttaaaaaaaaaagaggtgaaactgcgggaccggcgctgcgagtcgctaggcttcgcctcaaactttgctgttgcagcggagcggccccgcccctcctctcccctacgacgcccacgcgctcggatggggcttgttccctagctcgggagcgtgtgggcagcagcagcggcggcggcggcggcggcggcggcggcggcagcagcagcttcagtagcgcagaggcggcggtggcgagaggtgcggcgaaggaggcagaggcacttatgcttgtcaggccaagaagcttgagagaagaaaaatttcagaaaaattgtctcaatttgactagaatatcaatgaaccaggaaaactgaagcaccttccctaaagaaaacttgggtatacaattactccacagacagagctgagggttttttacccaaatcagtcactggattttgctgcctgatacgtgaatcttcttggaatttttctcatgtggatctaaggggaatgctttattatggctgctgttgtccaacagaacgacctagtatttgaatttgctagtaacgtcatggaggatgaacgacag

SEQ ID NO: 128884 - DNA, 3017 bp, Homo sapiens
  Payload ID: 5208
  Gene Symbol: ELF1
  Gene Name: E74-like factor 1 (ets domain transcription factor)
  ENST ID: ENST00000442101
  CDS Start-End: 427-1512
gcggcggcggcggcggcggcggcggcagcagcagcttcagtagcgcagaggcggcggtggcgagaggtgcggcgaaggaggcagaggcacttatgcttgtcaggccaagaagcttgagagaagaaaaatttcagaaaaattgtctcaatttgactagaatatcaatgaaccaggaaaactggaagaaaaactaaaccaccacgaccagattccccagccactacgccaaatatatctgtgaagaagaaaaacaaagatggaaagggaaacacaatttatctttgggagtttttactggcactgctccaggacaaggctacttgtcctaaatacatcaagtggacccagcgagagaaaggcatttttaaattggtggattctaaagcagtgtccaggttgtgggggaagcacaaaaacaaacctgatatgaattatgagaccatgggaagagcactcaggtactattaccaaaggggtattctggcaaaagtggaaggtcagcgcttggtgtatcagtttaaagaaatgccaaaagatcttatatatataaatgatgaggatccaagttccagcatagagtcttcagatccatcgctatcttcatcagccacttcaaataggaatcaaaccagccggtcgagagtatcttcaagtccaggggtaaaaggaggagccactacagttctaaaaccagggaattctaaagctgcaaaacccaaagatcctgtggaagttgcacaaccatcagaagttttgaggacagtgcagcccacgcagtctccatatcctacccagctcttccggactgttcatgtagtacagccagtacaggctgtcccagagggagaagcagctagaaccagtaccatgcaggatgaaacattaaattcttccgttcagagtattaggactatacaggctccaacccaagttccagtggttgtgtctcctaggaatcagcagttgcatacagtaacactccaaacagtgccactcacaacagttatagccagcacagatccatcagcaggtactggatctcagaagtttattttacaagccattccatcatcacagcccatgacagtactgaaagaaaatgtcatgctgcagtcacaaaaggcgggctctcctccttcaattgtcttgggccctgcccaggttcagcaggtccttactagcaatgttcagaccatttgcaatggaaccgtcagtgtggcttcctctccatccttcagtgctactgcacctgtggtgaccttttctcctcgcagttcacagctggttgctcacccacctggcactgtaatcacttcagttatcaaaactcaagaaacaaaaactcttacacaggaagtagagaaaaaggaatctgaagatcatttgaaagagaacactgagaaaacggagcagcagccacagccttatgtgatggtagtgtccagttccaatggatttacttctcaggtagctatgaaacaaaacgaactgctggaacccaactctttttagttaatataccaaagcttatgaataattgtttgttaattgaacattttcaattatatgcagactgactgattctaagataaattctaaggaggtttctaattttgtaattgttaaaaatagagttaattttgactttgttagatgagggaggaaaactcaactgtttctctttgttatctaaatgtttcagaattcaatcgtgaaggaacaggcattttacactatgaagacattcttttgagatttttatttcagttgctatatcataagcatttttaaagtttcttttctaattttacattgtattagattttctgattcttttgtaaatacagaacttaaatagaaggcaacaggaaatttatataggaactattttcattccacttgtgtaagttaagtcttgactctttcaaatgcaaaaaacctattttatgctttgttaaaattatggtgtcacttagattgactttagttgactgcactatataatatagaactatgaatatgtagaataacatgaaaaattggaggtgctggtggtatggctgaccctgtttcagaagcaggatagtataaaagcatcagcctaagaatggcactcccactaactagctatgtaatcttgacctctttgggctttagttcctctcataaaaggaagagatgtattggattagactagatgatcaccactttctcttctagttctaatttttttaattctaatacctatattttcaagttatgtcaattaaatcattatcaggttatttcctaatgtaagaatagctaaaatgttgcagagaaataagtgacccaacaaaatttattcatctgttatgggtaagatctgccataaattcttcctaaataatttgtttactaactctttaggccactgtgctttgcggtccattagtaaacttgtgttgctaagtgctaaacagaatactgctattttgagagagtcaagactctttcttaagggccaagaaagcaacttgagccttgggctaatctggctgagtagtcagttataaaagcataattgctttatattttggatcattttttactgggggcggacttggggggggttgcatacaaagataacatatatatccaactttctgaaatgaaatgtttttagattactttttcaactgtaaataatgtacatttaatgtcacaagaaaaaaatgtcttctgcaaattttctagtataacagaaatttttgtagatgaaaaaaatcattatgtttagaggtctaatgctatgttttcatattacagagtgaatttgtatttaaacaaaaatttaaattttggaatcctctaaacatttttgtatctttaattggtttattattaaataaatcatataaaaattctcagtgtctgttttcaggcaaaagtttcttaaagaataagtgtgcagagaatattactagaacatcagcattacttaatgtttataaataaatttcattagtcagaattgc

SEQ ID NO: 128885 - DNA, 2032 bp, Homo sapiens
  Payload ID: 5208
  Gene Symbol: ELF1
  Gene Name: E74-like factor 1 (ets domain transcription factor)
  Uniprot ID: P32519
  ENST ID: ENST00000625359
  CDS Start-End: 172-1959
atcaatgaaccaggaaaactgaagcaccttccctaaagaaaacttgggtatacaattactccacagacagagctgagggttttttacccaaatcagtcactggattttgctgcctgatacgtgaatcttcttggaatttttctcatgtggatctaaggggaatgctttattatggctgctgttgtccaacagaacgacctagtatttgaatttgctagtaacgtcatggaggatgaacgacagcttggtgatccagctatttttcctgccgtaattgtggaacatgttcctggtgctgatattctcaatagttatgccggtctagcctgtgtggaagagcccaatgacatgattactgagagttcactggatgttgctgaagaagaaatcatagacgatgatgatgatgacatcacccttacagttgaagcttcttgtcatgacggggatgaaacaattgaaactattgaggctgctgaggcactcctcaatatggattcccctggccctatgctggatgaaaaacgaataaatgggattcctgaagtgatggaaacacagcaggtgcaagaaaaatatgcagactcaccgggagcctcatcaccagaacagcctaagaggaaaaaaggaagaaaaactaaaccaccacgaccagattccccagccactacgccaaatatatctgtgaagaagaaaaacaaagatggaaagggaaacacaatttatctttgggagtttttactggcactgctccaggacaaggctacttgtcctaaatacatcaagtggacccagcgagagaaaggcatttttaaattggtggattctaaagcagtgtccaggttgtgggggaagcacaaaaacaaacctgatatgaattatgagaccatgggaagagcactcaggtactattaccaaaggggtattctggcaaaagtggaaggtcagcgcttggtgtatcagtttaaagaaatgccaaaagatcttatatatataaatgatgaggatccaagttccagcatagagtcttcagatccatcgctatcttcatcagccacttcaaataggaatcaaaccagccggtcgagagtatcttcaagtccaggggtaaaaggaggagccactacagttctaaaaccagggaattctaaagctgcaaaacccaaagatcctgtggaagttgcacaaccatcagaagttttgaggacagtgcagcccacgcagtctccatatcctacccagctcttccggactgttcatgtagtacagccagtacaggctgtcccagagggagaagcagctagaaccagtaccatgcaggatgaaacattaaattcttccgttcagagtattaggactatacaggctccaacccaagttccagtggttgtgtctcctaggaatcagcagttgcatacagtaacactccaaacagtgccactcacaacagttatagccagcacagatccatcagcaggtactggatctcagaagtttattttacaagccattccatcatcacagcccatgacagtactgaaagaaaatgtcatgctgcagtcacaaaaggcgggctctcctccttcaattgtcttgggccctgcccaggttcagcaggtccttactagcaatgttcagaccatttgcaatggaaccgtcagtgtggcttcctctccatccttcagtgctactgcacctgtggtgaccttttctcctcgcagttcacagctggttgctcacccacctggcactgtaatcacttcagttatcaaaactcaagaaacaaaaactcttacacaggaagtagagaaaaaggaatctgaagatcatttgaaagagaacactgagaaaacggagcagcagccacagccttatgtgatggtagtgtccagttccaatggatttacttctcaggtagctatgaaacaaaacgaactgctggaacccaactctttttagttaatataccaaagcttatgaataattgtttgttaattgaacattttcaattatatgcagactgactgattct

SEQ ID NO: 128886 - DNA, 3563 bp, Homo sapiens
  Payload ID: 5208
  Gene Symbol: ELF1
  Gene Name: E74-like factor 1 (ets domain transcription factor)
  ENST ID: ENST00000498824
  CDS Start-End: 189-563
ctcaatttgactagaatatcaatgaaccaggaaaactgaagcaccttccctaaagaaaacttgggtatacaattactccacagacagagctgagggttttttacccaaatcagtcactggattttgctgcctgatacgtgaatcttcttggaatttttctcatgtggatctaaggggaatgctttattatggctgctgttgtccaacagaacgacctagtatttgaatttgctagtaacgtcatggaggatgaacgacagcttggtgatccagctatttttcctgccgtaattgtggaacatgttcctggtgctgatattctcaatagttatgccggtctagcctgtgtggaagagcccaatgacatgattactgagagttcactggatgttgctgaagaagaaatcatagacgatgatgatgatgacatcacccttacagtagaaacagggtttctccatgttggccagtctcagactcctgacctcaagcaatctgcttgcctcggcttcccaaagtgcgggattacaggaatgagccactgcgccagccaggtttgttgaagcttcttgtcatgacggggatgaaacaattgaaactattgaggctgctgaggcactcctcaatatggattcccctggccctatgctggatgaaaaacgaataaataataatatatttagttcacctgaagatgacatggttgttgccccagtcacccatgtgtccgtcacattagatgggattcctgaagtgatggaaacacagcaggtgcaagaaaaatatgcagactcaccgggagcctcatcaccagaacagcctaagaggaaaaaaggaagaaaaactaaaccaccacgaccagattccccagccactacgccaaatatatctgtgaagaagaaaaacaaagatggaaagggaaacacaatttatctttgggagtttttactggcactgctccaggacaaggctacttgtcctaaatacatcaagtggacccagcgagagaaaggcatttttaaattggtggattctaaagcagtgtccaggttgtgggggaagcacaaaaacaaacctgatatgaattatgagaccatgggaagagcactcaggtactattaccaaaggggtattctggcaaaagtggaaggtcagcgcttggtgtatcagtttaaagaaatgccaaaagatcttatatatataaatgatgaggatccaagttccagcatagagtcttcagatccatcgctatcttcatcagccacttcaaataggaatcaaaccagccggtcgagagtatcttcaagtccaggggtaaaaggaggagccactacagttctaaaaccagggaattctaaagctgcaaaacccaaagatcctgtggaagttgcacaaccatcagaagttttgaggacagtgcagcccacgcagtctccatatcctacccagctcttccggactgttcatgtagtacagccagtacaggctgtcccagagggagaagcagctagaaccagtaccatgcaggatgaaacattaaattcttccgttcagagtattaggactatacaggctccaacccaagttccagtggttgtgtctcctaggaatcagcagttgcatacagtaacactccaaacagtgccactcacaacagttatagccagcacagatccatcagcaggtactggatctcagaagtttattttacaagccattccatcatcacagcccatgacagtactgaaagaaaatgtcatgctgcagtcacaaaaggcgggctctcctccttcaattgtcttgggccctgcccaggttcagcaggtccttactagcaatgttcagaccatttgcaatggaaccgtcagtgtggcttcctctccatccttcagtgctactgcacctgtggtgaccttttctcctcgcagttcacagctggttgctcacccacctggcactgtaatcacttcagttatcaaaactcaagaaacaaaaactcttacacaggaagtagagaaaaaggaatctgaagatcatttgaaagagaacactgagaaaacggagcagcagccacagccttatgtgatggtagtgtccagttccaatggatttacttctcaggtagctatgaaacaaaacgaactgctggaacccaactctttttagttaatataccaaagcttatgaataattgtttgttaattgaacattttcaattatatgcagactgactgattctaagataaattctaaggaggtttctaattttgtaattgttaaaaatagagttaattttgactttgttagatgagggaggaaaactcaactgtttctctttgttatctaaatgtttcagaattcaatcgtgaaggaacaggcattttacactatgaagacattcttttgagatttttatttcagttgctatatcataagcatttttaaagtttcttttctaattttacattgtattagattttctgattcttttgtaaatacagaacttaaatagaaggcaacaggaaatttatataggaactattttcattccacttgtgtaagttaagtcttgactctttcaaatgcaaaaaacctattttatgctttgttaaaattatggtgtcacttagattgactttagttgactgcactatataatatagaactatgaatatgtagaataacatgaaaaattggaggtgctggtggtatggctgaccctgtttcagaagcaggatagtataaaagcatcagcctaagaatggcactcccactaactagctatgtaatcttgacctctttgggctttagttcctctcataaaaggaagagatgtattggattagactagatgatcaccactttctcttctagttctaatttttttaattctaatacctatattttcaagttatgtcaattaaatcattatcaggttatttcctaatgtaagaatagctaaaatgttgcagagaaataagtgacccaacaaaatttattcatctgttatgggtaagatctgccataaattcttcctaaataatttgtttactaactctttaggccactgtgctttgcggtccattagtaaacttgtgttgctaagtgctaaacagaatactgctattttgagagagtcaagactctttcttaagggccaagaaagcaacttgagccttgggctaatctggctgagtagtcagttataaaagcataattgctttatattttggatcattttttactgggggcggacttggggggggttgcatacaaagataacatatatatccaactttctgaaatgaaatgtttttagattactttttcaactgtaaataatgtacatttaatgtcacaagaaaaaaatgtcttctgcaaattttctagtataacagaaatttttgtagatgaaaaaaatcattatgtttagaggtctaatgctatgttttcatattacagagtgaatttgtatttaaacaaaaatttaaattttggaatcctctaaacatttttgtatctttaattggtttattattaaataaatcatataaaaattctca

SEQ ID NO: 128887 - DNA, 2116 bp, Homo sapiens
  Payload ID: 5208
  Gene Symbol: ELF1
  Gene Name: E74-like factor 1 (ets domain transcription factor)
  ENST ID: ENST00000635415
  CDS Start-End: 271-2116
agtgcattaaaaaagaagccactgaagacaggcttaagcatggccaagaagcttgagagaagaaaaatttcagaaaaattgtctcaatttgactagaatatcaatgaaccaggaaaactgaagcaccttccctaaagaaaacttgggtatacaattactccacagacagagctgagggttttttacccaaatcagtcactggattttgctgcctgatacgtgaatcttcttggaatttttctcatgtggatctaaggggaatgctttattatggctgctgttgtccaacagaacgacctagtatttgaatttgctagtaacgtcatggaggatgaacgacagcttggtgatccagctatttttcctgccgtaattgtggaacatgttcctggtgctgatattctcaatagttatgccggtctagcctgtgtggaagagcccaatgacatgattactgagagttcactggatgttgctgaagaagaaatcatagacgatgatgatgatgacatcacccttacagttgaagcttcttgtcatgacggggatgaaacaattgaaactattgaggctgctgaggcactcctcaatatggattcccctggccctatgctggatgaaaaacgaataaataataatatatttagttcacctgaagatgacatggttgttgccccagtcacccatgtgtccgtcacattagatgggattcctgaagtgatggaaacacagcaggtgcaagaaaaatatgcagactcaccgggagcctcatcaccagaacagcctaagaggaaaaaaggaagaaaaactaaaccaccacgaccagattccccagccactacgccaaatatatctgtgaagaagaaaaacaaagatggaaagggaaacacaatttatctttgggagtttttactggcactgctccaggacaaggctacttgtcctaaatacatcaagtggacccagcgagagaaaggcatttttaaattggtggattctaaagcagtgtccaggttgtgggggaagcacaaaaacaaacctgatatgaattatgagaccatgggaagagcactcaggtactattaccaaaggggtattctggcaaaagtggaaggtcagcgcttggtgtatcagtttaaagaaatgccaaaagatcttatatatataaatgatgaggatccaagttccagcatagagtcttcagatccatcgctatcttcatcagccacttcaaataggaatcaaaccagccggtcgagagtatcttcaagtccaggggtaaaaggaggagccactacagttctaaaaccagggaattctaaagctgcaaaacccaaagatcctgtggaagttgcacaaccatcagaagttttgaggacagtgcagcccacgcagtctccatatcctacccagctcttccggactgttcatgtagtacagccagtacaggctgtcccagagggagaagcagctagaaccagtaccatgcaggatgaaacattaaattcttccgttcagagtattaggactatacaggctccaacccaagttccagtggttgtgtctcctaggaatcagcagttgcatacagtaacactccaaacagtgccactcacaacagttatagccagcacagatccatcagcaggtactggatctcagaagtttattttacaagccattccatcatcacagcccatgacagtactgaaagaaaatgtcatgctgcagtcacaaaaggcgggctctcctccttcaattgtcttgggccctgcccaggttcagcaggtccttactagcaatgttcagaccatttgcaatggaaccgtcagtgtggcttcctctccatccttcagtgctactgcacctgtggtgaccttttctcctcgcagttcacagctggttgctcacccacctggcactgtaatcacttcagttatcaaaactcaagaaacaaaaactcttacacaggaagtagagaaaaaggaatctgaagatcatttgaaagagaacactgagaaaacggagcagcagccacagccttatgtgatggtagtgtccagttccaatggatttacttctcaggtagctatgaaacaaaacgaactgctggaac

SEQ ID NO: 128888 - DNA, 3036 bp, Homo sapiens
  Payload ID: 5209
  Gene Symbol: ELF2
  Gene Name: E74-like factor 2 (ets domain transcription factor)
  Uniprot ID: Q15723
  ENST ID: ENST00000358635
  CDS Start-End: 307-1908
cgcgttgccagctgcggcggccgccacagccacagccgccgccgccgccgccgccgcccctgcccctgccgcccctgcccctgccgttaggtggtggggtttctcagcccggcggcgggaggcgggccggcctcggcttcctgtcggaggacgcgcaaggatccgggcgtcggagtgtgtgcgagtgcgtgagtgtgtgtcggtcgcacggcgtgtgtctccggccgcgggttccgcctcctcccctgccgccgctgctcacggtgtaagtcaatgtgaagcagcagctccagccccgggataaacatggcgacgtctctgcatgagggacccacgaaccagctggatctgctcatccgggccgtggaagcatcagttcacagcagtaatgcacactgtacagataagacaattgaagctgctgaagccctgcttcatatggaatctcctacctgcttgagggattcaagaagtcctgtggaagtgtttgttcctccttgtgtatcaactccagaattcatccatgctgctatgaggccagatgtcattacagaaactgtagtggaggtgtcaactgaagagtctgaacccatggatacctctcctattccaacatcaccagatagccatgaaccaatgaaaaagaaaaaagttggccgtaaaccaaagacccagcaatcaccaatttccaatgggtctcctgagttaggtataaagaagaaaccaagagaaggaaaaggaaacacaacctatttgtgggagtttcttttagatctacttcaagataaaaatacttgtcccaggtatattaaatggactcagagagaaaaaggcatattcaagctggtggattcaaaggctgtctctaagctttggggaaagcataagaacaaaccagacatgaactatgaaaccatgggacgagctttgagatactactaccaaaggggaattcttgcaaaggttgaaggacagaggcttgtatatcagttcaaggatatgccgaaaaacatagtggtcatagatgatgacaaaagtgaaacctgtaatgaagatttagcaggaactactgatgaaaaatcattagaacgagtgtcactgtctgcagaaagtctcctgaaagcagcatcctctgttcgcagtggaaaaaattcatcccctataaactgctccagagcagagaagggtgtagctagagttgtgaatatcacttcccctgggcacgatgcttcatccaggtctcctactaccactgcatctgtgtcagcaacagcagctccaaggacagttcgtgtggcaatgcaggtacctgttgtaatgacatcattgggtcagaaaatttcaactgtggcagttcagtcagttaatgcaggtgcaccattaataaccagcactagtccaacaacagcgacctctccaaaggtagtcattcagacaatccctactgtgatgccagcttctactgaaaatggagacaaaatcaccatgcagcctgccaaaattattaccatcccagctacacagcttgcacagtgtcaactgcagacaaagtcaaatctgactggatcaggaagcattaacattgttggaaccccattggctgtgagagcacttacccctgtttcaatagcccatggtacacctgtaatgagactatcaatgcctactcagcaggcatctggccagactcctcctcgagttatcagtgcagtcataaaggggccagaggttaaatcggaagcagtggcaaaaaagcaagaacatgatgtgaaaactttgcagctagtagaagaaaaaccagcagatggaaataagacagtgacccacgtagtggttgtcagtgcgccttcagctattgcccttcctgtaactatgaaaacagaaggactagtgacatgtgagaaataaaatagcagctccaccatggacttcaggctgttagtggcagtactgacataaacatttgcaagggaagtcatcaagaaaagtcaaagaagactttaaaacatttttaatgcatatacaaaaacaatcagacttactggaaataaattacctatcccatgtttcagtgggaaatgaactacatattgagatgctgacagaaaactgcctcttacagtaggaaacaactgaacccatcaataagaaaaaggatcgaaagggaccaagcagctcactacgatatcaagttacactaagacttggaacactaacattctgtaagaggttatatagttttcagtgggaggggttgggatgggtaatctcattgttacatatagcaatttttgatgcattttatatgcataccagcaattattactgtgttcgcacagttctcacttaactggtgctatgtgaagactctgctaatataggtattttagaatgtgaattgaagaatggatcccaaaaacttcagaaagaggatagcaaaaaaagatctagtgcgattttatatatatatatatatatatatacatacatatatatatatcatatagcttaagctgatttaaaacaaaggccttagactaattttcgattttctttcttgaaataagctaatggcttgtttgtgtaaagcttttttattaaaagaaaaattttaaaaatcttgtacctagcacagtattgttatagaatatacatgtaacattttatatggtagtttaagtctgtcagtttcttaattgtggacaaattaacagttggctctggccttttgctgtaacatgcctgtgtcactcacttagccttggcatttgtgcagacataccattttcagttctgctgtcacttggaagttcaggctcagcatgaatttttggcaggtagctctaatacctggagttttctttgtttttttttcttttttttagttgaagtttatgagggaaataccagtgttcagttttgaactataatagtttgtatattcaacatttgaagtatattctattttgttgtactcttgtttcaaagtgtattcaagtaggttttctgaaatatagaaatgaaatttatcttctg

SEQ ID NO: 128889 - DNA, 3005 bp, Homo sapiens
  Payload ID: 5209
  Gene Symbol: ELF2
  Gene Name: E74-like factor 2 (ets domain transcription factor)
  Uniprot ID: Q15723
  ENST ID: ENST00000379549
  CDS Start-End: 225-1739
gccgttaggtggtggggtttctcagcccggcggcgggaggcgggccggcctcggcttcctgtcggaggacgcgcaaggatccgggcgtcggagtgtgtgcgagtgcgtgagtgtgtgtcggtcgcacggcgtgtgtctccggccgcgggttccgcctcctcccctgccgccgctgctcacggtgtaagtcaatgtgaagcagcagctccagccccgggataaacatggcgacgtctctgcatgagggacccacgaaccagctggatctgctcatccgggccgtggaagcatcagttcacagcagtaatgcacactgtacagataagacaattgaagctgctgaagccctgcttcatatggaatctcctacctgcttgagggattcaagaagtcctgtggaagtgtttgttcctccttgtgtatcaactccagaattcatccatgctgctatgaggccagatgtcattacagaaactgtagtggaggtgtcaactgaagagtctgaacccatggatacctctcctattccaacatcaccagatagccatgaaccaatgaaaaagaaaaaaggaaacacaacctatttgtgggagtttcttttagatctacttcaagataaaaatacttgtcccaggtatattaaatggactcagagagaaaaaggcatattcaagctggtggattcaaaggctgtctctaagctttggggaaagcataagaacaaaccagacatgaactatgaaaccatgggacgagctttgagatactactaccaaaggggaattcttgcaaaggttgaaggacagaggcttgtatatcagttcaaggatatgccgaaaaacatagtggtcatagatgatgacaaaagtgaaacctgtaatgaagatttagcaggaactactgatgaaaaatcattagaacgagtgtcactgtctgcagaaagtctcctgaaagcagcatcctctgttcgcagtggaaaaaattcatcccctataaactgctccagagcagagaagggtgtagctagagttgtgaatatcacttcccctgggcacgatgcttcatccaggtctcctactaccactgcatctgtgtcagcaacagcagctccaaggacagttcgtgtggcaatgcaggtacctgttgtaatgacatcattgggtcagaaaatttcaactgtggcagttcagtcagttaatgcaggtgcaccattaataaccagcactagtccaacaacagcgacctctccaaaggtagtcattcagacaatccctactgtgatgccagcttctactgaaaatggagacaaaatcaccatgcagcctgccaaaattattaccatcccagctacacagcttgcacagtgtcaactgcagacaaagtcaaatctgactggatcaggaagcattaacattgttggaaccccattggctgtgagagcacttacccctgtttcaatagcccatggtacacctgtaatgagactatcaatgcctactcagcaggcatctggccagactcctcctcgagttatcagtgcagtcataaaggggccagaggttaaatcggaagcagtggcaaaaaagcaagaacatgatgtgaaaactttgcagctagtagaagaaaaaccagcagatggaaataagacagtgacccacgtagtggttgtcagtgcgccttcagctattgcccttcctgtaactatgaaaacagaaggactagtgacatgtgagaaataaaatagcagctccaccatggacttcaggctgttagtggcagtactgacataaacatttgcaagggaagtcatcaagaaaagtcaaagaagactttaaaacatttttaatgcatatacaaaaacaatcagacttactggaaataaattacctatcccatgtttcagtgggaaatgaactacatattgagatgctgacagaaaactgcctcttacagtaggaaacaactgaacccatcaataagaaaaaggatcgaaagggaccaagcagctcactacgatatcaagttacactaagacttggaacactaacattctgtaagaggttatatagttttcagtgggaggggttgggatgggtaatctcattgttacatatagcaatttttgatgcattttatatgcataccagcaattattactgtgttcgcacagttctcacttaactggtgctatgtgaagactctgctaatataggtattttagaatgtgaattgaagaatggatcccaaaaacttcagaaagaggatagcaaaaaaagatctagtgcgattttatatatatatatatatatatatacatacatatatatatatcatatagcttaagctgatttaaaacaaaggccttagactaattttcgattttctttcttgaaataagctaatggcttgtttgtgtaaagcttttttattaaaagaaaaattttaaaaatcttgtacctagcacagtattgttatagaatatacatgtaacattttatatggtagtttaagtctgtcagtttcttaattgtggacaaattaacagttggctctggccttttgctgtaacatgcctgtgtcactcacttagccttggcatttgtgcagacataccattttcagttctgctgtcacttggaagttcaggctcagcatgaatttttggcaggtagctctaatacctggagttttctttgtttttttttcttttttttagttgaagtttatgagggaaataccagtgttcagttttgaactataatagtttgtatattcaacatttgaagtatattctattttgttgtactcttgtttcaaagtgtattcaagtaggttttctgaaatatagaaatgaaatttatcttctgttttggtctctggtgatattttaaacaatatttaaaagtcagtatagaagtgttttagttaggaagtgataaaacatctctcttctccttcccaactactgcatgaagaaattctacttccattatattaatatttgg

SEQ ID NO: 128890 - DNA, 3278 bp, Homo sapiens
  Payload ID: 5209
  Gene Symbol: ELF2
  Gene Name: E74-like factor 2 (ets domain transcription factor)
  Uniprot ID: Q15723
  ENST ID: ENST00000379550
  CDS Start-End: 231-2012
gattttagctcttcccaagttgtgaaaatagtgaaggatgcttagactacttaacatacaaactgctttctggttaatcatctttagaagactggatttctggatatctactccactccatctctattgacttttaaaacatgataatgcaaacctataacactggcaaccatcagtgaacctttaatttcattgattaatagcgtttgaagcttcctcagggaataacaatgacatcagcagtggttgacagtggaggtactattttggagctttccagcaatggagtagaaaatcaagaggaaagtgaaaaggtttctgaatatccagcagtgattgtggagccagttccaagtgccagattagagcagggctatgcagcccaggttctggtttatgatgatgagacttatatgatgcaagatgtggcagaagaacaagaagttgagaccgagaatgtggaaacagtggaagcatcagttcacagcagtaatgcacactgtacagataagacaattgaagctgctgaagccctgcttcatatggaatctcctacctgcttgagggattcaagaagtcctgtggaagtgtttgttcctccttgtgtatcaactccagaattcatccatgctgctatgaggccagatgtcattacagaaactgtagtggaggtgtcaactgaagagtctgaacccatggatacctctcctattccaacatcaccagatagccatgaaccaatgaaaaagaaaaaagttggccgtaaaccaaagacccagcaatcaccaatttccaatgggtctcctgagttaggtataaagaagaaaccaagagaaggaaaaggaaacacaacctatttgtgggagtttcttttagatctacttcaagataaaaatacttgtcccaggtatattaaatggactcagagagaaaaaggcatattcaagctggtggattcaaaggctgtctctaagctttggggaaagcataagaacaaaccagacatgaactatgaaaccatgggacgagctttgagatactactaccaaaggggaattcttgcaaaggttgaaggacagaggcttgtatatcagttcaaggatatgccgaaaaacatagtggtcatagatgatgacaaaagtgaaacctgtaatgaagatttagcaggaactactgatgaaaaatcattagaacgagtgtcactgtctgcagaaagtctcctgaaagcagcatcctctgttcgcagtggaaaaaattcatcccctataaactgctccagagcagagaagggtgtagctagagttgtgaatatcacttcccctgggcacgatgcttcatccaggtctcctactaccactgcatctgtgtcagcaacagcagctccaaggacagttcgtgtggcaatgcaggtacctgttgtaatgacatcattgggtcagaaaatttcaactgtggcagttcagtcagttaatgcaggtgcaccattaataaccagcactagtccaacaacagcgacctctccaaaggtagtcattcagacaatccctactgtgatgccagcttctactgaaaatggagacaaaatcaccatgcagcctgccaaaattattaccatcccagctacacagcttgcacagtgtcaactgcagacaaagtcaaatctgactggatcaggaagcattaacattgttggaaccccattggctgtgagagcacttacccctgtttcaatagcccatggtacacctgtaatgagactatcaatgcctactcagcaggcatctggccagactcctcctcgagttatcagtgcagtcataaaggggccagaggttaaatcggaagcagtggcaaaaaagcaagaacatgatgtgaaaactttgcagctagtagaagaaaaaccagcagatggaaataagacagtgacccacgtagtggttgtcagtgcgccttcagctattgcccttcctgtaactatgaaaacagaaggactagtgacatgtgagaaataaaatagcagctccaccatggacttcaggctgttagtggcagtactgacataaacatttgcaagggaagtcatcaagaaaagtcaaagaagactttaaaacatttttaatgcatatacaaaaacaatcagacttactggaaataaattacctatcccatgtttcagtgggaaatgaactacatattgagatgctgacagaaaactgcctcttacagtaggaaacaactgaacccatcaataagaaaaaggatcgaaagggaccaagcagctcactacgatatcaagttacactaagacttggaacactaacattctgtaagaggttatatagttttcagtgggaggggttgggatgggtaatctcattgttacatatagcaatttttgatgcattttatatgcataccagcaattattactgtgttcgcacagttctcacttaactggtgctatgtgaagactctgctaatataggtattttagaatgtgaattgaagaatggatcccaaaaacttcagaaagaggatagcaaaaaaagatctagtgcgattttatatatatatatatatatatatacatacatatatatatatcatatagcttaagctgatttaaaacaaaggccttagactaattttcgattttctttcttgaaataagctaatggcttgtttgtgtaaagcttttttattaaaagaaaaattttaaaaatcttgtacctagcacagtattgttatagaatatacatgtaacattttatatggtagtttaagtctgtcagtttcttaattgtggacaaattaacagttggctctggccttttgctgtaacatgcctgtgtcactcacttagccttggcatttgtgcagacataccattttcagttctgctgtcacttggaagttcaggctcagcatgaatttttggcaggtagctctaatacctggagttttctttgtttttttttcttttttttagttgaagtttatgagggaaataccagtgttcagttttgaactataatagtttgtatattcaacatttgaagtatattctattttgttgtactcttgtttcaaagtgtattcaagtaggttttctgaaatatagaaatgaaatttatcttctgttttggtctctggtgatattttaaacaatatttaaaagtcagtatagaagtgttttagttaggaagtgataaaacatctctcttctccttcccaactactgcatgaagaaattctacttccattatattaatatttgg

SEQ ID NO: 128891 - DNA, 4012 bp, Homo sapiens
  Payload ID: 5209
  Gene Symbol: ELF2
  Gene Name: E74-like factor 2 (ets domain transcription factor)
  Uniprot ID: Q15723
  ENST ID: ENST00000394235
  CDS Start-End: 504-2249
attgctcccagcgccaagctctgtgtcgccgccgtcgcctaggcggttgggggtcggtggggcggcgcgggcgggggtcgctgcgcggggcggcgagcctctgttttgtctccttctctccctgtggagcggctcgggctgctggggaggccccggctccctccggacgctcggccaacggcggcggctagtccgcggccctgctgagagggaaaaggacgccgcggtcttcccaggcgtcgcggagagcagttccaaagaactactggttcagattttagctcttcccaagttgtgaaaatagtgaaggatgcttagactacttaacatacaaactgctttctggttaatcatctttagaagactggatttctggatatctactccactccatctctattgacttttaaaacatgataatgcaaacctataacactggcaaccatcagtgaacctttaatttcattgattaatagcgtttgaagcttcctcagggaataacaatgacatcagcagtggttgacagtggaggtactattttggagctttccagcaatggagtagaaaatcaagaggaaagtgaaaaggtttctgaatatccagcagtgattgtggagccagttccaagtgccagattagagcagggctatgcagcccaggttctggtttatgatgatgagacttatatgatgcaagatgtggcagaagaacaagaagttgagaccgagaatgtggaaacagtggaagcatcagttcacagcagtaatgcacactgtacagataagacaattgaagctgctgaagccctgcttcatatggaatctcctacctgcttgagggattcaagaagtcctgaattcatccatgctgctatgaggccagatgtcattacagaaactgtagtggaggtgtcaactgaagagtctgaacccatggatacctctcctattccaacatcaccagatagccatgaaccaatgaaaaagaaaaaagttggccgtaaaccaaagacccagcaatcaccaatttccaatgggtctcctgagttaggtataaagaagaaaccaagagaaggaaaaggaaacacaacctatttgtgggagtttcttttagatctacttcaagataaaaatacttgtcccaggtatattaaatggactcagagagaaaaaggcatattcaagctggtggattcaaaggctgtctctaagctttggggaaagcataagaacaaaccagacatgaactatgaaaccatgggacgagctttgagatactactaccaaaggggaattcttgcaaaggttgaaggacagaggcttgtatatcagttcaaggatatgccgaaaaacatagtggtcatagatgatgacaaaagtgaaacctgtaatgaagatttagcaggaactactgatgaaaaatcattagaacgagtgtcactgtctgcagaaagtctcctgaaagcagcatcctctgttcgcagtggaaaaaattcatcccctataaactgctccagagcagagaagggtgtagctagagttgtgaatatcacttcccctgggcacgatgcttcatccaggtctcctactaccactgcatctgtgtcagcaacagcagctccaaggacagttcgtgtggcaatgcaggtacctgttgtaatgacatcattgggtcagaaaatttcaactgtggcagttcagtcagttaatgcaggtgcaccattaataaccagcactagtccaacaacagcgacctctccaaaggtagtcattcagacaatccctactgtgatgccagcttctactgaaaatggagacaaaatcaccatgcagcctgccaaaattattaccatcccagctacacagcttgcacagtgtcaactgcagacaaagtcaaatctgactggatcaggaagcattaacattgttggaaccccattggctgtgagagcacttacccctgtttcaatagcccatggtacacctgtaatgagactatcaatgcctactcagcaggcatctggccagactcctcctcgagttatcagtgcagtcataaaggggccagaggttaaatcggaagcagtggcaaaaaagcaagaacatgatgtgaaaactttgcagctagtagaagaaaaaccagcagatggaaataagacagtgacccacgtagtggttgtcagtgcgccttcagctattgcccttcctgtaactatgaaaacagaaggactagtgacatgtgagaaataaaatagcagctccaccatggacttcaggctgttagtggcagtactgacataaacatttgcaagggaagtcatcaagaaaagtcaaagaagactttaaaacatttttaatgcatatacaaaaacaatcagacttactggaaataaattacctatcccatgtttcagtgggaaatgaactacatattgagatgctgacagaaaactgcctcttacagtaggaaacaactgaacccatcaataagaaaaaggatcgaaagggaccaagcagctcactacgatatcaagttacactaagacttggaacactaacattctgtaagaggttatatagttttcagtgggaggggttgggatgggtaatctcattgttacatatagcaatttttgatgcattttatatgcataccagcaattattactgtgttcgcacagttctcacttaactggtgctatgtgaagactctgctaatataggtattttagaatgtgaattgaagaatggatcccaaaaacttcagaaagaggatagcaaaaaaagatctagtgcgattttatatatatatatatatatatatacatacatatatatatatcatatagcttaagctgatttaaaacaaaggccttagactaattttcgattttctttcttgaaataagctaatggcttgtttgtgtaaagcttttttattaaaagaaaaattttaaaaatcttgtacctagcacagtattgttatagaatatacatgtaacattttatatggtagtttaagtctgtcagtttcttaattgtggacaaattaacagttggctctggccttttgctgtaacatgcctgtgtcactcacttagccttggcatttgtgcagacataccattttcagttctgctgtcacttggaagttcaggctcagcatgaatttttggcaggtagctctaatacctggagttttctttgtttttttttcttttttttagttgaagtttatgagggaaataccagtgttcagttttgaactataatagtttgtatattcaacatttgaagtatattctattttgttgtactcttgtttcaaagtgtattcaagtaggttttctgaaatatagaaatgaaatttatcttctgttttggtctctggtgatattttaaacaatatttaaaagtcagtatagaagtgttttagttaggaagtgataaaacatctctcttctccttcccaactactgcatgaagaaattctacttccattatattaatatttggcaaatatctgcatgttgccagtttctttctaattatgatgaactataatgttctgcttaacgtaatgaatttagtattttagttggctgcacttaaagaatttatatttgtaaaacactttaaaccatttgtttcacaatcagaccttttgtggattaaaaagaacaattactcttctagcccttttacagattaggaagttaaggtatctgaaggattacataaactatgtaattttactactgtctgtcactccatatcttaatgctctttctactacaaagaaaagttatctatttttacatgttttagaaatgtagatgaactcatacataatattttttgtcttttaattgatcacatactacttaggtcagaaattgtttataacagttccctttgtaatcttttaaacttttccataaatatattgatgatacttttatacaaaagctcaaagaaaaactcacttgattattttcccatttgggagttac

SEQ ID NO: 128892 - DNA, 882 bp, Homo sapiens
  Payload ID: 5209
  Gene Symbol: ELF2
  Gene Name: E74-like factor 2 (ets domain transcription factor)
  ENST ID: ENST00000420916
  CDS Start-End: 148-882
gatccgggcgtcggagtgtgtgcgagtgcgtgagtgtgtgtcggtcgcacggcgtgtgtctccggccgcgggttccgcctcctcccctgccgccgctgctcacggtgtaagtcaatgtgaagcagcagctccagccccgggataaacatggcgacgtctctgcatgagggacccacgaaccagctggatctgctcatccgggccgtggaagcatcagttcacagcagtaatgcacactgtacagataagacaattgaagctgctgaagccctgcttcatatggaatctcctacctgcttgagggattcaagaagtcctgtggaagtgtttgttcctccttgtgtatcaactccagaattcatccatgctgctatgaggccagatgtcattacagaaactgtagtggaggtgtcaactgaagagtctgaacccatggatacctctcctattccaacatcaccagatagccatgaaccaatgaaaaagaaaaaaggaaacacaacctatttgtgggagtttcttttagatctacttcaagataaaaatacttgtcccaggtatattaaatggactcagagagaaaaaggcatattcaagctggtggattcaaaggctgtctctaagctttggggaaagcataagaacaaaccagacatgaactatgaaaccatgggacgagctttgagatactactaccaaaggggaattcttgcaaaggttgaaggacagaggcttgtatatcagttcaaggatatgccgaaaaacatagtggtcatagatgatgacaaaagtgaaacctgtaatgaagatttagcaggaactactgatgaaaaatcattagaacgagtgtcactgtctgcagaaagtctcctgaaagcagca

SEQ ID NO: 128893 - DNA, 1766 bp, Homo sapiens
  Payload ID: 5209
  Gene Symbol: ELF2
  Gene Name: E74-like factor 2 (ets domain transcription factor)
  ENST ID: ENST00000511184
  CDS Start-End: 485-766
tctgtgtcgccgccgtcgcctaggcggttgggggtcggtggggcggcgcgggcgggggtcgctgcgcggggcggcgagcctctgttttgtctccttctctccctgtggagcggctcgggctgctggggaggccccggctccctccggacgctcggccaacggcggcggctagtccgcggccctgctgagagggaaaaggacgccgcggtcttcccaggcgtcgcggagagcagttccaaagaactactggttcagattttagctcttcccaagttgtgaaaatagtgaaggatgcttagactacttaacatacaaactgctttctggttaatcatctttagaagactggatttctggatatctactccactccatctctattgacttttaaaacatgataatgcaaacctataacactggcaaccatcagtgaacctttaatttcattgattaatagcgtttgaagcttcctcagggaataacaatgacatcagcagtggttgacagtggaggtactattttggagctttccagcaatggagtagaaaatcaagaggaaagtgaaaaggtttctgaatatccagcagtgattgtggagccagttccaagtgccagattagagcagggctatgcagcccaggttctggtttatgatgatgagacttatatgatgcaagatgtggcagaagaacaagaagttgagaccgagaatgtggaaacaggtggaatctcactctgtcacccaggctggagtgcggtggtgtgatctcggctcactgcaacctccgcctcccgggttcaagtgattctcctgcctcagcctcccaagtggctgggactacagaaatcctccctgtggcacaaaaggactcctttaattagaaaatattgttgccacagggaggtagaagatcgacatgaaaaactggggatctgaaaacgagcccctatcctaggattacctgaaggtgaaacagattgagccagaaggaagacaatgctgagaccgggtttcactgtgttagccaggatggtctcgatgtcttgacctcgtgatccacccacctcggcctcccaaagtgctgggatgacaggcgtgagccactgcgcccggccctgatacttcttatatatggtgtttgacaagtctttcaggaaaatctgaatttttttccccatatgaccttttttctgatgtgtaatagttggaaaataaaggcaggatttagaataattactgagaatgaaaaacttcttttgaagaggaaaccaagaacttggttcaagaggagaaagaaattaaaaggtggtaatttctttttgagacatttactttcttgaataaacttgacatcccccccttttttttttttatctttttctttagggacattggtctatagttagtatctaggtttacaacattaagcttttttcattttgtttggaaaaacaaggctggcagaattacatttgtttttaattccattgctaatattacatacttaggaggctatcaggtgcaagttatttacttgagacaagaagcactgattattttggctaggcttcatctgaaggcctatgttctgggaagggaggcctccataaaaaaggaagaacctttagtgacctttatccttgggaataaaagtaaagatcagaagccagtgcattcagtttaccgtcttacaaaaggagtcaagtattgtataggtcagagaccactattgtaagatcatataaatcctgtgtctaattttgtt

SEQ ID NO: 128894 - DNA, 611 bp, Homo sapiens
  Payload ID: 5209
  Gene Symbol: ELF2
  Gene Name: E74-like factor 2 (ets domain transcription factor)
  ENST ID: ENST00000512627
  CDS Start-End: 35-611
aatgtgaagcagcagctccagccccgggataaacatggcgacgtctctgcatgagggacccacgaaccagctggatctgctcatccgggccgtggaagcatcagttcacagcagtaatgcacactgtacagataagacaattgaagctgctgaagccctgcttcatatggaatctcctacctgcttgagggattcaagaagtcctgaattcatccatgctgctatgaggccagatgtcattacagaaactgtagtggaggtgtcaactgaagagtctgaacccatggatacctctcctattccaacatcaccagatagccatgaaccaatgaaaaagaaaaaaggaaacacaacctatttgtgggagtttcttttagatctacttcaagataaaaatacttgtcccaggtatattaaatggactcagagagaaaaaggcatattcaagctggtggattcaaaggctgtctctaagctttggggaaagcataagaacaaaccagacatgaactatgaaaccatgggacgagctttgagatactactaccaaaggggaattcttgcaaaggttgaaggacagaggcttgtatatcagttcaaggatatgccga

SEQ ID NO: 128895 - DNA, 1965 bp, Homo sapiens
  Payload ID: 5209
  Gene Symbol: ELF2
  Gene Name: E74-like factor 2 (ets domain transcription factor)
  Uniprot ID: Q15723
  ENST ID: ENST00000510408
  CDS Start-End: 136-1701
ggagtgtgtgcgagtgcgtgagtgtgtgtcggtcgcacggcgtgtgtctccggccgcgggttccgcctcctcccctgccgccgctgctcacggtgtaagtcaatgtgaagcagcagctccagccccgggataaacatggcgacgtctctgcatgagggacccacgaaccagctggatctgctcatccgggccgtggaagcatcagttcacagcagtaatgcacactgtacagataagacaattgaagctgctgaagccctgcttcatatggaatctcctacctgcttgagggattcaagaagtcctgaattcatccatgctgctatgaggccagatgtcattacagaaactgtagtggaggtgtcaactgaagagtctgaacccatggatacctctcctattccaacatcaccagatagccatgaaccaatgaaaaagaaaaaagttggccgtaaaccaaagacccagcaatcaccaatttccaatgggtctcctgagttaggtataaagaagaaaccaagagaaggaaaaggaaacacaacctatttgtgggagtttcttttagatctacttcaagataaaaatacttgtcccaggtatattaaatggactcagagagaaaaaggcatattcaagctggtggattcaaaggctgtctctaagctttggggaaagcataagaacaaaccagacatgaactatgaaaccatgggacgagctttgagatactactaccaaaggggaattcttgcaaaggttgaaggacagaggcttgtatatcagttcaaggatatgccgaaaaacatagtggtcatagatgatgacaaaagtgaaacctgtaatgaagatttagcaggaactactgatgaaaaatcattagaacgagtgtcactgtctgcagaaagtctcctgaaagcagcatcctctgttcgcagtggaaaaaattcatcccctataaactgctccagagcagagaagggtgtagctagagttgtgaatatcacttcccctgggcacgatgcttcatccaggtctcctactaccactgcatctgtgtcagcaacagcagctccaaggacagttcgtgtggcaatgcaggtacctgttgtaatgacatcattgggtcagaaaatttcaactgtggcagttcagtcagttaatgcaggtgcaccattaataaccagcactagtccaacaacagcgacctctccaaaggtagtcattcagacaatccctactgtgatgccagcttctactgaaaatggagacaaaatcaccatgcagcctgccaaaattattaccatcccagctacacagcttgcacagtgtcaactgcagacaaagtcaaatctgactggatcaggaagcattaacattgttggaaccccattggctgtgagagcacttacccctgtttcaatagcccatggtacacctgtaatgagactatcaatgcctactcagcaggcatctggccagactcctcctcgagttatcagtgcagtcataaaggggccagaggttaaatcggaagcagtggcaaaaaagcaagaacatgatgtgaaaactttgcagctagtagaagaaaaaccagcagatggaaataagacagtgacccacgtagtggttgtcagtgcgccttcagctattgcccttcctgtaactatgaaaacagaaggactagtgacatgtgagaaataaaatagcagctccaccatggacttcaggctgttagtggcagtactgacataaacatttgcaagggaagtcatcaagaaaagtcaaagaagactttaaaacatttttaatgcatatacaaaaacaatcagacttactggaaataaattacctatcccatgtttcagtgggaaatgaactacatattgagatgctgacagaaaactgcctcttacagtaggaaacaactgaacccatcaataagaaaaaggatcgaaagggaccaag

SEQ ID NO: 128896 - DNA, 4994 bp, Homo sapiens
  Payload ID: 5210
  Gene Symbol: ELF3
  Gene Name: E74-like factor 3 (ets domain transcription factor, epithelial-specific )
  Uniprot ID: P78545
  ENST ID: ENST00000359651
  CDS Start-End: 3193-4308
gtgctgccgtgtgggcaagctctgtggggagaggggaggccagtgggttgtttttgccatcacagaatactgggaagcccctggcatcctgctccatagctctcttcaccactatcctggaaccttctccccacccccatccccatgcctccaaggcactgacctcaaatccaagtctttctcacttatctcaagctgccagcctgtagggattccttatctcagctccatgtcagcggtgaggaagccccaagaaggcaagggagctgacagccttctcatttttctcgtacatcctcctgttcaccccgccatcccgggagccccagccagatgctcttcagggcagggagcacgtgagcagccctggggctagaagccggttctcccacattcctgggtgagggactgggtggagggtgtgcctgcctcaggctccttgggggaggccccctgaagggctggggaaaatcctactgagccccaggctctcctgcctgcactggcccagtgcgggggcgggggggcggggggatcctggacattaactctctcctaggcacctgggagcttcagagaggaagaaggtaaggtaagaagcagattctctgcgcaggactttcttagtcctcaggctatagagttaaagaaagaagtatctgtagaaggtggagtcaccttttgtttgagtaaccgtttcacccaccctggctgagggtggccaggaactccccaagttgtgcattaatggaggggggtcacacagatcctacatttttttgtttttgtttttttttttttgagacgcagtgattacaggtgtgagccaccggatcctacatttcaaatgcataaaaatctagatatgggctgggcgcagtagctcatgcctgtaatcccagcactttgggaggctgaggcaggcagatcatgaggtcaggagatcgagtccatcctggctaacatggtgaaaccccgtctctactaaaaatacagaaagccgggcatggcagcgggcgcctgtaatcccagctactcggaaagctgaggcaggagaatcgcttgaacccaggagtcagaggttgcagtgagcagagatcacgccactgcactccaacctgggcgacagagcgagactccacctcaaaacaaaataaacaaaatactagatctggaagagatcttagggattattaaattcagacaacctcattttttatagatggggaaacaagcacagactccaagggtctcatccaagatcacacagttgcagatgctggctacaagtctcctgcctcaaccacctgtattaccccattcagggtctcaagaagggtctataagacactatccattgtgtttcgggctgagtccatagagacaaccacagacatgggggactctgcccacagggaaggcaagggctctggccatggagctggatgggaagactctgaagcccgaagacattgaatcctgtgcagggaaagagcgagggttttgtgtacaacacacctgcatacctggatgtgaatctcagctccaccccttcaccaactctgtgtggcctgggcaagccattctaagggaaccctccacactgcaactttcatgtctataaaatgggaataaccatgcattccttacaggacttttttggtgtgaggattaaatgagagaatatgttgaaaagtgcttggtaaatatattaatactatgcattccctcttctttgaatgacgtgacccaggtagtcaggcttctgaccactagagggcagcagaaggtactggaaaactgggccgagtgaaccagagattagatggggtccagagagcagggatgaacttacccgtgtggattctggcaactccggcagggagggctccagcaggcgctgagggaagaactttcaagcagagccgggtctcttcaggagcgactgcagcaaccctgatgcttggatggagtccaggcaggtgatggtagtgaagaccttgccaacagagtgggcgctggagaaggagccctttagtggggaccctggggccacgactaggctggcaggcccagccagcaccaattaatccatgagtattgcccagcattgagcctggagcaccttccagcccctggccagagtcctgggtgttctgggaaaaacccctaaacctagtaactcctctccctactaggcctctttgttgctgaatctctggaatttaggggccagcagctttctgactcaggtcagccaggggttcatgttccctcacttgccctccccctgcctggcccatctctggcctggcccctgggaggaatttcctgggccagagggcagccgaaagcacagatgcccaccccagcaacgttcccgccacctgcccaggccagtgccccgtgcccaaccccagagggtgcgggatgacagactctgacaatcattaaaccagccgggcctgatttcccagcactgcctgctaagatccgggccaagtggcactgaatatgcaaatcacctggggccaggagcccagtctaaaggccaggaaatcccctccatccaatgagacaccagctcaggttactgcaggggacacactataaagccctgagctcagggaggagctccctccaggctctatttagagccgggtaggggagcgcagcggccagatacctcagcgctacctggcggaactggatttctctcccgcctgccggcctgcctgccacagccggactccgccactccggtaggattccccgcctgtcattccctagcccagctcttgggaaactgcagaggggtccagaggatttgcagttctgaacctgcacactccagtctaggatctccgagcaagagcgtaggtgtcctgagggtcaaagaacagagagagattgtctctgggaaggcagaatggccatgacgccgctagtctggctccagggccccagagatctgaggagggaagcccagctggaggctcctgtggtcctgccctggtctgagatcttggagcccttcttgaagagacggtgtccgcagagttgctgatcttcctgcccctgggggctactcttgcccagggttgggcaaagcagagtagctgggagtgtaaggagaggaccctcgtcccctcaccaacctcatcctctctccccctacccacaggtagcctcatggctgcaacctgtgagattagcaacatttttagcaactacttcagtgcgatgtacagctcggaggactccaccctggcctctgttccccctgctgccacctttggggccgatgacttggtactgaccctgagcaacccccagatgtcattggagggtacagagaaggccagctggttgggggaacagccccagttctggtcgaagacgcaggttctggactggatcagctaccaagtggagaagaacaagtacgacgcaagcgccattgacttctcacgatgtgacatggatggcgccaccctctgcaattgtgcccttgaggagctgcgtctggtctttgggcctctgggggaccaactccatgcccagctgcgagacctcacttccagctcttctgatgagctcagttggatcattgagctgctggagaaggatggcatggccttccaggaggccctagacccagggccctttgaccagggcagcccctttgcccaggagctgctggacgacggtcagcaagccagcccctaccaccccggcagctgtggcgcaggagccccctcccctggcagctctgacgtctccaccgcagggactggtgcttctcggagctcccactcctcagactccggtggaagtgacgtggacctggatcccactgatggcaagctcttccccagcgatggttttcgtgactgcaagaagggggatcccaagcacgggaagcggaaacgaggccggccccgaaagctgagcaaagagtactgggactgtctcgagggcaagaagagcaagcacgcgcccagaggcacccacctgtgggagttcatccgggacatcctcatccacccggagctcaacgagggcctcatgaagtgggagaatcggcatgaaggcgtcttcaagttcctgcgctccgaggctgtggcccaactatggggccaaaagaaaaagaacagcaacatgacctacgagaagctgagccgggccatgaggtactactacaaacgggagatcctggaacgggtggatggccggcgactcgtctacaagtttggcaaaaactcaagcggctggaaggaggaagaggttctccagagtcggaactgagggttggaactatacccgggaccaaactcacggaccactcgaggcctgcaaaccttcctgggaggacaggcaggccagatggcccctccactggggaatgctcccagctgtgctgtggagagaagctgatgttttggtgtattgtcagccatcgtcctgggactcggagactatggcctcgcctccccaccctcctcttggaattacaagccctggggtttgaagctgactttatagctgcaagtgtatctccttttatctggtgcctcctcaaacccagtctcagacactaaatgcagacaacaccttcctcctgcagacacctggactgagccaaggaggcctggggaggccctaggggagcaccgtgatggagaggacagagcaggggctccagcaccttctttctggactggcgttcacctccctgctcagtgcttgggctccacgggcaggggtcagagcactccctaatttatgtgctatataaatatgtcagatgtacatagagatctattttttctaaaacattcccctccccactcctctcccacagagtgctggactgttccaggccctccagtgggctgatgctgggacccttaggatggggctcccagctcctttctcctgtgaatggaggcagagacctccaataaagtgccttctgggctttttctaacctt

SEQ ID NO: 128897 - DNA, 2044 bp, Homo sapiens
  Payload ID: 5210
  Gene Symbol: ELF3
  Gene Name: E74-like factor 3 (ets domain transcription factor, epithelial-specific )
  Uniprot ID: P78545
  ENST ID: ENST00000367283
  CDS Start-End: 243-1358
aggctctatttagagccgggtaggggagcgcagcggccagatacctcagcgctacctggcggaactggatttctctcccgcctgccggcctgcctgccacagccggactccgccactccggtaggattccccgcctgtcattccctagcccagctcttgggaaactgcagaggggtccagaggatttgcagttctgaacctgcacactccagtctaggatctccgagcaagagcgtagcctcatggctgcaacctgtgagattagcaacatttttagcaactacttcagtgcgatgtacagctcggaggactccaccctggcctctgttccccctgctgccacctttggggccgatgacttggtactgaccctgagcaacccccagatgtcattggagggtacagagaaggccagctggttgggggaacagccccagttctggtcgaagacgcaggttctggactggatcagctaccaagtggagaagaacaagtacgacgcaagcgccattgacttctcacgatgtgacatggatggcgccaccctctgcaattgtgcccttgaggagctgcgtctggtctttgggcctctgggggaccaactccatgcccagctgcgagacctcacttccagctcttctgatgagctcagttggatcattgagctgctggagaaggatggcatggccttccaggaggccctagacccagggccctttgaccagggcagcccctttgcccaggagctgctggacgacggtcagcaagccagcccctaccaccccggcagctgtggcgcaggagccccctcccctggcagctctgacgtctccaccgcagggactggtgcttctcggagctcccactcctcagactccggtggaagtgacgtggacctggatcccactgatggcaagctcttccccagcgatggttttcgtgactgcaagaagggggatcccaagcacgggaagcggaaacgaggccggccccgaaagctgagcaaagagtactgggactgtctcgagggcaagaagagcaagcacgcgcccagaggcacccacctgtgggagttcatccgggacatcctcatccacccggagctcaacgagggcctcatgaagtgggagaatcggcatgaaggcgtcttcaagttcctgcgctccgaggctgtggcccaactatggggccaaaagaaaaagaacagcaacatgacctacgagaagctgagccgggccatgaggtactactacaaacgggagatcctggaacgggtggatggccggcgactcgtctacaagtttggcaaaaactcaagcggctggaaggaggaagaggttctccagagtcggaactgagggttggaactatacccgggaccaaactcacggaccactcgaggcctgcaaaccttcctgggaggacaggcaggccagatggcccctccactggggaatgctcccagctgtgctgtggagagaagctgatgttttggtgtattgtcagccatcgtcctgggactcggagactatggcctcgcctccccaccctcctcttggaattacaagccctggggtttgaagctgactttatagctgcaagtgtatctccttttatctggtgcctcctcaaacccagtctcagacactaaatgcagacaacaccttcctcctgcagacacctggactgagccaaggaggcctggggaggccctaggggagcaccgtgatggagaggacagagcaggggctccagcaccttctttctggactggcgttcacctccctgctcagtgcttgggctccacgggcaggggtcagagcactccctaatttatgtgctatataaatatgtcagatgtacatagagatctattttttctaaaacattcccctccccactcctctcccacagagtgctggactgttccaggccctccagtgggctgatgctgggacccttaggatggggctcccagctcctttctcctgtgaatggaggcagagacctccaataaagtgccttctgggctttttctaacctt

SEQ ID NO: 128898 - DNA, 3179 bp, Homo sapiens
  Payload ID: 5210
  Gene Symbol: ELF3
  Gene Name: E74-like factor 3 (ets domain transcription factor, epithelial-specific )
  Uniprot ID: P78545
  ENST ID: ENST00000367284
  CDS Start-End: 199-1314
atgagacaccagctcaggttactgcaggggacacactataaagccctgagctcagggaggagctccctccaggctctatttagagccgggtaggggagcgcagcggccagatacctcagcgctacctggcggaactggatttctctcccgcctgccggcctgcctgccacagccggactccgccactccggtagcctcatggctgcaacctgtgagattagcaacatttttagcaactacttcagtgcgatgtacagctcggaggactccaccctggcctctgttccccctgctgccacctttggggccgatgacttggtactgaccctgagcaacccccagatgtcattggagggtacagagaaggccagctggttgggggaacagccccagttctggtcgaagacgcaggttctggactggatcagctaccaagtggagaagaacaagtacgacgcaagcgccattgacttctcacgatgtgacatggatggcgccaccctctgcaattgtgcccttgaggagctgcgtctggtctttgggcctctgggggaccaactccatgcccagctgcgagacctcacttccagctcttctgatgagctcagttggatcattgagctgctggagaaggatggcatggccttccaggaggccctagacccagggccctttgaccagggcagcccctttgcccaggagctgctggacgacggtcagcaagccagcccctaccaccccggcagctgtggcgcaggagccccctcccctggcagctctgacgtctccaccgcagggactggtgcttctcggagctcccactcctcagactccggtggaagtgacgtggacctggatcccactgatggcaagctcttccccagcgatggttttcgtgactgcaagaagggggatcccaagcacgggaagcggaaacgaggccggccccgaaagctgagcaaagagtactgggactgtctcgagggcaagaagagcaagcacgcgcccagaggcacccacctgtgggagttcatccgggacatcctcatccacccggagctcaacgagggcctcatgaagtgggagaatcggcatgaaggcgtcttcaagttcctgcgctccgaggctgtggcccaactatggggccaaaagaaaaagaacagcaacatgacctacgagaagctgagccgggccatgaggtactactacaaacgggagatcctggaacgggtggatggccggcgactcgtctacaagtttggcaaaaactcaagcggctggaaggaggaagaggttctccagagtcggaactgagggttggaactatacccgggaccaaactcacggaccactcgaggcctgcaaaccttcctgggaggacaggcaggccagatggcccctccactggggaatgctcccagctgtgctgtggagagaagctgatgttttggtgtattgtcagccatcgtcctgggactcggagactatggcctcgcctccccaccctcctcttggaattacaagccctggggtttgaagctgactttatagctgcaagtgtatctccttttatctggtgcctcctcaaacccagtctcagacactaaatgcagacaacaccttcctcctgcagacacctggactgagccaaggaggcctggggaggccctaggggagcaccgtgatggagaggacagagcaggggctccagcaccttctttctggactggcgttcacctccctgctcagtgcttgggctccacgggcaggggtcagagcactccctaatttatgtgctatataaatatgtcagatgtacatagagatctattttttctaaaacattcccctccccactcctctcccacagagtgctggactgttccaggccctccagtgggctgatgctgggacccttaggatggggctcccagctcctttctcctgtgaatggaggcagagacctccaataaagtgccttctgggctttttctaacctttgtcttagctacctgtgtactgaaatttgggcctttggatcgaatatggtcaagaggttggaggggaggaaaatgaaggtctaccaggctgagggtgagggcaaaggctgacgaagaggggagttacagatttcctgtagcaggtgtgggcttacagacacatggactgggctgggaggcgagcaaaggaagcagctgagactgttggagaacgcttacaagacttcatgcaagcaaggacatgaactcagaacactgaggtcagaagcatcctgctgtcatgacaccgctcgagtgaccttgaccttgaccaagtctgtcctgtttaggactgatttttcctattaggctagggtttggacctgatgttctcaagatgtctagaattgcatggctggccttgtggaatagatggttttgcattccagccaagtgtgctgtaaactgtatatctgtaatatgaatcccagcttttgagtctgacaaaatcagagttaggatcttgtaaaggaaaaaaaaaaaaaaacaaaacaaaatggagatgagtacttgctgagaaagaatgagggaaggagttggcatttgttgaaagtgtagtctttttctcttttttttttaattgcaacttttactttagatttaggaggtcgtgcgcaggtttgttacatgggtatattgtgtgatgctgagcttgggatgcgaatgatcctgtcacccaggtagtgagtatagcacccagtgaaactgtagtctcatgccaggcactgtgctagcccactctggctcatttaatcctctcctaagaagagaggagacacagcgtccccatttgacagatgcagaaagaggttccacaggtgtgccttgattctgtcctaaaaccgtttcccggaagcttttcctggtgtgggcgcttctaacctaatcctcaatcgattccagaactattactctgtttccacagtgatactgtgtctaggttttagggaggacagttcattgatgttacttaagaatgctttccaggtggaaagttccttaagtttgaggcttcaaattccatacagcacattaaaatcccattcatgagtttgaaatactgctctgttgtcttggaaataccaatcagattgttggctgaagtgatgtggataaagaagggatcttagaaaaactaaa

SEQ ID NO: 128899 - DNA, 769 bp, Homo sapiens
  Payload ID: 5210
  Gene Symbol: ELF3
  Gene Name: E74-like factor 3 (ets domain transcription factor, epithelial-specific )
  ENST ID: ENST00000446188
  CDS Start-End: 72-769
ggcggaactggatttctctcccgcctgccggcctgcctgccacagccggactccgccactccggtagcctcatggctgcaacctgtgagattagcaacatttttagcaactacttcagtgcgatgtacagctcggaggactccaccctggcctctgttccccctgctgccacctttggggccgatgacttggtactgaccctgagcaacccccagatgtcattggaggagaaggccagctggttgggggaacagccccagttctggtcgaagacgcaggttctggactggatcagctaccaagtggagaagaacaagtacgacgcaagcgccattgacttctcacgatgtgacatggatggcgccaccctctgcaattgtgcccttgaggagctgcgtctggtctttgggcctctgggggaccaactccatgcccagctgcgagacctcacttccagctcttctgatgagctcagttggatcattgagctgctggagaaggatggcatggccttccaggaggccctagacccagggccctttgaccagggcagcccctttgcccaggagctgctggacgacggtcagcaagccagcccctaccaccccggcagctgtggcgcaggagccccctcccctggcagctctgacgtctccaccgcagggactggtgcttctcggagctcccactcctcagactccggtggaagtgacgtggacctggatcccactgatggcaagctcttccccagcgatggttttcgtgactg

SEQ ID NO: 128900 - DNA, 4165 bp, Homo sapiens
  Payload ID: 5211
  Gene Symbol: ELF4
  Gene Name: E74-like factor 4 (ets domain transcription factor)
  Uniprot ID: Q99607
  ENST ID: ENST00000308167
  CDS Start-End: 381-2372
ttctcctttcgccggcgccgagttcctggcgccgctcgcccggcccggcttccgaggggagaggacgggctggcggggctggggacccgcgtctcggcccccggagcggggaccacggagacagaccccggcccggcgaccgagctgggcccgtgagccactcggcctcaggtcgctcctgtggttggtccagcccagaatgcagccttgagcctggcttaggccaccacctactccagctctctccaccccctattttactgcagctcagggggtaggctctaggctccaaagtacctgggtattgtcccttcatcaagaaagccccacagctctggagggctctgataatcccgttgtcagctctctgaaaagacagcatggctattaccctacagcccagtgacctgatctttgagttcgcaagcaacgggatggatgatgatatccaccagctggaagacccctctgtgttcccagctgtgatcgtggagcaggtaccctaccctgatttactgcatctgtactcgggactggagttggacgacgttcacaatggcatcataacagacgggaccttgtgcatgacgcaggatcagatcctggaaggcagttttttgctgacagatgacaatgaggccacctcgcacaccatgtcaaccgcggaagtcttactcaatatggagtctcccagcgatatcctggatgagaagcagatcttcagtacctccgaaatgcttccagactcggaccctgcaccagctgtcactctgcccaactacctgtttcctgcctctgagcccgatgccctgaacagggcgggtgacactagtgaccaggaggggcattctctggaggagaaggcctccagagaggaaagtgccaagaagactgggaaatcaaagaagagaatccggaagaccaagggcaaccgaagtacctcacctgtcactgaccccagcatccccattaggaagaaatcaaaggatggcaaaggcagcaccatctatctgtgggagttcctcctggctcttctgcaagacagaaacacctgtcccaagtacatcaagtggacccagcgagagaaaggcatcttcaaactggtggactccaaagctgtgtccaagctgtgggggaagcagaaaaacaagcctgacatgaactatgagacaatggggcgggcactaagatactactaccaaagaggcatactggccaaagtggaagggcagaggctggtgtaccagtttaaggagatgcccaaggacctggtggtcattgaagatgaggatgagagcagcgaagccacagcagccccacctcaggcctccacggcctctgtggcctctgccagtaccacccggcgaaccagctccagggtctcatccagatctgccccccagggcaagggcagctcttcttgggagaagccaaaaattcagcatgtcggtctccagccatctgcgagtctggaattgggaccgtcgctagacgaggagatccccactacctccaccatgctcgtctctccagcagagggccaggtcaagctcaccaaagctgtgagtgcatcttcagtgcccagcaacatccacctaggagtggcccccgtggggtcgggctcggccctgaccctgcagacgatcccactgaccacggtgctgaccaatgggcctcctgccagtactactgctcccactcagctcgttctccagagtgttccagcggcctctactttcaaggacaccttcactttgcaggcctctttccccctgaacgccagtttccaagacagccaggtggcagccccaggggctccactgattctcagtggcctcccccaacttctggctggggccaaccgtccgaccaacccggcgccacccacggtcacaggggctggaccagcagggcccagctctcagccccctgggactgtcattgctgccttcatcaggacttctggcactacagcagcccctagggtcaaggaggggccactgaggtcctcctcctatgttcagggtatggtgacgggggcccccatggaggggctgctggttcctgaagagaccctgagggagctcctgagagatcaggctcatcttcagccacttccaacccaggtggtttccaggggttcccacaatccgagccttctgggcaaccagactttgtctcctcccagccgccccactgttgggctgaccccagtggctgaacttgagctctcctcaggctcagggtccctgctgatggctgagcctagtgtgaccacatctgggagccttctgacaagatcccccaccccagcccctttctccccattcaaccctacttccctcattaagatggagccccatgacatataagcaaaggggtcagggcaagtgtgacccaccaggcaaaattgagcagcattttcatagggaccgacttcagtagcacacctgcccctgcatttcagtgggatgtcaatacacttgaccccaagtcccccggccctgcctggtgtcactgtggccaaacagtgcccagcttaagcatccctggcatcagactatggccttcaagagcactagggcatatgcttttggcagcataacgggctgacttggtgatggagggaaaaagccttgagccaggcagaagtttgtggccagggtttgtgcagcagctttgtgagaagagcccttctacctggctctatctcactggctgcattccctacacagggaatttactaccctatatgtgaatatccctgtatgtacttgtgtgtacttgttggtctgtatcttagtttctttggggaggacagggctgtagctgtgaggtcttgtctccaagggtgtgtgtatgtctccgtggatcagccacagggatagggattttgtttttaagggaaagcattctctaattccctttgttcatgccgagattcagttgctctgagactatggggtacaagtttgatcctccgaatctggagatgttgtagagctggaacgagtgcagagtaggaacgctttgatgcgcatgcacattggggaagatgcgctcctcagggacacaaaggccgagtggggtaaaaccacgaagggagggaagggaagtcagctctgggagcagccctcactggctggaccaaggtactcttcctggagtttgccgtgttagcaaccacagtcaccttgcagtcaggctggaatcttgggccaccccaaagtgctttgctgaaggatttagacggggatgaagtgccctccagcctcagagctagccacaaagcccccagagctgaattcattgagtatttgtgcctagggcttgggctgtttgtgtgataccggccccccgccagacaatagcctttgctgacaccccagcctacttccccgatcctgggctccctcttgattactttttgacattttccagctgtcaggcatcactgcggctagtccggcagcgacctagatggggtccacccccattcctgctcaagcatgggcacctaccacatggtttctgctgctcagcctgcctgcaactcacctcgaaggcggaccagcctgcctctgtgatgactgcagcagacctccttgggtgtaccaatgcccctcatctcccactttcacacctaaccctgactccttcaccaagaagacgggagtcggcagccaggagttcccgtggcacctctctctcttcgtggctccctgcttcccccttccctctttccgaggaagggtcaacctattctctctcaaagccaacccctaggccaattgcctggatctcctcccctctcccttctttaaacgagcttgcctccctcctgccaagtttgagggcaaggctaagaaatgtcagccacggaaacaactctattatctggtgactttgggtaatgtgaatcagtgcctgaggacctttgctgtgtccttggtacagaaccatccacttgacctaactacctcccctggccgcgctctcgctcttctcttctttgttaagccaacaactatcaccctctcctactcttcttctccctgccccctggagggcactgtgtttggttgtgcaaatgtatttactatgcgtgtttccagcagttggcattaaagtgcctttttctaataaaatcagtttattatgacag

SEQ ID NO: 128901 - DNA, 4145 bp, Homo sapiens
  Payload ID: 5211
  Gene Symbol: ELF4
  Gene Name: E74-like factor 4 (ets domain transcription factor)
  Uniprot ID: Q99607
  ENST ID: ENST00000335997
  CDS Start-End: 307-2298
ggtatttgcatctctccctccaacttgccattggcggcgcgaagtgtgggagagccctgcgcctcgcccgcccggaccagcctgccccggcgccgaggtcgctcctgtggttggtccagcccagaatgcagccttgagcctggcttaggccaccacctactccagctctctccaccccctattttactgcagctcagggggtaggctctaggctccaaagtacctgggtattgtcccttcatcaagaaagccccacagctctggagggctctgataatcccgttgtcagctctctgaaaagacagcatggctattaccctacagcccagtgacctgatctttgagttcgcaagcaacgggatggatgatgatatccaccagctggaagacccctctgtgttcccagctgtgatcgtggagcaggtaccctaccctgatttactgcatctgtactcgggactggagttggacgacgttcacaatggcatcataacagacgggaccttgtgcatgacgcaggatcagatcctggaaggcagttttttgctgacagatgacaatgaggccacctcgcacaccatgtcaaccgcggaagtcttactcaatatggagtctcccagcgatatcctggatgagaagcagatcttcagtacctccgaaatgcttccagactcggaccctgcaccagctgtcactctgcccaactacctgtttcctgcctctgagcccgatgccctgaacagggcgggtgacactagtgaccaggaggggcattctctggaggagaaggcctccagagaggaaagtgccaagaagactgggaaatcaaagaagagaatccggaagaccaagggcaaccgaagtacctcacctgtcactgaccccagcatccccattaggaagaaatcaaaggatggcaaaggcagcaccatctatctgtgggagttcctcctggctcttctgcaagacagaaacacctgtcccaagtacatcaagtggacccagcgagagaaaggcatcttcaaactggtggactccaaagctgtgtccaagctgtgggggaagcagaaaaacaagcctgacatgaactatgagacaatggggcgggcactaagatactactaccaaagaggcatactggccaaagtggaagggcagaggctggtgtaccagtttaaggagatgcccaaggacctggtggtcattgaagatgaggatgagagcagcgaagccacagcagccccacctcaggcctccacggcctctgtggcctctgccagtaccacccggcgaaccagctccagggtctcatccagatctgccccccagggcaagggcagctcttcttgggagaagccaaaaattcagcatgtcggtctccagccatctgcgagtctggaattgggaccgtcgctagacgaggagatccccactacctccaccatgctcgtctctccagcagagggccaggtcaagctcaccaaagctgtgagtgcatcttcagtgcccagcaacatccacctaggagtggcccccgtggggtcgggctcggccctgaccctgcagacgatcccactgaccacggtgctgaccaatgggcctcctgccagtactactgctcccactcagctcgttctccagagtgttccagcggcctctactttcaaggacaccttcactttgcaggcctctttccccctgaacgccagtttccaagacagccaggtggcagccccaggggctccactgattctcagtggcctcccccaacttctggctggggccaaccgtccgaccaacccggcgccacccacggtcacaggggctggaccagcagggcccagctctcagccccctgggactgtcattgctgccttcatcaggacttctggcactacagcagcccctagggtcaaggaggggccactgaggtcctcctcctatgttcagggtatggtgacgggggcccccatggaggggctgctggttcctgaagagaccctgagggagctcctgagagatcaggctcatcttcagccacttccaacccaggtggtttccaggggttcccacaatccgagccttctgggcaaccagactttgtctcctcccagccgccccactgttgggctgaccccagtggctgaacttgagctctcctcaggctcagggtccctgctgatggctgagcctagtgtgaccacatctgggagccttctgacaagatcccccaccccagcccctttctccccattcaaccctacttccctcattaagatggagccccatgacatataagcaaaggggtcagggcaagtgtgacccaccaggcaaaattgagcagcattttcatagggaccgacttcagtagcacacctgcccctgcatttcagtgggatgtcaatacacttgaccccaagtcccccggccctgcctggtgtcactgtggccaaacagtgcccagcttaagcatccctggcatcagactatggccttcaagagcactagggcatatgcttttggcagcataacgggctgacttggtgatggagggaaaaagccttgagccaggcagaagtttgtggccagggtttgtgcagcagctttgtgagaagagcccttctacctggctctatctcactggctgcattccctacacagggaatttactaccctatatgtgaatatccctgtatgtacttgtgtgtacttgttggtctgtatcttagtttctttggggaggacagggctgtagctgtgaggtcttgtctccaagggtgtgtgtatgtctccgtggatcagccacagggatagggattttgtttttaagggaaagcattctctaattccctttgttcatgccgagattcagttgctctgagactatggggtacaagtttgatcctccgaatctggagatgttgtagagctggaacgagtgcagagtaggaacgctttgatgcgcatgcacattggggaagatgcgctcctcagggacacaaaggccgagtggggtaaaaccacgaagggagggaagggaagtcagctctgggagcagccctcactggctggaccaaggtactcttcctggagtttgccgtgttagcaaccacagtcaccttgcagtcaggctggaatcttgggccaccccaaagtgctttgctgaaggatttagacggggatgaagtgccctccagcctcagagctagccacaaagcccccagagctgaattcattgagtatttgtgcctagggcttgggctgtttgtgtgataccggccccccgccagacaatagcctttgctgacaccccagcctacttccccgatcctgggctccctcttgattactttttgacattttccagctgtcaggcatcactgcggctagtccggcagcgacctagatggggtccacccccattcctgctcaagcatgggcacctaccacatggtttctgctgctcagcctgcctgcaactcacctcgaaggcggaccagcctgcctctgtgatgactgcagcagacctccttgggtgtaccaatgcccctcatctcccactttcacacctaaccctgactccttcaccaagaagacgggagtcggcagccaggagttcccgtggcacctctctctcttcgtggctccctgcttcccccttccctctttccgaggaagggtcaacctattctctctcaaagccaacccctaggccaattgcctggatctcctcccctctcccttctttaaacgagcttgcctccctcctgccaagtttgagggcaaggctaagaaatgtcagccacggaaacaactctattatctggtgactttgggtaatgtgaatcagtgcctgaggacctttgctgtgtccttggtacagaaccatccacttgacctaactacctcccctggccgcgctctcgctcttctcttctttgttaagccaacaactatcaccctctcctactcttcttctccctgccccctggagggcactgtgtttggttgtgcaaatgtatttactatgcgtgtttccagcagttggcattaaagtgcctttttctaataaaatcagtttattatgacagtttcctgatggttgaaagtaagcatcttgataaagggtcaccattaaaaaaaaa

SEQ ID NO: 128902 - DNA, 406 bp, Homo sapiens
  Payload ID: 5211
  Gene Symbol: ELF4
  Gene Name: E74-like factor 4 (ets domain transcription factor)
  ENST ID: ENST00000434609
  CDS Start-End: 177-406
ggcgaccgagctgggcccgtgagccactcggcctcaggtcgctcctgtggttggtccagcccagaatgcagccttgagcctggcttaggccaccacctactccagctctctccaccccctattttactgcagctcaggggcccagtgacctgatctttgagttcgcaagcaacgggatggatgatgatatccaccagctggaagacccctctgtgttcccagctgtgatcgtggagcaggtaccctaccctgatttactgcatctgtactcgggactggagttggacgacgttcacaatggcatcataacagacgggaccttgtgcatgacgcaggatcagatcctggaaggcagttttttgctgacagatgacaatgaggccacctcgcacaccatgtcaaccgc

SEQ ID NO: 128903 - DNA, 3878 bp, Homo sapiens
  Payload ID: 5211
  Gene Symbol: ELF4
  Gene Name: E74-like factor 4 (ets domain transcription factor)
  ENST ID: ENST00000615377
  CDS Start-End: 103-2091
gctctaggctccaaagtacctgggtattgtcccttcatcaagaaagccccacagctctggagggctctgataatcccgttgtcagctctctgaaaagacagcatggctattaccctacagcccagtgacctgatctttgagttcgcaagcaacgggatggatgatgatatccaccagctggaagacccctctgtgttcccagctgtgatcgtggagcaggtaccctaccctgatttactgcatctgtactcgggactggagttggacgacgttcacaatggcatcataacagacgggaccttgtgcatgacgcaggatcagatcctggaaggcagttttttgctgacagatgacaatgaggccacctcgcacaccatgtcaaccgcggaagtcttactcaatatggagtctcccagcgatatcctggatgagaagcagatcttcagtacctccgaaatgcttccagactcggaccctgcaccagctgtcactctgcccaactacctgtttcctgcctctgagcccgatgccctgaacagggcgggtgacactagtgaccaggaggggcattctctggaggagaaggcctccagagaggaaagtgccaagaagactgggaaatcaaagaagagaatccggaagaccaagggcaaccgaagtacctcacctgtcactgaccccagcatccccattaggaagaaatcaaaggatggcaaaggcagcaccatctatctgtgggagttcctcctggctcttctgcaagacagaaacacctgtcccaagtacatcaagtggacccagcgagagaaaggcatcttcaaactggtggactccaaagctgtgtccaagctgtgggggaagcagaaaaacaagcctgacatgaactatgagacaatggggcgggcactaagatactactaccaaagaggcatactggccaaagtggaagggcagaggctggtgtaccagtttaaggagatgcccaaggacctggtggtcattgaagatgaggatgagagcagcgaagccacagcagccccacctcaggcctccacggcctctgtggcctctgccagtaccacccggcgaaccagctccagggtcatccagatctgccccccagggcaagggcagctcttcttgggagaagccaaaaattcagcatgtcggtctccagccatctgcgagtctggaattgggaccgtcgctagacgaggagatccccactacctccaccatgctcgtctctccagcagagggccaggtcaagctcaccaaagctgtgagtgcatcttcagtgcccagcaacatccacctaggagtggcccccgtgggtcgggctcggccctgaccctgcagacgatcccactgaccacggtgctgaccaatgggcctcctgccagtactactgctcccactcagctcgttctccagagtgttccagcggcctctactttcaaggacaccttcactttgcaggcctctttccccctgaacgccagtttccaagacagccaggtggcagccccaggggctccactgattctcagtggcctcccccaacttctggctggggccaaccgtccgaccaacccggcgccacccacggtcacaggggctggaccagcagggcccagctctcagccccctgggactgtcattgctgccttcatcaggacttctggcactacagcagcccctagggtcaaggaggggccactgaggtcctcctcctatgttcagggtatggtgacgggggcccccatggaggggctgctggttcctgaagagaccctgagggagctcctgagagatcaggctcatcttcagccacttccaacccaggtggtttccaggggttcccacaatccgagccttctgggcaaccagactttgtctcctcccagccgccccactgttgggctgaccccagtggctgaacttgagctctcctcaggctcagggtccctgctgatggctgagcctagtgtgaccacatctgggagccttctgacaagatcccccaccccagcccctttctccccattcaaccctacttccctcattaagatggagccccatgacatataagcaaaggggtcagggcaagtgtgacccaccaggcaaaattgagcagcattttcatagggaccgacttcagtagcacacctgcccctgcatttcagtgggatgtcaatacacttgaccccaagtcccccggccctgcctggtgtcactgtggccaaacagtgcccagcttaagcatccctggcatcagactatggccttcaagagcactagggcatatgcttttggcagcataacgggctgacttggtgatggagggaaaaagccttgagccaggcagaagtttgtggccagggtttgtgcagcagctttgtgagaagagcccttctacctggctctatctcactggctgcattccctacacagggaatttactaccctatatgtgaatatccctgtatgtacttgtgtgtacttgttggtctgtatcttagtttctttggggaggacagggctgtagctgtgaggtcttgtctccaagggtgtgtgtatgtctccgtggatcagccacagggatagggattttgtttttaagggaaagcattctctaattccctttgttcatgccgagattcagttgctctgagactatggggtacaagtttgatcctccgaatctggagatgttgtagagctggaacgagtgcagagtaggaacgctttgatgcgcatgcacattggggaagatgcgctcctcagggacacaaaggccgagtggggtaaaaccacgaagggagggaagggaagtcagctctgggagcagccctcactggctggaccaaggtactcttcctggagtttgccgtgttagcaaccacagtcaccttgcagtcaggctggaatcttgggccaccccaaagtgctttgctgaaggatttagacggggatgaagtgccctccagcctcagagctagccacaaagcccccagagctgaattcattgagtatttgtgcctagggcttgggctgtttgtgtgataccggccccccgccagacaatagcctttgctgacaccccagcctacttccccgatcctgggctccctcttgattactttttgacattttccagctgtcaggcatcactgcggctagtccggcagcgacctagatggggtccacccccattcctgctcaagcatgggcacctaccacatggtttctgctgctcagcctgcctgcaactcacctcgaaggcggaccagcctgcctctgtgatgactgcagcagacctccttgggtgtaccaatgcccctcatctcccactttcacacctaaccctgactccttcaccaagaagacgggagtcggcagccaggagttcccgtggcacctctctctcttcgtggctccctgcttcccccttccctctttccgaggaagggtcaacctattctctctcaaagccaacccctaggccaattgcctggatctcctcccctctcccttctttaaacgagcttgcctccctcctgccaagtttgagggcaaggctaagaaatgtcagccacggaaacaactctattatctggtgactttgggtaatgtgaatcagtgcctgaggacctttgctgtgtccttggtacagaaccatccacttgacctaactacctcccctggccgcgctctcgctcttctcttctttgttaagccaacaactatcaccctctcctactcttcttctccctgccccctggagggcactgtgtttggttgtgcaaatgtatttactatgcgtgtttccagcagttggcattaaagtgcctttttctaataaaatcagtttatta

SEQ ID NO: 128904 - DNA, 2321 bp, Homo sapiens
  Payload ID: 5212
  Gene Symbol: ELF5
  Gene Name: E74-like factor 5 (ets domain transcription factor)
  Uniprot ID: Q9UKW6
  ENST ID: ENST00000257832
  CDS Start-End: 129-896
gtaggtgtcacttatatcacaaggctacaggtgtctttatttccactgcacgctggtgctgggagcgcctgccttctcttgccttgaaagcctcctctttggacctagccaccgctgccctcacggtaatgttggactcggtgacacacagcaccttcctgcctaatgcatccttctgcgatcccctgatgtcgtggactgatctgttcagcaatgaagagtactaccctgcctttgagcatcagacagcctgtgactcatactggacatcagtccaccctgaatactggactaagcgccatgtgtgggagtggctccagttctgctgcgaccagtacaagttggacaccaattgcatctccttctgcaacttcaacatcagtggcctgcagctgtgcagcatgacacaggaggagttcgtcgaggcagctggcctctgcggcgagtacctgtacttcatcctccagaacatccgcacacaaggttactccttttttaatgacgctgaagaaagcaaggccaccatcaaagactatgctgattccaactgcttgaaaacaagtggcatcaaaagtcaagactgtcacagtcatagtagaacaagcctccaaagttctcatctatgggaatttgtacgagacctgcttctatctcctgaagaaaactgtggcattctggaatgggaagatagggaacaaggaatttttcgggtggttaaatcggaagccctggcaaagatgtggggacaaaggaagaaaaatgacagaatgacatatgaaaagttgagcagagccctgagatactactataaaacaggaattttggagcgggttgaccgaaggttagtgtacaaatttggaaaaaatgcacacgggtggcaggaagacaagctatgatctgctccaggcatcaagctcattttatggatttctgtcttttaaaacaatcagattgcaatagacattcgaaaggcttcattttcttctctttttttttaacctgcaaacatgctgataaaatttctccacatctcagcttacatttggattcagagttgttgtctatggagggtgagagcagaaactcttaagaaatcctttcttctccctaaggggatgaggggatgatcttttgtggtgtcttgatcaaactttattttcctagagttgtggaatgacaacagcccatgccattgatgctgatcagagaaaaactattcaattctgccattagagacacatccaatgctcccatcccaaaggttcaaaagttttcaaataactgtggcagctcaccaaaggtgggggaaagcatgattagtttgcaggttatggtaggagagggtgagatataagacatacatactttagattttaaattattaaagtcaaaaatccatagaaaagtatccctttttttttttttgagacgggttctcactatgttgcccagggctggtcttgaactcctatgctcaagtgatcctcccacctcagcctcccaaagtactgtgattacaagcgtgagccacggcacctgggcagaaaagtatcttaattaatgaaagagctaagccatcaagctgggacttaattggatttaacataggttcacagaaagtttcctaaccagagcatctttttgaccactcagcaaaacttccacagacatccttctggacttaaacacttaacattaaccacattattaattgttgctgagtttattcccccttctaactgatggctggcatctgatatgcagagttagtcaacagacactggcatcaattacaaaatcactgctgtttctgtgattcaagctgtcaacacaataaaatcgaaattcattgattccatctcaggtccagatgttaaacgtttataaaaccggaaatgtcctaacaactctgtaatggcaaattaaattgtgtgtcttttttgttttgtctttctacctgatgtgtattcaagcgctataacacgtatttccttgacaaaaatagtgacagtgaattcacactaataaatgttcataggttaaagtctgcactgacattttctcatcaatcactggtatgtaagttatcagtgactgacagctaggtggactgcccctaggacttctgtttcaccagagcaggaatcaagtggtgaggcactgaatcgctgtacaggctgaagacctccttattagagttgaacttcaaagtaacttgttttaaaaaatatgaattactgtaaaataatctattttggattcatgtgttttccaggtggatatagtttgtaaacaatgtgaataaagtatttaacatgttc

SEQ ID NO: 128905 - DNA, 2450 bp, Homo sapiens
  Payload ID: 5212
  Gene Symbol: ELF5
  Gene Name: E74-like factor 5 (ets domain transcription factor)
  Uniprot ID: Q9UKW6
  ENST ID: ENST00000312319
  CDS Start-End: 231-1028
ggctgagtggtttgctccttcccctctctctgggaggctgagcaggggtgccgggttgctcaggccatgggagccacacctgttattgctgcctctgatttgtgtgacactgagaagcccacaggcctgtccctccaactcggtggaccctctctgtgtgcatttggtgtgtgagccagctctgagaagggttcagaagccactggaggcatctggggacctcagcttccatgccatctctgcctcactcccacagggtaatgttggactcggtgacacacagcaccttcctgcctaatgcatccttctgcgatcccctgatgtcgtggactgatctgttcagcaatgaagagtactaccctgcctttgagcatcagacagcctgtgactcatactggacatcagtccaccctgaatactggactaagcgccatgtgtgggagtggctccagttctgctgcgaccagtacaagttggacaccaattgcatctccttctgcaacttcaacatcagtggcctgcagctgtgcagcatgacacaggaggagttcgtcgaggcagctggcctctgcggcgagtacctgtacttcatcctccagaacatccgcacacaaggttactccttttttaatgacgctgaagaaagcaaggccaccatcaaagactatgctgattccaactgcttgaaaacaagtggcatcaaaagtcaagactgtcacagtcatagtagaacaagcctccaaagttctcatctatgggaatttgtacgagacctgcttctatctcctgaagaaaactgtggcattctggaatgggaagatagggaacaaggaatttttcgggtggttaaatcggaagccctggcaaagatgtggggacaaaggaagaaaaatgacagaatgacatatgaaaagttgagcagagccctgagatactactataaaacaggaattttggagcgggttgaccgaaggttagtgtacaaatttggaaaaaatgcacacgggtggcaggaagacaagctatgatctgctccaggcatcaagctcattttatggatttctgtcttttaaaacaatcagattgcaatagacattcgaaaggcttcattttcttctctttttttttaacctgcaaacatgctgataaaatttctccacatctcagcttacatttggattcagagttgttgtctatggagggtgagagcagaaactcttaagaaatcctttcttctccctaaggggatgaggggatgatcttttgtggtgtcttgatcaaactttattttcctagagttgtggaatgacaacagcccatgccattgatgctgatcagagaaaaactattcaattctgccattagagacacatccaatgctcccatcccaaaggttcaaaagttttcaaataactgtggcagctcaccaaaggtgggggaaagcatgattagtttgcaggttatggtaggagagggtgagatataagacatacatactttagattttaaattattaaagtcaaaaatccatagaaaagtatccctttttttttttttgagacgggttctcactatgttgcccagggctggtcttgaactcctatgctcaagtgatcctcccacctcagcctcccaaagtactgtgattacaagcgtgagccacggcacctgggcagaaaagtatcttaattaatgaaagagctaagccatcaagctgggacttaattggatttaacataggttcacagaaagtttcctaaccagagcatctttttgaccactcagcaaaacttccacagacatccttctggacttaaacacttaacattaaccacattattaattgttgctgagtttattcccccttctaactgatggctggcatctgatatgcagagttagtcaacagacactggcatcaattacaaaatcactgctgtttctgtgattcaagctgtcaacacaataaaatcgaaattcattgattccatctcaggtccagatgttaaacgtttataaaaccggaaatgtcctaacaactctgtaatggcaaattaaattgtgtgtcttttttgttttgtctttctacctgatgtgtattcaagcgctataacacgtatttccttgacaaaaatagtgacagtgaattcacactaataaatgttcataggttaaagtctgcactgacattttctcatcaatcactggtatgtaagttatcagtgactgacagctaggtggactgcccctaggacttctgtttcaccagagcaggaatcaagtggtgaggcactgaatcgctgtacaggctgaagacctccttattagagttgaacttcaaagtaacttgttttaaaaaatatgaattactgtaaaataatctattttggattcatgtgttttccaggtggatatagtttgtaaacaatgtgaataaagtatttaacatg

SEQ ID NO: 128906 - DNA, 637 bp, Homo sapiens
  Payload ID: 5212
  Gene Symbol: ELF5
  Gene Name: E74-like factor 5 (ets domain transcription factor)
  Uniprot ID: Q9UKW6
  ENST ID: ENST00000429939
  CDS Start-End: 134-616
tgtctgtaggtgtcacttatatcacaaggctacaggtgtctttatttccactgcacgctggtgctgggagcgcctgccttctcttgccttgaaagcctcctctttggacctagccaccgctgccctcacggtaatgttggactcggtgacacacagcaccttcctgcctaatgcatccttctgcgatcccctgatgtcgtggactgatctgttcagcaatgaagagtactaccctgcctttgagcatcagacagatgctgattccaactgcttgaaaacaagtggcatcaaaagtcaagactgtcacagtcatagtagaacaagcctccaaagttctcatctatgggaatttgtacgagacctgcttctatctcctgaagaaaactgtggcattctggaatgggaagatagggaacaaggaatttttcgggtggttaaatcggaagccctggcaaagatgtggggacaaaggaagaaaaatgacagaatgacatatgaaaagttgagcagagccctgagatactactataaaacaggaattttggagcgggttgaccgaaggttagtgtacaaatttggaaaaaatgcacacgggtggcaggaagacaagctatgatctgctccaggcatcaagctc

SEQ ID NO: 128907 - DNA, 2330 bp, Homo sapiens
  Payload ID: 5212
  Gene Symbol: ELF5
  Gene Name: E74-like factor 5 (ets domain transcription factor)
  Uniprot ID: Q9UKW6
  ENST ID: ENST00000532417
  CDS Start-End: 94-510
tttatttccactgcacgctggtgctgggagcgcctgccttctcttgccttgaaagcctcctctttggacctagccaccgctgccctcacggtaatgttggactcggtgacacacagcaccttcctgcctaatgcatccttctgcgatcccctgatgtcgtggactgatctgttcagcaatgaagagtactaccctgcctttgagcatcagacagcctgtgactcatactggacatcagtccaccctgaatactggactaagcgccatgtgtgggagtggctccagttctgctgcgaccagtacaagttggacaccaattgcatctccttctgcaacttcaacatcagtggcctgcagctgtgcagcatgacacaggaggagttcgtcgaggcagctggcctctgcggcgagtacctgtacttcatcctccagaacatccgcacacaaggtcagtgttcagagggccagacctccaggggagggaccaggattaggaccaaacaactttgagaagtcctttcccatcgtgtgaattgcacagcaaaattttactaactggagttctcgttaatccaaaccttcaataactggaagctagtatgccagaattggggattttagggaaaagggagcgagttacaaaaatgcaaattgagtgcatttaaaaaaagagaaagaaaaacggacaccacgttcagggactgcccaggcaccaggctgataataatacagtatattcataatgatttgaaaccacacaggatggacaaaaaagaggtttgtgcttcatctctcattaagcagaagaggaataaaattaaatagactaccttcccttttctacaggagtccaactaattatcatttcatcacattcctaatggtcaaggatcaagtggccagaaggtggcgccaatagcattatttaactcttcaacaggccttttgcatgcagaatgtcgatgaacattttttcaatccagaaaggttctttgagaacatcgagctctaatgtctcaaagtcacacatagataaaggaactgatatcctgagacattaagtgacttcctcaaggtcacacagcaaacagggctgattcacagaaagtcagtacaaagcaagggcttggagatccgaaagacctgtgttccaaccctggctccaatactccgagctacggaacctctggcgagtggcttaagctgtctgaatccccactgcctcatctgtccaatgggataatgacacctccatgggctttttgagaggattcagggaaatattacctagaacagcatatgaagatggaaatgcagtaaatggcagctgtttttccatcatcattaatataatcaagaggcatattataggatgttaaaggaagcctatctcagctcagttttaagaaggatctttttaaaggttagtaccttcttttgaaaaggtaattcagaagatacaggagataggacgatccccaccactggagataatcaagtagtctaatagccccctgcttgaagaggaggatatgacagcgcctcttgtttgcacagaaaaaccacagaggaccctcctgctctgtgattctttggcctcctcttgatcctcatccatcatgagcgcttgaaggcagaaaagctaagaatggtggcccttgggcactacatggctggggccctgggagccaaaactccagtgacaatgacctgccaagagctgggatctgtgtcctgtgctcagagtgggcactccctgaaagaggacaagtttgaccaagtcacaacggctccagaagaaggagcttgggactccatttaggatcctcccaagggaacaggctcgcacaaaaatcctagggccacagagaggggtgtattttattctggaaaaagatgcagtttggcaatgccagcttggccaaatgtcaagtcaacctcatttgtctccatgctcttgtgcagcccctgtgctggcatctcccaccacaagcacctctcttccctggcaatggttgcatcaaaaaacaaacaaacaaaaaaaacctgttggccaggcacagttgctcaggcctgtaatcccaatactttgggaggctgaggcaggcagatcatctaaggtcaggaattcgagacaagcctggccaacatggtgaaaccccgtctctactaaaaatacaaaattagacaggcatggtggtgcgtgcctataatcccagttactcaggaggctgaggcatgagaatcacttgaacccaggaggtggaggttgcaagtgagccgagattgcaccattgcactccagcctgggcaaaaagagcaaaatcctg

SEQ ID NO: 128908 - DNA, 2217 bp, Homo sapiens
  Payload ID: 5212
  Gene Symbol: ELF5
  Gene Name: E74-like factor 5 (ets domain transcription factor)
  ENST ID: ENST00000620316
  CDS Start-End: 231-794
ggctgagtggtttgctccttcccctctctctgggaggctgagcaggggtgccgggttgctcaggccatgggagccacacctgttattgctgcctctgatttgtgtgacactgagaagcccacaggcctgtccctccaactcggtggaccctctctgtgtgcatttggtgtgtgagccagctctgagaagggttcagaagccactggaggcatctggggacctcagcttccatgccatctctgcctcactcccacagggtaatgttggactcggtgacacacagcaccttcctgcctaatgcatccttctgcgatcccctgatgtcgtggactgatctgttcagcaatgaagagtactaccctgcctttgagcatcagacaggttactccttttttaatgacgctgaagaaagcaaggccaccatcaaagactatgctgattccaactgcttgaaaacaagtggcatcaaaagtcaagactgtcacagtcatagtagaacaagcctccaaagttctcatctatgggaatttgtacgagacctgcttctatctcctgaagaaaactgtggcattctggaatgggaagatagggaacaaggaatttttcgggtggttaaatcggaagccctggcaaagatgtggggacaaaggaagaaaaatgacagaatgacatatgaaaagttgagcagagccctgagatactactataaaacaggaattttggagcgggttgaccgaaggttagtgtacaaatttggaaaaaatgcacacgggtggcaggaagacaagctatgatctgctccaggcatcaagctcattttatggatttctgtcttttaaaacaatcagattgcaatagacattcgaaaggcttcattttcttctctttttttttaacctgcaaacatgctgataaaatttctccacatctcagcttacatttggattcagagttgttgtctatggagggtgagagcagaaactcttaagaaatcctttcttctccctaaggggatgaggggatgatcttttgtggtgtcttgatcaaactttattttcctagagttgtggaatgacaacagcccatgccattgatgctgatcagagaaaaactattcaattctgccattagagacacatccaatgctcccatcccaaaggttcaaaagttttcaaataactgtggcagctcaccaaaggtgggggaaagcatgattagtttgcaggttatggtaggagagggtgagatataagacatacatactttagattttaaattattaaagtcaaaaatccatagaaaagtatccctttttttttttttgagacgggttctcactatgttgcccagggctggtcttgaactcctatgctcaagtgatcctcccacctcagcctcccaaagtactgtgattacaagcgtgagccacggcacctgggcagaaaagtatcttaattaatgaaagagctaagccatcaagctgggacttaattggatttaacataggttcacagaaagtttcctaaccagagcatctttttgaccactcagcaaaacttccacagacatccttctggacttaaacacttaacattaaccacattattaattgttgctgagtttattcccccttctaactgatggctggcatctgatatgcagagttagtcaacagacactggcatcaattacaaaatcactgctgtttctgtgattcaagctgtcaacacaataaaatcgaaattcattgattccatctcaggtccagatgttaaacgtttataaaaccggaaatgtcctaacaactctgtaatggcaaattaaattgtgtgtcttttttgttttgtctttctacctgatgtgtattcaagcgctataacacgtatttccttgacaaaaatagtgacagtgaattcacactaataaatgttcataggttaaagtctgcactgacattttctcatcaatcactggtatgtaagttatcagtgactgacagctaggtggactgcccctaggacttctgtttcaccagagcaggaatcaagtggtgaggcactgaatcgctgtacaggctgaagacctccttattagagttgaacttcaaagtaacttgttttaaaaaatatgaattactgtaaaataatctattttggattcatgtgttttccaggtggatatagtttgtaaacaatgtgaataaagtatttaacatgt

SEQ ID NO: 128909 - DNA, 5250 bp, Homo sapiens
  Payload ID: 5213
  Gene Symbol: EBF1
  Gene Name: early B-cell factor 1
  Uniprot ID: Q9UH73
  ENST ID: ENST00000313708
  CDS Start-End: 284-2059
gccaagcatacatctctaattttattattttggtcttttcgttggattttccctttcttctttttttcgggttatcgctcagttttgagcagaggtttacattttttaaaaatttgctttccagcccgccttgatcttctaagtgcgagttcatcgtctgagaaaaaaaaaaatctctggttggcgtttttgtttcttttcttttctttcttttctttcctttttttttttttttaatttttttcaagggggaggagattttccacaagaaaaggttgttttcatgtttgggattcaggaaagcatccaacggagtggaagcagcatgaaggaagagccgctgggcagcggcatgaacgcggtgcggacgtggatgcagggcgccggggtgctggacgccaacacggcggcgcagagcggggtgggtctggcccgggctcactttgagaagcagccgccttccaatctgcggaaatccaacttcttccacttcgtcctggccctctacgacagacagggccagcccgtggagatcgagaggacagcgtttgtggggttcgtggagaaggaaaaagaagccaacagcgaaaagaccaataacggaattcactaccggcttcagcttctctacagcaatgggataaggacggagcaggatttctacgtgcgcctcattgactccatgacaaaacaagccatagtgtatgaaggccaagacaagaacccagaaatgtgccgagtcttgctcacacatgagatcatgtgcagccgctgttgtgacaagaaaagctgtggcaaccgaaatgagactccctcagatccagtgataattgacaggttcttcttgaaatttttcctcaaatgtaaccaaaattgcctaaagaatgcgggaaacccacgtgacatgcggagattccaggtcgtggtgtctacgacagtcaatgtggatggccatgtcctggcagtctctgataacatgtttgtccataataattccaagcatgggcggagggctcggaggcttgacccctcggaaggtacgccctcttatctggaacatgctactccctgtatcaaagccatcagcccgagtgaaggatggacgacgggaggtgcgactgtgatcatcataggggacaatttctttgatgggttacaggtcatattcggtaccatgctggtctggagtgagttgatcactcctcatgccatccgtgtgcagacccctcctcggcacatccctggtgttgtggaagtcacactgtcctacaaatctaagcagttctgcaaaggaacaccaggcagattcatttatacagcgctcaacgaacccaccatcgattatggtttccagaggttacagaaggtcattcctcggcaccctggtgaccctgagcgtttgccaaaggaagtaatactcaaaagggctgcggatctggtagaagcactgtatgggatgccacacaacaaccaggaaatcattctgaagagagcggccgacattgccgaggccctgtacagtgttccccgcaaccacaaccaactcccggcccttgctaacacctcggtccacgcagggatgatgggcgtgaattcgttcagtggacaactggccgtgaatgtctccgaggcatcacaagccaccaatcagggtttcacccgcaactcaagcagcgtatcaccacacgggtacgtgccgagcaccactccccagcagaccaactataactccgtcaccacgagcatgaacggatacggctctgccgcaatgtccaatttgggcggctcccccaccttcctcaacggctcagctgccaactccccctatgccatagtgccatccagccccaccatggcctcctccacaagcctcccctccaactgcagcagctcctcgggcatcttctccttctcaccagccaacatggtctcagccgtgaaacagaagagtgctttcgcaccagtcgtcagaccccagacctccccacctcccacctgcaccagcaccaacgggaacagcctgcaagcgatatctggcatgattgttcctcctatgtgaaagaattgccttgaagaattgtattaatgaagaggttggattctgctacagagagtaatctgatacaagtcccagagtggaacttttaactcaggcctttttaagaggaatcacaataactgcagatttttaaacaaacaaaatcaccgaccttgcaaatactgaaattggaagagggatctgcaagtgcagggtgttggttaaagttgtacctcccaagtatttgggggatatatttattctgtattgacaaaagcaaatccactttttctttttcttttttttttttaagcttaattctgcaatcatttgtcttttataaaccgtaaagctctatacaagggacactataaataagactccatgttttaatttatgatgtttttaaagctgtgtaaaggaagaatgaagtggtgatatttacaaaaaagtaaaaaaaaaaaaaaagaaaaaaaggaaaaaaaaaaaagcttgtatgggacagaataggaatgccagttagattttttagaaaaactaagggtcggcttttgcgccttaaagcatatcaaatggtagttagctcagacagtgcattttcaatatctaacttaacatgccaccccttagcagtgcaagcttatttatctcttttgtattgttgtcttaagcaactgtgtaaataaatgcagcctggaaagttaaaacgcgatgtaagtgatcacatttttccctctactcgaaaatccagtgcctctagacagattgttaaaactgcatatttaaatctgatctcattctctccttttacttaagtcagtttcttctgaagccgatggcctctcgagagcttggtggcacacatactgtgtgagaatctcctttgagacttcatggaacagggtccaggcacagaattccacactctgccctccagttaacaagccaaaacctcacgtacgctcccccatttgcaagtttaaagtttactcgtcctaaatgcagacttcatacctatcttccaaaagttgataaaagcaacgtggcaggtattttcgattttcccattccagatactgcctctatcagtcgacccttaccatttgtaacataatagattgaaacaacaggttaagtgctttggaattaagagttaaagggaaccgggggtggagaaaggaaaagaaggttgagacctccaaaacatagttttctgttctatgggaatttttgctctcattatctgggaagtgttcttaaaaataagaattaatagcaaagatgcagcaaagctctgaggatgcatttgcctgatatttttttctttgctcttgtgtttttgtatgtagttataaatactgtagattttttttttgtgattttttgccaaagttgttgttctatttatacattttaatgtcttaagacattttttcaatatcacaaaaagattttactgcgtattttgcaaagaaaaaaagctcactacctttagcttgcacatacttgcaaagttaattaaaaggctttttgttttaaaggggattttgtaaaatatccatataaataatgtatttatctttcgaatttgtacattgcttttcccttcttcctcttccttccacccccaatttattttattgtgtatgtttgctacgtgaaaagtgcgtatttgtttggtcacctacacttgtattagctgtttcaatgtgatttttaaacatttcatttatagttatttttagtattgttataaaccatgcttcagtttttttaatttccacccaaaagtcattgtctatttttgtattatttgtaagttaagaagttttttccaatatatggcaaaaaaaaaaaaatagtagcatattattcttgtagtatttagttcagtagatttaaaaaaaaatgtatcctttgctttggaagcttacaaaacaaccctaatgctgttttactctattaatatgcatggaatctctccctttggagtgacgcattttgtgcattaaattctagggagaaacttcatagaaatcaatgaacatactttctttcttaagtctgcttgtatatttcctctgtctttcacataaatataaaccagcagattggatgccttaacaatgcaaatcatattcatttcacttgtacattgtaactgtgcaccagaactgtcagtcatcactaacattctaagaaaaaagaaaaagaaaaaaagaaaaaaaaaaaaacaaagaaatcgaaaagcacaaaagaactgttttgttaccttaagacaatgtaactttttctagtagagcaagaaatcatttacaacaatgctgcaactgtgcatgcccccatatggattttgcaatggttttcactaggctgtcaagagtgcgatttttatgggttggggtgggtgggggaggggagttgtgggagggtaggggagggaggaaagctgtttttcatggtgagaaataataatgatgactaataataataaaaaaaactggaaaatgtaagcaaggtggacgcattgcttctcggtactcagaaaggttatctgaatttgcgtggtaagcgctggcctgaagatgtacacaagttaaagccatattttatctggtgagccccttaactgtttctgaaggaatgaacggtcagccgggaaggtgtccggcttagaccttgacaacagacactacccatctgtcagccatgtgcagtggttagaactcttcttgaaagtccaaagagcctttaaaatgtgtataatttgtgttttgttgcttctatttctattgattagatgaaaagacattctggccctctgatcctctttcttctccacaaaagttttacaaataaaagatgttcccctaaatacagaatatggctttaagaagaaaatgaaatgaagaattaaattaagatttcagtgttgggggaaaaaatacagcttctggatgactggattgcataacattgccctggcctcacattgtactaggatgcagcttaaatgaagtcatctctaaatctactaacctttcaccttcttatcaaaactttttgaatagacacacactgtacagttcaattgttagagaacctaactactgtagagattgttaaattttttttttttttttgcaaaaattcaagctgtaaaaacttttcaactttcacaatatttaattaaagttacttcctgtctgtga

SEQ ID NO: 128910 - DNA, 2345 bp, Homo sapiens
  Payload ID: 5213
  Gene Symbol: EBF1
  Gene Name: early B-cell factor 1
  Uniprot ID: Q9UH73
  ENST ID: ENST00000380654
  CDS Start-End: 216-1898
gggttatcgctcagttttgagcagaggtttacattttttaaaaatttgctttccagcccgccttgatcttctaagtgcgagttcatcgtctgagaaaaaaaaaaatctctggttggcgtttttgtttcttttcttttctttcttttctttcctttttttttttttttaatttttttcaagggggaggagattttccacaagaaaaggttgttttcatgtttgggattcaggaaagcatccaacggagtggaagcagcatgaaggaagagccgctgggcagcggcatgaacgcggtgcggacgtggatgcagggcgccggggtgctggacgccaacacggcggcgcagagcggggtgggtctggcccgggctcactttgagaagcagccgccttccaatctgcggaaatccaacttcttccacttcgtcctggccctctacgacagacagggccagcccgtggagatcgagaggacagcgtttgtggggttcgtggagaaggaaaaagaagccaacagcgaaaagaccaataacggaattcactaccggcttcagcttctctacagcaatgggataaggacggagcaggatttctacgtgcgcctcattgactccatgacaaaacaagccatagtgtatgaaggccaagacaagaacccagaaatgtgccgagtcttgctcacacatgagatcatgtgcaggttcttcttgaaatttttcctcaaatgtaaccaaaattgcctaaagaatgcgggaaacccacgtgacatgcggagattccaggtcgtggtgtctacgacagtcaatgtggatggccatgtcctggcagtctctgataacatgtttgtccataataattccaagcatgggcggagggctcggaggcttgacccctcggaagctactccctgtatcaaagccatcagcccgagtgaaggatggacgacgggaggtgcgactgtgatcatcataggggacaatttctttgatgggttacaggtcatattcggtaccatgctggtctggagtgagttgatcactcctcatgccatccgtgtgcagacccctcctcggcacatccctggtgttgtggaagtcacactgtcctacaaatctaagcagttctgcaaaggaacaccaggcagattcatttatacagcgctcaacgaacccaccatcgattatggtttccagaggttacagaaggtcattcctcggcaccctggtgaccctgagcgtttgccaaaggaagtaatactcaaaagggctgcggatctggtagaagcactgtatgggatgccacacaacaaccaggaaatcattctgaagagagcggccgacattgccgaggccctgtacagtgttccccgcaaccacaaccaactcccggcccttgctaacacctcggtccacgcagggatgatgggcgtgaattcgttcagtggacaactggccgtgaatgtctccgaggcatcacaagccaccaatcagggtttcacccgcaactcaagcagcgtatcaccacacgggtacgtgccgagcaccactccccagcagaccaactataactccgtcaccacgagcatgaacggatacggctctgccgcaatgtccaatttgggcggctcccccaccttcctcaacggctcagctgccaactccccctatgccatagtgccatccagccccaccatggcctcctccacaagcctcccctccaactgcagcagctcctcgggcatcttctccttctcaccagccaacatggtctcagccgtgaaacagaagagtgctttcgcaccagtcgtcagaccccagacctccccacctcccacctgcaccagcaccaacgggaacagcctgcaagcgatatctggcatgattgttcctcctatgtgaaagaattgccttgaagaattgtattaatgaagaggttggattctgctacagagagtaatctgatacaagtcccagagtggaacttttaactcaggcctttttaagaggaatcacaataactgcagatttttaaacaaacaaaatcaccgaccttgcaaatactgaaattggaagagggatctgcaagtgcagggtgttggttaaagttgtacctcccaagtatttgggggatatatttattctgtattgacaaaagcaaatccactttttctttttcttttttttttttaagcttaattctgcaatcatttgtcttttataaaccgtaaagctctatacaagggacactataaataagactccatgttttaatttatgatgtttttaaagctgtgtaaaggaagaatgaagtggtgatatttacaaaaaagtaaaaaaaaaaaaaaa

SEQ ID NO: 128911 - DNA, 2277 bp, Homo sapiens
  Payload ID: 5213
  Gene Symbol: EBF1
  Gene Name: early B-cell factor 1
  ENST ID: ENST00000517373
  CDS Start-End: 284-1855
gccaagcatacatctctaattttattattttggtcttttcgttggattttccctttcttctttttttcgggttatcgctcagttttgagcagaggtttacattttttaaaaatttgctttccagcccgccttgatcttctaagtgcgagttcatcgtctgagaaaaaaaaaaatctctggttggcgtttttgtttcttttcttttctttcttttctttcctttttttttttttttaatttttttcaagggggaggagattttccacaagaaaaggttgttttcatgtttgggattcaggaaagcatccaacggagtggaagcagcatgaaggaagagccgctgggcagcggcatgaacgcggtgcggacgtggatgcagggcgccggggtgctggacgccaacacggcggcgcagagcggggtgggtctggcccgggctcactttgagaagcagccgccttccaatctgcggaaatccaacttcttccacttcgtcctggccctctacgacagacagggccagcccgtggagatcgagaggacagcgtttgtggggttcgtggagaaggaaaaagaagccaacagcgaaaagaccaataacggaattcactaccggcttcagcttctctacagcaatgggataaggacggagcaggatttctacgtgcgcctcattgactccatgacaaaacaagccatagtgtatgaaggccaagacaagaacccagaaatgtgccgagtcttgctcacacatgagatcatgtgcagccgctgttgtgacaagaaaagctgtggcaaccgaaatgagactccctcagatccagtgataattgacaggttcttcttgaaatttttcctcaaatgtaaccaaaattgcctaaagaatgcgggaaacccacgtgacatgcggagattccaggtcgtggtgtctacgacagtcaatgtggatggccatgtcctggcagtctctgataacatgtttgtccataataattccaagcatgggcggagggctcggaggcttgacccctcggaagctactccctgtatcaaagccatcagcccgagtgaaggatggacgacgggaggtgcgactgtgatcatcataggggacaatttctttgatgggttacaggtcatattcggtaccatgctggtctggagtgagttgatcactcctcatgccatccgtgtgcagacccctcctcggcacatccctggtgttgtggaagtcacactgtcctacaaatctaagcagttctgcaaaggaacaccaggcagattcatttatacagcgctcaacgaacccaccatcgattatggtttccagaggttacagaaggtcattcctcggcaccctggtgaccctgagcgtttgccaaaggaagtaatactcaaaagggctgcggatctggtagaagcactgtatgggatgccacacaacaaccaggaaatcattctgaagagagcggccgacattgccgaggccctgtacagtgttccccgcaaccacaaccaactcccggcccttgctaacacctcggtccacgcagggatgatgggcgtgaattcgttcagtggacaactggccgtgaatgtctccgaggcatcacaagccaccaatcaggtagtgccatccagccccaccatggcctcctccacaagcctcccctccaactgcagcagctcctcgggcatcttctccttctcaccagccaacatggtctcagccgtgaaacagaagagtgctttcgcaccagtcgtcagaccccagacctccccacctcccacctgcaccagcaccaacgggaacagcctgcaagcgatatctggcatgattgttcctcctatgtgaaagaattgccttgaagaattgtattaatgaagaggttggattctgctacagagagtaatctgatacaagtcccagagtggaacttttaactcaggcctttttaagaggaatcacaataactgcagatttttaaacaaacaaaatcaccgaccttgcaaatactgaaattggaagagggatctgcaagtgcagggtgttggttaaagttgtacctcccaagtatttgggggatatatttattctgtattgacaaaagcaaatccactttttctttttcttttttttttttaagcttaattctgcaatcatttgtcttttataaaccgtaaagctctatacaagggacactataaataagactccatgttttaatttatgatgtttttaaagctgtgtaaaggaagaatgaagtggtgatattt

SEQ ID NO: 128912 - DNA, 4430 bp, Homo sapiens
  Payload ID: 5213
  Gene Symbol: EBF1
  Gene Name: early B-cell factor 1
  ENST ID: ENST00000622875
  CDS Start-End: 12-1235
tgtttcttcacaggttcttcttgaaatttttcctcaaatgtaaccaaaattgcctaaagaatgcgggaaacccacgtgacatgcggagattccaggtcgtggtgtctacgacagtcaatgtggatggccatgtcctggcagtctctgataacatgtttgtccataataattccaagcatgggcggagggctcggaggcttgacccctcggaaggtacgccctcttatctggaacatgctactccctgtatcaaagccatcagcccgagtgaaggatggacgacgggaggtgcgactgtgatcatcataggggacaatttctttgatgggttacaggtcatattcggtaccatgctggtctggagtgagttgatcactcctcatgccatccgtgtgcagacccctcctcggcacatccctggtgttgtggaagtcacactgtcctacaaatctaagcagttctgcaaaggaacaccaggcagattcatttatacagcgctcaacgaacccaccatcgattatggtttccagaggttacagaaggtcattcctcggcaccctggtgaccctgagcgtttgccaaaggaagtaatactcaaaagggctgcggatctggtagaagcactgtatgggatgccacacaacaaccaggaaatcattctgaagagagcggccgacattgccgaggccctgtacagtgttccccgcaaccacaaccaactcccggcccttgctaacacctcggtccacgcagggatgatgggcgtgaattcgttcagtggacaactggccgtgaatgtctccgaggcatcacaagccaccaatcagggtttcacccgcaactcaagcagcgtatcaccacacgggtacgtgccgagcaccactccccagcagaccaactataactccgtcaccacgagcatgaacggatacggctctgccgcaatgtccaatttgggcggctcccccaccttcctcaacggctcagctgccaactccccctatgccatagtgccatccagccccaccatggcctcctccacaagcctcccctccaactgcagcagctcctcgggcatcttctccttctcaccagccaacatggtctcagccgtgaaacagaagagtgctttcgcaccagtcgtcagaccccagacctccccacctcccacctgcaccagcaccaacgggaacagcctgcaagcgatatctggcatgattgttcctcctatgtgaaagaattgccttgaagaattgtattaatgaagaggttggattctgctacagagagtaatctgatacaagtcccagagtggaacttttaactcaggcctttttaagaggaatcacaataactgcagatttttaaacaaacaaaatcaccgaccttgcaaatactgaaattggaagagggatctgcaagtgcagggtgttggttaaagttgtacctcccaagtatttgggggatatatttattctgtattgacaaaagcaaatccactttttctttttcttttttttttttaagcttaattctgcaatcatttgtcttttataaaccgtaaagctctatacaagggacactataaataagactccatgttttaatttatgatgtttttaaagctgtgtaaaggaagaatgaagtggtgatatttacaaaaaagtaaaaaaaaaaaaaaagaaaaaaaggaaaaaaaaaaaagcttgtatgggacagaataggaatgccagttagattttttagaaaaactaagggtcggcttttgcgccttaaagcatatcaaatggtagttagctcagacagtgcattttcaatatctaacttaacatgccaccccttagcagtgcaagcttatttatctcttttgtattgttgtcttaagcaactgtgtaaataaatgcagcctggaaagttaaaacgcgatgtaagtgatcacatttttccctctactcgaaaatccagtgcctctagacagattgttaaaactgcatatttaaatctgatctcattctctccttttacttaagtcagtttcttctgaagccgatggcctctcgagagcttggtggcacacatactgtgtgagaatctcctttgagacttcatggaacagggtccaggcacagaattccacactctgccctccagttaacaagccaaaacctcacgtacgctcccccatttgcaagtttaaagtttactcgtcctaaatgcagacttcatacctatcttccaaaagttgataaaagcaacgtggcaggtattttcgattttcccattccagatactgcctctatcagtcgacccttaccatttgtaacataatagattgaaacaacaggttaagtgctttggaattaagagttaaagggaaccgggggtggagaaaggaaaagaaggttgagacctccaaaacatagttttctgttctatgggaatttttgctctcattatctgggaagtgttcttaaaaataagaattaatagcaaagatgcagcaaagctctgaggatgcatttgcctgatatttttttctttgctcttgtgtttttgtatgtagttataaatactgtagattttttttttgtgattttttgccaaagttgttgttctatttatacattttaatgtcttaagacattttttcaatatcacaaaaagattttactgcgtattttgcaaagaaaaaaagctcactacctttagcttgcacatacttgcaaagttaattaaaaggctttttgttttaaaggggattttgtaaaatatccatataaataatgtatttatctttcgaatttgtacattgcttttcccttcttcctcttccttccacccccaatttattttattgtgtatgtttgctacgtgaaaagtgcgtatttgtttggtcacctacacttgtattagctgtttcaatgtgatttttaaacatttcatttatagttatttttagtattgttataaaccatgcttcagtttttttaatttccacccaaaagtcattgtctatttttgtattatttgtaagttaagaagttttttccaatatatggcaaaaaaaaaaaaatagtagcatattattcttgtagtatttagttcagtagatttaaaaaaaaatgtatcctttgctttggaagcttacaaaacaaccctaatgctgttttactctattaatatgcatggaatctctccctttggagtgacgcattttgtgcattaaattctagggagaaacttcatagaaatcaatgaacatactttctttcttaagtctgcttgtatatttcctctgtctttcacataaatataaaccagcagattggatgccttaacaatgcaaatcatattcatttcacttgtacattgtaactgtgcaccagaactgtcagtcatcactaacattctaagaaaaaagaaaaagaaaaaaagaaaaaaaaaaaaacaaagaaatcgaaaagcacaaaagaactgttttgttaccttaagacaatgtaactttttctagtagagcaagaaatcatttacaacaatgctgcaactgtgcatgcccccatatggattttgcaatggttttcactaggctgtcaagagtgcgatttttatgggttggggtgggtgggggaggggagttgtgggagggtaggggagggaggaaagctgtttttcatggtgagaaataataatgatgactaataataataaaaaaaactggaaaatgtaagcaaggtggacgcattgcttctcggtactcagaaaggttatctgaatttgcgtggtaagcgctggcctgaagatgtacacaagttaaagccatattttatctggtgagccccttaactgtttctgaaggaatgaacggtcagccgggaaggtgtccggcttagaccttgacaacagacactacccatctgtcagccatgtgcagtggttagaactcttcttgaaagtccaaagagcctttaaaatgtgtataatttgtgttttgttgcttctatttctattgattagatgaaaagacattctggccctctgatcctctttcttctccacaaaagttttacaaataaaagatgttcccctaaatacagaatatggctttaagaagaaaatgaaatgaagaattaaattaagatttcagtgttgggggaaaaaatacagcttctggatgactggattgcataacattgccctggcctcacattgtactaggatgcagcttaaatgaagtcatctctaaatctactaacctttcaccttcttatcaaaactttttgaatagacacacactgtacagttcaattgttagagaacctaactactgtagagattgttaaattttttttttttttttgcaaaaattcaagctgtaaaaacttttcaactttcacaatatttaattaaagttacttcctgtctgtgatggc

SEQ ID NO: 128913 - DNA, 1888 bp, Homo sapiens
  Payload ID: 5214
  Gene Symbol: EBF2
  Gene Name: early B-cell factor 2
  ENST ID: ENST00000408929
  CDS Start-End: 358-1641
gcacttcccaaagtccctcctgaacctggaactcagtccctgagctcgtggccctgcgtgcgcagtcctcgcgggataggcccgaatgctgcctttccaaatgacaagtcccttcacttttctgccaagggaagccttggggcttcctaaggacagacagagcccgatgggttgggtggtgcctgtttaaaggcagctttggaacaaggcaacgagaagaccaacaacggcactcactacaagttacagctcctctacagcaacggtgtccgcacggaacaggacctctatgtcaggctcatcgactcggtcaccaagcagcccatcgcttacgagggacagaataagaatccggaaatgtgccgagttctcctgacgcacgaagtgatgtgtagtcgatgctgcgaaaagaaaagctgtggaaaccgaaatgagactccatcggacccagtcataattgacagattctttttaaaatttttcctcaagtgcaatcagaattgtttgaaaacagcaggaaacccaagggacatgagacggtttcaggttgtgttgtcaacaacggtgaatgtggatggacacgtcctggctgtttctgacaacatgtttgttcataacaactccaagcatggacggagagcaagaagactcgatccatcggaagctaccccctgcatcaaagccattagcccgagtgaaggctggaccacaggaggagccatggtcatcatcatcggggacaacttctttgatggtctccaagtggtgtttgggactatgcttgtatggagcgagctaataacccctcatgccatcagagtacagactcctccccggcacatcccaggcgtggtagaggtgacattatcttataaatctaaacagttctgcaaaggagccccaggaaggttcatttacacagcattaaatgaacccaccatagactatggcttccagagactgcagaaggtcatccctaggcatcctggagatcctgagagattagctaaggagatgctgttgaaaagagctgcagatctagtggaagctctttatggcacaccacacaataaccaggacatcattttgaagcgagccgcagacattgctgaagctctctacagcgtccccaggaatcccagccagcttccagccctctctagctccccagcgcacagtggcatgatgggaatcaactcctatggcagccagcttggggtcagcatctcagagtcaacacaaggaaataatcaagggtacatccgcaacacaagcagcatctctccgcggggatactcttccagctccacgcctcaacagtctaattacagtacctccagcaacagtatgaatggctacagcaatgtccccatggccaacttgggtgttccaggttcaccaggatttctaaatggctcacccaccggctctccttatggaatcatgtcatcaagtcccaccgttgggtcttccagcacatcctccatcctcccattttcctcttcagtttttcctgctgtcaaacagaagagtgcctttgcccctgtcatcaggccccaaggctccccttcacctgcctgctccagcggcaatggaaatggattcagagccatgaccggacttgttgtacccccgatgtaaagaagaactgctttcttatagcacaaaactacttactctgatggaccaataatgaagaaagcactaggagctcttttgggggtgtagtggtgcccccacatgaacatgatggacacccttgggtctgcaaggagccagcatcttacttggtcccacgtcctcctatagctctgatggtggctacacaaactgaccctcttgggacaaggacaaaagatgtcattgacgtagtcagtgctaagagcag

SEQ ID NO: 128914 - DNA, 5145 bp, Homo sapiens
  Payload ID: 5214
  Gene Symbol: EBF2
  Gene Name: early B-cell factor 2
  Uniprot ID: Q9HAK2
  ENST ID: ENST00000520164
  CDS Start-End: 539-2266
attcatggggcccgcgcgcggctgcagccgggctccgtggcgctcgcagccaccgcctcctctcggctccaggtcttccccttctttttacaactgatcctgttggggattttttttttttctaaattggaacggtggggaggagcagggaggggggacctggaggaaggggagagattaggcagccatcaatttcctccagtttctcccagaacaggtgatgcttctaaattgtgatcactttcaggaggcagcactgcagctggaaggatgcgagcgacctagggtggagtggctgaggcggcagatctgaacttgcggaggataagaacccaaactttgactacatcagtccgcacctcgccagtgaagcaaaggacgggttatcttttttttttttctaagactcaaacttgggcacttgatcccttttcttggattgctttggaggagacgatttgctggcaacgttgggaacagtcaggactgtgttgtaactcttacttttaaagcgacagtagaggatcagactttttaaatgtttggaattcaagatactttaggaagaggaccaactctgaaagagaaatcgctgggcgcggagatggattcggtcaggtcctgggtccggaatgtcggagtggtggacgctaatgtcgccgcgcagagcggggtcgccctgtcccgggcccactttgagaaacagcctccttccaacttgaggaaatccaacttctttcacttcgtcctggcgctctatgacaggcagggccagccggtggagatcgagcggacggccttcgtggactttgtggagaatgacaaagaacaaggcaacgagaagaccaacaacggcactcactacaagttacagctcctctacagcaacggtgtccgcacggaacaggacctctatgtcaggctcatcgactcggtcaccaagcagcccatcgcttacgagggacagaataagaatccggaaatgtgccgagttctcctgacgcacgaagtgatgtgtagtcgatgctgcgaaaagaaaagctgtggaaaccgaaatgagactccatcggacccagtcataattgacagattctttttaaaatttttcctcaagtgcaatcagaattgtttgaaaacagcaggaaacccaagggacatgagacggtttcaggttgtgttgtcaacaacggtgaatgtggatggacacgtcctggctgtttctgacaacatgtttgttcataacaactccaagcatggacggagagcaagaagactcgatccatcggaagctaccccctgcatcaaagccattagcccgagtgaaggctggaccacaggaggagccatggtcatcatcatcggggacaacttctttgatggtctccaagtggtgtttgggactatgcttgtatggagcgagctaataacccctcatgccatcagagtacagactcctccccggcacatcccaggcgtggtagaggtgacattatcttataaatctaaacagttctgcaaaggagccccaggaaggttcatttacacagcattaaatgaacccaccatagactatggcttccagagactgcagaaggtcatccctaggcatcctggagatcctgagagattagctaaggagatgctgttgaaaagagctgcagatctagtggaagctctttatggcacaccacacaataaccaggacatcattttgaagcgagccgcagacattgctgaagctctctacagcgtccccaggaatcccagccagcttccagccctctctagctccccagcgcacagtggcatgatgggaatcaactcctatggcagccagcttggggtcagcatctcagagtcaacacaaggaaataatcaagggtacatccgcaacacaagcagcatctctccgcggggatactcttccagctccacgcctcaacagtctaattacagtacctccagcaacagtatgaatggctacagcaatgtccccatggccaacttgggtgttccaggttcaccaggatttctaaatggctcacccaccggctctccttatggaatcatgtcatcaagtcccaccgttgggtcttccagcacatcctccatcctcccattttcctcttcagtttttcctgctgtcaaacagaagagtgcctttgcccctgtcatcaggccccaaggctccccttcacctgcctgctccagcggcaatggaaatggattcagagccatgaccggacttgttgtacccccgatgtaaagaagaactgctttcttatagcacaaaactacttactctgatggaccaataatgaagaaagcactaggagctcttttgggggtgtagtggtgcccccacatgaacatgatggacacccttgggtctgcaaggagccagcatcttacttggtcccacgtcctcctatagctctgatggtggctacacaaactgaccctcttgggacaaggacaaaagatgtcattgacgtagtcagtgctaagagcagaaatgcaattctttgttatgaacattatgaaaaccaccttcctatgtttgtaaaatatttaagaaaaaattggcaaacaattaatgcttaatattttggatactatttgtttttctttgtaggaaaaaaaagttgaaagtttctattttctatgaagcctttcagataccaatttagtttatgcagaaaaaaattgaacaaaacagggtaccagcacggaagactttcttaaaacgcaacctgaattgaatgatgaaatgttgtatgtgtgtttgcttatagcttaatctctttaaaaaatgaacaaaaaaagggaaaaattttaaaatgttttacaattatttaaataaataaatgtgtaacttattgtaagtagaggtagaaattaagacctttttttggaagagagagggatttctcttcctgatgtaaaatgaaaatgatgcaaacatgtagtaacaagttttaaaggtgtgtgattattactgcagttacttactagattcttatcccctgtcctgcaccccctccttttccatcactttattgacccaagggcaagaacatgtagattcccacagaacaccctaatgcagaaacagacactctagcacatgcacaaatactccaacccatcaattcattcccagctccgtctgatttctaaatagtccacactcttgtgaatactttttaaaattcctattattagctttcaacgttctcccctgagcagtccagagaattcccatgtttgagtctgtctcaggctttcagcatcccaaggaaagaagcacctcaccttctagcagagccaaaaccacagactttcttaaccaagggaccccttgggaattcctcctcaccagaaccccaccactccctccgctttgggtgcctggttcagtacagaggtacacagccccatagaacttcagcaacacggtttggagaagataactctgtttgatggactctttagagtcagtcttagaacatccaagtcctttcctctccctgtcaatttccccttttatggcattaaactctcttgaaaaacatagctatgccactcgacagtttctagtcaagaatgagacggaatgtgggagagggatattaaaagccctaatcccctcttctgatgttcgaagaaaggcaagaccagattcttgggagatccagagattaggggcatctgcgttctatgcagcacagttacccagccctttgatgggctcttcatcgttttgtgactagctcttagaggggaagaaccttgccttagctgctaacagtggttgattcttgaaagcttatgtaatcctagagacatatccaggcatattgggattgccaataaagatgtcacttgtttccacgttggggttctccttattgactcatgagcaccacaatagagtctatacacagacttagtttggggttcttggttgggatttcagcattagaaatagatgcagcactcatggaaaaacatcatgagtgcatctgagccaattttagatgatttcattaattctgcataccttctctttgacccattgatgcaggcccacatctatccagccccaactgtcttatttgcctttaacccattctggaattacccagtatgacttatattatttctatgcacatgagaatccaaggttttagaaacctggcatgcttataactactgctgacagtccctcatagtcagggcttaaagcgccaaaatacacggaaacataagagaaaaagtcccccagtgagaaacctgattgatggaaggggaagaatgtgtggaatatgaatgttaccttccaaaagtgaaggcagagcaaaattaagcatgtttagccctggatttgagccaatccaacataaggaaattttgttttttttaagtagcattgcttttagaacctgtgaattttccttttgcatgaagatgagtgcagtactgtcttcaaaatgattgtagaatttcttggtagctttacaccgaaaaatgcgtgtaactaaataccagacatcttgaccattcagctagaaccctggcagcaacagagctatttaattgtacaaatgtgtgtaaggattatttttagtgtactaataaattaaaaacaaagctaccctgtcctcgttagtcattgctattcaatcattccagtcccaagttatttttgtgccacttggaatatgagtatttctattggtaactacaaactctatcctgtgtttgtaagaggagctgtgtaagatttttttcatttaaagggacaatttacttcattatttatctttcttttgttatagcgttgtaattcttctcagtttttctttgcacatttcaatatgcatggtttaaaaaccattaacttctctaccttttgtacagtaaggtttcattttcacactgtatagtttcattttattgttttgctttgtcagttatatacagtataaagttgctatgcacagagctttttgtaaagacagcttttttgtttactgtttttaatggtcttacttaaagaatatcttgtttgtaaaatgaatatgtctacttcagttttaaactttaaattatcctaacaaaaaaataaaatttttgtactgt

SEQ ID NO: 128915 - DNA, 1017 bp, Homo sapiens
  Payload ID: 5214
  Gene Symbol: EBF2
  Gene Name: early B-cell factor 2
  Uniprot ID: Q9HAK2
  ENST ID: ENST00000535548
  CDS Start-End: 1-795
atggtcatcatcatcggggacaacttctttgatggtctccaagtggtgtttgggactatgcttgtatggagcgagctaataacccctcatgccatcagagtacagactcctccccggcacatcccaggcgtggtagaggtgacattatcttataaatctaaacagttctgcaaaggagccccaggaaggttcatttacacagcattaaatgaacccaccatagactatggcttccagagactgcagaaggtcatccctaggcatcctggagatcctgagagattagctaaggagatgctgttgaaaagagctgcagatctagtggaagctctttatggcacaccacacaataaccaggacatcattttgaagcgagccgcagacattgctgaagctctctacagcgtccccaggaatcccagccagcttccagccctctctagctccccagcgcacagtggcatgatgggaatcaactcctatggcagccagcttggggtcagcatctcagagtcaacacaaggaaataatcaagggtacatccgcaacacaagcagcatctctccgcggggatactcttccagctccacgcctcaacagtctaattacagtacctccagcaacagtatgaatggctacagcaatgtccccatggccaacttgggtgttccaggttcaccaggatttctaaatggctcacccaccggctctccttatggaactggactttggctcacgtggttactcaaggccttttggggaaagaaaaggattgaaacaattccgtttttatagagaaagagcatgtgtggcctgttcatgtcatcaagtcccaccgttgggtcttccagcacatcctccatcctcccattttcctcttcagtttttcctgctgtcaaacagaagagtgcctttgcccctgtcatcaggccccaaggctccccttcacctgcctgctccagcggcaatggaaatggattcagagccatgaccggacttgttgtacccccgatgtaa

SEQ ID NO: 128916 - DNA, 2993 bp, Homo sapiens
  Payload ID: 5215
  Gene Symbol: EBF3
  Gene Name: early B-cell factor 3
  Uniprot ID: Q9H4W6
  ENST ID: ENST00000355311
  CDS Start-End: 74-1864
ccgccaagccccgagcgccgctgctcgaggaaacgctttcggccgggagctgcggccgccgccagcagttttcatgtttgggattcaggagaatattccgcgcggggggacgaccatgaaggaggagccgctgggcagcggcatgaacccggtgcgctcgtggatgcacacggcgggcgtggtggacgccaacacggccgcccagagcggcgtggggctggcgcgggcgcacttcgagaagcagccgccttccaacctccggaaatccaatttcttccacttcgtgctggcgctctacgataggcaggggcagccggtggagattgaaaggaccgcttttgtggactttgtggagaaagagaaagagccaaacaacgagaaaaccaacaacggcatccactataaactccagttattgtacagcaacggagtcagaacagagcaagatctgtatgttcgcctcatagattcaatgaccaaacaggccatcgtctacgagggccaggacaagaacccggagatgtgccgtgtgctgctgacccacgagatcatgtgcagccggtgctgtgacaagaaaagttgtggcaatagaaacgaaacgccctcagaccctgtaatcattgacagattctttctaaagtttttcctcaagtgcaatcagaactgtttgaagaatgcaggcaaccctcgagatatgcggagattccaggttgttgtatcgacaacagtcaacgtggacggccacgtgctggccgtgtcagacaacatgtttgtgcacaacaattccaaacacgggaggcgggcccgccgcctagacccgtcagaaggtacggccccttcttatctggaaaatgccactccgtgcatcaaggccatcagtcccagtgaaggctggaccacggggggtgccaccgtcatcataattggcgacaacttctttgacgggctgcaagttgtattcggaactatgttggtgtggagcgagctgataactccccatgccatccgagtccagaccccgccgaggcacattcctggcgtcgtcgaagtgaccctctcctacaaatccaagcagttctgcaaaggtgctcctgggcgctttgtctacaccgcccttaatgaaccaaccatagattacggctttcagaggttgcagaaagtgatcccaagacatccgggtgatcccgaaaggttacccaaggaggtgttactgaagcgggcggcggacctggtggaagccttatacggaatgcctcacaacaaccaggagatcatcttgaagcgagcggcggacatcgccgaggcgctgtacagcgttccccgcaatcacaaccagatccccaccctgggcaacaaccctgcacacacgggcatgatgggcgtcaactccttcagcagccagctagccgtcaacgtgtcagagacgtcacaagccaacgaccaagtcggctacagtcgcaatacaagcagcgtgtccccgcgaggctacgtccccagcagtactccccagcagtccaattacaacacagtcagcactagcatgaatggatatggaagtggcgccatggccagtctaggggtccctggctcgcctggatttcttaatggctcctccgctaactctccctacggcatagtgccgtccagccccaccatggcagcctcttcggtcaccctcccttcaaactgtagcagcacacacggcattttctcattctcacctgccaatgtcatctccgcagtgaaacagaagagcgccttcgcgcccgtggtccggccccaagcctctcctcctccttcctgcaccagcgccaacgggaatggactgcaagctatgtctgggctggtagtcccgccaatgtgagggacttctgtttaccttccgcagcacccagcatcaaaggacggacttcaggggacacgtttagtatattaagacatgctgatggaaacagtatcttcaaaaaaatcagcagcaattgaaatgctacaaaagactttgtttaaagattttatttaaactattaagaatcaacatgcaaacagcctacttcttcatgaacaattccattttattgactgaacttttctcatattttcacatttctcagtcctgaagaataaggaaaacaaagcgacgcctattttgtataaagtttccgactccgtcttggccatgtctagtaattgctatgtgttgggagaaactttgtgaatgcaccattttgatgatcatgaaacgctgatgaaaaatgcctccaaacatttttctgtactcatacttagattcacaatggttgtgtatctctataatgtgaaatatttttttgtggtgataaaaagagggccaaggaggtatgagccatcagactggaaaaaaggatgactatatgatgaggagaaactggggtggcagggagggagggagggtttatcactgcttaacttcatcttcatgaaatgaaactttgtaacttattgtagttagaaattgtaactttgatattgaattctcttgccttcaacaagcacactgacagagaaaaaatgctactgtctgttggttccaatattctcccactgctagagcttcctgttaagcaagtgtgatctgcaacattttttcaacttttgctagcactgtatactattgcattcttaggctactgtgaggtctatgtttcttgtaccagaaattgtccttttgacttctagatccttcttccctaatgtgttttgtatgtggttataaaattgtagacttttgtgattttgccaaagttgtagctaaatatttatacacttgtcttgaatttttttcagatccacttaaaatatttagaaaaacaagttttattccttatgtgtcttataaggaataaaatggtcttcatttgacacttactttcccatgaacacttgcagttgctaagggactttattttgtaacatatcaattataaatattgtatttatctttgaaattttgtaca

SEQ ID NO: 128917 - DNA, 4375 bp, Homo sapiens
  Payload ID: 5215
  Gene Symbol: EBF3
  Gene Name: early B-cell factor 3
  Uniprot ID: Q9H4W6
  ENST ID: ENST00000368648
  CDS Start-End: 74-1729
ccgccaagccccgagcgccgctgctcgaggaaacgctttcggccgggagctgcggccgccgccagcagttttcatgtttgggattcaggagaatattccgcgcggggggacgaccatgaaggaggagccgctgggcagcggcatgaacccggtgcgctcgtggatgcacacggcgggcgtggtggacgccaacacggccgcccagagcggcgtggggctggcgcgggcgcacttcgagaagcagccgccttccaacctccggaaatccaatttcttccacttcgtgctggcgctctacgataggcaggggcagccggtggagattgaaaggaccgcttttgtggactttgtggagaaagagaaagagccaaacaacgagaaaaccaacaacggcatccactataaactccagttattgtacagcaacggagtcagaacagagcaagatctgtatgttcgcctcatagattcaatgaccaaacaggccatcgtctacgagggccaggacaagaacccggagatgtgccgtgtgctgctgacccacgagatcatgtgcagccggtgctgtgacaagaaaagttgtggcaatagaaacgaaacgccctcagaccctgtaatcattgacagattctttctaaagtttttcctcaagtgcaatcagaactgtttgaagaatgcaggcaaccctcgagatatgcggagattccaggttgttgtatcgacaacagtcaacgtggacggccacgtgctggccgtgtcagacaacatgtttgtgcacaacaattccaaacacgggaggcgggcccgccgcctagacccgtcagaagccactccgtgcatcaaggccatcagtcccagtgaaggctggaccacggggggtgccaccgtcatcataattggcgacaacttctttgacgggctgcaagttgtattcggaactatgttggtgtggagcgagctgataactccccatgccatccgagtccagaccccgccgaggcacattcctggcgtcgtcgaagtgaccctctcctacaaatccaagcagttctgcaaaggtgctcctgggcgctttgtctacaccgcccttaatgaaccaaccatagattacggctttcagaggttgcagaaagtgatcccaagacatccgggtgatcccgaaaggttacccaaggaggtgttactgaagcgggcggcggacctggtggaagccttatacggaatgcctcacaacaaccaggagatcatcttgaagcgagcggcggacatcgccgaggcgctgtacagcgttccccgcaatcacaaccagatccccaccctgggcaacaaccctgcacacacgggcatgatgggcgtcaactccttcagcagccagctagccgtcaacgtgtcagagacgtcacaagccaacgaccaagtcggctacagtcgcaatacaagcagcgtgtccccgcgaggctacgtccccagcagtactccccagcagtccaattacaacacagtcagcactagcatgaatggatatggaagtggcgccatggccagtctaggggtccctggctcgcctggatttcttaatggctcctccgctaactctccctacggcatgaaacagaagagcgccttcgcgcccgtggtccggccccaagcctctcctcctccttcctgcaccagcgccaacgggaatggactgcaagctatgtctgggctggtagtcccgccaatgtgagggacttctgtttaccttccgcagcacccagcatcaaaggacggacttcaggggacacgtttagtatattaagacatgctgatggaaacagtatcttcaaaaaaatcagcagcaattgaaatgctacaaaagactttgtttaaagattttatttaaactattaagaatcaacatgcaaacagcctacttcttcatgaacaattccattttattgactgaacttttctcatattttcacatttctcagtcctgaagaataaggaaaacaaagcgacgcctattttgtataaagtttccgactccgtcttggccatgtctagtaattgctatgtgttgggagaaactttgtgaatgcaccattttgatgatcatgaaacgctgatgaaaaatgcctccaaacatttttctgtactcatacttagattcacaatggttgtgtatctctataatgtgaaatatttttttgtggtgataaaaagagggccaaggaggtatgagccatcagactggaaaaaaggatgactatatgatgaggagaaactggggtggcagggagggagggagggtttatcactgcttaacttcatcttcatgaaatgaaactttgtaacttattgtagttagaaattgtaactttgatattgaattctcttgccttcaacaagcacactgacagagaaaaaatgctactgtctgttggttccaatattctcccactgctagagcttcctgttaagcaagtgtgatctgcaacattttttcaacttttgctagcactgtatactattgcattcttaggctactgtgaggtctatgtttcttgtaccagaaattgtccttttgacttctagatccttcttccctaatgtgttttgtatgtggttataaaattgtagacttttgtgattttgccaaagttgtagctaaatatttatacacttgtcttgaatttttttcagatccacttaaaatatttagaaaaacaagttttattccttatgtgtcttataaggaataaaatggtcttcatttgacacttactttcccatgaacacttgcagttgctaagggactttattttgtaacatatcaattataaatattgtatttatctttgaaattttgtacattgcttttcccaccttttcctttttcttctttcttgtctgtattggtttttgatcacggcctggtgttgtgatactgggaagagcattagccaagaacttgtctctttgatctgtttcgttaagctgaaccagtgtctttacatttcatttgtacttcaaaaaatatgctattgtttagactttccatcctttttttttttattttgaggaaaagtcaaattcattgtttatttttatattatttttaagttatctgaacaaatacttttgaaaaaaaagtttgttgtatagtcaaaacaaatcggtgccacccggccgtgacaaatcctagtagattctgtgcatgtggagcggccgcgaagaggtgacaccgtttggggctgtgtccttattttattttatttttttgtagaatgtaaaaagtcattttagatgccacccattgactttgccacatagctgaactgtgtttactggaaaaattcagaggcctaaagtttaaaataaaatttacttctgatgttttaattaaaatgtttgccacattaacttttctgatgccttaaaagtgaacttctttaaagaacctttgtgctattttatcacaggcttacactacaattgttaataaatacttcatttggagatgtatggtgtaaaacacacaaacacacacaaaaaagcacaagcccgctgcatgacccgtctctcctttctgggactatttctgctgcgtcctgcaccctcctgggcccacctccgattcacagaggtttcagggggacccaaatcactgctggttttcaatttttttttaacaatacatttttgtggtcagttccaacagcactgtccgtacttttaaaactggaatgacctccttcagatatcgtgcctcttagtgccaaacccacagtgagaccaaaagtgtcaggtgtttttttttttttctttctcctttgcactaagtgctttgcagacacggcacagcaaacattttgcaaactgcagcagaaatcgaatttaaaacaaaaaggagggactttaaaataccttcttgacaaaaatcaacaatgcacaacttacaaagtgttcattctagggacaaaattaaataaacagaatgtccccaggagtcagcaggtcacagtctggctttgtgatggttgacaaggtctagctacatgggaaagcctgagaagtcactttggaactaaattgcctccattttattttgtacgagtaagggtttgatctacaaaagagctcacatggacgcactgagaacgcctgccagcttccccatgccctcacttggtttgtgttttaggttaagtagtcaatgcccacatcacttcactgtctcaagactgagcacttcactaaatggtagattttactgttaaagaccctacaataagattgttttatctgtacattttttcagatatttaactgtataaaaatgttcattttacacaatatttaattaaagtatttcttgtctgtgaatttc

SEQ ID NO: 128918 - DNA, 817 bp, Homo sapiens
  Payload ID: 5215
  Gene Symbol: EBF3
  Gene Name: early B-cell factor 3
  ENST ID: ENST00000440978
  CDS Start-End: 1-574
cttcagcagccagctagccgtcaacgtgtcagagacgtcacaagccaacgaccaagtcggctacagtcgcaatacaagcagcgtgtccccgcgaggctacgtccccagcagtactccccagcagtccaattacaacacagtcagcactagcatgaatggatatggaagtggcgccatggccagtctaggggtccctggctcgcctggatttcttaatggctcctccgctaactctccctacggcatagtgccgtccagccccaccatggcagcctcttcggtcaccctcccttcaaactgtagcagcacacacggcattttctcattctcacctgccaatgtcatctccgcagtgaaacagaagagcgccttcgcgcccgtggtccggccccaagcctctcctcctccttcctgcaccagcgccaacgggaatggactgcaaggctctctgctgggtgctgaggacgtagccgcggagaagacaaactggcccttttgtgaagtcggtggcatatttcactttgatgaactaatgctcaaaaaaggaactggaaagctatgtctgggctggtagtcccgccaatgtgagggacttctgtttaccttccgcagcacccagcatcaaaggacggacttcaggggacacgtttagtatattaagacatgctgatggaaacagtatcttcaaaaaaatcagcagcaattgaaatgctacaaaagactttgtttaaagattttatttaaactattaagaatcaacatgcaaacagcctacttcttcatgaacaattccattttattgactgaacttttctca

SEQ ID NO: 128919 - DNA, 2705 bp, Homo sapiens
  Payload ID: 5216
  Gene Symbol: EBF4
  Gene Name: early B-cell factor 4
  ENST ID: ENST00000342725
  CDS Start-End: 1-1866
cggccgcggcggggcggcgcgggaaccgggccccggggggagtcggccgggctgctgctgctgctgctccaggacgctctgccccgcagcgggctgaacctgaaggaggagccgctgctgcccgccggcctgggctcagtgcgctcctggatgcagggcgcgggcatcctggacgccagcaccgcggcgcagagtggcgtgggtctggcacgagcacattttgagaagcagcctccctccaacctcaggaaatccaacttcttccacttcgtgctggccatgtacgaccggcaggggcagcccgtggaggtggagcgcacagccttcatcgacttcgtggaaaaggaccgagagcccggggcggaaaagactaacaatgggatccattaccgcctccggctggtgtataacaatggactgcggacagagcaagacctctacgtgcgtctcatcgactccatgtccaaacaggccatcatctatgaggggcaggacaagaaccccgaaatgtgccgagtgctgctcacccatgagatcatgtgcagccggtgctgtgaccggaagagctgtggcaaccggaatgagacgccctcagaccccgtcatcattgacaggttcttcctcaagttcttcctcaaatgcaaccagaactgcctgaagaatgcggggaatcccagagacatgcgccgcttccaggtggtggtgtccacgacggtgagcgtggacggacacgtgctggccgtgtccgacaacatgtttgtgcacaacaactccaagcatggccgcagggcgcgccgcctggacccctccgaagctgccaccccctgcatcaaggccatcagccccggggagggctggaccacgggcggcgccaccgtcattgtcatcggcgacaacttcttcgacgggttgcaggtcgtgttcggaaacgtgctcgtgtggagcgagctcatcacgccccacgccatccgggtgcagacgcccccgcggcacatccccggggtggtggaggtgaccctctcctacaagtccaagcagttttgcaagggatgccccggccgctttgtctacacagctctgaacgagcccaccattgactacggattccagaggctacagaaagtcattcccagacaccccggagaccccgagaggctgcccaaggaagtgctgctgaagcgggcggccgacttggcagaagccctgtacggagtgcccggcagtaaccaggagctgctcctgaagcgcgcggcggacgtggccgaggctctgtacagcaccccccgcgcacccgggccgctcgcacccctggccccgagccacccacaccccgccgtcgtgggcatcaacgccttcagcagcccgctggccatcgccgtcggggacgccaccccggggcccgagccgggctacgcgcgcagctgcagcagcgcgtccccccgcgggttcgcgcccagccccggctcgcagcagagcggctacggcggcggcctcggagctggcctgggcggctacggcgcgccgggcgtggccggcctcggcgtgcctgggtcccccagcttcctcaatggctccaccgccacctcgcccttcgccatcatgccctctagccccccgctggcggctgcctcctccatgtccctcccggccgctgcccccaccaccagcgtgttctccttctcgcctgtcaacatgatctccgccgtcaaacagaggagcgccttcgcccccgtgctgcgccccccaagctccccaccccaggcctgccccagagcccacggagaggggcttccagaccagtcttttgaggattctgacaagtttcactctccagcccgggggcttcagggcctggcatactcctaattacggtctgcagctgttcccatggagcccggactggaggtccctctgggattcacagccacaccccggatggtggcacagacagatgcagggccagggccatgggcggacctcaacccgtgagctgaacggggagaggccttcaccccatgctcaagcctccccgctagcagccccacaggcttctctcgcctccctgtcttggggtagtcagaagccccagcactgtgcagatgctcttggcaggacagcatcgcagggaggtgctgggattctgggcctcactgtctgggtcttggttcctctgaaagagatggatcttgtgcagaccagggttgttgagtgaggggagcgtgggatggggaccgtgggaaagaggacagctcagggagaagtgacctggaaaggtcctgtttgcatctgacccatctcaactggcccagcatcccaacttctctgcagcgaaagggtggcgccccgcagcctcgggaggcctgcccaggctcccgtggagcttccaacagctgcttggccccgcagctgcccccacttcctttgagacctgcactctcatgcttgccgcatcatgcctccctgtgggggctttgggcatggaggaggcagaagagggggtgccaggcctcctgtatttggggtcttcccccagtggatgtctcatggactctggccccacacactcacaatgactctggctggccccacgcagcgggcccagccgccccccaggtggcctcacattctgctctgctaagtttggagaaaacagaacaataaaccagatgcaggtggtgcccgcccggcctctcacctgcctcctt

SEQ ID NO: 128920 - DNA, 2910 bp, Homo sapiens
  Payload ID: 5216
  Gene Symbol: EBF4
  Gene Name: early B-cell factor 4
  ENST ID: ENST00000380648
  CDS Start-End: 269-2065
gcggccgcggcggggcggcgcgggaaccgggccccggggggagtcggccgggctgctgctgctgctgctccaggtgctgccgcccggggctacggcagggccgggacgccggggcacgcggggcgctggcgctggcggcggcggcgtctgctggcccggcgcggccccagcctttccccgggacgcgcggctgctgctgctcctgccgccgctgccgccactgtcgccgccgccgccgagctccgcgcccgcagcctccgcctcccggatggacgctctgccccgcagcgggctgaacctgaaggaggagccgctgctgcccgccggcctgggctcagtgcgctcctggatgcagggcgcgggcatcctggacgccagcaccgcggcgcagagtggcgtgggtctggcacgagcacattttgagaagcagcctccctccaacctcaggaaatccaacttcttccacttcgtgctggccatgtacgaccggcaggggcagcccgtggaggtggagcgcacagccttcatcgacttcgtggaaaaggaccgagagcccggggcggaaaagactaacaatgggatccattaccgcctccggctggtgtataacaatggactgcggacagagcaagacctctacgtgcgtctcatcgactccatgtccaaacaggccatcatctatgaggggcaggacaagaaccccgaaatgtgccgagtgctgctcacccatgagatcatgtgcagccggtgctgtgaccggaagagctgtggcaaccggaatgagacgccctcagaccccgtcatcattgacaggttcttcctcaagttcttcctcaaatgcaaccagaactgcctgaagaatgcggggaatcccagagacatgcgccgcttccaggtggtggtgtccacgacggtgagcgtggacggacacgtgctggccgtgtccgacaacatgtttgtgcacaacaactccaagcatggccgcagggcgcgccgcctggacccctccgaagctgccaccccctgcatcaaggccatcagccccggggagggctggaccacgggcggcgccaccgtcattgtcatcggcgacaacttcttcgacgggttgcaggtcgtgttcggaaacgtgctcgtgtggagcgagctcatcacgccccacgccatccgggtgcagacgcccccgcggcacatccccggggtggtggaggtgaccctctcctacaagtccaagcagttttgcaagggatgccccggccgctttgtctacacagctctgaacgagcccaccattgactacggattccagaggctacagaaagtcattcccagacaccccggagaccccgagaggctgcccaaggaagtgctgctgaagcgggcggccgacttggcagaagccctgtacggagtgcccggcagtaaccaggagctgctcctgaagcgcgcggcggacgtggccgaggctctgtacagcaccccccgcgcacccgggccgctcgcacccctggccccgagccacccacaccccgccgtcgtgggcatcaacgccttcagcagcccgctggccatcgccgtcggggacgccaccccggggcccgagccgggctacgcgcgcagctgcagcagcgcgtccccccgcgggttcgcgcccagccccggctcgcagcagagcggctacggcggcggcctcggagctggcctgggcggctacggcgcgccgggcgtggccggcctcggcgtgcctgggtcccccagcttcctcaatggctccaccgccacctcgcccttcgccatcatgccctctagccccccgctggcggctgcctcctccatgtccctcccggccgctgcccccaccaccagcgtgttctccttctcgcctgtcaacatgatctccgccgtcaaacagaggagcgccttcgcccccgtgctgcgccccccaagctccccaccccaggcctgccccagagcccacggagaggggcttccagaccagtcttttgaggattctgacaagtttcactctccagcccgggggcttcagggcctggcatactcctaattacggtctgcagctgttcccatggagcccggactggaggtccctctgggattcacagccacaccccggatggtggcacagacagatgcagggccagggccatgggcggacctcaacccgtgagctgaacggggagaggccttcaccccatgctcaagcctccccgctagcagccccacaggcttctctcgcctccctgtcttggggtagtcagaagccccagcactgtgcagatgctcttggcaggacagcatcgcagggaggtgctgggattctgggcctcactgtctgggtcttggttcctctgaaagagatggatcttgtgcagaccagggttgttgagtgaggggagcgtgggatggggaccgtgggaaagaggacagctcagggagaagtgacctggaaaggtcctgtttgcatctgacccatctcaactggcccagcatcccaacttctctgcagcgaaagggtggcgccccgcagcctcgggaggcctgcccaggctcccgtggagcttccaacagctgcttggccccgcagctgcccccacttcctttgagacctgcactctcatgcttgccgcatcatgcctccctgtgggggctttgggcatggaggaggcagaagagggggtgccaggcctcctgtatttggggtcttcccccagtggatgtctcatggactctggccccacacactcacaatgactctggctggccccacgcagcgggcccagccgccccccaggtggcctcacattctgctctgctaagtttggagaaaacagaacaataaaccagatgcaggtggtgcccgcccggcctctcacctgcctccttggtgtg

SEQ ID NO: 128921 - DNA, 2788 bp, Homo sapiens
  Payload ID: 5216
  Gene Symbol: EBF4
  Gene Name: early B-cell factor 4
  ENST ID: ENST00000449079
  CDS Start-End: 269-1891
gcggccgcggcggggcggcgcgggaaccgggccccggggggagtcggccgggctgctgctgctgctgctccaggtgctgccgcccggggctacggcagggccgggacgccggggcacgcggggcgctggcgctggcggcggcggcgtctgctggcccggcgcggccccagcctttccccgggacgcgcggctgctgctgctcctgccgccgctgccgccactgtcgccgccgccgccgagctccgcgcccgcagcctccgcctcccggatggacgctctgccccgcagcgggctgaacctgaaggaggagccgctgctgcccgccggcctgggctcagtgcgctcctggatgcagggcgcgggcatcctggacgccagcaccgcggcgcagagtggcgtgggtctggcacgagcacattttgagaagcagcctccctccaacctcaggaaatccaacttcttccacttcgtgctggccatgtacgaccggcaggggcagcccgtggaggtggagcgcacagccttcatcgacttcgtggaaaaggaccgagagcccggggcggaaaagactaacaatgggatccattaccgcctccggctggtgtataacaatggactgcggacagagcaagacctctacgtgcgtctcatcgactccatgtccaaacaggccatcatctatgaggggcaggacaagaaccccgaaatgtgccgagtgctgctcacccatgagatcatgtgcagccggtgctgtgaccggaagagctgtggcaaccggaatgagacgccctcagaccccgtcatcattgacaggttcttcctcaagttcttcctcaaatgcaaccagaactgcctgaagaatgcggggaatcccagagacatgcgccgcttccaggtggtggtgtccacgacggtgagcgtggacggacacgtgctggccgtgtccgacaacatgtttgtgcacaacaactccaagcatggccgcagggcgcgccgcctggacccctccgaagctgccaccccctgcatcaaggccatcagccccggggagggctggaccacgggcggcgccaccgtcattgtcatcggcgacaacttcttcgacgggttgcaggtcgtgttcggaaacgtgctcgtgtggagcgagctcatcacgccccacgccatccgggtgcagacgcccccgcggcacatccccggggtggtggaggtgaccctctcctacaagtccaagcagttttgcaagggatgccccggccgctttgtctacacagctctgaacgagcccaccattgactacggattccagaggctacagaaagtcattcccagacaccccggagaccccgagaggctgcccaaggaagtgctgctgaagcgggcggccgacttggcagaagccctgtacggagtgcccggcagtaaccaggagctgctcctgaagcgcgcggcggacgtggccgaggctctgtacagcaccccccgcgcacccgggccgctcgcacccctggccccgagccacccacaccccgccgtcgtgggcatcaacgccttcagcagcccgctggccatcgccgtcggggacgccaccccggggcccgagccgggctacgcgcgcagctgcagcagcgcgtccccccgcgggttcgcgcccagccccggctcgcagcagagcggctacggcggcggcctcggagctggcctgggcggctacggcgcgccgggcgtggccggcctcggcgtgcctgggtcccccagcttcctcaatggctccaccgccacctcgcccttcgccaaggagcgccttcgcccccgtgctgcgccccccaagctccccaccccaggcctgccccagagcccacggagaggggcttccagaccagtcttttgaggattctgacaagtttcactctccagcccgggggcttcagggcctggcatactcctaattacggtctgcagctgttcccatggagcccggactggaggtccctctgggattcacagccacaccccggatggtggcacagacagatgcagggccagggccatgggcggacctcaacccgtgagctgaacggggagaggccttcaccccatgctcaagcctccccgctagcagccccacaggcttctctcgcctccctgtcttggggtagtcagaagccccagcactgtgcagatgctcttggcaggacagcatcgcagggaggtgctgggattctgggcctcactgtctgggtcttggttcctctgaaagagatggatcttgtgcagaccagggttgttgagtgaggggagcgtgggatggggaccgtgggaaagaggacagctcagggagaagtgacctggaaaggtcctgtttgcatctgacccatctcaactggcccagcatcccaacttctctgcagcgaaagggtggcgccccgcagcctcgggaggcctgcccaggctcccgtggagcttccaacagctgcttggccccgcagctgcccccacttcctttgagacctgcactctcatgcttgccgcatcatgcctccctgtgggggctttgggcatggaggaggcagaagagggggtgccaggcctcctgtatttggggtcttcccccagtggatgtctcatggactctggccccacacactcacaatgactctggctggccccacgcagcgggcccagccgccccccaggtggcctcacattctgctctgctaagtttggagaaaacagaacaataaaccagatgcaggtggtgcccgcccggcctctcacctgcctcctt

SEQ ID NO: 128922 - DNA, 2012 bp, Homo sapiens
  Payload ID: 5216
  Gene Symbol: EBF4
  Gene Name: early B-cell factor 4
  Uniprot ID: Q9BQW3
  ENST ID: ENST00000609451
  CDS Start-End: 73-1881
tgagctagacgcccgcagcctcagcgggaccggatccggggcggcgggggcgctcactcaccgcgcgccctcatgttccctgcgcaggacgctctgccccgcagcgggctgaacctgaaggaggagccgctgctgcccgccggcctgggctcagtgcgctcctggatgcagggcgcgggcatcctggacgccagcaccgcggcgcagagtggcgtgggtctggcacgagcacattttgagaagcagcctccctccaacctcaggaaatccaacttcttccacttcgtgctggccatgtacgaccggcaggggcagcccgtggaggtggagcgcacagccttcatcgacttcgtggaaaaggaccgagagcccggggcggaaaagactaacaatgggatccattaccgcctccggctggtgtataacaatggactgcggacagagcaagacctctacgtgcgtctcatcgactccatgtccaaacaggccatcatctatgaggggcaggacaagaaccccgaaatgtgccgagtgctgctcacccatgagatcatgtgcagccggtgctgtgaccggaagagctgtggcaaccggaatgagacgccctcagaccccgtcatcattgacaggttcttcctcaagttcttcctcaaatgcaaccagaactgcctgaagaatgcggggaatcccagagacatgcgccgcttccaggtggtggtgtccacgacggtgagcgtggacggacacgtgctggccgtgtccgacaacatgtttgtgcacaacaactccaagcatggccgcagggcgcgccgcctggacccctccgaagctgccaccccctgcatcaaggccatcagccccggggagggctggaccacgggcggcgccaccgtcattgtcatcggcgacaacttcttcgacgggttgcaggtcgtgttcggaaacgtgctcgtgtggagcgagctcatcacgccccacgccatccgggtgcagacgcccccgcggcacatccccggggtggtggaggtgaccctctcctacaagtccaagcagttttgcaagggatgccccggccgctttgtctacacagctctgaacgagcccaccattgactacggattccagaggctacagaaagtcattcccagacaccccggagaccccgagaggctgcccaaggaagtgctgctgaagcgggcggccgacttggcagaagccctgtacggagtgcccggcagtaaccaggagctgctcctgaagcgcgcggcggacgtggccgaggctctgtacagcaccccccgcgcacccgggccgctcgcacccctggccccgagccacccacaccccgccgtcgtgggcatcaacgccttcagcagcccgctggccatcgccgtcggggacgccaccccggggcccgagccgggctacgcgcgcagctgcagcagcgcgtccccccgcgggttcgcgcccagccccggctcgcagcagagcggctacggcggcggcctcggagctggcctgggcggctacggcgcgccgggcgtggccggcctcggcgtgcctgggtcccccagcttcctcaatggctccaccgccacctcgcccttcgccatcatgccctctagccccccgctggcggctgcctcctccatgtccctcccggccgctgcccccaccaccagcgtgttctccttctcgcctgtcaacatgatctccgccgtcaaacagaggagcgccttcgcccccgtgctgcgccccccaagctccccaccccaggcctgccccagagcccacggagaggggcttccagaccagtcttttgaggattctgacaagtttcactctccagcccgggggcttcagggcctggcatactcctaattacggtctgcagctgttcccatggagcccggactggaggtccctctgggattcacagccacaccccggatggtggcacagacagatgcagggccagggccatgggcggacctcaacccgtgagctgaacg

SEQ ID NO: 128923 - DNA, 642 bp, Homo sapiens
  Payload ID: 5216
  Gene Symbol: EBF4
  Gene Name: early B-cell factor 4
  ENST ID: ENST00000463145
  CDS Start-End: 1-534
ctcatcgactccatgtccaaacaggccatcatctatgaggggcaggacaagaaccccgaaatgtgccgagtgctgctcacccatgagatcatgtgcagccggtgctgtgaccggaagagctgtggcaaccggaatgagacgccctcagaccccgtcatcattgacaggttcttcctcaagttcttcctcaaatgcaaccagaactgcctgaagaatgcggggaatcccagagacatgcgccgcttccaggtggtggtgtccacgacggtgagcgtggacggacacgtgctggccgtgtccgacaacatgtttgtgcacaacaactccaagcatggccgcagggcgcgccgcctggacccctccgaagctgcccccacttcctttgagacctgcactctcatgcttgccgcatcatgcctccctgtgggggctttgggcatggaggaggcagaagagggggtgccaggcctcctgtatttggggtcttcccccagtggatgtctcatggactctggccccacacactcacaatgactctggctggccccacgcagcgggcccagccgccccccaggtggcctcacattctgctctgctaagtttggagaaaacagaacaataaaccagatgcaggtggtgccc

SEQ ID NO: 128924 - DNA, 9875 bp, Homo sapiens
  Payload ID: 5217
  Gene Symbol: EEA1
  Gene Name: early endosome antigen 1
  Uniprot ID: Q15075
  ENST ID: ENST00000322349
  CDS Start-End: 266-4501
atctgtcagttacgggggctgcccggcgggcgggctggaggcgctcgcaggctgcctagtcgttcgctcgctctctctcgcgtgctccctctcgccgcctgtggggaagtcggggccgcccgagcggccgtcgccaccgcctcgccccgacctccttcccggtcccctcccggcccagtccctcccgcccgcgcaccccgagtagtgagtggccccgcgcagggtctggagagtcaccgcggcggcgccgggtggtggttaaaccatgttaaggaggattttacagaggactcctgggagagttggctctcaaggttctgatttagattcatcagcaactcctataaacacagtggacgtcaataatgaaagctcttcagagggtttcatatgtccccagtgtatgaaatctcttggatctgctgatgaacttttcaaacattatgaagctgttcatgatgctggtaatgactcaggtcatggaggagagtctaatcttgctttgaagcgagatgatgtaacactgctcagacaagaggtccaagacctacaggcttcacttaaggaagaaaaatggtactcggaagaattaaagaaggaattagaaaaatatcaagggctgcagcagcaagaggccaaacctgatgggttggtgactgattcatcagcagaactacagtctttggaacagcaattagaagaagcccaaacagaaaattttaatattaagcaaatgaaagacttatttgaacagaaagcagcccaacttgctactgaaattgcagatataaagtcaaagtatgatgaagaaaggagtcttcgagaagctgctgaacaaaaagtgacacgtctgacagaagaattaaacaaagaggcaactgtaattcaagatctgaagacggaactgcttcagagacctggtatagaagatgttgccgtgctaaagaaagaactggtccaagttcaaacactaatggataacatgaccttggaacgtgagcgagaatctgaaaaactcaaagatgaatgcaaaaaattgcagtcacaatatgctagctcagaggccacaataagccagctaaggagtgaacttgccaaaggcccccaggaagttgctgtatatgtacaggaactacaaaaactgaaaagttcagttaatgaattaacacaaaaaaatcagaccttgacagaaaacttgctgaaaaaagaacaagactatactaagttagaggagaaacataatgaagaatctgtgagtaaaaagaatattcaggcaacccttcatcaaaaagacctagattgtcaacagcttcagtcaagattgtctgcatctgaaacctcactgcatagaatacatgtagaactaagtgaaaaaggagaagctactcaaaagctcaaagaagaattatctgaggtagagaccaagtaccagcatctaaaggcggagtttaagcagctacaacaacagagagaagaaaaggagcagcatgggttacaactccaaagtgaaattaatcaattacatagcaaacttctggagacagagcgccaactaggggaagctcatggtaggctgaaggaacagagacagctttcaagtgaaaagttgatggataaagaacaacaagtggctgatttacaactcaaactttctcggttagaagagcagttgaaggaaaaagttacaaattctacagaattgcagcatcaattagataaaacaaagcaacagcatcaagaacaacaggctcttcagcaaagcaccacggcaaaacttcgagaagctcagaatgatttggaacaagttctacgtcaaattggcgataaggaccaaaagatccagaaccttgaagctttattacagaagagtaaagaaaatatttcattactagaaaaagaaagagaagatctttatgcaaaaattcaggctggtgaaggagagactgctgttcttaaccagttacaagaaaaaaaccatacactacaggagcaagtaactcaactaacagagaagctgaagaatcagtcagaaagtcataaacaagcccaggagaatttgcatgaccaggtacaagagcagaaggcacatcttagagctgcacaagaccgtgtcctttccctagaaactagtgtcaatgaattaaatagtcaattaaatgaaagcaaggagaaggtctcccagcttgacatacagattaaagccaaaaccgaactattactatcagcagaagcagcaaaaactgctcaaagagctgatcttcagaatcatttggacacagctcaaaatgcattacaagataaacagcaggagttaaataagattactactcagttggatcaggtcactgcaaagttacaagacaagcaagaacattgcagtcagctggaaagtcatcttaaagaatataaagagaaatacctctctttagaacagaaaaccgaagagctagaaggtcaaattaagaaactagaagctgatagtcttgaagttaaagcaagcaaggagcaggctttgcaagatctacaacagcaaagacagctgaacacagatttagagctcagagccacagaattgagtaaacaacttgaaatggagaaggaaatagtatccagtacaagattggatctacagaaaaaatctgaagcccttgaaagtatcaagcaaaagcttaccaagcaagaggaagaaaaaaaaatcctgaaacaagattttgaaactttaagtcaagaaacaaagattcagcatgaggaattgaataacagaattcaaacaacagtaacagaactacaaaaagtgaaaatggagaaagaagctttaatgacagagctttctacagtaaaggacaaactatcaaaagtttctgattctttgaaaaactctaaaagtgaatttgaaaaggagaatcagaaaggaaaagccgctatattagacttggaaaaaacttgcaaagaattaaagcatcaacttcaagtgcagatggaaaacacacttaaggaacagaaggaactgaaaaagtcacttgaaaaagagaaggaggcttctcatcagttgaaattggaactcaattcaatgcaggaacaacttatacaggcccagaatactttaaaacaaaatgaaaaagaagagcaacaacttcaggggaacataaatgagctaaagcaatcaagtgaacagaagaaaaaacaaattgaagcactccaaggagagcttaaaattgctgttttacagaagacagagcttgagaataaactacagcagcagttaacacaggcagcccaggaacttgcagcagagaaagagaaaatatcagtattacaaaacaactatgaaaaaagtcaggaaactttcaaacagcttcaatctgatttctatgggagggaatctgaacttctagccaccaggcaagatcttaagtctgtagaagagaagctttctctagcacaggaggacttgatttcaaacagaaatcaaattggaaatcaaaataaattgattcaagaactgaagactgccaaggctacattggagcaggattcagcaaagaaagaacagcaattgcaggagcgatgtaaagcactacaagacattcagaaagaaaagtcactgaaagaaaaagaactggtaaatgagaagtctaaattggcagagatagaagaaattaaatgtagacaagaaaaagaaatcactaaactaaacgaagaactcaagtcccacaaactagaaagcataaaggagataacaaatcttaaagatgctaaacagcttctaattcagcagaaattagaacttcaaggaaaagcggactccctgaaggcagctgttgaacaggagaagagaaatcagcagatactaaaagaccaggtgaaaaaggaagaagaggagctgaagaaagaatttattgagaaagaagctaagttgcattccgaaataaaagaaaaggaagtaggaatgaagaagcatgaagaaaatgaggctaaacttaccatgcagattacagcattaaatgaaaacttaggcactgtgaagaaggagtggcaatctagtcaacggagagttagtgagcttgagaaacaaacggatgacttacggggtgaaattgcagtattagaagcaacggttcagaataatcaagatgaaaggagagcactactggaaagatgtcttaaaggagaaggtgaaatagaaaagcttcaaaccaaagtattagaattgcaaagaaagctggataatacaactgcagcagtgcaggagctgggcagagaaaaccaatcacttcagatcaaacatacacaagcgttgaatagaaagtgggccgaagacaatgaagtacaaaactgtatggcctgtgggaaaggcttttcagtaacagtgagacggcatcactgccgacagtgtggaaatatcttctgtgctgaatgttcagccaaaaatgccttaactccttcctccaagaagcctgttcgtgtctgtgatgcatgtttcaatgacttgcaaggataatgggttatcacaacttcagagtaatattacactaacattagatttttaataaatgtacttaatagaggtcttggactactatttggtttggacactggttgcaatactagaccaaataggaattagtatattttggaatgttatggatatcaagtaaaactcttctatttttgtgagacttgggcttatcatctttcattacttttttcccatttagcccctggaatagctttcatgccaagtttagaattagccaatgaaatgtaaataaactttggacagaaaatagcaatgtatttttttaatataatttcattattcacaaatgaagaatgcaattccatagcttacttctttctcctaaatttaatgtacaaaaatgtacatggatgatattatcacttgttgctgtttttgttgcacaatagcacattaattatattaaatattctctttgtgaagttatgcacagaactgtaacactttcctctgcctttttctcttatatgtgggttcatggttcagttgcattgttatgttatgaatttactacttgggtgttctaaatacagtttatcttaaaatatgtagtaatatgaattcaaaaatggtttttgttttaacaatattaattaaattttcttgggtggattttataaaaacctctgtaaaatcaatttgtttacttatagttatctggggttgtattgcaaagaatagggttaatttttctttttgtctttttctgtctctttcttaaactcccacgcattgtccatttagaatcttagaaagcttcttaccctcgctgtcagttggaggatgaataataaacattgtataatgttcttattctcggtttcttgtaagtgggaagtcttttgagatcagccttcatatcatacccttattttgtctctctagcatcttcaggaacctgagtttgctttttacatagatctgattttttcctttatttggtttaacattttcaagcatagatcagcttcatgtatttgttttataattttgcatcttaaagctagtaactaatattgctgtggtcttattggtgaaaacaaaatataaaatgataagaagacattaaatattttactttctatttcttaccctattgggaagaatttttaaaagttgtaaaattgacttaaagttaaaatggttctgaatttggtgttccatgtcaactgttcccagttttaattttaactttgcaaaaataatgttgtgaaattccctttaagtaactaacacctagaaatagagtatcaccaaaaacaaatgtatttaggaatcccagttacaataaaaactgaaacagcatggctaagcatcttaaggataattaagaaattagcttatttgtatgctgaacaatggaatcgaactttaatttagcatagtcttattaatttggaaaattgtaaaacatctcaagagagaagttattaatattggtttattaatctttctagagaagaagtgtagttatacattcattcagtgcaatcattttataacagtagttaatatttcatttataatagttcttaatatacatttgctttcaaatattctgaaatgaaattatattcatgctatacctacagtgtatgtaaactaaagagatcactacatatttgtttaattatttaaaaaaaaatttaagtaaaccctgttgtcattagctattaagaacattgattaagtccctggacttggataaacatatatccttgaacatatataatgaagaaatacagtggctctttattaaaaataatagttggataatataaactgaactatttatgcatttttatatacttataaatccttccaaatagttttaattctatccttttacatataaataacttaataagtgtgctggaaaaacacagatattcacagcaccactgttttttttttttttttgagataataaattccatgagaaatctgggtttgaatatttgtttactttgtctcctaattgaacaccactccaggccttctgtctgtctcccctttacccccaaaatactcacaaaaaaattttaagacaacaagtaaccatatataggtgtttgaatgattttctcatttttatctaatttcatttcataagtcccgagtaatttacctaccataggctactatactgataatataaatgaaaccgaacattttttgctactaactctccccaatttaatgtgttttcgaaataaaaatttaaatttttttccttttaattaaaaagtcatctttgaagtccttattggctgtacattttacatgtttgctggtactattattttgtcagtcagttaaagctggcatgtacagctcttggctttaatgaaaagcacattgacataatgttagtaaattccaaaccccggcacagaatgtgagttaaaattaagtcttgctgggttagtgtacaataaactatacctacagacttttttttaatagaaagaagacaaagctgctggtataggatttgttcctttgaagaaaaaatgagggaaacaaacacaaaaacctcaatgcagtgtataaataacattttgttcaactacctcttaatgtggaattatctactttaatagtttcctgacagtaatgttaaatagtaactgccaaatttgttattttcccatctctcttaaaaaagtctttatgattattttatatagttttgagaactttaaagccacttttttttaaccttacatttgcataaaaatgtttagcttttaagtagagagcaaattatgatcatatattttgatattcatgacctgtttgactataggagtttttttaaaaaaatgcactttggctataaaaccatggatgatttgatccataagatttaaatgtgccaccattatagtattcctagacatgagcttgatgaatggtattctgtaattataacgtgccacacattattgtgtcttaattgcccttagcctgaattttaatgatcaatttgttattgttgcagatgtgaatattgtgcataaacttactaaatttatgtaaaattgtataaaatagaattagaagtcactaagttctttctgtgtagaagtaataaatttattgtaacacaatgcagttgtgtatatgacattctgtaattccttgaactggatcatatattcataagttctgtagatacttatgcatgaacattttctcatttagtttttgggttcattatttgtattgtgtttactacttgtgatcatgtagttgtgccttactttgtgagaaaggttagctcagtaaatactgcaatttctaaactcagtgattggaaggttattaattataaatgtaactgataaagtacgtgacagcatttaaatctgtataaagaacaatggaaggatccttattgaattgttgcttttttttaatatgtttaaatattatattaaaaacatttctttctaaactagttgtattctgtgactataaattgttttgtctaacaaaagagagaacactgtattaaccattttgcattaatttatttacagaatattaggactttgcacttggatatagacagtggtgttttaatgttgttcaatttcgaatagtaattaaattcctgatctcaagagaaattattaatgccattttgccttagacattccatttaatattgtagagaattaacaaaactaaaaacaaatataaaaaatatgtaattaaccccttatttcattgtgtgtctgcatttaatacccagatgaccatttaaagatacttaaaacattatttatttatttatttatttatttttctccctcccctccccaaagatactttttggaaggcccaatgtgccattgttttttgctattttttcttcctgggagccacggttctagaatggtttttgttctgacccccgtgatcccttcattcgaatgtgcttcattctaaaccctccaaagagtttaatgtgcatatcctcaaacatctaatatattgtatattagacatgttactttgtgagctttatagaattccagtttatgtacagcatattcttgagctgttttatatattttgttaatttagtcagtctgtctctccctttaatgagattcagagggagaaaactacctttatacatgtaagtctgtggttgctggattcatgggactaaaggaatttgagaggccacctcatcctagtccactgctcacctccgaggttagtttatatctaaacatttgcaagatgattgttaatgtaaaaattttttttaaccagaaatttctttataaaatcttctcttgcataatctatattgtattctcctggacataactgctttcagtcccatccagatgccatctctaggaattcacttgaagcttgaagtctattctcccctttttctcccctccacctcatttattcttagctattaacaatagttactgtcctccagattttcctttttttcttctattaaatttctgacattattataaagaggttattagtctccattctaatagtgcttgccttgtacaaaagcctttctgctgcacttgtctttactgctttgtttgcatagtgaaatttcaccttcctcaaggaattactgggcacatgacttgcccaaacattatcctctctaccccattcttcagcttaacaaaatcagctaaggcttcagttgtcttgcagccaaatttgataaatttactactttcactttgcaaattgcaaaaggtacgattctgaaatggaagtttgtggacttccctttgatgcaataatctgaccctaagaactagttccttgaatgtagttaatagtatatatcctgccatgataataattattcaaactgcctttcatgataaaaattctgaagaaatttgaagtcctgccaaataaaattaagtgactgtactgtgctaacacacacacacacacacacacacaccaatcaaaaccagaaagtatttttatggcaaacaccatcattcttcaaaaaataaagttaagagacagataccttactatgtctatgaaaatctgtacacttcacaacaggccaagaaaagccatgcaaaagtgttaactggtgaaagccagattttttttttcttcctatcttaaagtaatggaatttagtctttgggattttctacttccacgttagagtactatatacctgagatgagtttgagaataggaattttaaaactgctacttaaatgtagtccctatttattgctttgtatattaaaagaacaatcaagctttgtatctaaagatttatcattatgtttgaggtaggact

SEQ ID NO: 128925 - DNA, 2542 bp, Homo sapiens
  Payload ID: 5217
  Gene Symbol: EEA1
  Gene Name: early endosome antigen 1
  ENST ID: ENST00000418984
  CDS Start-End: 262-384
gtcagttacgggggctgcccggcgggcgggctggaggcgctcgcaggctgcctagtcgttcgctcgctctctctcgcgtgctccctctcgccgcctgtggggaagtcggggccgcccgagcggccgtcgccaccgcctcgccccgacctccttcccggtcccctcccggcccagtccctcccgcccgcgcaccccgagtagtgagtggccccgcgcagggtctggagagtcaccgcggcggcgccgggtggtggttaaaccatgttaaggaggattttacagaggactcctgggagagttggctctcaaggttctgatttagattcatcagcaactcctataaacacagtggacgtcaataatgaaagctcttcagagagatgatgtaacactgctcagacaagaggtccaagacctacaggcttcacttaaggaagaaaaatggtactcggaagaattaaagaaggaattagaaaaatatcaagggctgcagcagcaagaggccaaacctgatgggttggtgactgattcatcagcagaactacagtctttggaacagcaattagaagaagcccaaacagaaaattttaatattaagcaaatgaaagacttatttgaacagaaagcagcccaacttgctactgaaattgcagatataaagtcaaagtatgatgaagaaaggagtcttcgagaagctgctgaacaaaaagtgacacgtctgacagaagaattaaacaaagaggcaactgtaattcaagatctgaagacggaactgcttcagagacctggtatagaagatgttgccgtgctaaagaaagaactggtccaagttcaaacactaatggataacatgaccttggaacgtgagcgagaatctgaaaaactcaaagatgaatgcaaaaaattgcagtcacaatatgctagctcagaggccacaataagccagctaaggagtgaacttgccaaaggcccccaggaagttgctgtatatgtacaggaactacaaaaactgaaaagttcagttaatgaattaacacaaaaaaatcagaccttgacagaaaacttgctgaaaaaagaacaagactatactaagttagaggagaaacataatgaagaatctgtgagtaaaaagaatattcaggcaacccttcatcaaaaagacctagattgtcaacagcttcagtcaagattgtctgcatctgaaacctcactgcatagaatacatgtagaactaagtgaaaaaggagaagctactcaaaagctcaaagaagaattatctgaggtagagaccaagtaccagcatctaaaggcggagtttaagcagctacaacaacagagagaagaaaaggagcagcatgggttacaactccaaagtgaaattaatcaattacatagcaaacttctggagacagagcgccaactaggggaagctcatggtaggctgaaggaacagagacagctttcaagtgaaaagttgatggataaagaacaacaagtggctgatttacaactcaaactttctcggttagaagagcagttgaaggaaaaagttacaaattctacagaattgcagcatcaattagataaaacaaagcaacagcatcaagaacaacaggctcttcagcaaagcaccacggcaaaacttcgagaagctcagaatgatttggaacaagttctacgtcaaattggcgataaggaccaaaagatccagaaccttgaagctttattacagaagagtaaagaaaatatttcattactagaaaaagaaagagaagatctttatgcaaaaattcaggctggtgaaggagagactgctgttcttaaccagttacaagaaaaaaaccatacactacaggagcaagtaactcaactaacagagaagctgaagaatcagtcagaaagtcataaacaagcccaggagaatttgcatgaccaggtacaagagcagaaggcacatcttagagctgcacaagaccgtgtcctttccctagaaactagtgtcaatgaattaaatagtcaattaaatgaaagcaaggagaaggtctcccagcttgacatacagattaaagccaaaaccgaactattactatcagcagaagcagcaaaaactgctcaaagagctgatcttcagaatcatttggacacagctcaaaatgcattacaagataaacagcaggagttaaataagattactactcagttggatcaggtcactgcaaagttacaagacaagcaagaacattgcagtcagctggaaagtcatcttaaagaatataaagagaaatacctctctttagaacagaaaaccgaagagctagaaggtcaaattaagaaactagaagctgatagtcttgaagttaaagcaagcaaggagcaggctttgcaagatctacaacagcaaagacagctgaacacagatttagagctcagagccacagaattgagtaaacaacttgaaatggagaaggaaatagtatccagtacaagattggatctacagaaaaaatctgaagcccttgaaagtatcaagcaaaagcttacc

SEQ ID NO: 128926 - DNA, 542 bp, Homo sapiens
  Payload ID: 5217
  Gene Symbol: EEA1
  Gene Name: early endosome antigen 1
  ENST ID: ENST00000549790
  CDS Start-End: 415-542
ggattgagagaaagactaaatcaggtctcaagtcttcagtgaatgagaatgatttggaacaagttctacgtcaaattggcgataaggaccaaaagatccagaaccttgaagctttattacagaagagtaaagaaaatatttcattactagaaaaagaaagagaagatctttatgcaaaaattcaggctggtgaaggagagactgctgttcttaaccagttacaagaaaaaaaccatacactacaggagcaagtaactcaactaacagagaagctgaagaatcagtcagaaagtcataaacaagcccaggagaatttgcatgaccaggtacaagagcagaaggcacatcttagagctgcacaagaccgtgtcctttccctagaaactagtgtcaatgaattaaatagtcaattaaatgaaagcaaggagaaggtctcccagcttgacatacagattaaagccaaaaccgaactattactatcagcagaagcagcaaaaactgctcaaagagctgatcttcagaatcatttggacacagctcaa

SEQ ID NO: 128927 - DNA, 558 bp, Homo sapiens
  Payload ID: 5217
  Gene Symbol: EEA1
  Gene Name: early endosome antigen 1
  ENST ID: ENST00000553019
  CDS Start-End: 197-328
gctctctctcgcgtgctccctctcgccgcctgtggggaagtcggggccgcccgagcggccgtcgccaccgcctcgccccgacctccttcccggtcccctcccggcccagtccctcccgcccgcgcaccccgagtagtgagtggccccgcgcagggtctggagagtcaccgcggcggcgccgggtggtggttaaaccatgttaaggaggattttacagaggactcctgggagagttggctctcaaggttctgatttagattcatcagcaactcctataaacacagtggacgtcaataatgaaagctcttcagaggtggagcatccctaatctgaaaattcaaaatccgaaatgctgcaaaattccaaacttgagtgccgaaatgatgttcatttcagattttggatttttttggattaggatgtccaactgggtttcatatgtccccagtgtatgaaatctcttggatctgctgatgaacttttcaaacattatgaagctgttcatgatgctggtaatgactcaggtcatggaggagagtctaatcttgctttgaagcg

SEQ ID NO: 128928 - DNA, 3138 bp, Homo sapiens
  Payload ID: 5218
  Gene Symbol: EGR1
  Gene Name: early growth response 1
  Uniprot ID: P18146
  ENST ID: ENST00000239938
  CDS Start-End: 273-1904
gcgcgcagaacttggggagccgccgccgccatccgccgccgcagccagcttccgccgccgcaggaccggcccctgccccagcctccgcagccgcggcgcgtccacgcccgcccgcgcccagggcgagtcggggtcgccgcctgcacgcttctcagtgttccccgcgccccgcatgtaacccggccaggcccccgcaactgtgtcccctgcagctccagccccgggctgcacccccccgccccgacaccagctctccagcctgctcgtccaggatggccgcggccaaggccgagatgcagctgatgtccccgctgcagatctctgacccgttcggatcctttcctcactcgcccaccatggacaactaccctaagctggaggagatgatgctgctgagcaacggggctccccagttcctcggcgccgccggggccccagagggcagcggcagcaacagcagcagcagcagcagcgggggcggtggaggcggcgggggcggcagcaacagcagcagcagcagcagcaccttcaaccctcaggcggacacgggcgagcagccctacgagcacctgaccgcagagtcttttcctgacatctctctgaacaacgagaaggtgctggtggagaccagttaccccagccaaaccactcgactgccccccatcacctatactggccgcttttccctggagcctgcacccaacagtggcaacaccttgtggcccgagcccctcttcagcttggtcagtggcctagtgagcatgaccaacccaccggcctcctcgtcctcagcaccatctccagcggcctcctccgcctccgcctcccagagcccacccctgagctgcgcagtgccatccaacgacagcagtcccatttactcagcggcacccaccttccccacgccgaacactgacattttccctgagccacaaagccaggccttcccgggctcggcagggacagcgctccagtacccgcctcctgcctaccctgccgccaagggtggcttccaggttcccatgatccccgactacctgtttccacagcagcagggggatctgggcctgggcaccccagaccagaagcccttccagggcctggagagccgcacccagcagccttcgctaacccctctgtctactattaaggcctttgccactcagtcgggctcccaggacctgaaggccctcaataccagctaccagtcccagctcatcaaacccagccgcatgcgcaagtaccccaaccggcccagcaagacgcccccccacgaacgcccttacgcttgcccagtggagtcctgtgatcgccgcttctcccgctccgacgagctcacccgccacatccgcatccacacaggccagaagcccttccagtgccgcatctgcatgcgcaacttcagccgcagcgaccacctcaccacccacatccgcacccacacaggcgaaaagcccttcgcctgcgacatctgtggaagaaagtttgccaggagcgatgaacgcaagaggcataccaagatccacttgcggcagaaggacaagaaagcagacaaaagtgttgtggcctcttcggccacctcctctctctcttcctacccgtccccggttgctacctcttacccgtccccggttactacctcttatccatccccggccaccacctcatacccatcccctgtgcccacctccttctcctctcccggctcctcgacctacccatcccctgtgcacagtggcttcccctccccgtcggtggccaccacgtactcctctgttccccctgctttcccggcccaggtcagcagcttcccttcctcagctgtcaccaactccttcagcgcctccacagggctttcggacatgacagcaaccttttctcccaggacaattgaaatttgctaaagggaaaggggaaagaaagggaaaagggagaaaaagaaacacaagagacttaaaggacaggaggaggagatggccataggagaggagggttcctcttaggtcagatggaggttctcagagccaagtcctccctctctactggagtggaaggtctattggccaacaatcctttctgcccacttccccttccccaattactattccctttgacttcagctgcctgaaacagccatgtccaagttcttcacctctatccaaagaacttgatttgcatggattttggataaatcatttcagtatcatctccatcatatgcctgaccccttgctcccttcaatgctagaaaatcgagttggcaaaatggggtttgggcccctcagagccctgccctgcacccttgtacagtgtctgtgccatggatttcgtttttcttggggtactcttgatgtgaagataatttgcatattctattgtattatttggagttaggtcctcacttgggggaaaaaaaaaaaagaaaagccaagcaaaccaatggtgatcctctattttgtgatgatgctgtgacaataagtttgaacctttttttttgaaacagcagtcccagtattctcagagcatgtgtcagagtgttgttccgttaacctttttgtaaatactgcttgaccgtactctcacatgtggcaaaatatggtttggtttttctttttttttttttttgaaagtgttttttcttcgtccttttggtttaaaaagtttcacgtcttggtgccttttgtgtgatgcgccttgctgatggcttgacatgtgcaattgtgagggacatgctcacctctagccttaaggggggcagggagtgatgatttgggggaggctttgggagcaaaataaggaagagggctgagctgagcttcggttctccagaatgtaagaaaacaaaatctaaaacaaaatctgaactctcaaaagtctatttttttaactgaaaatgtaaatttataaatatattcaggagttggaatgttgtagttacctactgagtaggcggcgatttttgtatgttatgaacatgcagttcattattttgtggttctattttactttgtacttgtgtttgcttaaacaaagtgactgtttggcttataaacacattgaatgcgctttattgcccatgggatatgtggtgtatatccttccaaaaaattaaaacgaaaataaagtagctgcgattggg

SEQ ID NO: 128929 - DNA, 2968 bp, Homo sapiens
  Payload ID: 5219
  Gene Symbol: EGR2
  Gene Name: early growth response 2
  Uniprot ID: P11161
  ENST ID: ENST00000242480
  CDS Start-End: 327-1757
gagcaattgattaatagctcggcgaggggactcactgactgttataataacactacaccagcaactcctggcttcccagcagccggaacacagacaggagagagtcagtggcaaatagacatttttcttatttcttaaaaaacagcaacttgtttgctacttttatttctgttgatttttttttcttggtgtgtgtggtggttgtttttaagtgtggagggcaaaaggagataccatcccaggctcagtccaacccctctccaaaacggcttttctgacactccaggtagcgagggagttgggtctccaggttgtgcgaggagcaaatgatgaccgccaaggccgtagacaaaatcccagtaactctcagtggttttgtgcaccagctgtctgacaacatctacccggtggaggacctcgccgccacgtcggtgaccatctttcccaatgccgaactgggaggcccctttgaccagatgaacggagtggccggagatggcatgatcaacattgacatgactggagagaagaggtcgttggatctcccatatcccagcagctttgctcccgtctctgcacctagaaaccagaccttcacttacatgggcaagttctccattgaccctcagtaccctggtgccagctgctacccagaaggcataatcaatattgtgagtgcaggcatcttgcaaggggtcacttccccagcttcaaccacagcctcatccagcgtcacctctgcctcccccaacccactggccacaggacccctgggtgtgtgcaccatgtcccagacccagcctgacctggaccacctgtactctccgccaccgcctcctcctccttattctggctgtgcaggagacctctaccaggacccttctgcgttcctgtcagcagccaccacctccacctcttcctctctggcctacccaccacctccttcctatccatcccccaagccagccacggacccaggtctcttcccaatgatcccagactatcctggattctttccatctcagtgccagagagacctacatggtacagctggcccagaccgtaagccctttccctgcccactggacaccctgcgggtgccccctccactcactccactctctacaatccgtaactttaccctggggggccccagtgctggggtgaccggaccaggggccagtggaggcagcgagggaccccggctgcctggtagcagctcagcagcagcagcagccgccgccgccgccgcctataacccacaccacctgccactgcggcccattctgaggcctcgcaagtaccccaacagacccagcaagacgccggtgcacgagaggccctacccgtgcccagcagaaggctgcgaccggcggttctcccgctctgacgagctgacacggcacatccgaatccacactgggcataagcccttccagtgtcggatctgcatgcgcaacttcagccgcagtgaccacctcaccacccatatccgcacccacaccggtgagaagcccttcgcctgtgactactgtggccgaaagtttgcccggagtgatgagaggaagcgccacaccaagatccacctgagacagaaagagcggaaaagcagtgccccctctgcatcggtgccagccccctctacagcctcctgctctgggggcgtgcagcctgggggtaccctgtgcagcagtaacagcagcagtcttggcggagggccgctcgccccttgctcctctcggacccggacaccttgagatgagactcaggctgatacaccagctcccaaaggtcccggaggccctttgtccactggagctgcacaacaaacactaccaccctttcctgtccctctctccctttgttgggcaaagggctttggtggagctagcactgccccctttccacctagaagcaggttcttcctaaaacttagcccattctagtctctcttaggtgagttgactatcaacccaaggcaaaggggaggctcagaaggaggtggtgtggggacccctggccaagagggctgaggtctgaccctgctttaaagggttgtttgactaggttttgctaccccacttccccttattttgacccatcacaggtttttgaccctggatgtcagagttgatctaagacgttttctacaataggttgggagatgctgatcccttcaagtggggacagcaaaaagacaagcaaaactgatgtgcactttatggcttgggactgatttgggggacattgtacagtgagtgaagtatagcctttatgccacactctgtggccctaaaatggtgaatcagagcatatctagttgtctcaacccttgaagcaatatgtattataaactcagagaacagaagtgcaatgtgatgggaggaacatagcaatatctgctccttttcgagttgtttgagaaatgtaggctattttttcagtgtatatccactcagattttgtgtatttttgatgtacactgttctctaaattctgaatctttgggaaaaaatgtaaagcatttatgatctcagaggttaacttatttaagggggatgtacatatattctctgaaactaggatgcatgcaattgtgttggaagtgtccttggtgccttgtgtgatgtagacaatgttacaaggtctgcatgtaaatgggttgccttattatggagaaaaaaaatcactccctgagtttagtatggctgtatatttctgcctattaatatttggaattttttttagaaagtatatttttgtatgctttgttttgtgacttaaaagtgttacctttgtagtcaaatttcagataagaatgtacataatgttaccggagctgatttgtttggtcattagctcttaatagttgtgaaaaaataaatctattctaacgcaaaaccactaactgaagttcagataatggatggtttgtgactatagtgtaaataaatacttttcaacaata

SEQ ID NO: 128930 - DNA, 2872 bp, Homo sapiens
  Payload ID: 5219
  Gene Symbol: EGR2
  Gene Name: early growth response 2
  Uniprot ID: P11161
  ENST ID: ENST00000411732
  CDS Start-End: 388-1668
aactgagcgaggagcaattgattaatagctcggcgaggggactcactgactgttataataacactacaccagcaactcctggcttcccagcagccggaacacagacaggagagagtcagtggcaaatagacatttttcttatttcttaaaaaacagcaacttgtttgctacttttatttctgttgatttttttttcttggtgtgtgtggtggttgtttttaagtgtggagggcaaaaggagataccatcccaggctcagtccaacccctctccaaaacggcttttctgacactccagctgtctgacaacatctacccggtggaggacctcgccgccacgtcggtgaccatctttcccaatgccgaactgggaggcccctttgaccagatgaacggagtggccggagatggcatgatcaacattgacatgactggagagaagaggtcgttggatctcccatatcccagcagctttgctcccgtctctgcacctagaaaccagaccttcacttacatgggcaagttctccattgaccctcagtaccctggtgccagctgctacccagaaggcataatcaatattgtgagtgcaggcatcttgcaaggggtcacttccccagcttcaaccacagcctcatccagcgtcacctctgcctcccccaacccactggccacaggacccctgggtgtgtgcaccatgtcccagacccagcctgacctggaccacctgtactctccgccaccgcctcctcctccttattctggctgtgcaggagacctctaccaggacccttctgcgttcctgtcagcagccaccacctccacctcttcctctctggcctacccaccacctccttcctatccatcccccaagccagccacggacccaggtctcttcccaatgatcccagactatcctggattctttccatctcagtgccagagagacctacatggtacagctggcccagaccgtaagccctttccctgcccactggacaccctgcgggtgccccctccactcactccactctctacaatccgtaactttaccctggggggccccagtgctggggtgaccggaccaggggccagtggaggcagcgagggaccccggctgcctggtagcagctcagcagcagcagcagccgccgccgccgccgcctataacccacaccacctgccactgcggcccattctgaggcctcgcaagtaccccaacagacccagcaagacgccggtgcacgagaggccctacccgtgcccagcagaaggctgcgaccggcggttctcccgctctgacgagctgacacggcacatccgaatccacactgggcataagcccttccagtgtcggatctgcatgcgcaacttcagccgcagtgaccacctcaccacccatatccgcacccacaccggtgagaagcccttcgcctgtgactactgtggccgaaagtttgcccggagtgatgagaggaagcgccacaccaagatccacctgagacagaaagagcggaaaagcagtgccccctctgcatcggtgccagccccctctacagcctcctgctctgggggcgtgcagcctgggggtaccctgtgcagcagtaacagcagcagtcttggcggagggccgctcgccccttgctcctctcggacccggacaccttgagatgagactcaggctgatacaccagctcccaaaggtcccggaggccctttgtccactggagctgcacaacaaacactaccaccctttcctgtccctctctccctttgttgggcaaagggctttggtggagctagcactgccccctttccacctagaagcaggttcttcctaaaacttagcccattctagtctctcttaggtgagttgactatcaacccaaggcaaaggggaggctcagaaggaggtggtgtggggacccctggccaagagggctgaggtctgaccctgctttaaagggttgtttgactaggttttgctaccccacttccccttattttgacccatcacaggtttttgaccctggatgtcagagttgatctaagacgttttctacaataggttgggagatgctgatcccttcaagtggggacagcaaaaagacaagcaaaactgatgtgcactttatggcttgggactgatttgggggacattgtacagtgagtgaagtatagcctttatgccacactctgtggccctaaaatggtgaatcagagcatatctagttgtctcaacccttgaagcaatatgtattataaactcagagaacagaagtgcaatgtgatgggaggaacatagcaatatctgctccttttcgagttgtttgagaaatgtaggctattttttcagtgtatatccactcagattttgtgtatttttgatgtacactgttctctaaattctgaatctttgggaaaaaatgtaaagcatttatgatctcagaggttaacttatttaagggggatgtacatatattctctgaaactaggatgcatgcaattgtgttggaagtgtccttggtgccttgtgtgatgtagacaatgttacaaggtctgcatgtaaatgggttgccttattatggagaaaaaaaatcactccctgagtttagtatggctgtatatttctgcctattaatatttggaattttttttagaaagtatatttttgtatgctttgttttgtgacttaaaagtgttacctttgtagtcaaatttcagataagaatgtacataatgttaccggagctgatttgtttggtcattagctcttaatagttgtgaaaaaataaatctattctaacgcaaaaccactaactgaagttcagataatggatggtttgtgactatagtgtaaataaatacttttc

SEQ ID NO: 128931 - DNA, 2844 bp, Homo sapiens
  Payload ID: 5219
  Gene Symbol: EGR2
  Gene Name: early growth response 2
  Uniprot ID: P11161
  ENST ID: ENST00000439032
  CDS Start-End: 210-1640
gatgcagcgtagctcttagggggaggtgtgagtccttggaaagctcacaagaatttcagaggggcccgagatgcgagtcggactcccttccgaggcgtcgtcttgcccatggtcagcgcgggggccgcgggacccgccagagcgcaggcggagtgggctggcgcacgtggtagcgagggagttgggtctccaggttgtgcgaggagcaaatgatgaccgccaaggccgtagacaaaatcccagtaactctcagtggttttgtgcaccagctgtctgacaacatctacccggtggaggacctcgccgccacgtcggtgaccatctttcccaatgccgaactgggaggcccctttgaccagatgaacggagtggccggagatggcatgatcaacattgacatgactggagagaagaggtcgttggatctcccatatcccagcagctttgctcccgtctctgcacctagaaaccagaccttcacttacatgggcaagttctccattgaccctcagtaccctggtgccagctgctacccagaaggcataatcaatattgtgagtgcaggcatcttgcaaggggtcacttccccagcttcaaccacagcctcatccagcgtcacctctgcctcccccaacccactggccacaggacccctgggtgtgtgcaccatgtcccagacccagcctgacctggaccacctgtactctccgccaccgcctcctcctccttattctggctgtgcaggagacctctaccaggacccttctgcgttcctgtcagcagccaccacctccacctcttcctctctggcctacccaccacctccttcctatccatcccccaagccagccacggacccaggtctcttcccaatgatcccagactatcctggattctttccatctcagtgccagagagacctacatggtacagctggcccagaccgtaagccctttccctgcccactggacaccctgcgggtgccccctccactcactccactctctacaatccgtaactttaccctggggggccccagtgctggggtgaccggaccaggggccagtggaggcagcgagggaccccggctgcctggtagcagctcagcagcagcagcagccgccgccgccgccgcctataacccacaccacctgccactgcggcccattctgaggcctcgcaagtaccccaacagacccagcaagacgccggtgcacgagaggccctacccgtgcccagcagaaggctgcgaccggcggttctcccgctctgacgagctgacacggcacatccgaatccacactgggcataagcccttccagtgtcggatctgcatgcgcaacttcagccgcagtgaccacctcaccacccatatccgcacccacaccggtgagaagcccttcgcctgtgactactgtggccgaaagtttgcccggagtgatgagaggaagcgccacaccaagatccacctgagacagaaagagcggaaaagcagtgccccctctgcatcggtgccagccccctctacagcctcctgctctgggggcgtgcagcctgggggtaccctgtgcagcagtaacagcagcagtcttggcggagggccgctcgccccttgctcctctcggacccggacaccttgagatgagactcaggctgatacaccagctcccaaaggtcccggaggccctttgtccactggagctgcacaacaaacactaccaccctttcctgtccctctctccctttgttgggcaaagggctttggtggagctagcactgccccctttccacctagaagcaggttcttcctaaaacttagcccattctagtctctcttaggtgagttgactatcaacccaaggcaaaggggaggctcagaaggaggtggtgtggggacccctggccaagagggctgaggtctgaccctgctttaaagggttgtttgactaggttttgctaccccacttccccttattttgacccatcacaggtttttgaccctggatgtcagagttgatctaagacgttttctacaataggttgggagatgctgatcccttcaagtggggacagcaaaaagacaagcaaaactgatgtgcactttatggcttgggactgatttgggggacattgtacagtgagtgaagtatagcctttatgccacactctgtggccctaaaatggtgaatcagagcatatctagttgtctcaacccttgaagcaatatgtattataaactcagagaacagaagtgcaatgtgatgggaggaacatagcaatatctgctccttttcgagttgtttgagaaatgtaggctattttttcagtgtatatccactcagattttgtgtatttttgatgtacactgttctctaaattctgaatctttgggaaaaaatgtaaagcatttatgatctcagaggttaacttatttaagggggatgtacatatattctctgaaactaggatgcatgcaattgtgttggaagtgtccttggtgccttgtgtgatgtagacaatgttacaaggtctgcatgtaaatgggttgccttattatggagaaaaaaaatcactccctgagtttagtatggctgtatatttctgcctattaatatttggaattttttttagaaagtatatttttgtatgctttgttttgtgacttaaaagtgttacctttgtagtcaaatttcagataagaatgtacataatgttaccggagctgatttgtttggtcattagctcttaatagttgtgaaaaaataaatctattctaacgcaaaaccactaactgaagttcagataatggatggtttgtgactatagtgtaaataaatacttttc

SEQ ID NO: 128932 - DNA, 4336 bp, Homo sapiens
  Payload ID: 5220
  Gene Symbol: EGR3
  Gene Name: early growth response 3
  Uniprot ID: Q06889
  ENST ID: ENST00000317216
  CDS Start-End: 359-1522
gatcaatactgaggccgcgtccgacccccttgagccgagatccccccccagcccagcccccaccccaccccccgcacacgccccaccccccccacgacccagcctcataccgcaccagctgaggcacccaagaggattaccccctggggccctctcccgccccccaaaaaagagaagatcccctctcctggcccatcccttcccttcttccctcccccctccccccgaactttccctctcgcatgcttttcccctgcaccacggatcgcctctcggatgccgcttgcctggaagctgcgttaggagcgagcggcggcggtggcggcggtggcggcggcggcggcagctcgggagtgctatgaccggcaaactcgccgagaagctgccggtgaccatgagcagtttgctaaaccaactgcctgacaatctgtaccccgaggagatccccagcgcgctcaacctcttctccggcagcagcgactcggtagtccattacaatcagatggctacagagaatgtaatggacatcggtctgaccaacgagaagcccaacccggaactctcttactccggctccttccagccagcccccggcaacaagaccgtgacctacttgggaaagttcgccttcgactccccttccaactggtgccaggacaacatcattagcctcatgagcgccggcatcttgggggtgcccccggcttcaggggcgctcagcacgcagacgtccacggccagcatggtgcagccaccgcagggtgacgtggaggccatgtatcccgcgctacccccctactccaactgcggcgacctctactcagagcccgtgtctttccacgacccccagggcaatcccgggctcgcctattccccccaggattaccaatcggccaagccggcgttggacagcaatctcttccccatgattcctgactacaacctctaccaccaccccaacgacatgggctccattccggagcacaagcccttccagggcatggaccccatccgggtcaacccgccccctattacccctctggagaccatcaaggcattcaaagacaagcagatccacccgggctttggcagcctgccccagccgccgctcaccctcaagcccatccggccccgcaagtaccccaaccggcctagcaagacaccgctccacgaacggccccacgcgtgcccggccgagggctgcgaccgccgtttcagccgttcggacgagctgacccggcacctgcgcatccacacgggccacaagcccttccagtgccggatctgcatgcggagcttcagccgcagcgaccacctcaccactcacatccgcactcatacgggcgagaagccctttgcctgcgagttctgcgggcgcaagtttgcgcgcagcgacgagcgcaagcgccacgccaagatccacctcaagcaaaaggagaagaaggcggagaagggcggtgcaccctctgcatcctcggcgccccccgtgtcgctggcccccgtggtcaccacctgcgcctgaggatcgggcccccagatccccacttttcccctccagtgcctcccggctgctagcctgaaagcagcgggaaagccagccacggaggcgtaggggccgcgccctggcctctccatggacgtgcggccccttgcttccccttcgatgcccccggttcccaacctttcacgccggccagcggtcaggggccagggctggaggcgccttcccctcgcggtcccccacttagccaaggcgtgggggcggaaaggtggcgtctagcccgctttgttcagttcggatcgccttgatccaggggccgccgggccgcgccaaggacctgcaagggactgaaggcggagcccatccaaccctcgcccgacccaaacacctcattgtttcccccacgtctccctctataccccctcgaagactcgagagggggagggggtaaggagcgcaccaaagcgcagagcttgctgcccgccgcacgcacgcgcgcctgcgtgcggggatgcgcgcgagtgtgtgcgtgctcgcgtgtgtgtgtatgtgtgtgtgtgagtgtgtgtgtgtgcgcgcgcgcaagcgtgtgtgtttaagactcttgagctgaactgggctgtgtttaccccaaactcttccccacctcgggtccccaagccgctgggagatgtcccatgctgggggtccgcacgtggctggaggaggtggtcttccatccgctctgaaatcatgtttcttagagaaatgcctcggatgccgccgacgcggtgctgctgccgccgcttcgggtttggcccctcagaacccctccttttctgagcgcttccctcttaggcctcagggcagtttgatctgtggggagaaagagcagccatcgctgagcctgccttttaaaatatatgtgtatttccttagccccactctaagaaatctatgttcctgagtttgccccctgccctcccactccttccccttctcccctctaaaccttctcccatctctttcaaaatcttttcccagaaaggcaggcttcaaccagccactccagctttgtgtcttctctcaattacatagcaatttctccttcccaccatcatggggaagctggctctgcttttgccctttgtcatcaccaacacaacagatagaatttaaatataagtatatggtgtgcgtgtgtatgtatgtgtatgtatatgcatgcatgtgtataaagatgcacatgcgtacatatacataacatacacacaatatgtattcctagcaaaataaaatctctaaggtacttggttatccagtgcagtgcaccggaataaagagaatttgtaggcgtatacagctttaaatgatttattttttatgaaaatgttaactgatgagattatatctacatacgtgtgttatgtgtgtggatatagatgcacacatatctgtacatatacatgtgagtgtacatatatacacatatacacatctatgtatggatatgtgtgtatacacatatacacatctctgtccaaaatttcctcaaagatatggggattttttcatgaatccatgtggatgaatgaggtgtctcctttccatacccagtctcaccttctccccaccctacctcacctcttctcaggcacccctcttccccagctgtcctgccagcccttctcgtacagggtggctcctttgaagtggagtaatagggaaggttgctctctgccacagcttgcagcatggtcttgactgaatgtactgttcctgttagcgttacttctcctgtggtcagtaagttgcccagagagaaggaacaaaggtctggagtttacagaatgtctgtttttaaagtcactttatgcgttttccacttttttcttttttaagaaaaagaagtaccatttttgttttgttttgttttgatttttggtggtggataaataatactaaaaggactctagtggaaaggggggatatcgaagagcagggggttgtgaatttccaggtacttggactttttgtagaaggagagagaagaagatgaagtttgccaggagggcccatattttttcagctgaagggtaaaatctttctttgcagagacagtattttgctgaatactttttataatgtgatgattattaaaaaagcaaaaattttggtcacttccaagctagaaggaggaatcagataccctttaatattttttcctcgctccttctggtatatgcatgtcactgcatgataattgagttttcctttgttttaataaaactgttctcagacattaagctaaactaagagaaaaataactttgttgccaaaaggttgtgctatccagattttttatatgtctgcatgtttaaaaaaaaaaagcaacaaaagaaaatgcactctaacttatgtgaactgagagaaaaaaatcaggttttaaacaggaaaacctatggggaatgatattttttgaaagacttttgtataaagttgagtacttagaaaaaagacaaaccagatgtaatatattttgtggatgtttttatttcttggatttatagtaccttatactaaggttaaaaaaatatgcttgatattgtgaaaaggtgaaattcttcaccaacatttcatttgctcctttgtcatattgtaatgccaatataatatagttaatgaaaacagcatttttaaaaaccgaaatattgaaatggtgtaatgttgtaccatttgcactgtgagcaaatgctaatacagtaaatatattgtgtttgctgacaatcagccggcctataaatctccttattttatttcttgtttttatagcataaagctttagtttggcctgtt

SEQ ID NO: 128933 - DNA, 1500 bp, Homo sapiens
  Payload ID: 5220
  Gene Symbol: EGR3
  Gene Name: early growth response 3
  ENST ID: ENST00000519492
  CDS Start-End: 235-450
cacccaagaggattaccccctggggccctctcccgccccccaaaaaagagaagatcccctctcctggcccatcccttcccttcttccctcccccctccccccgaactttccctctcgcatgcttttcccctgcaccacggatcgcctctcggatgccgcttgcctggaagctgcgttaggagcgagcggcggcggtggcggcggtggcggcggcggcggcagctcgggagtgctatgaccggcaaactcgccgagaagctgccggtgaccatgagcagtttgctaaaccaactgcctgacaatctgtaccccgaggagatccccagcgcgctcaacctcttctccggcagcagcgactcggtagtccattacaatcagatggctacagcctcccacccgggatggagccatgtgcggcgtggagtccccgcggtgggagagagaatgtaatggacatcggtctgaccaacgagaagcccaacccggaactctcttactccggctccttccagccagcccccggcaacaagaccgtgacctacttgggaaagttcgccttcgactccccttccaactggtgccaggacaacatcattagcctcatgagcgccggcatcttgggggtgcccccggcttcaggggcgctcagcacgcagacgtccacggccagcatggtgcagccaccgcagggtgacgtggaggccatgtatcccgcgctacccccctactccaactgcggcgacctctactcagagcccgtgtctttccacgacccccagggcaatcccgggctcgcctattccccccaggattaccaatcggccaagccggcgttggacagcaatctcttccccatgattcctgactacaacctctaccaccaccccaacgacatgggctccattccggagcacaagcccttccagggcatggaccccatccgggtcaacccgccccctattacccctctggagaccatcaaggcattcaaagacaagcagatccacccgggctttggcagcctgccccagccgccgctcaccctcaagcccatccggccccgcaagtaccccaaccggcctagcaagacaccgctccacgaacggccccacgcgtgcccggccgagggctgcgaccgccgtttcagccgttcggacgagctgacccggcacctgcgcatccacacgggccacaagcccttccagtgccggatctgcatgcggagcttcagccgcagcgaccacctcaccactcacatccgcactcatacgggcgagaagccctttgcctgcgagttctgcgggcgcaagtttgcgcgcagcgacgagcgcaagcgccacgccaagatccacctcaagcaaaaggagaagaaggcggagaagggcggtgcaccctctgcatcctcggcgccccccgtgtcgctggcccccgtggtcaccacctgcgcctgaggatcgggcccccagatccccacttttcccctccagtgcctcccggctg

SEQ ID NO: 128934 - DNA, 1553 bp, Homo sapiens
  Payload ID: 5220
  Gene Symbol: EGR3
  Gene Name: early growth response 3
  Uniprot ID: Q06889
  ENST ID: ENST00000522910
  CDS Start-End: 74-1123
ctcttcccgggaggagcccggcgtctttttcacccgcgctctccccccttactccctcagcctcccacccgggatggagccatgtgcggcgtggagtccccgcggtgggagagagaatgtaatggacatcggtctgaccaacgagaagcccaacccggaactctcttactccggctccttccagccagcccccggcaacaagaccgtgacctacttgggaaagttcgccttcgactccccttccaactggtgccaggacaacatcattagcctcatgagcgccggcatcttgggggtgcccccggcttcaggggcgctcagcacgcagacgtccacggccagcatggtgcagccaccgcagggtgacgtggaggccatgtatcccgcgctacccccctactccaactgcggcgacctctactcagagcccgtgtctttccacgacccccagggcaatcccgggctcgcctattccccccaggattaccaatcggccaagccggcgttggacagcaatctcttccccatgattcctgactacaacctctaccaccaccccaacgacatgggctccattccggagcacaagcccttccagggcatggaccccatccgggtcaacccgccccctattacccctctggagaccatcaaggcattcaaagacaagcagatccacccgggctttggcagcctgccccagccgccgctcaccctcaagcccatccggccccgcaagtaccccaaccggcctagcaagacaccgctccacgaacggccccacgcgtgcccggccgagggctgcgaccgccgtttcagccgttcggacgagctgacccggcacctgcgcatccacacgggccacaagcccttccagtgccggatctgcatgcggagcttcagccgcagcgaccacctcaccactcacatccgcactcatacgggcgagaagccctttgcctgcgagttctgcgggcgcaagtttgcgcgcagcgacgagcgcaagcgccacgccaagatccacctcaagcaaaaggagaagaaggcggagaagggcggtgcaccctctgcatcctcggcgccccccgtgtcgctggcccccgtggtcaccacctgcgcctgaggatcgggcccccagatccccacttttcccctccagtgcctcccggctgctagcctgaaagcagcgggaaagccagccacggaggcgtaggggccgcgccctggcctctccatggacgtgcggccccttgcttccccttcgatgcccccggttcccaacctttcacgccggccagcggtcaggggccagggctggaggcgccttcccctcgcggtcccccacttagccaaggcgtgggggcggaaaggtggcgtctagcccgctttgttcagttcggatcgccttgatccaggggccgccgggccgcgccaaggacctgcaagggactgaaggcggagcccatccaaccctcgcccgacccaaacacctcattgtttcccccacgtctccctctataccccctcgaagactcgagagggggagggggtaa

SEQ ID NO: 128935 - DNA, 2377 bp, Homo sapiens
  Payload ID: 5221
  Gene Symbol: EGR4
  Gene Name: early growth response 4
  ENST ID: ENST00000436467
  CDS Start-End: 389-1849
ttttcgggagtccccggcacacatcctgtgtccatgtttgggcatttacgtcacggcggcagggccggggcctcccaaaatggcagtggcccggggagtcggaagcccggagccagcgccgccgcagctatataagtgggggggctgtgggctgggggagcccggcagcgctttggagaggcgaggagccgccgcccgaggccggtgcgggcgagcgagggcgccgcggctccccgactcctttcccagaggtgagtgcccgaagccaggagcccgggcgcctaggtctgtgcgctgcggggaacccctaccgccagcctccccgccacccgcgcgcccccaagcccagcgggcgaggccccgggcgccccacagccggcgccgcgccatgctccaccttagcgagttttccgaacccgacgcgctcctcgtcaagtccactgaaggctgttgcgccgaacccagcgctgaattgccccggctgcctgccagggacgctcccgcggccaccggctaccctggagcaggcgacttcttgagctgggctttgaacagctgcggcgcaagtggggacttagccgactcctgcttcctggaggggcctgcgcccacaccccctcccggcctcagctacagcggtagcttcttcattcaggcagtgcccgaacacccgcacgacccggaggcactcttcaacctcatgtcgggcatcttaggcctggcacccttccccggtccagaggcagcagcgtccagatccccgctggatgccccttttcctgcggggtccgatgccttgctgccgggtccgccggacctttactccccggatctgggcgctgcccctttcccagaggcgttctgggaggcctcgccttgcgcgggtgccccctcgcagtgcctgtatgagcctcagctctccccgcccgacgtcaagcccggcctccgggcgcctcccgcctcgccagcgctggacgctgtctctgccttcaagggtccctacgcgccctgggagctgctttctgtgggggccccagggaactgtgggtcacagggagactaccaggccgccccggaggctcgttttcccgtaatagggaccaagattgaggacttgctgtccatcagctgccctgcggaactgccggccgtcccagccaacagactctatcccagcggggcctatgacgctttcccgctggccccgggtgacttaggggagggggctgagggcctccctgggctcctgacccctcctagtggggagggagggagtagcggcgacggcggagagtttctggccagtacgcagcctcagctttccccgctgggccttcgcagcgccgccgcggcggacttccctaaacctctggtggcggacatccctggaagcagtggcgtggctgcaccacccgtgccgccgccgccgcccacccctttcccccaggccaaggcgcgacgcaaggggcgccgcggcggcaaatgcagcacgcgctgcttctgcccgcggccgcacgccaaggccttcgcttgcccggtggagagttgtgtgcggagctttgcgcgctccgacgagctcaatcgccacctgcgcatccacacgggccacaaacccttccagtgccgcatctgcctccgcaacttcagccgcagcgaccacctcaccacgcacgtgcgcacccacaccggcgagaagccttttgcttgcgacgtgtgcggccgccgcttcgcgcgcagcgatgagaagaaacggcacagcaaggtgcacctcaagcagaaggcgcgcgccgaggagcggctcaagggcctcggcttttactcgctgggcctctccttcgcttctctctgagcaagagatgggtttatgggttggggcgccgccgttcggcgcgcacgagttccgggccgttcccctccccgctcttcttccaactcctcctcgcacgcccgagggccggcctccggtcccgcttccagtttccttgaagcgcccgccgcacacgccctattcagcaccagctccgcggacagttcccgcggtccaggcgctgtcacccttgtcagccgcgctttgggggaagtcttctgagaccacccagtgaataggcactaccctgggattcaagacagtcttttgtaactggcacacgccccacgccttcctctataacccccagagacaggctggggcagcgccaaggcggtctcgcgcgggactttgtacagcagtgtcttatccagcagccattggatgtaacgttttgctttgggttttttttccttttgttgttgttaatttttgtaaagcagacgctactctcaagcagttgacaaaactgtttatttttgcaattaaaattattgtgctaaaagctta

SEQ ID NO: 128936 - DNA, 2372 bp, Homo sapiens
  Payload ID: 5221
  Gene Symbol: EGR4
  Gene Name: early growth response 4
  Uniprot ID: Q05215
  ENST ID: ENST00000545030
  CDS Start-End: 76-1845
cgggagtccccggcacacatcctgtgtccatgtttgggcatttacgtcacggcggcagggccggggcctcccaaaatggcagtggcccggggagtcggaagcccggagccagcgccgccgcagctatataagtgggggggctgtgggctgggggagcccggcagcgctttggagaggcgaggagccgccgcccgaggccggtgcgggcgagcgagggcgccgcggctccccgactcctttcccagaggtgagtgcccgaagccaggagcccgggcgcctaggtctgtgcgctgcggggaacccctaccgccagcctccccgccacccgcgcgcccccaagcccagcgggcgaggccccgggcgccccacagccggcgccgcgccatgctccaccttagcgagttttccgaacccgacgcgctcctcgtcaagtccactgaaggctgttgcgccgaacccagcgctgaattgccccggctgcctgccagggacgctcccgcggccaccggctaccctggagcaggcgacttcttgagctgggctttgaacagctgcggcgcaagtggggacttagccgactcctgcttcctggaggggcctgcgcccacaccccctcccggcctcagctacagcggtagcttcttcattcaggcagtgcccgaacacccgcacgacccggaggcactcttcaacctcatgtcgggcatcttaggcctggcacccttccccggtccagaggcagcagcgtccagatccccgctggatgccccttttcctgcggggtccgatgccttgctgccgggtccgccggacctttactccccggatctgggcgctgcccctttcccagaggcgttctgggaggcctcgccttgcgcgggtgccccctcgcagtgcctgtatgagcctcagctctccccgcccgacgtcaagcccggcctccgggcgcctcccgcctcgccagcgctggacgctgtctctgccttcaagggtccctacgcgccctgggagctgctttctgtgggggccccagggaactgtgggtcacagggagactaccaggccgccccggaggctcgttttcccgtaatagggaccaagattgaggacttgctgtccatcagctgccctgcggaactgccggccgtcccagccaacagactctatcccagcggggcctatgacgctttcccgctggccccgggtgacttaggggagggggctgagggcctccctgggctcctgacccctcctagtggggagggagggagtagcggcgacggcggagagtttctggccagtacgcagcctcagctttccccgctgggccttcgcagcgccgccgcggcggacttccctaaacctctggtggcggacatccctggaagcagtggcgtggctgcaccacccgtgccgccgccgccgcccacccctttcccccaggccaaggcgcgacgcaaggggcgccgcggcggcaaatgcagcacgcgctgcttctgcccgcggccgcacgccaaggccttcgcttgcccggtggagagttgtgtgcggagctttgcgcgctccgacgagctcaatcgccacctgcgcatccacacgggccacaaacccttccagtgccgcatctgcctccgcaacttcagccgcagcgaccacctcaccacgcacgtgcgcacccacaccggcgagaagccttttgcttgcgacgtgtgcggccgccgcttcgcgcgcagcgatgagaagaaacggcacagcaaggtgcacctcaagcagaaggcgcgcgccgaggagcggctcaagggcctcggcttttactcgctgggcctctccttcgcttctctctgagcaagagatgggtttatgggttggggcgccgccgttcggcgcgcacgagttccgggccgttcccctccccgctcttcttccaactcctcctcgcacgcccgagggccggcctccggtcccgcttccagtttccttgaagcgcccgccgcacacgccctattcagcaccagctccgcggacagttcccgcggtccaggcgctgtcacccttgtcagccgcgctttgggggaagtcttctgagaccacccagtgaataggcactaccctgggattcaagacagtcttttgtaactggcacacgccccacgccttcctctataacccccagagacaggctggggcagcgccaaggcggtctcgcgcgggactttgtacagcagtgtcttatccagcagccattggatgtaacgttttgctttgggttttttttccttttgttgttgttaatttttgtaaagcagacgctactctcaagcagttgacaaaactgtttatttttgcaattaaaattattgtgctaaaagctt

SEQ ID NO: 128937 - DNA, 1322 bp, Homo sapiens
  Payload ID: 5222
  Gene Symbol: EBNA1BP2
  Gene Name: EBNA1 binding protein 2
  Uniprot ID: Q99848
  ENST ID: ENST00000236051
  CDS Start-End: 143-1063
gcgattcggtggcacgtggagccacggcgtgggagtagggggctgaaggcaggcagcagcggccagggccgccctctgctagccgcttgggtctcgggataccccgtttcttcctgtaggtgtgggacgtgcgtgcggcgagatggacactcccccgctctcggattcggagtcggaatccgatgaatcccttgtcacagacagagagttgcaggatgcgttttcccgagggcttctgaagccaggcctcaatgtcgtgctagaggggccgaagaaggccgtgaacgacgtgaatggcctgaagcaatgtttggcagaattcaagcgggatctggaatgggttgaaaggctcgatgtgacactgggtccggtaccggagatcggtggatctgaggcgccagcacctcagaacaaggaccagaaagctgttgatccagaagacgacttccagcgagagatgagtttctatcgccaagcccaggccgcagtgcttgcagtcttaccccgcctccatcagctcaaagtccctacgaagcgacccactgattattttgcggaaatggccaaatctgatctgcagatgcagaagattcgacagaagctgcagactaaacaggctgccatggagaggtctgaaaaagctaagcaactgcgagcacttaggaaatacgggaagaaggtgcaaacggaggttcttcagaagaggcagcaggagaaagcccatatgatgaatgctattaagaaatatcagaaaggcttctctgataaactggatttccttgagggagatcagaaacctctggcacagcgcaagaaggcaggagccaaaggccagcagatgaggaaggggcccagtgctaaacgacggtataaaaaccagaagtttggttttggtggaaagaagaaaggctcaaagtggaacactcgggagagctatgatgatgtatctagcttccgggccaagacagctcatggcagaggcctcaagaggcctggcaagaaagggtcaaataagagacctggaaaacgaacaagagagaagatgaagaacagaacacactaaatagcatctttgaatacaaagaaccaagaaaaaggaatgaagactcgcaatttcacgacacactttgatcccttctgttggtgtcatgttgtaaacatttctttcaataaactaaagaaaaattattaaaggaacacatacctttggttaaatagtctagactaaaagattgagaagttactttccattgctatctattgataatttagacattgagttcaaattgccttcattttatgataaataatgatttaactga

SEQ ID NO: 128938 - DNA, 1503 bp, Homo sapiens
  Payload ID: 5222
  Gene Symbol: EBNA1BP2
  Gene Name: EBNA1 binding protein 2
  ENST ID: ENST00000431635
  CDS Start-End: 150-1235
cctcccccggggtcctcctccgcgccaccccacccccgcggctcctttttctgccttttcctttgtaccctcactgctaccagctccttctggcgacccccaggtaccccctcccacctttcgtttctctctgggtcagcagaccacgcatgtatccagaggcgctacctgtagggatcctaagcaacccggacactttcaaacgccgtagcggttcctatagcaacgacaaaccggaagtatggtttgccgccggaagcggaagtcccaatcaaaagttgagcagtagctgtgtgggacgtgcgtgcggcgagatggacactcccccgctctcggattcggagtcggaatccgatgaatcccttgtcacagacagagagttgcaggatgcgttttcccgagggcttctgaagccaggcctcaatgtcgtgctagaggggccgaagaaggccgtgaacgacgtgaatggcctgaagcaatgtttggcagaattcaagcgggatctggaatgggttgaaaggctcgatgtgacactgggtccggtaccggagatcggtggatctgaggcgccagcacctcagaacaaggaccagaaagctgttgatccagaagacgacttccagcgagagatgagtttctatcgccaagcccaggccgcagtgcttgcagtcttaccccgcctccatcagctcaaagtccctacgaagcgacccactgattattttgcggaaatggccaaatctgatctgcagatgcagaagattcgacagaagctgcagactaaacaggctgccatggagaggtctgaaaaagctaagcaactgcgagcacttaggaaatacgggaagaaggtgcaaacggaggttcttcagaagaggcagcaggagaaagcccatatgatgaatgctattaagaaatatcagaaaggcttctctgataaactggatttccttgagggagatcagaaacctctggcacagcgcaagaaggcaggagccaaaggccagcagatgaggaaggggcccagtgctaaacgacggtataaaaaccagaagtttggttttggtggaaagaagaaaggctcaaagtggaacactcgggagagctatgatgatgtatctagcttccgggccaagacagctcatggcagaggcctcaagaggcctggcaagaaagggtcaaataagagacctggaaaacgaacaagagagaagatgaagaacagaacacactaaatagcatctttgaatacaaagaaccaagaaaaaggaatgaagactcgcaatttcacgacacactttgatcccttctgttggtgtcatgttgtaaacatttctttcaataaactaaagaaaaattattaaaggaacacatacctttggttaaatagtctagactaaaagattgagaagttactttccattgctatctattgataatttagacattgagttcaaattgccttcattttatgataaataatgatttaactgacaccttctc

SEQ ID NO: 128939 - DNA, 3069 bp, Homo sapiens
  Payload ID: 5223
  Gene Symbol: ECD
  Gene Name: ecdysoneless homolog (Drosophila)
  Uniprot ID: O95905
  ENST ID: ENST00000372979
  CDS Start-End: 208-2142
caaggtttcggggactgagtgggtttcagactttctctcaggatttccgctggcttcaggttccggtcaggcgtcgggacagagcctgatccaggcttcggcggccggtggcagctctcgatcagctctcgcagtcggagaggcggctaaggaaaggtgccacagcagagacgcgaaggagaggccctagaaccttttcaaagaagaatggaagaaaccatgaagcttgctacgatggaagacacagtggagtactgcctgttcctgataccagatgagtcaagggactcagataaacataaagagattcttcagaagtacattgagagaataatcactcggtttgcacctatgctggtcccctacatctggcagaatcagcctttcaatcttaaatataaacctgggaaaggaggtgttcctgctcatatgtttggcgtgacaaagtttggggataacattgaggatgaatggtttattgtttatgtaataaagcagatcacaaaggaatttccagagttagtagcaaggattgaagacaatgatggtgaattcttgttaatagaagctgctgactttctccctaaatggctggatcctgaaaatagcaccaatagggtatttttctgccatggggaattgtgtattatccctgcaccaagaaaatctggagcagaatcttggttacccaccacacccccaacaattccacaagcattgaatataatcacagcacattcagaaaaaatacttgcttcagaatctatacgagctgctgtgaataggcgcatcagagggtacccagaaaaaattcaggcctcacttcatcgagcacactgcttccttccagctggcattgtggcagtgctaaagcagcgccccagattggtggctgcagcagtccaggcattttacctacgagaccctattgacctgcgagcttgtcgtgttttcaagacattcttgcctgaaacacgaataatgacatcggtcacattcactaaatgtctatatgcacaattggtgcaacaaaggtttgtgccagaccggcggagtggatacaggctgcctcctccatctgatccccagtaccgagcccatgaattgggcatgaaattggctcatggatttgagatcttatgctccaaatgtagcccacatttttctgactgcaagaaatcccttgtgactgcctcaccactctgggccagtttccttgaaagtctgaaaaagaatgattactttaagggactgatagaaggttctgctcagtaccgggaaaggctagaaatggcagagaattacttccagctctcagtagactggccagaaagttctcttgctatgagccctggtgaagaaatcttaaccttattacagacaataccatttgatatagaagaccttaagaaagaagcagctaatcttcccccagaggatgatgaccagtggttagatctctcaccagatcagctggaccagctgctgcaggaagctgttggcaaaaaagaatccgagtctgtttccaaggaggagaaggagcagaactatgacttaactgaagtctcagagagcatgaaagctttcatatccaaagtctcaacccacaagggagcagagctgcctcgagaaccttctgaggctccaatcacttttgatgcagattcttttcttaattattttgataagattttagggccaaggcctaatgagtcagattctgatgatctggatgatgaagactttgaatgtttagatagtgatgatgacttggactttgaaacacacgaacctggcgaagaggcttccctgaaaggaacacttgataatctcaagtcatacatggcccagatggaccaggaactagcacacacctgcatcagcaaaagtttcaccactaggaaccaagtggaacctgtatcccagactaccgataacaattcagatgaggaagattctggtacgggagaatctgttatggcaccagtagatgtagacctgaacctggtttcaaatatattggaatcctatagctcccaagctggactggcaggacctgcttccaatcttttacaaagcatgggagtgcagctgcctgacaacaccgatcacagaccaacaagtaagccaacaaaaaattaaccagcacatttagcttctcttttttctttttaaataaatattgaatatgattctgttcatttctagtttagattactcatttagtaaaaatgtttcttcattacaagttttacagattgacttctccatgagccccaaatgtggccctcttggcacaagtctttgtgatctcagctgtgggttatacacaggttttgaactcggcagggtagaatctagcccctagacaaccttgagatgaaattcacacacttcatgctaaagacataccctaccacaatatacccttggagtaattctaaatatttaaatttctcccttactgctattcatcctcagatcaaaatttcaagttgacaaatttggatttgaaaactcattcactttttcaatttttttaatgaggcataacatgcatatggttaagtgcacaaatcttaagtgtacagtcagtgaatttttgcatgtatgtatgtacctgaagcaagatatagaacttatttacttgtaaataacagctatattgatatgtcacataccaaaaaatttaccctttaaattatacaattcagtggtttttagtatatttacaaaattgtgcaaccatccctaccatctaattctagaatattagaaaccccatactcactaatagtctctcattcccttctactcccagcccctagaaaccactagtctactttctgtctctatggatttgcctattttggatatttcatacctgatactgtacttaattgttttaattaattaattggtttgatatttaatataactgatatatcttttgctaagatgaaatgtttatttcttaaaatgatgctcatattcctcctaaaataaatcaagtattatctatatatcataaaattcaccattaaaagcaaaaaaaaagtcttctttaca

SEQ ID NO: 128940 - DNA, 884 bp, Homo sapiens
  Payload ID: 5223
  Gene Symbol: ECD
  Gene Name: ecdysoneless homolog (Drosophila)
  ENST ID: ENST00000453402
  CDS Start-End: 248-884
aaaatgctcccgccgacgcacagcagtgacgacacacaaggtttcggggactgagtgggtttcagactttctctcaggatttccgctggcttcaggttccggtcaggcgtcgggacagagcctgatccaggcttcggcggccggtggcagctctcgatcagctctcgcagtcggagaggcggctaaggaaaggtgccacagcagagacgcgaaggagaggccctagaaccgaggtgttcctgctcatatgtttggcgtgacaaagtttggggataacattgaggatgaatggtttattgtttatgtaataaagcagatcacaaaggaatttccagagttagtagcaaggattgaagacaatgatggtgaattcttgttaatagaagctgctgactttctccctaaatggctggatcctgaaaatagcaccaatagggtatttttctgccatggggaattgtgtattatccctgcaccaagaaaatctggagcagaatcttggttacccaccacacccccaacaattccacaagcattgaatataatcacagcacattcagaaaaaatacttgcttcagaatctatacgagctgctgtgaataggcgcatcagagggtacccagaaaaaattcaggcctcacttcatcgagcacactgcttccttccagctggcattgtggcagtgctaaagcagcgccccagattggtggctgcagcagtccaggcattttacctacgagaccctattgacctgcgagcttgtcgtgttttcaagacattcttgcctgaaacacgaataatgacatcggtcacattcactaaatgtctatatgcacaattggtgcaacaaaggtttgtgccagaccggcggagtggatacaggc

SEQ ID NO: 128941 - DNA, 2084 bp, Homo sapiens
  Payload ID: 5223
  Gene Symbol: ECD
  Gene Name: ecdysoneless homolog (Drosophila)
  Uniprot ID: O95905
  ENST ID: ENST00000454759
  CDS Start-End: 220-2025
agtgacgacacacaaggtttcggggactgagtgggtttcagactttctctcaggatttccgctggcttcaggttccggtcaggcgtcgggacagagcctgatccaggcttcggcggccggtggcagctctcgatcagctctcgcagtcggagaggcggctaaggaaaggtgccacagcagagacgcgaaggagaggccctagaaccttttcaaagaagaatggaagaaaccatgaagcttgctacgatggaagacacagtggagtactgcctgttcctgataccagatgagtcaagggactcagataaacataaagagattcttcagaagtacattgagagaataatcactcggtttgcacctatgctggtcccctacatctggcagaatcagcctttcaatcttaaatataaacctgggaaaggaggtgttcctgctcatatgtttggcgtgacaaagtttggggataacattgaggatgaatggtttattgtttatgtaataaagcagatcacaaaggaatttccagagttagtagcaaggattgaagacaatgatggtgaattcttgttaatagaagctgctgactttctccctaaatggctggatcctgaaaatagcaccaatagggtatttttctgccatggggaattgtgtattatccctgcaccaagaaaatctggagcagaatcttggttacccaccacacccccaacaattccacaagcattgaatataatcacagcacattcagaaaaaatacttgcttcagaatctatacgagctgctgtgaataggcgcatcagagggtacccagaaaaaattcaggcctcacttcatcgagcacactgcttccttccagctggcattgtggcagtgctaaagcagcgccccagattggtggctgcagcagtccaggcattttacctacgagaccctattgacctgcgagcttgtcgtgttttcaagacattcttgcctgaaacacgaataatgacatcggctcatggatttgagatcttatgctccaaatgtagcccacatttttctgactgcaagaaatcccttgtgactgcctcaccactctgggccagtttccttgaaagtctgaaaaagaatgattactttaagggactgatagaaggttctgctcagtaccgggaaaggctagaaatggcagagaattacttccagctctcagtagactggccagaaagttctcttgctatgagccctggtgaagaaatcttaaccttattacagacaataccatttgatatagaagaccttaagaaagaagcagctaatcttcccccagaggatgatgaccagtggttagatctctcaccagatcagctggaccagctgctgcaggaagctgttggcaaaaaagaatccgagtctgtttccaaggaggagaaggagcagaactatgacttaactgaagtctcagagagcatgaaagctttcatatccaaagtctcaacccacaagggagcagagctgcctcgagaaccttctgaggctccaatcacttttgatgcagattcttttcttaattattttgataagattttagggccaaggcctaatgagtcagattctgatgatctggatgatgaagactttgaatgtttagatagtgatgatgacttggactttgaaacacacgaacctggcgaagaggcttccctgaaaggaacacttgataatctcaagtcatacatggcccagatggaccaggaactagcacacacctgcatcagcaaaagtttcaccactaggaaccaagtggaacctgtatcccagactaccgataacaattcagatgaggaagattctggtacgggagaatctgttatggcaccagtagatgtagacctgaacctggtttcaaatatattggaatcctatagctcccaagctggactggcaggacctgcttccaatcttttacaaagcatgggagtgcagctgcctgacaacaccgatcacagaccaacaagtaagccaacaaaaaattaaccagcacatttagcttctcttttttctttttaaataaatattgaatatgattctgttca

SEQ ID NO: 128942 - DNA, 2246 bp, Homo sapiens
  Payload ID: 5223
  Gene Symbol: ECD
  Gene Name: ecdysoneless homolog (Drosophila)
  Uniprot ID: O95905
  ENST ID: ENST00000430082
  CDS Start-End: 213-2246
acacacaaggtttcggggactgagtgggtttcagactttctctcaggatttccgctggcttcaggttccggtcaggcgtcgggacagagcctgatccaggcttcggcggccggtggcagctctcgatcagctctcgcagtcggagaggcggctaaggaaaggtgccacagcagagacgcgaaggagaggccctagaaccttttcaaagaagaatggaagaaaccatgaagcttgctacgatggaagacacagtggagtactgcctgttcctgataccagatgagtcaagggactcagataaacataaagagattcttcagaagtacattgagagaataatcactcggtttgcacctatgctggtcccctacatctggcagaatcagcctttcaatcttaaatataaacctgggaaaggaggtgttcctgctcatatgtttggcgtgacaaagtttggggataacattgaggatgaatggtttattgtttatgtaataaagcagatcacaaaggaatttccagagttagtagcaaggattgaagacaatgatggtgaattcttgttaatagaagctgctgactttctccctaaatggctggatcctgaaaatagcaccaatagggtatttttctgccatggggaattgtgtattatccctgcaccaagaaaatctggagcagaatcttggttacccaccacacccccaacaattccacaagcattgaatataatcacagcacattcagaaaaaatacttgcttcagaatctatacgagctgctgtgaataggcgcatcagagggtacccagaaaaaattcaggcctcacttcatcgagcacactgcttccttccagctggcattgtggcagtgctaaagcagcgccccagattggtggctgcagcagtccaggcattttacctacgagaccctattgacctgcgagcttgtcgtgttttcaagacattcttgcctgaaacacgaataatgacatcggtcacattcactaaatgtctatatgcacaattggtgcaacaaaggtttgtgccagaccggcggagtggatacaggctgcctcctccatctgatccccagtaccgagcccatgaattgggcatgaaattggctcatggatttgagatcttatgctccaaatgtagcccacatttttctgactgcaagaaatcccttgtgactgcctcaccactctgggccagtttccttgaaagtctgaaaaagaatgattactttaagggactgatagaaggttctgctcagtaccgggaaaggctagaaatggcagagaattacttccagctctcagtagactggccagaaaggttggaggtgcagtggcgcgatcctggcttactgcaagctccacctcctgggttcacgccattcatctgcctcagcctcctgagtacctgggacaacagttctcttgctatgagccctggtgaagaaatcttaaccttattacagacaataccatttgatatagaagaccttaagaaagaagcagctaatcttcccccagaggatgatgaccagtggttagatctctcaccagatcagctggaccagctgctgcaggaagctgttggcaaaaaagaatccgagtctgtttccaaggaggagaaggagcagaactatgacttaactgaagtctcagagagcatgaaagctttcatatccaaagtctcaacccacaagggagcagagctgcctcgagaaccttctgaggctccaatcacttttgatgcagattcttttcttaattattttgataagattttagggccaaggcctaatgagtcagattctgatgatctggatgatgaagactttgaatgtttagatagtgatgatgacttggactttgaaacacacgaacctggcgaagaggcttccctgaaaggaacacttgataatctcaagtcatacatggcccagatggaccaggaactagcacacacctgcatcagcaaaagtttcaccactaggaaccaagtggaacctgtatcccagactaccgataacaattcagatgaggaagattctggtacgggagaatctgttatggcaccagtagatgtagacctgaacctggtttcaaatatattggaatcctatagctcccaagctggactggcaggacctgcttccaatcttttacaaagcatgggagtgcagctgcctgacaacaccgatcacagaccaacaagtaagccaacaaaaaattaa

SEQ ID NO: 128943 - DNA, 877 bp, Homo sapiens
  Payload ID: 5223
  Gene Symbol: ECD
  Gene Name: ecdysoneless homolog (Drosophila)
  ENST ID: ENST00000413026
  CDS Start-End: 227-877
gcacagcagtgacgacacacaaggtttcggggactgagtgggtttcagactttctctcaggatttccgctggcttcaggttccggtcaggcgtcgggacagagcctgatccaggcttcggcggccggtggcagctctcgatcagctctcgcagtcggagaggcggctaaggaaaggtgccacagcagagacgcgaaggagaggccctagaaccttttcaaagaagaatggaagaaaccatgaagcttgctacgatggaagacacagtggagtactgcctgttcctgataccagatgagtcaagggactcagataaacataaagagattcttcagaagtacattgagagaataatcactcggtttgcacctatgctggtcccctacatctggcagaatcagcctttcaatcttaaatataaacctgggaaaggaggtgttcctgctcatatgtttggcgtgacaaagtttggggataacattgaggatgaatggtttattgtttatgtaataaagcagatcacaaaggaatttccagagttagtagcaagcaccaatagggtatttttctgccatggggaattgtgtattatccctgcaccaagaaaatctggagcagaatcttggttacccaccacacccccaacaattccacaagcattgaatataatcacagcacattcagaaaaaatacttgcttcagaatctatacgagctgctgtgaataggcgcatcagagggtacccagaaaaaattcaggcctcacttcatcgagcacactgcttccttccagctggcattgtggcagtgctaaagcagcgccccagattggtggctgcagcagtccaggcattttacctacgagaccctattgacctg

SEQ ID NO: 128944 - DNA, 1679 bp, Homo sapiens
  Payload ID: 5223
  Gene Symbol: ECD
  Gene Name: ecdysoneless homolog (Drosophila)
  ENST ID: ENST00000484976
  CDS Start-End: 101-592
cagctctcgatcagctctcgcagtcggagaggcggctaaggaaaggtgccacagcagagacgcgaaggagaggccctagaaccgaggtgttcctgctcatatgtttggcgtgacaaagtttggggataacattgaggatgaatggtttattgtttatgtaataaagcagatcacaaaggaatttccagagttagtagcaaggattgaagacaatgatggtgaattcttgttaatagaagctgctgactttctccctaaatggctggatcctgaaaatagcaccaatagggtatttttctgccatggggaattgtgtattatccctgcaccaagaaaatctggagcagaatcttggttacccaccacacccccaacaattccacaagcattgaatataatcacagcacattcagaaaaaatacttgcttcagaatctatacgagctgctgtgaataggcgcatcagagggtcacattcactaaatgtctatatgcacaattggtgcaacaaaggtttgtgccagaccggcggagtggatacaggctgcctcctccatctgatccccagtaccgagcccatgaattgggcatgaaattggctcatggatttgagatcttatgctccaaatgtagcccacatttttctgactgcaagaaatcccttgtgactgcctcaccactctgggccagtttccttgaaagtctgaaaaagaatgattactttaagggactgatagaaggttctgctcagtaccgggaaaggctagaaatggcagagaattacttccagctctcagtagactggccagaaagttctcttgctatgagccctggtgaagaaatcttaaccttattacagacaataccatttgatatagaagaccttaagaaagaagcagctaatcttcccccagaggatgatgaccagtggttagatctctcaccagatcagctggaccagctgctgcaggaagctgttggcaaaaaagaatccgagtctgtttccaaggaggagaaggagcagaactatgacttaactgaagtctcagagagcatgaaagctttcatatccaaagtctcaacccacaagggagcagagctgcctcgagaaccttctgaggctccaatcacttttgatgcagattcttttcttaattattttgataagattttagggccaaggcctaatgagtcagattctgatgatctggatgatgaagactttgaatgtttagatagtgatgatgacttggactttgaaacacacgaacctggcgaagaggcttccctgaaaggaacacttgataatctcaagtcatacatggcccagatggaccaggaactagcacacacctgcatcagcaaaagtttcaccactaggaaccaagtggaacctgtatcccagactaccgataacaattcagatgaggaagattctggtacgggagaatctgttatggcaccagtagatgtagacctgaacctggtttcaaatatattggaatcctatagctcccaagctggactggcaggacctgcttccaatcttttacaaagcatgggagtgcagctgcctgacaacaccgatcacagaccaacaagtaagccaacaaaaaattaaccagcacatttagcttctcttttttctttttaaataaatattgaatatgattctgttca

SEQ ID NO: 128945 - DNA, 457 bp, Homo sapiens
  Payload ID: 5223
  Gene Symbol: ECD
  Gene Name: ecdysoneless homolog (Drosophila)
  ENST ID: ENST00000494307
  CDS Start-End: 1-262
atctgttatggcaccagtagatgtagacctgaacctggtttcaaatatattggaatcctatagctcccaagctggactggcaggacctgcttccaatcttttacaaagcatgggagtgcagctgcctgacaacaccgatcacagaccaacaaacggagtctctctctgttgcccaggctggagtgcagtggcgctatcttggctcaatgcaagctccacctcccaggttcacgccattctcctgcctcagcctcctgagtagctgggactacaggcgcccgccaccatgcccggctaattttttgtattttttagtagagacagggtttcaccgtgtcagccaggatggtctcgatctcctgatcttgtgatccacccgccttggccccccaaagtgctgggattacaggtgtgagccactgtgcccggccgagttaaatatatttctaacatagta

SEQ ID NO: 128946 - DNA, 4535 bp, Homo sapiens
  Payload ID: 5224
  Gene Symbol: EML1
  Gene Name: echinoderm microtubule associated protein like 1
  Uniprot ID: O00423
  ENST ID: ENST00000262233
  CDS Start-End: 140-2587
atggtaaccggcagcagcagccgccacagcagggccggccccagcgccagcgccggtcgcggtcgggctcagctcagtgtgtggtgagcggcggcggcgcggccgggccggggagcgggcgcggcccggcggcctcagcatggaggacggcttctccagctacagcagcctgtacgacacgtcctcgctgctccagttctgcaacgatgacagcgcttctgctgcaagtagcatggaggtgacagaccgcattgcttcactggagcagagagtccagatgcaagaagacgacatccagctgctcaaatcagctctagctgatgtggttcggcggctgaacattactgaggaacagcaggccgtgcttaacaggaaaggacctaccaaagcaagaccactgatgcagaccctgcctttaagaaccacggtcaacaatggcactgtgttaccaaagaaacctactggctctctaccatccccctccggggtcaggaaagaaactgctgtgccagcaaccaaaagtaacatcaagaggaccagctcttctgaacgagtgtctcctgggggtcgaagggaaagcaatggggattccagaggaaaccggaatcgcacaggctccaccagcagctcttccagtggcaaaaagaacagtgaaagcaaacccaaggagcctgtattcagtgcagaagaaggctatgtaaaaatgtttcttcgtggacgccctgttaccatgtacatgcccaaagatcaagtggattcttacagcttggaagcaaaagtagaacttccaaccaagagactcaagctggaatgggtctatgggtacaggggtcgagactgccgtaacaacctgtacttgcttccgacgggagagaccgtctacttcatcgcatccgtggtggtgttatacaacgtggaggagcaactgcagaggcattacgctggccacaacgatgacgtgaagtgcctagcagttcatcctgatcggatcacgatagcaacaggacaagttgcgggcacatcgaaggatggaaaacaattgcccccacatgtgcgcatctgggattctgtgacattgaatactctccacgtcattggaataggtttttttgaccgagcagtcacctgtattgcattctcaaaatctaatggaggaaccaatctctgtgctgtggatgactccaacgaccatgtgctctctgtatgggactggcagaaagaagaaaaactagcagatgtgaagtgctctaatgaagctgtgtttgctgcggatttccaccccacggacaccaacatcatagttacttgtggaaaatcacatctctacttttggacactagaaggaagctcccttaataagaagcaaggattattcgagaaacaagaaaagccaaagtttgtcctctgtgtgactttctctgaaaacggtgacaccattactggagattcaagtggcaacatcttagtatggggaaaaggtacaaatcgaataagctatgcagttcagggggcccatgagggtggcatttttgcactttgtatgttaagagatggcacactggtgtcgggaggtgggaaagaccgaaagctcatttcttggagcggaaactatcaaaaacttcgtaaaacggagattccagaacagtttggtccaatacggacagtggccgaggggaaaggcgatgtgatcttgattggcacaactcgaaactttgtcctgcagggcactctgtcaggggacttcacacccattactcagggtcacactgatgagctctggggactggccatccatgcctcaaaatctcagttcttgacctgtgggcatgacaagcatgccactctctgggacgctgtgggtcaccgtcccgtctgggacaaaataatagaggatccagctcagtcttctggttttcatccttcagggtctgtggttgcagtcggaacactcactgggaggtggtttgtgtttgacacagaaacaaaagacttggtcaccgttcacacagatggaaacgaacagctctctgtaatgcgatactcaccagatgggaatttcttagccataggctcacatgacaactgcatctatatatatggcgttagtgacaacgggaggaagtacacgcgagtgggcaagtgctcgggtcattccagcttcattactcacctggactggtctgtaaactcacagttcctcgtgtcaaattccggagactacgaaatcctctactgggttccctctgcctgtaagcaagtcgtaagtgtggaaactacaagagacattgaatgggctacctatacctgcactttgggattccatgtttttggagtgtggccagaaggctcggacggaaccgacatcaatgccgtctgtcgggcccatgagaagaaactcctgtcaacaggcgacgactttggcaaagtgcacctcttctcatacccctgctcgcagttcagggctccaagccacatctacggcgggcacagcagccatgtcaccaatgtcgatttcctctgtgaagacagccacctcatctccacgggcgggaaagacacaagcatcatgcagtggcgcgtcatttagtacccaccgagagctgtggggagcagcatgggcaaggaagacacagactcgcattacccttggtcactgtgatttctgttttgtttaaaaaattcttacaaacctcaggaaaactgtgccctccgccggctaccttagcttagcgtgtcagcgggcgccacagcggatcagcggttccgtgttcacttttgttgtacaatatatgacacagtgcacattgaataccaacaaggttgcaacgtttacattatagccacatcaacagaagtaactggtatattcttagtaacttttctatgaactcttcaaaaatggtcacagaatgccttttaaaacattgtatataatcttcactgtttcaccatctagcttgctaagtcaaatatttatgatgataatgaggtactgaaccacgatggctgttgaggaattggtcctaaaaggacagatcacttcagaagagtgaataactgatttgcacagctgaatcaggagacacaaagatgagactgtgtttggttacattttccaaagtttcattgcattctcccttggggaggctgtgagagagggcttgtatccctcttgtgctaagcagactctactcctaactgacttcaatatttcagcagggtacacaggcgtttccaagtttcagtgacaccgtcctgcctaaccagatgcggtcagcctcttcacacccacctggcttgcatcccccatcccttgttcacacgccctgattcacggtgagacattttgccaccttcttgtgtatattacttggcatgagatgatattgtacttgtataggattctagcaattcataataaatatgtaagactaggctttactgtcttatgcttatggacattgtatatttgtattttatgaccaagtagaccaagtcagaaagatctctctcgagcgtaccataaacctgcagagagaagtctcgaaaggctccaccaggtaccaagggcagctgcttttcctgtcttttgtgcatgggcgacccattacagtatgagataagattgagttctgatgcgttaaacggaggtggcagaaatttgtcaagaaggccttatccatttcgattgtgtgacagattgaaatttattgtttacattggggaatgtatctcaaatttttaaatagaagagtaataaacagactttaaagcaaatattaagatttttactcattcaaggcaagtaaatgaatggaattatctgagctctatggcactggttgtttagagtgactgatgaagtgcaactttcaaaaacatttttgatgacatcaccagcctactgcagaagtgcagggcaccagtaaacaccatgtattattgaagatgaatctgtttgtatgtatccttgtcaaatatattctataatgaaataaaatctgaaaagtggatttcttattgacctatattcatgaaagcatataaattaaaatatttaaaattagatatgattcacactatattctgtttcatatgcagattttattctcacctgggccatttgcagatgagactgtagtttgcagatgagactgtagtttgcagatggcgtggaagcattcatcaggggagataaccataaaggatttggcctaattaccatactcaattgtcagtttacgtggttttgtgaatactggcaaaagcaattgtttttaaattaacaatggagagaatgataagatgagggaaggaaaaggcattcattattgacttacatgtcagtaaggtctgcttttatttctatgtactcctgtttgccaagctcaataatggacaaaggatacaaacacacacacatctactattttagataaatgtactgttatatatatatgtaaactactattgctctctttataatgattaatcactttattatgaatgaatgaatgaatttgatggatttaaaa

SEQ ID NO: 128947 - DNA, 3715 bp, Homo sapiens
  Payload ID: 5224
  Gene Symbol: EML1
  Gene Name: echinoderm microtubule associated protein like 1
  ENST ID: ENST00000327921
  CDS Start-End: 1092-3503
tccatggcttagaaggctttgcatcttgaacatcctggatgcagagcggtcacaggccatccccacagataggttcctacagatggggtgtgtgaccatgttctctcctcctccacacccctctggggcttacagctaccaaagcccaaaatccttcagggctcaggcctcagggctaaacagtgattcacagactttcacacttccccacacacccccgcgcatgccaactttttgtttcggtaaataaagacattcaaaagtaatgaccatctactctggccctcatttcataaaagcaaggctactttatcaccaatgtcagatgaacaatctcagaataaggctaagttctaaaattaaaatacattttatttcatgacaaactccctctacattttcctcactattctgtagacaggcactggggagcctcccacacagctagggcccctggagcacaggctgcaaagaccccaggaggtcccagaatctacctgccttaggcccagagaggggtggacgttgcccaggaccatgccgctggaacaggaaaaaggttttccagttttaccccaggcaattctccatcaaaatgccatctgactacaaagaggcaggcacttgcttccggatcccctctctgctctgcagaactcccaggccacggagctgatttcactaactgcagccgtccccctggggcgccccgtctgccctacttgccatcacccagatgcgcaggatcttgtggcagaaagcaggagcctggatgggaagaggagcagccaggccgaggtgggcgccgctccccctccccggccctgcccaggtcctcagagagctgggacctgagactcattagtgcctgcataatggatgcctccttctctcttcttggaaatccccagcccatcttgcttaatggccacgagggaagtgggataccggcgctctgctcgtaaagccggcctctgccccccgcatctccccttggaggaggggcggctgggcggcttacacaggggaggcctggtctcttgtcttctgcttcacgacggctggatgacagcgcttctgctgcaagtagcatggaggtgacagaccgcattgcttcactggagcagagagtccagatgcaagaagacgacatccagctgctcaaatcagctctagctgatgtggttcggcggctgaacattactgaggaacagcaggccgtgcttaacaggaaaggacctaccaaagcaagaccactgatgcagaccctgcctttaagaaccacggtcaacaatggcactgtgttaccaaagaaacctactggctctctaccatccccctccggggtcaggaaagaaactgctgtgccagcaaccaaaagattaaacagatctgtgagtcttctcaatgcttgcaaactgaatagatcgacaccaagtaacatcaagaggaccagctcttctgaacgagtgtctcctgggggtcgaagggaaagcaatggggattccagaggaaaccggaatcgcacaggctccaccagcagctcttccagtggcaaaaagaacagtgaaagcaaacccaaggagcctgtattcagtgcagaagaaggctatgtaaaaatgtttcttcgtggacgccctgttaccatgtacatgcccaaagatcaagtggattcttacagcttggaagcaaaagtagaacttccaaccaagagactcaagctggaatgggtctatgggtacaggggtcgagactgccgtaacaacctgtacttgcttccgacgggagagaccgtctacttcatcgcatccgtggtggtgttatacaacgtggaggagcaactgcagaggcattacgctggccacaacgatgacgtgaagtgcctagcagttcatcctgatcggatcacgatagcaacaggacaagttgcgggcacatcgaaggatggaaaacaattgcccccacatgtgcgcatctgggattctgtgacattgaatactctccacgtcattggaataggtttttttgaccgagcagtcacctgtattgcattctcaaaatctaatggaggaaccaatctctgtgctgtggatgactccaacgaccatgtgctctctgtatgggactggcagaaagaagaaaaactagcagatgtgaagtgctctaatgaagctgtgtttgctgcggatttccaccccacggacaccaacatcatagttacttgtggaaaatcacatctctacttttggacactagaaggaagctcccttaataagaagcaaggattattcgagaaacaagaaaagccaaagtttgtcctctgtgtgactttctctgaaaacggtgacaccattactggagattcaagtggcaacatcttagtatggggaaaaggtacaaatcgaataagctatgcagttcagggggcccatgagggtggcatttttgcactttgtatgttaagagatggcacactggtgtcgggaggtgggaaagaccgaaagctcatttcttggagcggaaactatcaaaaacttcgtaaaacggagattccagaacagtttggtccaatacggacagtggccgaggggaaaggcgatgtgatcttgattggcacaactcgaaactttgtcctgcagggcactctgtcaggggacttcacacccattactcagggtcacactgatgagctctggggactggccatccatgcctcaaaatctcagttcttgacctgtgggcatgacaagcatgccactctctgggacgctgtgggtcaccgtcccgtctgggacaaaataatagaggatccagctcagtcttctggttttcatccttcagggtctgtggttgcagtcggaacactcactgggaggtggtttgtgtttgacacagaaacaaaagacttggtcaccgttcacacagatggaaacgaacagctctctgtaatgcgatactcaccagatgggaatttcttagccataggctcacatgacaactgcatctatatatatggcgttagtgacaacgggaggaagtacacgcgagtgggcaagtgctcgggtcattccagcttcattactcacctggactggtctgtaaactcacagttcctcgtgtcaaattccggagactacgaaatcctctactgggttccctctgcctgtaagcaagtcgtaagtgtggaaactacaagagacattgaatgggctacctatacctgcactttgggattccatgtttttggagtgtggccagaaggctcggacggaaccgacatcaatgccgtctgtcgggcccatgagaagaaactcctgtcaacaggcgacgactttggcaaagtgcacctcttctcatacccctgctcgcagttcagggctccaagccacatctacggcgggcacagcagccatgtcaccaatgtcgatttcctctgtgaagacagccacctcatctccacgggcgggaaagacacaagcatcatgcagtggcgcgtcatttagtacccaccgagagctgtggggagcagcatgggcaaggaagacacagactcgcattacccttggtcactgtgatttctgttttgtttaaaaaattcttacaaacctcaggaaaactgtgccctccgccggctaccttagcttagcgtgtcagcgggcgccacagcggatcagcggttccgtgttcacttttgttgtacaatatatgacacagt

SEQ ID NO: 128948 - DNA, 4064 bp, Homo sapiens
  Payload ID: 5224
  Gene Symbol: EML1
  Gene Name: echinoderm microtubule associated protein like 1
  Uniprot ID: O00423
  ENST ID: ENST00000334192
  CDS Start-End: 135-2639
aaccggcagcagcagccgccacagcagggccggccccagcgccagcgccggtcgcggtcgggctcagctcagtgtgtggtgagcggcggcggcgcggccgggccggggagcgggcgcggcccggcggcctcagcatggaggacggcttctccagctacagcagcctgtacgacacgtcctcgctgctccagttctgcaacgatgacagcgcttctgctgcaagtagcatggaggtgacagaccgcattgcttcactggagcagagagtccagatgcaagaagacgacatccagctgctcaaatcagctctagctgatgtggttcggcggctgaacattactgaggaacagcaggccgtgcttaacaggaaaggacctaccaaagcaagaccactgatgcagaccctgcctttaagaaccacggtcaacaatggcactgtgttaccaaagaaacctactggctctctaccatccccctccggggtcaggaaagaaactgctgtgccagcaaccaaaagattaaacagatctgtgagtcttctcaatgcttgcaaactgaatagatcgacaccaagtaacatcaagaggaccagctcttctgaacgagtgtctcctgggggtcgaagggaaagcaatggggattccagaggaaaccggaatcgcacaggctccaccagcagctcttccagtggcaaaaagaacagtgaaagcaaacccaaggagcctgtattcagtgcagaagaaggctatgtaaaaatgtttcttcgtggacgccctgttaccatgtacatgcccaaagatcaagtggattcttacagcttggaagcaaaagtagaacttccaaccaagagactcaagctggaatgggtctatgggtacaggggtcgagactgccgtaacaacctgtacttgcttccgacgggagagaccgtctacttcatcgcatccgtggtggtgttatacaacgtggaggagcaactgcagaggcattacgctggccacaacgatgacgtgaagtgcctagcagttcatcctgatcggatcacgatagcaacaggacaagttgcgggcacatcgaaggatggaaaacaattgcccccacatgtgcgcatctgggattctgtgacattgaatactctccacgtcattggaataggtttttttgaccgagcagtcacctgtattgcattctcaaaatctaatggaggaaccaatctctgtgctgtggatgactccaacgaccatgtgctctctgtatgggactggcagaaagaagaaaaactagcagatgtgaagtgctctaatgaagctgtgtttgctgcggatttccaccccacggacaccaacatcatagttacttgtggaaaatcacatctctacttttggacactagaaggaagctcccttaataagaagcaaggattattcgagaaacaagaaaagccaaagtttgtcctctgtgtgactttctctgaaaacggtgacaccattactggagattcaagtggcaacatcttagtatggggaaaaggtacaaatcgaataagctatgcagttcagggggcccatgagggtggcatttttgcactttgtatgttaagagatggcacactggtgtcgggaggtgggaaagaccgaaagctcatttcttggagcggaaactatcaaaaacttcgtaaaacggagattccagaacagtttggtccaatacggacagtggccgaggggaaaggcgatgtgatcttgattggcacaactcgaaactttgtcctgcagggcactctgtcaggggacttcacacccattactcagggtcacactgatgagctctggggactggccatccatgcctcaaaatctcagttcttgacctgtgggcatgacaagcatgccactctctgggacgctgtgggtcaccgtcccgtctgggacaaaataatagaggatccagctcagtcttctggttttcatccttcagggtctgtggttgcagtcggaacactcactgggaggtggtttgtgtttgacacagaaacaaaagacttggtcaccgttcacacagatggaaacgaacagctctctgtaatgcgatactcaccagatgggaatttcttagccataggctcacatgacaactgcatctatatatatggcgttagtgacaacgggaggaagtacacgcgagtgggcaagtgctcgggtcattccagcttcattactcacctggactggtctgtaaactcacagttcctcgtgtcaaattccggagactacgaaatcctctactgggttccctctgcctgtaagcaagtcgtaagtgtggaaactacaagagacattgaatgggctacctatacctgcactttgggattccatgtttttggagtgtggccagaaggctcggacggaaccgacatcaatgccgtctgtcgggcccatgagaagaaactcctgtcaacaggcgacgactttggcaaagtgcacctcttctcatacccctgctcgcagttcagggctccaagccacatctacggcgggcacagcagccatgtcaccaatgtcgatttcctctgtgaagacagccacctcatctccacgggcgggaaagacacaagcatcatgcagtggcgcgtcatttagtacccaccgagagctgtggggagcagcatgggcaaggaagacacagactcgcattacccttggtcactgtgatttctgttttgtttaaaaaattcttacaaacctcaggaaaactgtgccctccgccggctaccttagcttagcgtgtcagcgggcgccacagcggatcagcggttccgtgttcacttttgttgtacaatatatgacacagtgcacattgaataccaacaaggttgcaacgtttacattatagccacatcaacagaagtaactggtatattcttagtaacttttctatgaactcttcaaaaatggtcacagaatgccttttaaaacattgtatataatcttcactgtttcaccatctagcttgctaagtcaaatatttatgatgataatgaggtactgaaccacgatggctgttgaggaattggtcctaaaaggacagatcacttcagaagagtgaataactgatttgcacagctgaatcaggagacacaaagatgagactgtgtttggttacattttccaaagtttcattgcattctcccttggggaggctgtgagagagggcttgtatccctcttgtgctaagcagactctactcctaactgacttcaatatttcagcagggtacacaggcgtttccaagtttcagtgacaccgtcctgcctaaccagatgcggtcagcctcttcacacccacctggcttgcatcccccatcccttgttcacacgccctgattcacggtgagacattttgccaccttcttgtgtatattacttggcatgagatgatattgtacttgtataggattctagcaattcataataaatatgtaagactaggctttactgtcttatgcttatggacattgtatatttgtattttatgaccaagtagaccaagtcagaaagatctctctcgagcgtaccataaacctgcagagagaagtctcgaaaggctccaccaggtaccaagggcagctgcttttcctgtcttttgtgcatgggcgacccattacagtatgagataagattgagttctgatgcgttaaacggaggtggcagaaatttgtcaagaaggccttatccatttcgattgtgtgacagattgaaatttattgtttacattggggaatgtatctcaaatttttaaatagaagagtaataaacagactttaaagcaaatattaagatttttactcattcaaggcaagtaaatgaatggaattatctgagctctatggcactggttgtttagagtgactgatgaagtgcaactttcaaaaacatttttgatgacatcaccagcctactgcagaagtgcagggcaccagtaaacaccatgtattattgaagatgaatctgtttgtatgtatccttgtcaaatatattctataatgaaataaaatctgaaaagtgg

SEQ ID NO: 128949 - DNA, 480 bp, Homo sapiens
  Payload ID: 5224
  Gene Symbol: EML1
  Gene Name: echinoderm microtubule associated protein like 1
  ENST ID: ENST00000555096
  CDS Start-End: 65-322
agtgtgtggtgagcggcggcggcgcggccgggccggggagcgggcgcggcccggcggcctcagcatggaggacggcttctccagctacagcagcctgtacgacacgtcctcgctgctccagttctgcaacgatgacagcgcttctgctgcaagtagcatggaggtgacagaccgcattgcttcactggagcagagagtccagatgcaagaagacgacatccagctgctcaaatcagctctagctgatgtggttcggcggctgaacattactgaggaacagcaggccgtgcttaacaggaaaggacctaccaaagaccactgatgcagaccctgcctttaagaaccacggtcaacaatggcactgtgttaccaaagaaacctactggctctctaccatccccctccggggtcaggaaagaaactgctgtgccagcaaccaaaagtaacatcaagaggaccagctcttctgaacgagtgtct

SEQ ID NO: 128950 - DNA, 562 bp, Homo sapiens
  Payload ID: 5224
  Gene Symbol: EML1
  Gene Name: echinoderm microtubule associated protein like 1
  ENST ID: ENST00000557313
  CDS Start-End: 1-230
atgagctctggggactggccatccatgcctcaaaatctcagttcttgacctgtgggcatgacaagcatgccactctctgggacgctgtgggtcaccgtcccgtctgggacaaaataatagagggtctgtggttgcagtcggaacactcactgggaggtggtttgtgtttgacacagaaacaaaagacttggtcaccgttcacacagatggaaacgaacagctctctgtaatgcgatactcaccagatgggaatttcttagccataggctcacatgacaactgcatctatatatatggcgttagtgacaacgggaggaagtacacgcgagtgggcaagtgctcgggtcattccagcttcattactcacctggactggtctgtaaactcacagttcctcgtgtcaaattccggagactacgaaatcctctactgggttccctctgcctgtaagcaagtcgtaagtgtggaaactacaagagacattgaatgggctacctatacctgcactttgggattccatgtttttggagtgtggccagaaggctcggacggaaccgacatc

SEQ ID NO: 128951 - DNA, 1277 bp, Homo sapiens
  Payload ID: 5224
  Gene Symbol: EML1
  Gene Name: echinoderm microtubule associated protein like 1
  ENST ID: ENST00000554479
  CDS Start-End: 141-1277
ggtggccaggccggccggggcgggacgctgcctggggctggacgcggaggagccccaagccctgctgggtgggtgacagccgctgaggctctgagtgaccctgcaggctggtggccagccggccgcccatcttccacaccatgtcggacggcgagggcccctccgccgatgacagcgcttctgctgcaagtagcatggaggtgacagaccgcattgcttcactggagcagagagtccagatgcaagaagacgacatccagctgctcaaatcagctctagctgatgtggttcggcggctgaacattactgaggaacagcaggccgtgcttaacaggaaaggacctaccaaagcaagaccactgatgcagaccctgcctttaagaaccacggtcaacaatggcactgtgttaccaaagaaacctactggctctctaccatccccctccggggtcaggaaagaaactgctgtgccagcaaccaaaagtaacatcaagaggaccagctcttctgaacgagtgtctcctgggggtcgaagggaaagcaatggggattccagaggaaaccggaatcgcacaggctccaccagcagctcttccagtggcaaaaagaacagtgaaagcaaacccaaggagcctgtattcagtgcagaagaaggctatgtaaaaatgtttcttcgtggacgccctgttaccatgtacatgcccaaagatcaagtggattcttacagcttggaagcaaaagtagaacttccaaccaagagactcaagctggaatgggtctatgggtacaggggtcgagactgccgtaacaacctgtacttgcttccgacgggagagaccgtctacttcatcgcatccgtggtggtgttatacaacgtggaggagcaactgcagaggcattacgctggccacaacgatgacgtgaagtgcctagcagttcatcctgatcggatcacgatagcaacaggacaagttgcgggcacatcgaaggatggaaaacaattgcccccacatgtgcgcatctgggattctgtgacattgaatactctccacgtcattggaataggtttttttgaccgagcagtcacctgtattgcattctcaaaatctaatggaggaaccaatctctgtgctgtggatgactccaacgaccatgtgctctctgtatgggactggcagaaagaagaaaaactagcagatgtgaagtgctctaatgaagctgtgtttgctgcggatttccaccccacggacaccaacatcatagttacttgtggaaaa

SEQ ID NO: 128952 - DNA, 568 bp, Homo sapiens
  Payload ID: 5224
  Gene Symbol: EML1
  Gene Name: echinoderm microtubule associated protein like 1
  ENST ID: ENST00000556835
  CDS Start-End: 246-568
gatgttttagctgcgtcgagtcctcaacacgggggacttccagcctggtaccaggatagcctctctggcccagtgtgagcgaaggttcgagctgacttgccagtcccgtgctaagtctcactgaggcagggccttgctgccgcggaaaaacgtgtggacagaggaacgcgccggtcggatgtgggccacagtgagccgcggcgtggaaacggccgaaatatgacagcgcttctgctgcaagtagcatggaggtgacagaccgcattgcttcactggagcagagagtccagatgcaagaagacgacatccagctgctcaaatcagctctagctgatgtggttcggcggctgaacattactgaggaacagcaggccgtgcttaacaggaaaggacctaccaaagcaagaccactgatgcagaccctgcctttaagaaccacggtcaacaatggcactgtgttaccaaagaaacctactggctctctaccatccccctccggggtcaggaaagaaactgctgtgccagcaaccaaaagtaacatcaagaggaccagctcttctgaacgagt

SEQ ID NO: 128953 - DNA, 582 bp, Homo sapiens
  Payload ID: 5224
  Gene Symbol: EML1
  Gene Name: echinoderm microtubule associated protein like 1
  ENST ID: ENST00000554553
  CDS Start-End: 1-366
gtggaggagcaactgcagaggcattacgctggccacaacgatgacgtgaagtgcctagcagttcatcctgatcggatcacgatagcaacaggacaagttgcgggcacatcgaaggatggaaaacaattgcccccacatgtgcgcatctgggattctgtgacattgaatactctccacgtcattggaataggtttttttgaccgagcagtcacctgtattgcattctcaaaatctaatggaggaaccaatctctgtgctgtggatgactccaacgaccatgtgctctctgtatgggactggcagaaagaagaaaaactagcagatgtgaagagatgtgaggcatccgagtccctgtttttcctatagtgctctaatgaagctgtgtttgctgcggatttccaccccacggacaccaacatcatagttacttgtggaaaatcacatctctacttttggacactagaaggaagctcccttaataagaagcaaggattattcgagaaacaagaaaagccaaagtttgtcctctgtgtgactttctctgaaaacggtgacaccattactggagattcaagtggcaac

SEQ ID NO: 128954 - DNA, 539 bp, Homo sapiens
  Payload ID: 5224
  Gene Symbol: EML1
  Gene Name: echinoderm microtubule associated protein like 1
  ENST ID: ENST00000556947
  CDS Start-End: 155-539
aaatgagagtccaggataggtcaagataagaggcagagttttgtcatgttgcctaggctgatatcaaactcctgcgctcaagcagtctgcctacctcagcctcccaaagtgttctctgtgttctctggttggagcacagtaagtgaagggaagaatgatgtacaatgagattggagaggcgaagaagatcacggagaggtttatagaccctgataaggagttggaaattatgattctgaatgacagcgcttctgctgcaagtagcatggaggtgacagaccgcattgcttcactggagcagagagtccagatgcaagaagacgacatccagctgctcaaatcagctctagctgatgtggttcggcggctgaacattactgaggaacagcaggccgtgcttaacaggaaaggacctaccaaagcaagaccactgatgcagaccctgcctttaagaaccacggtcaacaatggcactgtgttaccaaagaaacctactggctctctaccatccccctccggggtcaggaaagaaactgctg

SEQ ID NO: 128955 - DNA, 584 bp, Homo sapiens
  Payload ID: 5224
  Gene Symbol: EML1
  Gene Name: echinoderm microtubule associated protein like 1
  ENST ID: ENST00000556199
  CDS Start-End: 330-584
agaaagcaggagcctggatgggaagaggagcagccaggccgaggtgggcgccgctccccctccccggccctgcccaggtcctcagagagctgggacctgagactcattagtgcctgcataatggatgcctccttctctcttcttggaaatccccagcccatcttgcttaatggccacgagggaagtgggataccggcgctctgctcgtaaagccggcctctgccccccgcatctccccttggaggaggggcggctgggcggcttacacaggggaggcctggtctcttgtcttctgcttcacgacggctggcgcttctgctgcaagtagcatggaggtgacagaccgcattgcttcactggagcagagagtccagatgcaagaagacgacatccagctgctcaaatcagctctagctgatgtggttcggcggctgaacattactgaggaacagcaggccgtgcttaacaggaaaggacctaccaaagcaagaccactgatgcagaccctgcctttaagaaccacggtcaacaatggcactgtgttaccaaagaaacctactggctctctaccatccccctccggg

SEQ ID NO: 128956 - DNA, 406 bp, Homo sapiens
  Payload ID: 5224
  Gene Symbol: EML1
  Gene Name: echinoderm microtubule associated protein like 1
  ENST ID: ENST00000557741
  CDS Start-End: 1-201
ggggtcaggaaagaaactgctgtgccagcaaccaaaagtaacatcaagaggaccagctcttctgaacgagtgtctcctgggggtcgaagggaaagcaatggggattccagaggaaaccggaatcgcacaggctccaccagcagctcttccagtggcaaaaagaacagtgaaagattaaggaggttaagctggtggaggtgaagcccctcacccaagccctagaacacggatccagctggcctcaaaatctgtgctccttccaccatgttaagctgggaagtattggttggaaatgtctatgaagcagtcgcttttgtcccaaataaagtctccagcaacttctaaacattttgaatagatggttcttaaatgaccctatttctaataaaaagctgcttaaggacaa

SEQ ID NO: 128957 - DNA, 964 bp, Homo sapiens
  Payload ID: 5224
  Gene Symbol: EML1
  Gene Name: echinoderm microtubule associated protein like 1
  ENST ID: ENST00000556714
  CDS Start-End: 110-964
cgcggccgggccggggagcgggcgcggcccggcggcctcagcatggaggacggcttctccagctacagcagcctgtacgacacatgacagcgcttctgctgcaagtagcatggaggtgacagaccgcattgcttcactggagcagagagtccagatgcaagaagacgacatccagctgctcaaatcagctctagctgatgtggttcggcggctgaacattactgaggaacagcaggccgtgcttaacaggaaaggacctaccaaagcaagaccactgatgcagaccctgcctttaagaaccacggtcaacaatggcactgtgttaccaaagaaacctactggctctctaccatccccctccggggtcaggaaagaaactgctgtgccagcaaccaaaagtaacatcaagaggaccagctcttctgaacgagtgtctcctgggggtcgaagggaaagcaatggggattccagaggaaaccggaatcgcacaggctccaccagcagctcttccagtggcaaaaagaacagtgaaagcaaacccaaggagcctgtattcagtgcagaagaaggctatgtaaaaatgtttcttcgtggacgccctgttaccatgtacatgcccaaagatcaagtggattcttacagcttggaagcaaaagtagaacttccaaccaagagactcaagctggaatgggtctatgggtacaggggtcgagactgccgtaacaacctgtacttgcttccgacgggagagaccgtctacttcatcgcatccgtggtggtgttatacaacgtggaggagcaactgcagaggcattacgctggccacaacgatgacgtgaagtgcctagcagttcatcctgatcggatcacgatagcaacaggacaagttgcgggcacatcgaaggatggaaaacaattgcccccacatgtgcgcatctgggattctgtgacattgaatactctc

SEQ ID NO: 128958 - DNA, 553 bp, Homo sapiens
  Payload ID: 5224
  Gene Symbol: EML1
  Gene Name: echinoderm microtubule associated protein like 1
  ENST ID: ENST00000555145
  CDS Start-End: 85-553
aagccctgctgggtgggtgacagccgctgaggctctgagtgaccctgcaggctggtggccagccggccgcccatcttccacaccatgtcggacggcgagggcccctccgccgatgacagcgcttctgctgcaagtagcatggaggtgacagaccgcattgcttcactggagcagagagtccagatgcaagaagacgacatccagctgctcaaatcagctctagctgatgtggttcggcggctgaacattactgaggaacagcaggccgtgcttaacaggaaaggacctaccaaagcaagaccactgatgcagaccctgcctttaagaaccacggtcaacaatggcactgtgttaccaaagaaacctactggctctctaccatccccctccggggtcaggaaagaaactgctgtgccagcaaccaaaagattaaacagatctgtgagtcttctcaatgcttgcaaactgaatagatcgacaccaagtaacatcaagaggaccagctcttctgaacgagtgtctcctgggggtcgaagggaaagcaatggggatt

SEQ ID NO: 128959 - DNA, 501 bp, Homo sapiens
  Payload ID: 5224
  Gene Symbol: EML1
  Gene Name: echinoderm microtubule associated protein like 1
  ENST ID: ENST00000553720
  CDS Start-End: 225-501
attctggctgaagtaagggatgagacagcatgcccagaagctgtgtccagcacttggacaggcgccctggtcggcaccctgggaacctcggccgtgcactgccagctttctgggtccatcccagccctgggtgtatggcagatgccttgagatttaacagcccttgagtcaggcctgcaacgtcttatctgcgatttcaacatccagaaagctgtgaaacccagatgttttttgatgacagcgcttctgctgcaagtagcatggaggtgacagaccgcattgcttcactggagcagagagtccagatgcaagaagacgacatccagctgctcaaatcagctctagctgatgtggttcggcggctgaacattactgaggaacagcaggccgtgcttaacaggaaaggacctaccaaagcaagaccactgatgcagaccctgcctttaagaaccacggtcaacaatggcactgtgttaccaaagaaacctactggctctctac

SEQ ID NO: 128960 - DNA, 546 bp, Homo sapiens
  Payload ID: 5224
  Gene Symbol: EML1
  Gene Name: echinoderm microtubule associated protein like 1
  ENST ID: ENST00000554386
  CDS Start-End: 1-546
cctagcagttcatcctgatcggatcacgatagcaacaggacaagttgcgggcacatcgaaggatggaaaacaattgcccccacatgtgcgcatctgggattctgtgacattgaatactctccacgtcattggaataggtttttttgaccgagcagtcacctgtattgcattctcaaaatcttgctctaatgaagctgtgtttgctgcggatttccaccccacggacaccaacatcatagttacttgtggaaaatcacatctctacttttggacactagaaggaagctcccttaataagaagcaaggattattcgagaaacaagaaaagccaaagtttgtcctctgtgtgactttctctgaaaacggtgacaccattactggagattcaagtggcaacatcttagtatggggaaaaggtacaaatcgaataagctatgcagttcagggggcccatgagggtggcatttttgcactttgtatgttaagagatggcacactggtgtcgggaggtgggaaagaccgaaagctcatttcttggagcggaaa

SEQ ID NO: 128961 - DNA, 2264 bp, Homo sapiens
  Payload ID: 5225
  Gene Symbol: EML2
  Gene Name: echinoderm microtubule associated protein like 2
  Uniprot ID: O95834
  ENST ID: ENST00000245925
  CDS Start-End: 52-2001
agagccggtcccggctccacccccggccccgaagctccgccacccgccgccatgagtagctttggagctggcaaaaccaaagaagttatcttcagtgtggaggatggctccgtgaaaatgttcctgaggggccgccctgtgcccatgatgatcccagacgagctggcacccacctacagcctggacacacgctcggagctgccttcttgccggctcaagctggagtgggtctatggctaccgtggccgagactgccgggccaacctttatttgctgcccaccggggagatagtgtactttgtggcctccgtagccgtgctatacagcgtggaggagcagaggcagcgacactacctgggacacaacgatgacatcaaatgcttggccatccacccagatatggtcaccatcgccacgggacaggtggcgggaaccactaaggaagggaagccgctgccgccccacgtgcgcatctgggactcagtttccctctccaccttacacgtgctgggcttgggggtgtttgacagagccgtgtgctgtgtgggcttctccaaatctaatggaggcaacctgctgtgtgcagtggatgaatccaatgatcacatgctctcggtgtgggactgggccaaggagaccaaggtggtggatgtcaagtgctccaatgaggctgtattggtggccaccttccaccccacggaccccactgtgcttatcacctgcgggaaatctcacatctacttctggaccttggaggggggcagcttgagcaagcggcaaggcctctttgagaaacatgagaaaccgaagtatgtgctgtgtgtgacctttttggaaggtggcgacgtggtcacgggggactctggggggaacctctatgtttggggcaaaggtgggaaccgtatcacacaggcggtgctgggcgcccacgacggcggcgtgtttgggctctgcgccctgcgggacgggacgctggtgtctggagggggccgtgatcggcgggtggtcctctggggttctgactacagcaagctgcaggaagtggaggtccctgaggactttggccctgtgcgcaccgtggcagagggccacggagacacactgtacgtggggaccacccgcaattccatcctgcagggctccgtgcacacaggcttctcactgctggtccagggccatgtggaagagctgtggggcctggccacacaccccagtcgggcccagtttgtgacctgcgggcaggataagctggtgcatctatggagctcagattcccaccagcccctgtggagcaggatcatcgaggaccctgcccgctcagccggcttccaccccagtggctctgtcctggctgtgggtacagtgactggcagatggctgctgctggacacggagacccatgacctggtggctatccacacagacggcaatgaacagatctcagtggtcagcttctccccagacggggcgtacctggccgtgggctcccacgacaacttggtgtacgtgtacacggtggaccagggcggccgcaaggtcagccgcctgggcaagtgctcgggccattccagttttatcacccacctggattgggcccaggacagcagctgctttgtcaccaactccggggactatgagattctgtactgggacccggctacctgtaagcagatcaccagtgcggatgctgtgaggaacatggaatgggccacagctacttgtgtcctagggtttggggtgtttgggatctggtctgagggggcggacggcactgatatcaacgctgtggcccgctctcatgatgggaagttgctggcttcagctgatgactttggcaaagttcacctgtttagctacccctgctgtcagcctcgagccctcagccacaagtacggtggacacagcagccatgtgacaaatgtggccttcttgtgggatgacagcatggccctgaccacagggggcaaggacaccagtgtgctacagtggcgggtggtctgatgcggccagggaagagtcaggtgtcagggcaggaattctattttcgggagatgtctattgccgagtagagtaatatatacccagagtatgtctatagcagagggggttatgggggcgggagggtagactgacatacagaagtctctatttatccgggtgggaagagggagtcacatcgctttggggatccattggtgtttggtttggggtgttttttaagttttttcttttatatcatccagaaataaagacacgtacactaa

SEQ ID NO: 128962 - DNA, 2232 bp, Homo sapiens
  Payload ID: 5225
  Gene Symbol: EML2
  Gene Name: echinoderm microtubule associated protein like 2
  ENST ID: ENST00000399594
  CDS Start-End: 167-1978
atagcagggggacagacagagggggtgggggtggatttggtgttgagttgagggcagagtgtgggactggaaagggacggccagaggactttgcttctaggatacctcccaaatcctctggccctggccctcccatgcattagcaccatcccttctccctagacaaatgggtgtgataccagaaggaccactgtgggtgtcgggctcagatgacaatttgtcgggcacgagcggtatggaagtggacgaccgcgtgtcggcgctggagcagcggctgcagttacaggaagacgagctggcggtcctaaaggcggcgctggcggatgctctgcgtcgcctgcgggcatgcgaagaacagggagcggcgctacgcgcgcggggcacccccaagggccgggcgcctccgcgcttaggcaccactgcctcggtgtgtcagctcttgaaaggccttcccaccaggacgccccttaatggctcgggacccccgcggcgcgtgggtggctatgccacgtccccatcctctcccaagaaggaggcgacctccgggcgcagcagtgtccgccgctacttgtcaccagagcgcctcgcctcggtgcgccgtgaggacccccgcagccggaccacatcctccagcagcaactgtagcgccaaaaaggaaggcaaaaccaaagaagttatcttcagtgtggaggatggctccgtgaaaatgttcctgaggggccgccctgtgcccatgatgatcccagacgagctggcacccacctacagcctggacacacgctcggagctgccttcttgccggctcaagctggagtgggtctatggctaccgtggccgagactgccgggccaacctttatttgctgcccaccggggagatagtgtactttgtggcctccgtagccgtgctatacagcgtggaggagcagaggcagcgacactacctgggacacaacgatgacatcaaatgcttggccatccacccagatatggtcaccatcgccacgggacaggtggcgggaaccactaaggaagggaagccgctgccgccccacgtgcgcatctgggactcagtttccctctccaccttacacgtgctgggcttgggggtgtttgacagagccgtgtgctgtgtgggcttctccaaatctaatggaggcaacctgctgtgtgcagtggatgaatccaatgatcacatgctctcggtgtgggactgggccaaggagaccaaggtggtggatgtcaagtgctccaatgaggctgtattggtggccaccttccaccccacggaccccactgtgcttatcacctgcgggaaatctcacatctacttctggaccttggaggggggcagcttgagcaagcggcaaggcctctttgagaaacatgagaaaccgaagtatgtgctgtgtgtgacctttttggaaggtggcgacgtggtcacgggggactctggggggaacctctatgtttggggcaaaggtgggaaccgtatcacacaggcggtgctgggcgcccacgacggcggcgtgtttgggctctgcgccctgcgggacgggacgctggtgtctggagggggccgtgatcggcgggtggtcctctggggttctgactacagcaagctgcaggaagtggaggtccctgaggactttggccctgtgcgcaccgtggcagagggccacggagacacactgtacgtggggaccacccgcaattccatcctgcagggctccgtgcacacaggcttctcactgctggtccagggccatgtggaagagctgtggggcctggccacacaccccagtcgggcccagtttgtgacctgcgggcaggataagctggtgcatctatggagctcagattcccaccagcccctgtggagcaggatcatcgaggtggagtctcgctctgtcacccaggctggagggcaatggcacgatctcggctcactgcaacctccgcctcccgggttcaagtgattcttctgcctcagcctcccgagtagctgggattacaggaccctgcccgctcagccggcttccaccccagtggctctgtcctggctgtgggtacagtgactggcagatggctgctgctggacacggagacccatgacctggtggctatccacacagacggcaatgaacagatctcagtggtcagcttctccccagacggggcgtacctggccgtgggctcccacgacaacttggtgtacgtgtacacggtggac

SEQ ID NO: 128963 - DNA, 2791 bp, Homo sapiens
  Payload ID: 5225
  Gene Symbol: EML2
  Gene Name: echinoderm microtubule associated protein like 2
  Uniprot ID: O95834
  ENST ID: ENST00000536630
  CDS Start-End: 140-2530
actgcggagcccagagggccagctgcgcggcctgtggacgcgggatggcaggggcgagctccacgccctgtccccgtctaagctaccacctttacttccaccaggctgggaaccagggcttccttggttgtggtcagcaatgagtctggatgacaatttgtcgggcacgagcggtatggaagtggacgaccgcgtgtcggcgctggagcagcggctgcagttacaggaagacgagctggcggtcctaaaggcggcgctggcggatgctctgcgtcgcctgcgggcatgcgaagaacagggagcggcgctacgcgcgcggggcacccccaagggccgggcgcctccgcgcttaggcaccactgcctcggtgtgtcagctcttgaaaggccttcccaccaggacgccccttaatggctcgggacccccgcggcgcgtgggtggctatgccacgtccccatcctctcccaagaaggaggcgacctccgggcgcagcagtgtccgccgctacttgtcaccagagcgcctcgcctcggtgcgccgtgaggacccccgcagccggaccacatcctccagcagcaactgtagcgccaaaaaggaaggcaaaaccaaagaagttatcttcagtgtggaggatggctccgtgaaaatgttcctgaggggccgccctgtgcccatgatgatcccagacgagctggcacccacctacagcctggacacacgctcggagctgccttcttgccggctcaagctggagtgggtctatggctaccgtggccgagactgccgggccaacctttatttgctgcccaccggggagatagtgtactttgtggcctccgtagccgtgctatacagcgtggaggagcagaggcagcgacactacctgggacacaacgatgacatcaaatgcttggccatccacccagatatggtcaccatcgccacgggacaggtggcgggaaccactaaggaagggaagccgctgccgccccacgtgcgcatctgggactcagtttccctctccaccttacacgtgctgggcttgggggtgtttgacagagccgtgtgctgtgtgggcttctccaaatctaatggaggcaacctgctgtgtgcagtggatgaatccaatgatcacatgctctcggtgtgggactgggccaaggagaccaaggtggtggatgtcaagtgctccaatgaggctgtattggtggccaccttccaccccacggaccccactgtgcttatcacctgcgggaaatctcacatctacttctggaccttggaggggggcagcttgagcaagcggcaaggcctctttgagaaacatgagaaaccgaagtatgtgctgtgtgtgacctttttggaaggtggcgacgtggtcacgggggactctggggggaacctctatgtttggggcaaaggtgggaaccgtatcacacaggcggtgctgggcgcccacgacggcggcgtgtttgggctctgcgccctgcgggacgggacgctggtgtctggagggggccgtgatcggcgggtggtcctctggggttctgactacagcaagctgcaggaagtggaggtccctgaggactttggccctgtgcgcaccgtggcagagggccacggagacacactgtacgtggggaccacccgcaattccatcctgcagggctccgtgcacacaggcttctcactgctggtccagggccatgtggaagagctgtggggcctggccacacaccccagtcgggcccagtttgtgacctgcgggcaggataagctggtgcatctatggagctcagattcccaccagcccctgtggagcaggatcatcgaggaccctgcccgctcagccggcttccaccccagtggctctgtcctggctgtgggtacagtgactggcagatggctgctgctggacacggagacccatgacctggtggctatccacacagacggcaatgaacagatctcagtggtcagcttctccccagacggggcgtacctggccgtgggctcccacgacaacttggtgtacgtgtacacggtggaccagggcggccgcaaggtcagccgcctgggcaagtgctcgggccattccagttttatcacccacctggattgggcccaggacagcagctgctttgtcaccaactccggggactatgagattctgtactgggacccggctacctgtaagcagatcaccagtgcggatgctgtgaggaacatggaatgggccacagctacttgtgtcctagggtttggggtgtttgggatctggtctgagggggcggacggcactgatatcaacgctgtggcccgctctcatgatgggaagttgctggcttcagctgatgactttggcaaagttcacctgtttagctacccctgctgtcagcctcgagccctcagccacaagtacggtggacacagcagccatgtgacaaatgtggccttcttgtgggatgacagcatggccctgaccacagggggcaaggacaccagtgtgctacagtggcgggtggtctgatgcggccagggaagagtcaggtgtcagggcaggaattctattttcgggagatgtctattgccgagtagagtaatatatacccagagtatgtctatagcagagggggttatgggggcgggagggtagactgacatacagaagtctctatttatccgggtgggaagagggagtcacatcgctttggggatccattggtgtttggtttggggtgttttttaagttttttcttttatatcatccagaaataaagacacgtacact

SEQ ID NO: 128964 - DNA, 543 bp, Homo sapiens
  Payload ID: 5225
  Gene Symbol: EML2
  Gene Name: echinoderm microtubule associated protein like 2
  ENST ID: ENST00000590575
  CDS Start-End: 1-543
tttttggaaggtggcgacgtggtcacgggggactctggggggaacctctatgtttggggcaaaggtgggaaccgtatcacacaggcggtgctgggcgcccacgacggcggcgtgtttgggctctgcgccctgcgggacgggacgctggtgtctggagggggccgtgatcggcgggtggtcctctggggttctgactacagcaagctgcaggaagtggaggtccctgaggactttggccctgtgcgcaccgtggcagagggccacggagacacactgtacgtggggaccacccgcaattccatcctgcagggctccgtgcacacaggcttctcactgctggtccaggaccctgcccgctcagccggcttccaccccagtggctctgtcctggctgtgggtacagtgactggcagatggctgctgctggacacggagacccatgacctggtggctatccacacagacggcaatgaacagatctcagtggtcagcttctccccagacggggcgtacctggccgtgggctcccacgacaacttggtg

SEQ ID NO: 128965 - DNA, 2364 bp, Homo sapiens
  Payload ID: 5225
  Gene Symbol: EML2
  Gene Name: echinoderm microtubule associated protein like 2
  ENST ID: ENST00000589876
  CDS Start-End: 28-2349
ggccccgaagctccgccacccgccgccatgagtagctttggagctggcaaaaccaaagaagttatcttcagtgtggaggatggctccgtgaaaatgttcctgaggggccgccctgtgcccatgatgatcccagacgagctggcacccacctacagcctggacacacgctcggagctgccttcttgccggctcaagctggagtgggtctatggctaccgtggccgagactgccgggccaacctttatttgctgcccaccggggagatagtgtactttgtggcctccgtagccgtgctatacagcgtggaggagcagaggcagcgacactacctgggacacaacgatgacatcaaatgcttggccatccacccagatatggtcaccatcgccacgggacaggtggcgggaaccactaaggaagggaagccgctgccgccccacgtgcgcatctgggactcagtttccctctccaccttacacgtgctgggcttgggggtgtttgacagagccgtgtgctgtgtgggcttctccaaatctaatggaggcaacctgctgtgtgcagtggatgaatccaatgatcacatgctctcggtgtgggactgggccaaggagaccaaggtggtggatgtcaagtgctccaatgaggctgtattggtggccaccttccaccccacggaccccactgtgcttatcacctgcgggaaatctcacatctacttctggaccttggaggggggcagcttgagcaagcggcaaggcctctttgagaaacatgagaaaccgaagtatgtgctgtgtgtgacctttttggaaggtggcgacgtggtcacgggggactctggggggaacctctatgtttggggcaaaggtgggaaccgtatcacacaggcggtgctgggcgcccacgacggcggcgtgtttgggctctgcgccctgcgggacgggacgctggtgtctggagggggccgtgatcggcgggtggtcctctggggttctgactacagcaagctgcaggaagtggaggtccctgaggactttggccctgtgcgcaccgtggcagagggccacggagacacactgtacgtggggaccacccgcaattccatcctgcagggctccgtgcacacaggcttctcactgctggtccagggccatgtggaagagctgtggggcctggccacacaccccagtcgggcccagtttgtgacctgcgggcaggataagctggtgcatctatggagctcagattcccaccagcccctgtggagcaggatcatcgaggaccctgcccgctcagccggcttccaccccagtggctctgtcctggctgtgggtacagtgactggcagatggctgctgctggacacggagacccatgacctggtggctatccacacagacggcaatgaacagatctcagtggtcagcttctccccagacggggcgtacctggccgtgggctcccacgacaacttggtgtacgtgtacacggtggaccagggcggccgcaaggtcagccgcctgggcaagtgctcgggccattccagttttatcacccacctggattgggcccaggacagcagctgctttgtcaccaactccggggactatgagattctgtactgggacccggctacctgtaagcagatcaccagtgcggatgctgtgaggaacatggaatgggccacagctacttgtgtcctagggtttggggtgtttgggatctggtctgagggggcggacggcactgatatcaacgctgtggcccgctctcatgatgggaagttgctggcttcagctgatgactttggcaaagttcacctgtttagctacccctgctgtcagcctcgagttctgggaaagtggcccagcgctgcggaagcggccctttcatcgggcatccgggtgctctttcgacccctcgtggccagtcttggacctgcatggaaaaatgtgccaagaaagttctgctggaaaagtgctggtgattctccacgtgaccctcctccgcgcccccagggtcactctcagccttccttccccagctcggggccctgggagaccgccgtgtgcaaattctatcggcagggtcggtggagagaggtcagggtatttgcttcctgggcccctccctgcatcccgcactcacagtggctgtggttcccctcctctgagccgcagttcctctgggaactcgagctgtccctggagacgggtaacagactccctccctgtcccttctgccctaggctggcgatggcttcgtgcccacttcggatggtcccctggggccgccccatcctttgtggctttctccactctgcccatccctctataaactgcccataaatgctcccagttaaa

SEQ ID NO: 128966 - DNA, 482 bp, Homo sapiens
  Payload ID: 5225
  Gene Symbol: EML2
  Gene Name: echinoderm microtubule associated protein like 2
  ENST ID: ENST00000590043
  CDS Start-End: 150-482
gaagctccgccacccgccgccatgagtagctttggagctgggtgagaccctttcgcagaccaccccccatctcctctccgcgctcccggggcttagatctcagcaaaaccaaagaagttatcttcagtgtggaggatggctccgtgaaaatgttcctgaggggccgccctgtgcccatgatgatcccagacgagctggcacccacctacagcctggacacacgctcggagctgccttcttgccggctcaagctggagtgggtctatggctaccgtggccgagactgccgggccaacctttatttgctgcccaccggggagatagtgtactttgtggcctccgtagccgtgctatacagcgtggaggagcagaggcagcgacactacctgggacacaacgatgacatcaaatgcttggccatccacccagatatggtcaccatcgccacgggacaggtggcgggaaccactaaggaagggaag

SEQ ID NO: 128967 - DNA, 626 bp, Homo sapiens
  Payload ID: 5225
  Gene Symbol: EML2
  Gene Name: echinoderm microtubule associated protein like 2
  ENST ID: ENST00000590819
  CDS Start-End: 1-156
tggaccttggaggggggcagcttgagcaagcggcaaggcctctttgagaaacatgagaaaccgaagtatgtgctgtgtgtgacctttttggaaggtggcgacgtggtcacgggggactctggggggaacctctatgtttggggcaaaggtccctgaggactttggccctgtgcgcaccgtggcagagggccacggagacacactgtacgtggggaccacccgcaattccatcctgcagggctccgtgcacacaggcttctcactgctggtccagggccatgtggaagagctgtggggcctggccacacaccccagtcgggcccagtttgtgacctgcgggcaggataagctggtgcatctatggagctcagattcccaccagcccctgtggagcaggatcatcgaggaccctgcccgctcagccggcttccaccccagtggctctgtcctggctgtgggtacagtgactggcagatggctgctgctggacacggagacccatgacctggtggctatccacacagacggcaatgaacagatctcagtggtcagcttctccccagacggggcgtacctggccgtgggctcccacgacaacttggtgtacgtgtacacggtggaccagg

SEQ ID NO: 128968 - DNA, 1952 bp, Homo sapiens
  Payload ID: 5225
  Gene Symbol: EML2
  Gene Name: echinoderm microtubule associated protein like 2
  ENST ID: ENST00000586195
  CDS Start-End: 20-457
agctccgccacccgccgccatgagtagctttggagctggcaaaaccaaagaagttatcttcagtgtggcttggccatccacccagatatggtcaccatcgccacgggacaggtggcgggaaccactaaggaagggaagccgctgccgccccacgtgcgcatctgggactcagtttccctctccaccttacacgtgctgggcttgggggtgtttgacagagccgtgtgctgtgtgggcttctccaaatctaatggaggcaacctgctgtgtgcagtggatgaatccaatgatcacatgctctcggtgtgggactgggccaaggagaccaaggtggtggatgtcaagtgctccaatgaggctgtattggtggccaccttccaccccacggaccccactgtgcttatcacctgcgggaaatctcacatctacttctggaccttggaggggggcagcttgagcaagcggcaaggcctctttgagaaacatgagaaaccgaagtatgtgctgtgtgtgacctttttggaaggtggcgacgtggtcacgggggactctggggggaacctctatgtttggggcaaaggtgggaaccgtatcacacaggcggtgctgggcgcccacgacggcggcgtgtttgggctctgcgccctgcgggacgggacgctggtgtctggagggggccgtgatcggcgggtggtcctctggggttctgactacagcaagctgcaggaagtggaggtccctgaggactttggccctgtgcgcaccgtggcagagggccacggagacacactgtacgtggggaccacccgcaattccatcctgcagggctccgtgcacacaggcttctcactgctggtccagggccatgtggaagagctgtggggcctggccacacaccccagtcgggcccagtttgtgacctgcgggcaggataagctggtgcatctatggagctcagattcccaccagcccctgtggagcaggatcatcgaggaccctgcccgctcagccggcttccaccccagtggctctgtcctggctgtgggtacagtgactggcagatggctgctgctggacacggagacccatgacctggtggctatccacacagacggcaatgaacagatctcagtggtcagcttctccccagacggggcgtacctggccgtgggctcccacgacaacttggtgtacgtgtacacggtggaccagggcggccgcaaggtcagccgcctgggcaagtgctcgggccattccagttttatcacccacctggattgggcccaggacagcagctgctttgtcaccaactccggggactatgagattctgtactgggacccggctacctgtaagcagatcaccagtgcggatgctgtgaggaacatggaatgggccacagctacttgtgtcctagggtttggggtgtttgggatctggtctgagggggcggacggcactgatatcaacgctgtggcccgctctcatgatgggaagttgctggcttcagctgatgactttggcaaagttcacctgtttagctacccctgctgtcagcctcgagccctcagccacaagtacggtggacacagcagccatgtgacaaatgtggccttcttgtgggatgacagcatggccctgaccacagggggcaaggacaccagtgtgctacagtggcgggtggtctgatgcggccagggaagagtcaggtgtcagggcaggaattctattttcgggagatgtctattgccgagtagagtaatatatacccagagtatgtctatagcagagggggttatgggggcgggagggtagactgacatacagaagtctctatttatccgggtgggaagagggagtcacatcgctttggggatccattggtgtttggtttggggtgttttttaagttttttcttttatatcatccagaaataaagacacgtacactaa

SEQ ID NO: 128969 - DNA, 669 bp, Homo sapiens
  Payload ID: 5225
  Gene Symbol: EML2
  Gene Name: echinoderm microtubule associated protein like 2
  ENST ID: ENST00000588496
  CDS Start-End: 1-669
atcgccacgggacaggtggcgggaaccactaaggaagggaagccgctgccgccccacgtgcgcatctgggactcagtttccctctccaccttacacgtgctgggcttgggggtgtttgacagagccgtgtgctgtgtgggcttctccaaatcttgctccaatgaggctgtattggtggccaccttccaccccacggaccccactgtgcttatcacctgcgggaaatctcacatctacttctggaccttggaggggggcagcttgagcaagcggcaaggcctctttgagaaacatgagaaaccgaagtatgtgctgtgtgtgacctttttggaaggtggcgacgtggtcacgggggactctggggggaacctctatgtttggggcaaaggtgggaaccgtatcacacaggcggtgctgggcgcccacgacggcggcgtgtttgggctctgcgccctgcgggacgggacgctggtgtctggagggggccgtgatcggcgggtggtcctctggggttctgactacagcaagctgcaggaagtggaggtccctgaggactttggccctgtgcgcaccgtggcagagggccacggagacacactgtacgtggggaccacccgcaattccatcctgcagggctccgtgcacacaggcttctcactgctggtccag

SEQ ID NO: 128970 - DNA, 952 bp, Homo sapiens
  Payload ID: 5225
  Gene Symbol: EML2
  Gene Name: echinoderm microtubule associated protein like 2
  ENST ID: ENST00000586770
  CDS Start-End: 278-952
acttcgtgctgtgtgatctttggcgatcactgcctctctgggcctgtgtcttaggctctgcaagatcaaccgagcaaagcacacggcctgcagagaggcagcgctctgccccttactcggccccgttttcatcggagacctccggggagcggtgggggtggaggaatggtttctccccttttctgaactgaatactaagaccctttttttttctttgtcctttcctgacagcaaaaccaaagaagttatcttcagtgtggaggatggctccgtgaaaatgttcctgaggggccgccctgtgcccatgatgatcccagacgagctggcacccacctacagcctggacacacgctcggagctgccttcttgccggctcaagctggagtgggtctatggctaccgtggccgagactgccgggccaacctttatttgctgcccaccggggagatagtgtactttgtggcctccgtagccgtgctatacagcgtggaggagcagaggcagcgacactacctgggacacaacgatgacatcaaatgcttggccatccacccagatatggtcaccatcgccacgggacaggtggcgggaaccactaaggaagggaagccgctgccgccccacgtgcgcatctgggactcagtttccctctccaccttacacgtgctgggcttgggggtgtttgacagagccgtgtgctgtgtgggcttctccaaatctaatggaggcaacctgctgtgtgcagtggatgaatccaatgatcacatgctctcggtgtgggactgggccaaggagaccaaggtggtggatgtcaagtgctccaatgaggctgtattggtggccaccttccaccccacggaccccactgtgcttatcacctgcgggaaatctcacatctacttctggaccttggaggggggcagcttgagcaagcggcaaggcctctttgag

SEQ ID NO: 128971 - DNA, 630 bp, Homo sapiens
  Payload ID: 5225
  Gene Symbol: EML2
  Gene Name: echinoderm microtubule associated protein like 2
  ENST ID: ENST00000586405
  CDS Start-End: 1-230
gcggccgcaaggtcagccgcctgggcaagtgctcgggccattccagttttatcacccacctggattgggcccaggacagcagctgctttgtcaccaactccggggactatgagattctgtacttagagatggggtttcaccatcttggccaggctggtctcgaactcctgacctcaggtgatccagccagatgctgtggctcatgctgcctcctgggattacagacgtgagccaccatgcccggccagatgcgggtttaaaagtagatgctcctgcttacgctgcgggctgtgaagaccccagcatgtgatgccttctcagccagtcctgacaggggacccggctacctgtaagcagatcaccagtgcggatgctgtgaggaacatggaatgggccacagctacttgtgtcctagggtttggggtgtttgggatctggtctgagggggcggacggcactgatatcaacgctgtggcccgctctcatgatgggaagttgctggcttcagctgatgactttggcaaagttcacctgtttagctacccctgctgtcagcctcgagccctcagccacaagtacggtggacacagcagccatgtgacaaatgtggccttcttgtgggatgacagc

SEQ ID NO: 128972 - DNA, 219 bp, Homo sapiens
  Payload ID: 5225
  Gene Symbol: EML2
  Gene Name: echinoderm microtubule associated protein like 2
  ENST ID: ENST00000587484
  CDS Start-End: 1-219
ccaccagcccctgtggagcaggatcatcgaggaccctgcccgctcagccggcttccaccccagtggctctgtcctggctgtgggtacagtgactggcagatggctgctgctggacacggagacccatgacctggtggctatccacacagacggcaatgaacagatctcagtggtcagcttctccccagggccattccagttttatcacccacctggatt

SEQ ID NO: 128973 - DNA, 361 bp, Homo sapiens
  Payload ID: 5225
  Gene Symbol: EML2
  Gene Name: echinoderm microtubule associated protein like 2
  ENST ID: ENST00000588272
  CDS Start-End: 1-361
gctgtgtgcagtggatgaatccaatgatcacatgctctcggtgtgggactgggccaaggagaccaaggtggtggatgtcaaggtccctgaggactttggccctgtgcgcaccgtggcagagggccacggagacacactgtacgtggggaccacccgcaattccatcctgcagggctccgtgcacacaggcttctcactgctggtccagggccatgtggaagagctgtggggcctggccacacaccccagtcgggcccagtttgtgacctgcgggcaggataagctggtgcatctatggagctcagattcccaccagcccctgtggagcaggatcatcgaggaccctgcccgctcagccggc

SEQ ID NO: 128974 - DNA, 553 bp, Homo sapiens
  Payload ID: 5225
  Gene Symbol: EML2
  Gene Name: echinoderm microtubule associated protein like 2
  ENST ID: ENST00000593255
  CDS Start-End: 155-553
acatttcaactctgctcaaacatagcaaacacaaatacagcgttgtgtatactccaggcacttcccaataattaaccaatttcaccctcgcaactacccccgggaggtcaaaaccaaagaagttatcttcagtgtggaggatggctccgtgaaaatgttcctgaggggccgccctgtgcccatgatgatcccagacgagctggcacccacctacagcctggacacacgctcggagctgccttcttgccggctcaagctggagtgggtctatggctaccgtggccgagactgccgggccaacctttatttgctgcccaccggggagatagtgtactttgtggcctccgtagccgtgctatacagcgtggaggagcagaggcagcgacactacctgggacacaacgatgacatcaaatgcttggccatccacccagatatggtcaccatcgccacgggacaggtggcgggaaccactaaggaagggaagccgctgccgccccacgtgcgcatctgggactcagtttccctctccaccttacacgtgctgggcttg

SEQ ID NO: 128975 - DNA, 2763 bp, Homo sapiens
  Payload ID: 5225
  Gene Symbol: EML2
  Gene Name: echinoderm microtubule associated protein like 2
  Uniprot ID: O95834
  ENST ID: ENST00000587152
  CDS Start-End: 186-2738
atactccggttgtgggcgggaccagacggtacctagggggatccgggcgcagccaatcctggccctaggattgtgttggggggcttggcaggcggtgtcccgacccccctttctgggcatcctggggatgaccccagcgccgggcccggcgccggccgcctgatgccaggcgagctgagctggggatgctggaacgaagggcgttgctatggcaacgggaggcagggcctggttggggggaccgggcccgggctgggaccgggggggccggcggtggctgtggtggggcgatggcggagcgcggcccggccttctgcggcctgtacgacacgtcctcgctgctgcgatactgcaacgatgacaatttgtcgggcacgagcggtatggaagtggacgaccgcgtgtcggcgctggagcagcggctgcagttacaggaagacgagctggcggtcctaaaggcggcgctggcggatgctctgcgtcgcctgcgggcatgcgaagaacagggagcggcgctacgcgcgcggggcacccccaagggccgggcgcctccgcgcttaggcaccactgcctcggtgtgtcagctcttgaaaggccttcccaccaggacgccccttaatggctcgggacccccgcggcgcgtgggtggctatgccacgtccccatcctctcccaagaaggaggcgacctccgggcgcagcagtgtccgccgctacttgtcaccagagcgcctcgcctcggtgcgccgtgaggacccccgcagccggaccacatcctccagcagcaactgtagcgccaaaaaggaaggcaaaaccaaagaagttatcttcagtgtggaggatggctccgtgaaaatgttcctgaggggccgccctgtgcccatgatgatcccagacgagctggcacccacctacagcctggacacacgctcggagctgccttcttgccggctcaagctggagtgggtctatggctaccgtggccgagactgccgggccaacctttatttgctgcccaccggggagatagtgtactttgtggcctccgtagccgtgctatacagcgtggaggagcagaggcagcgacactacctgggacacaacgatgacatcaaatgcttggccatccacccagatatggtcaccatcgccacgggacaggtggcgggaaccactaaggaagggaagccgctgccgccccacgtgcgcatctgggactcagtttccctctccaccttacacgtgctgggcttgggggtgtttgacagagccgtgtgctgtgtgggcttctccaaatctaatggaggcaacctgctgtgtgcagtggatgaatccaatgatcacatgctctcggtgtgggactgggccaaggagaccaaggtggtggatgtcaagtgctccaatgaggctgtattggtggccaccttccaccccacggaccccactgtgcttatcacctgcgggaaatctcacatctacttctggaccttggaggggggcagcttgagcaagcggcaaggcctctttgagaaacatgagaaaccgaagtatgtgctgtgtgtgacctttttggaaggtggcgacgtggtcacgggggactctggggggaacctctatgtttggggcaaaggtgggaaccgtatcacacaggcggtgctgggcgcccacgacggcggcgtgtttgggctctgcgccctgcgggacgggacgctggtgtctggagggggccgtgatcggcgggtggtcctctggggttctgactacagcaagctgcaggaagtggaggtccctgaggactttggccctgtgcgcaccgtggcagagggccacggagacacactgtacgtggggaccacccgcaattccatcctgcagggctccgtgcacacaggcttctcactgctggtccagggccatgtggaagagctgtggggcctggccacacaccccagtcgggcccagtttgtgacctgcgggcaggataagctggtgcatctatggagctcagattcccaccagcccctgtggagcaggatcatcgaggaccctgcccgctcagccggcttccaccccagtggctctgtcctggctgtgggtacagtgactggcagatggctgctgctggacacggagacccatgacctggtggctatccacacagacggcaatgaacagatctcagtggtcagcttctccccagacggggcgtacctggccgtgggctcccacgacaacttggtgtacgtgtacacggtggaccagggcggccgcaaggtcagccgcctgggcaagtgctcgggccattccagttttatcacccacctggattgggcccaggacagcagctgctttgtcaccaactccggggactatgagattctgtactgggacccggctacctgtaagcagatcaccagtgcggatgctgtgaggaacatggaatgggccacagctacttgtgtcctagggtttggggtgtttgggatctggtctgagggggcggacggcactgatatcaacgctgtggcccgctctcatgatgggaagttgctggcttcagctgatgactttggcaaagttcacctgtttagctacccctgctgtcagcctcgagccctcagccacaagtacggtggacacagcagccatgtgacaaatgtggccttcttgtgggatgacagcatggccctgaccacagggggcaaggacaccagtgtgctacagtggcgggtggtctgatgcggccagggaagagtcaggtgtc

SEQ ID NO: 128976 - DNA, 2062 bp, Homo sapiens
  Payload ID: 5225
  Gene Symbol: EML2
  Gene Name: echinoderm microtubule associated protein like 2
  ENST ID: ENST00000588308
  CDS Start-End: 16-1299
ccgccacccgccgccatgagtagctttggagctggcaaaaccaaagaagttatcttcagtgtggaggatggctccgtgaaaatgttcctgaggggccgccctgtgcccatgatgatcccagacgagctggcacccacctacagcctggacacacgctcggagctgccttcttgccggctcaagctggagtgggtctatggctaccgtggccgagactgccgggccaacctttatttgctgcccaccggggagatagtgtactttgtggcctccgtagccgtgctatacagcgtggaggagcagaggcagcgacactacctgggacacaacgatgacatcaaatgcttggccatccacccagatatggtcaccatcgccacgggacaggtggcgggaaccactaaggaagggaagccgctgccgccccacgtgcgcatctgggactcagtttccctctccaccttacacgtgctgggcttgggggtgtttgacagagccgtgtgctgtgtgggcttctccaaatctaatggaggcaacctgctgtgtgcagtggatgaatccaatgatcacatgctctcggtgtgggactgggccaaggagaccaaggtggtggatgtcaagtgctccaatgaggctgtattggtggccaccttccaccccacggaccccactgtgcttatcacctgcgggaaatctcacatctacttctggaccttggaggggggcagcttgagcaagcggcaaggcctctttgagaaacatgagaaaccgaagtatgtgctgtgtgtgacctttttggaaggtggcgacgtggtcacgggggactctggggggaacctctatgtttggggcaaaggtgggaaccgtatcacacaggcggtgctgggcgcccacgacggcggcgtgtttgggctctgcgccctgcgggacgggacgctggtgtctggagggggccgtgatcggcgggtggtcctctggggttctgactacagcaagctgcaggaagtggaggtccctgaggactttggccctgtgcgcaccgtggcagagggccacggagacacactgtacgtggggaccacccgcaattccatcctgcagggctccgtgcacacaggcttctcactgctggtccagggccatgtggaagagctgtggggcctggccacacaccccagtcgggcccagtttgtgacctgcgggcaggataagctggtgcatctatggagctcagattcccaccagcccctgtggagcaggatcatcgagatggctgctgctggacacggagacccatgacctggtggctatccacacagacggcaatgaacagatctcagtggtcagcttctccccagggccattccagttttatcacccacctggattgggcccaggacagcagctgctttgtcaccaactccggggactatgagattctgtactgggacccggctacctgtaagcagatcaccagtgcggatgctgtgaggaacatggaatgggccacagctacttgtgtcctagggtttggggtgtttgggatctggtctgagggggcggacggcactgatatcaacgctgtggcccgctctcatgatgggaagttgctggcttcagctgatgactttggcaaagttcacctgtttagctacccctgctgtcagcctcgagccctcagccacaagtacggtggacacagcagccatgtgacaaatgtggccttcttgtgggatgacagcatggccctgaccacagggggcaaggacaccagtgtgctacagtggcgggtggtctgatgcggccagggaagagtcaggtgtcagggcaggaattctattttcgggagatgtctattgccgagtagagtaatatatacccagagtatgtctatagcagagggggttatgggggcgggagggtagactgacatacagaagtctctatttatccgggtgggaagagggagtcacatcgctttggggatccattggtgtttggtttggggtgttttttaagttttttcttttatatcatccagaaataaagacacgtacactaa

SEQ ID NO: 128977 - DNA, 551 bp, Homo sapiens
  Payload ID: 5225
  Gene Symbol: EML2
  Gene Name: echinoderm microtubule associated protein like 2
  ENST ID: ENST00000590018
  CDS Start-End: 257-551
caaaaccaaagaagttatcttcagtgtgggtgagtggggagatggggaagggctcggtggaagcttgcttgttggggtgacaggctggagccagaggtcaggagtcttggctactgggtctttgcctctctggcctcagtttccctgcctttaaaaaaataaataaataaagctggaagaggagagggaatagggatggggctggtgtcagtgcctgacctctgggggtgtcctggcagaggatggctccgtgaaaatgttcctgaggggccgccctgtgcccatgatgatcccagacgagctggcacccacctacagcctggacacacgctcggagctgccttcttgccggctcaagctggagtgggtctatggctaccgtggccgagactgccgggccaacctttatttgctgcccaccggggagatagtgtactttgtggcctccgtagccgtgctatacagcgtggaggagcagaggcagcgacactacctgggacacaacgatgacatcaaatgcttggccatccacccagatatggtcaccatcg

SEQ ID NO: 128978 - DNA, 539 bp, Homo sapiens
  Payload ID: 5225
  Gene Symbol: EML2
  Gene Name: echinoderm microtubule associated protein like 2
  ENST ID: ENST00000592853
  CDS Start-End: 1-276
ccgctgccgccccacgtgcgcatctgggactcagtttccctctccaccttacacgtgctgggcttgggggtgtttgacagagccgtgtgctgtgtgggcttctccaaatctaatggaggcaacctgctgtgtgcagtggatgaatccaatgatcacatgctctcggtgtgggactgggccaaggagaccaaggtggtggatgtcaaggctggagtgcaatggcataatcttggctcactgcaacctccacctcccaggttccagcgattctcctgactcagcctcctgagtagctgagactacagtgctccaatgaggctgtattggtggccaccttccaccccacggaccccactgtgcttatcacctgcgggaaatctcacatctacttctggaccttggaggggggcagcttgagcaagcggcaaggcctctttgagaaacatgagaaaccgaagtatgtgctgtgtgtgacctttttggaaggtggcgacgtggtcacgggggactctggggggaacctctatgtttggggcaaa

SEQ ID NO: 128979 - DNA, 526 bp, Homo sapiens
  Payload ID: 5225
  Gene Symbol: EML2
  Gene Name: echinoderm microtubule associated protein like 2
  ENST ID: ENST00000591721
  CDS Start-End: 83-526
taaactctccccgtttctccctctgcttgacgtttgcaaaaccaaagaagttatcttcagtgtggaggatggctccgtgaaaatgttcctgaggggccgccctgtgcccatgatgatcccagacgagctggcacccacctacagcctggacacacgctcggagctgccttcttgccggctcaagctggagtgggtctatggctaccgtggccgagactgccgggccaacctttatttgctgcccaccggggagatagtgtactttgtggcctccgtagccgtgctatacagcgtggaggagcagaggcagcgacactacctgggacacaacgatgacatcaaatgcttggccatccacccagatatggtcaccatcgccacgggacaggtggcgggaaccactaaggaagggaagccgctgccgccccacgtgcgcatctgggactcagtttccctctccaccttacacgtgctgggcttgggggtgtttgacagagccgtgtgctgtgtgggcttctccaaatct

SEQ ID NO: 128980 - DNA, 542 bp, Homo sapiens
  Payload ID: 5225
  Gene Symbol: EML2
  Gene Name: echinoderm microtubule associated protein like 2
  ENST ID: ENST00000588172
  CDS Start-End: 118-542
ggagtgtgcggatgggttggagagctgtggggatttccttcccccttcagagtcctcttccttggctcatgtccaagtgtcccagccccagatgacaatttgtcgggcacgagcggtatggaagtggacgaccgcgtgtcggcgctggagcagcggctgcagttacaggaagacgagctggcggtcctaaaggcggcgctggcggatgctctgcgtcgcctgcgggcatgcgaagaacagggagcggcgctacgcgcgcggggcacccccaagggccgggcgcctccgcgcttaggcaccactgcctcggtgtgtcagctcttgaaaggccttcccaccaggacgccccttaatggctcgggacccccgcggcgcgtgggtggctatgccacgtccccatcctctcccaagaaggaggcgacctccgggcgcagcagtgtccgccgctacttgtcaccagagcgcctcgcctcggtgcgccgtgaggacccccgcagccggaccacatcctccagcagcaactgtagcgccaaaaaggaagg

SEQ ID NO: 128981 - DNA, 3017 bp, Homo sapiens
  Payload ID: 5226
  Gene Symbol: EML3
  Gene Name: echinoderm microtubule associated protein like 3
  ENST ID: ENST00000278845
  CDS Start-End: 68-2761
ccggccgtggcccccgcggcttagacgcctcctccgccgccgccgctcggagcaacccgggggccggatggacggggccgcggggcccggtgacggccctgctcgggaggccctccagtctctgagccagcggcttcgggtgcaggagcaggagatggaactggtaaaggcagccctggcagaagcccttcgcctgctgcggctgcaggtgcccccttcctccctgcagggctctggcacaccagctcctccgggggacagcagtcttgcagcccccccaggactgccacccacgtgcaccccttccttggtgagccgaggcacccagacggagacagaggtggagctcaagtcatcccctggaccccctggcctgagcaatggacccccagcccctcagggggccagcgaagagcctagcgggacccaatctgaaggagggggcagcagcagcagtggtgctggctcccctggccccccggggatcctcaggcccttgcagcccccacagcgtgctgacacgccgcgaagaaattcttcctcctcctcatccccctcagagcggcctcggcagaagctctccaggaaggcaatctcctccgccaacctgttagtgcggtccgggagcacagagagccgtgggggaaaagaccccctctccagccctgggggccctggatctcggaggagcaattacaatttggaaggcatctcagtgaagatgttccttcgagggcgccccattaccatgtacatcccgtctggcatccgcagccttgaggagctgccgagtggcccaccgccagagaccctcagccttgactgggtttatgggtacaggggtcgtgactcccgctctaatctgtttgtgttgcgctctggggaggtggtctactttatcgcctgtgtggtggtgctgtaccggcctggaggaggcccagggggtcctggaggtggcggccagagacattaccgggggcacacagactgcgttcgatgccttgctgttcaccctgatggtgttcgggtagcctcgggacagacagctggagtggataaggatggaaagcccctgcagcctgtggttcacatctgggactcagagacgctgttgaaactgcaggagattggactgggggccttcgagcggggtgttggggccctggccttttcagctgcggatcagggtgcctttctttgtgtggtggatgattccaatgagcacatgctgtcggtgtgggactgcagccggggaatgaagctggctgagatcaagagtacaaatgactcagtcctggccgttggcttcaaccctcgtgacagcagctgcatcgtcaccagtgggaaatctcacgtccacttctggaattggagtggtggagtaggggttcctgggaatgggacccttacccggaaacagggtgtctttgggaaatacaagaaacccaagtttatcccttgctttgtgttccttccggatggagacattctcactggagactcagaggggaacattctcacctgggggcggagcccttcagattccaagaccccaggcaggggtggcgccaaagagacctatgggattgtggcccaggctcacgctcatgaaggttctatcttcgccttgtgtctccggagggacgggacagtgctgagtggtggcgggcgggaccgccggctggtacagtgggggcccgggttggtggccctccaggaggctgagattcccgagcacttcggggccgtgcgagccattgctgaagggcttggctctgagctgctggtgggaaccacgaagaatgcattgctgaggggagacctggcccagggcttctcccctgtaatccagggccacactgatgagctctgggggctctgcacacacccctcccagaaccgcttcctcacctgcggccacgaccggcagctctgcctgtgggatggggagagccatgcactggcctggagcatcgacctcaaggagactggtctctgtgctgacttccacccgagtggggcagttgtggccgtaggactgaacacggggaggtggttggttttggacacagagaccagagagatcgtgtctgatgtcattgatggcaatgagcagctctcagtggtccggtacagcccagatgggttgtacctggccattggttcccatgacaacgtgatctacatctatagtgtttccagtgatggtgccaaatccagccgctttggccgctgtatgggtcactccagcttcatcactcatcttgactggtccaaggatgggaatttcatcatgtccaattctggggactatgagattctttactgggacgtggctggaggctgcaagcagctgaagaatcgctatgagagccgagaccgggaatgggctacctacacctgtgtgctgggctttcacgtctacggcgtctggccggacggctccgatgggaccgacatcaactccctgtgccgctcccacaacgagcgcgtggtggcggtggccgacgacttctgcaaagtgcatctcttccagtacccgtgcgctcgtgccaaggcgccgagccgcatgtacgggggccacggcagccacgtgaccagcgtccgattcacgcacgacgactcgcacctcgtctcgctgggcggcaaggacgccagcatcttccagtggcgagtgctgggcgctgggggcgcggggccggcgcccgccacgccctctcgaaccccctccctgtcccccgcctcctccctcgacgtttgatcgctgcctggcgggaccgactggcccggcggcgtggccccgccccgccctgcccttccctggcccaatcccccacgactaggggccgactctttcctggactgacttcgagacattcccgatcgcgcattttcctggagggcgcgaacggcgcccctgcacacactgtttagacccgctggctgagccgggcagccccagcctaggccttgactcccgctgcctgctgaggggcaataaaccagaaccaaagtcg

SEQ ID NO: 128982 - DNA, 3256 bp, Homo sapiens
  Payload ID: 5226
  Gene Symbol: EML3
  Gene Name: echinoderm microtubule associated protein like 3
  Uniprot ID: Q32P44
  ENST ID: ENST00000394773
  CDS Start-End: 309-2999
ggctccgcgtccggcgcctgtttgtgctgcggcgctgtggcaccggacggccctgccaccccacccccgggagccgagagcggccccgggagagtccgagggcccgggggggtctggagactgcggccccgggcccacagcgccccctccaggccccttccccgcgcccgacagcgccccctcggggtggtggtacggcgcccttcgcgcgcgccccggggtgcttccccttcccctctccccggccgtggcccccgcggcttagacgcctcctccgccgccgccgctcggagcaacccgggggccggatggacggggccgcggggcccggtgacggccctgctcgggaggccctccagtctctgagccagcggcttcgggtgcaggagcaggagatggaactggtaaaggcagccctggcagaagcccttcgcctgctgcggctgcaggtgcccccttcctccctgcagggctctggcacaccagctcctccgggggacagtcttgcagcccccccaggactgccacccacgtgcaccccttccttggtgagccgaggcacccagacggagacagaggtggagctcaagtcatcccctggaccccctggcctgagcaatggacccccagcccctcagggggccagcgaagagcctagcgggacccaatctgaaggagggggcagcagcagcagtggtgctggctcccctggccccccggggatcctcaggcccttgcagcccccacagcgtgctgacacgccgcgaagaaattcttcctcctcctcatccccctcagagcggcctcggcagaagctctccaggaaggcaatctcctccgccaacctgttagtgcggtccgggagcacagagagccgtgggggaaaagaccccctctccagccctgggggccctggatctcggaggagcaattacaatttggaaggcatctcagtgaagatgttccttcgagggcgccccattaccatgtacatcccgtctggcatccgcagccttgaggagctgccgagtggcccaccgccagagaccctcagccttgactgggtttatgggtacaggggtcgtgactcccgctctaatctgtttgtgttgcgctctggggaggtggtctactttatcgcctgtgtggtggtgctgtaccggcctggaggaggcccagggggtcctggaggtggcggccagagacattaccgggggcacacagactgcgttcgatgccttgctgttcaccctgatggtgttcgggtagcctcgggacagacagctggagtggataaggatggaaagcccctgcagcctgtggttcacatctgggactcagagacgctgttgaaactgcaggagattggactgggggccttcgagcggggtgttggggccctggccttttcagctgcggatcagggtgcctttctttgtgtggtggatgattccaatgagcacatgctgtcggtgtgggactgcagccggggaatgaagctggctgagatcaagagtacaaatgactcagtcctggccgttggcttcaaccctcgtgacagcagctgcatcgtcaccagtgggaaatctcacgtccacttctggaattggagtggtggagtaggggttcctgggaatgggacccttacccggaaacagggtgtctttgggaaatacaagaaacccaagtttatcccttgctttgtgttccttccggatggagacattctcactggagactcagaggggaacattctcacctgggggcggagcccttcagattccaagaccccaggcaggggtggcgccaaagagacctatgggattgtggcccaggctcacgctcatgaaggttctatcttcgccttgtgtctccggagggacgggacagtgctgagtggtggcgggcgggaccgccggctggtacagtgggggcccgggttggtggccctccaggaggctgagattcccgagcacttcggggccgtgcgagccattgctgaagggcttggctctgagctgctggtgggaaccacgaagaatgcattgctgaggggagacctggcccagggcttctcccctgtaatccagggccacactgatgagctctgggggctctgcacacacccctcccagaaccgcttcctcacctgcggccacgaccggcagctctgcctgtgggatggggagagccatgcactggcctggagcatcgacctcaaggagactggtctctgtgctgacttccacccgagtggggcagttgtggccgtaggactgaacacggggaggtggttggttttggacacagagaccagagagatcgtgtctgatgtcattgatggcaatgagcagctctcagtggtccggtacagcccagatgggttgtacctggccattggttcccatgacaacgtgatctacatctatagtgtttccagtgatggtgccaaatccagccgctttggccgctgtatgggtcactccagcttcatcactcatcttgactggtccaaggatgggaatttcatcatgtccaattctggggactatgagattctttactgggacgtggctggaggctgcaagcagctgaagaatcgctatgagagccgagaccgggaatgggctacctacacctgtgtgctgggctttcacgtctacggcgtctggccggacggctccgatgggaccgacatcaactccctgtgccgctcccacaacgagcgcgtggtggcggtggccgacgacttctgcaaagtgcatctcttccagtacccgtgcgctcgtgccaaggcgccgagccgcatgtacgggggccacggcagccacgtgaccagcgtccgattcacgcacgacgactcgcacctcgtctcgctgggcggcaaggacgccagcatcttccagtggcgagtgctgggcgctgggggcgcggggccggcgcccgccacgccctctcgaaccccctccctgtcccccgcctcctccctcgacgtttgatcgctgcctggcgggaccgactggcccggcggcgtggccccgccccgccctgcccttccctggcccaatcccccacgactaggggccgactctttcctggactgacttcgagacattcccgatcgcgcattttcctggagggcgcgaacggcgcccctgcacacactgtttagacccgctggctgagccgggcagccccagcctaggccttgactcccgctgcctgctgaggggcaataaaccagaaccaaagtcgc

SEQ ID NO: 128983 - DNA, 2818 bp, Homo sapiens
  Payload ID: 5226
  Gene Symbol: EML3
  Gene Name: echinoderm microtubule associated protein like 3
  ENST ID: ENST00000394776
  CDS Start-End: 1-2735
gtgacggccctgctcgggaggccctccagtctctgagccagcggcttcgggtgcaggagcaggagatggaactggtaaaggcagccctggcagaagcccttcgcctgctgcggctgcaggtgcccccttcctccctgcagggctctggcacaccagctcctccgggggacagcagtcttgcagcccccccaggactgccacccacgtgcaccccttccttggtgagccgaggcacccagacggagacagaggtggagctcaagtcatcccctggaccccctggcctgagcaatggacccccagcccctcagggggccagcgaagagcctagcgggacccaatctgaaggagggggcagcagcagcagtggtgctggctcccctggccccccggggatcctcaggcccttgcagcccccacagcgtgctgacacgccgcgaagaaattcttcctcctcctcatccccctcagagcggcctcggcagaagctctccaggaaggcaatctcctccgccaacctgttagtgcggtccgggagcacagagagccgtgggggaaaagaccccctctccagccctgggggccctggatctcggaggagcaattacaatttggaaggcatctcagtgaagatgttccttcgagggcgccccattaccatgtacatcccgtctggcatccgcagccttgaggagctgccgagtggcccaccgccagagaccctcagccttgactgggtttatgggtacaggggtcgtgactcccgctctaatctgtttgtgttgcgctctggggaggtggtctactttatcgcctgtgtggtggtgctgtaccggcctggaggaggcccagggggtcctggaggtggcggccagagacattaccgggggcacacagactgcgttcgatgccttgctgttcaccctgatggtgttcgggtagcctcgggacagacagctggagtggataaggatggaaagcccctgcagcctgtggttcacatctgggactcagagacgctgttgaaactgcaggagattggactgggggccttcgagcggggtgttggggccctggccttttcagctgcggatcagggtgcctttctttgtgtggtggatgattccaatgagcacatgctgtcggtgtgggactgcagccggggaatgaagctggctgagatcaagagtacaaatgactcagtcctggccgttggcttcaaccctcgtgacagcagctgcatcgtcaccagtgggaaatctcacgtccacttctggaattggagtggtggagtaggggttcctgggaatgggacccttacccggaaacagggtgtctttgggaaatacaagaaacccaagtttatcccttgctttgtgttccttccggatggagacattctcactggagactcagaggggaacattctcacctgggggcggagcccttcagattccaagaccccaggcaggggtggcgccaaagagacctatgggattgtggcccaggctcacgctcatgaaggttctatcttcgccttgtgtctccggagggacgggacagtgctgagtggtggcgggcgggaccgccggctggtacagtgggggcccgggttggtggccctccaggaggctgagattcccgagcacttcggggccgtgcgagccattgctgaagggcttggctctgagctgctggtgggaaccacgaagaatgcattgctgaggggagacctggcccagggcttctcccctgtaatccagggccacactgatgagctctgggggctctgcacacacccctcccagaaccgcttcctcacctgcggccacgaccggcagctctgcctgtgggatggggagagccatgcactggcctggagcatcgacctcaaggagactggtctctgtgctgacttccacccgagtggggcagttgtggccgtaggactgaacacggggaggtggttggttttggacacagagaccagagagatcgtgtctgatgtcattgatggcaatgagcagctctcagtggtccggtacagcccagatgggttgtacctggccattggttcccatgacaacgtgatctacatctatagtgtttccagtgatggtgccaaatccagccgctttggccgctgtatgggtcactccagcttcatcactcatcttgactggtccaaggatgggaatttcatcatgtccaattctggggactatgagattctttactgggacgtggctggaggctgcaagcagctgaagaatcgctatgagagccgagaccgggaatgggctacctacacctgtgtgctgggctttcacgtctacgtacccgtgcgctcgtgccaaggcgccgagccgcatgtacgggggccacggcagccacgtgaccagcgtccgattcacgcacgacgactcgcacctcgtctcgctgggcggcaaggacgccagcatcttccagtggcgagtgctgggcgctgggggcgcggggccggcgcccgccacgccctctcgaaccccctccctgtcccccgcctcctccctcgacgtttgatcgctgcctggcgggaccgactggcccggcggcgtggccccgccccgccctgcccttccctggcccaatcccccacgactaggggccgactctttcctggactgacttcgagacattcccgatcgcgcattttcctggagggcgcgaacggcgcccctgcacacactgtttagacccgctggctgagccgggcagccccagcctaggccttgactcccgctgcctgctgaggggcaataaaccagaaccaaagtcg

SEQ ID NO: 128984 - DNA, 671 bp, Homo sapiens
  Payload ID: 5226
  Gene Symbol: EML3
  Gene Name: echinoderm microtubule associated protein like 3
  ENST ID: ENST00000439994
  CDS Start-End: 1-414
attctttactgggacgtggctggaggctgcaagcagctgaagaatcgctatgagagccgagaccgggaatgggctacctacacctgtgtgctgggctttcacgtctacgtacccgtgcgctcgtgccaaggtgaggccgcggggatcgccggggtgggaccggtgggcccgagggctcagccgccaccgcaactcttccctccggcccaggcgccgagccgcatgtacgggggccacggcagccacgtgaccagcgtccgattcacgcacgacgactcgcacctcgtctcgctgggcggcaaggacgccagcatcttccagtggcgagtgctgggcgctgggggcgcggggccggcgcccgccacgccctctcgaaccccctccctgtcccccgcctcctccctcgacgtttgatcgctgcctggcgggaccgactggcccggcggcgtggccccgccccgccctgcccttccctggcccaatcccccacgactaggggccgactctttcctggactgacttcgagacattcccgatcgcgcattttcctggagggcgcgaacggcgcccctgcacacactgtttagacccgctggctgagccgggcagccccagcctaggccttgactcccgctgcctgctgaggggcaataaaccagaaccaaagtcgc

SEQ ID NO: 128985 - DNA, 578 bp, Homo sapiens
  Payload ID: 5226
  Gene Symbol: EML3
  Gene Name: echinoderm microtubule associated protein like 3
  ENST ID: ENST00000419857
  CDS Start-End: 239-578
gtttgtgctgcggcgctgtggcaccggacggccctgccaccccacccccgggagccgagagcggccccgggagagtccgagggcccgggggggtctggagactgcggccccgggcccacagcgccccctccaggccccttccccgcgcccgacagcgccccctcggggtggtggtgacggccctgctcgggaggccctccagtctctgagccagcggcttcgggtgcaggagcaggagatggaactggtaaaggcagccctggcagaagcccttcgcctgctgcggctgcaggtgcccccttcctccctgcagggctctggcacaccagctcctccgggggacagtcttgcagcccccccaggactgccacccacgtgcaccccttccttggtgagccgaggcacccagacggagacagaggtggagctcaagtcatcccctggaccccctggcctgagcaatggacccccagcccctcagggggccagcgaagagcctagcgggacccaatctgaaggagggggcagcagcagcagtggtgctggctcccctggccccccggggatcctcaggccct

SEQ ID NO: 128986 - DNA, 3665 bp, Homo sapiens
  Payload ID: 5226
  Gene Symbol: EML3
  Gene Name: echinoderm microtubule associated protein like 3
  Uniprot ID: Q32P44
  ENST ID: ENST00000494448
  CDS Start-End: 851-1435
gggttatgccagagctggacggctgtctggaggcgtccccgcgtgctcctccgccccaggggctccgagcatcctccacagttcctccggtcgccctccctagttgcttgggtcttgctgtcacttcgggcttccccagcgtcattctacgccccacgtaactccgggcccctcgatgtttccctgccccctgcgttactccgggcctcttctcgtggtatttcaggtctttttccttctgatccccactgccccctgagaccttcactgtgactctgctcaccactcacactctctcctgtcactctggatctcttttcttgtactctgggtcctcagtatgactccattcccgcaccccgttctctctcctggtgttcccccggctcagttactcagctttcgctggagacctgagcttgctgggggcgcgtggggagggctgcggtccctgccctcaccagtgcggcgcctctctctgtggctcccacgttcctcggcagtactccatatttcccccccggtactccatggtactcccagtctttgcggaggctgagacggcagcaggaagggagctttgccaggtttctcgcctgccctgccagaaggaggcccttgatcctttaccaccgtctcctcccctctggacgagcattcaagcctggggctgcctgaaaggggcagtcctaccggacacatgtaaagttgtggggagacagaatcccctctacgctttcttcaggtgatgggtacattctgagtacctcttgcccttttcccaggtgacggccctgctcgggaggccctccagtctctgagccagcggcttcgggtgcaggagcaggagatggaactggtaaaggcagccctggcagaagcccttcgcctgctgcggctgcaggtgcccccttcctccctgcagggctctggcacaccagctcctccgggggacagtcttgcagcccccccaggactgccacccacgtgcaccccttccttggtgagccgaggcacccagacggagacagaggtggagctcaagtcatcccctggaccccctggcctgagcaatggacccccagcccctcagggggccagcgaagagcctagcgggacccaatctgaaggagggggcagcagcagcagtggtgctggctcccctggccccccggggatcctcaggcccttgcagcccccacagcgtgctgacacagcggcctcggcagaagctctccaggaaggcaatctcctccgccaacctgttagtgcggtccgggagcacagagagccgtgggggaaaagaccccctctccagccctgggggccctggatctcggaggagcaattacaatttggaaggcatctcagtgaagatgttccttcgagggcgccccattaccatgtacatcccgtctggcatccgcagccttgaggagctgccgagtggcccaccgccagagaccctcagccttgactgggtttatgggtacaggggtcgtgactcccgctctaatctgtttgtgttgcgctctggggaggtggtctactttatcgcctgtgtggtggtgctgtaccggcctggaggaggcccagggggtcctggaggtggcggccagagacattaccgggggcacacagactgcgttcgatgccttgctgttcaccctgatggtgttcgggtagcctcgggacagacagctggagtggataaggatggaaagcccctgcagcctgtggttcacatctgggactcagagacgctgttgaaactgcaggagattggactgggggccttcgagcggggtgttggggccctggccttttcagctgcggatcagggtgcctttctttgtgtggtggatgattccaatgagcacatgctgtcggtgtgggactgcagccggggaatgaagctggctgagatcaagagtacaaatgactcagtcctggccgttggcttcaaccctcgtgacagcagctgcatcgtcaccagtgggaaatctcacgtccacttctggaattggagtggtggagtaggggttcctgggaatgggacccttacccggaaacagggtgtctttgggaaatacaagaaacccaagtttatcccttgctttgtgttccttccggatggagacattctcactggagactcagaggggaacattctcacctgggggcggagcccttcagattccaagaccccaggcaggggtggcgccaaagagacctatgggattgtggcccaggctcacgctcatgaaggttctatcttcgccttgtgtctccggagggacgggacagtgctgagtggtggcgggcgggaccgccggctggtacagtgggggcccgggttggtggccctccaggaggctgagattcccgagcacttcggggccgtgcgagccattgctgaagggcttggctctgagctgctggtgggaaccacgaagaatgcattgctgaggggagacctggcccagggcttctcccctgtaatccagggccacactgatgagctctgggggctctgcacacacccctcccagaaccgcttcctcacctgcggccacgaccggcagctctgcctgtgggatggggagagccatgcactggcctggagcatcgacctcaaggagactggtctctgtgctgacttccacccgagtggggcagttgtggccgtaggactgaacacggggaggtggttggttttggacacagagaccagagagatcgtgtctgatgtcattgatggcaatgagcagctctcagtggtccggtacagcccagatgggttgtacctggccattggttcccatgacaacgtgatctacatctatagtgtttccagtgatggtgccaaatccagccgctttggccgctgtatgggtcactccagcttcatcactcatcttgactggtccaaggatgggaatttcatcatgtccaattctggggactatgagattctttactgggacgtggctggaggctgcaagcagctgaagaatcgctatgagagccgagaccgggaatgggctacctacacctgtgtgctgggctttcacgtctacggcgtctggccggacggctccgatgggaccgacatcaactccctgtgccgctcccacaacgagcgcgtggtggcggtggccgacgacttctgcaaagtgcatctcttccagtacccgtgcgctcgtgccaaggcgccgagccgcatgtacgggggccacggcagccacgtgaccagcgtccgattcacgcacgacgactcgcacctcgtctcgctgggcggcaaggacgccagcatcttccagtggcgagtgctgggcgctgggggcgcggggccggcgcccgccacgccctctcgaaccccctccctgtcccccgcctcctccctcgacgtttgatcgctgcctggcgggaccgactggcccggcggcgtggccccgccccgccctgcccttccctggcccaatcccccacgactaggggccgactctttcctggactgacttcgagacattcccgatcgcgcattttcctggagggcgcgaacggcgcccctgcacacactgtttagacccgctggctgagccgggcagccccagcctaggccttgactcccgctgcctgctgaggggcaataaaccagaacc

SEQ ID NO: 128987 - DNA, 2509 bp, Homo sapiens
  Payload ID: 5226
  Gene Symbol: EML3
  Gene Name: echinoderm microtubule associated protein like 3
  ENST ID: ENST00000531557
  CDS Start-End: 215-2254
ctatgcccccaccaggccgcgaagaaattcttcctcctcctcatccccctcagagcggcctcggcagaagctctccaggaaggcaatctcctccgccaacctgttagtgcggtccgggagcacagagagccgtgggggaaaagaccccctctccagccctgggggccctggatctcggaggagcaattacaatttggaaggcatctcagtgaagatgttccttcgagggcgccccattaccatgtacatcccgtctggcatccgcagccttgaggagctgccgagtggcccaccgccagagaccctcagccttgactgggtttatgggtacaggggtcgtgactcccgctctaatctgtttgtgttgcgctctggggaggtggtctactttatcgcctgtgtggtggtgctgtaccggcctggaggaggcccagggggtcctggaggtggcggccagagacattaccgggggcacacagactgcgttcgatgccttgctgttcaccctgatggtgttcgggtagcctcgggacagacagctggagtggataaggatggaaagcccctgcagcctgtggttcacatctgggactcagagacgctgttgaaactgcaggagattggactgggggccttcgagcggggtgttggggccctggccttttcagctgcggatcagggtgcctttctttgtgtggtggatgattccaatgagcacatgctgtcggtgtgggactgcagccggggaatgaagctggctgagatcaagagtacaaatgactcagtcctggccgttggcttcaaccctcgtgacagcagctgcatcgtcaccagtgggaaatctcacgtccacttctggaattggagtggtggagtaggggttcctgggaatgggacccttacccggaaacagggtgtctttgggaaatacaagaaacccaagtttatcccttgctttgtgttccttccggatggagacattctcactggagactcagaggggaacattctcacctgggggcggagcccttcagattccaagaccccaggcaggggtggcgccaaagagacctatgggattgtggcccaggctcacgctcatgaaggttctatcttcgccttgtgtctccggagggacgggacagtgctgagtggtggcgggcgggaccgccggctggtacagtgggggcccgggttggtggccctccaggaggctgagattcccgagcacttcggggccgtgcgagccattgctgaagggcttggctctgagctgctggtgggaaccacgaagaatgcattgctgaggggagacctggcccagggcttctcccctgtaatccagggccacactgatgagctctgggggctctgcacacacccctcccagaaccgcttcctcacctgcggccacgaccggcagctctgcctgtgggatggggagagccatgcactggcctggagcatcgacctcaaggagactggtctctgtgctgacttccacccgagtggggcagttgtggccgtaggactgaacacggggaggtggttggttttggacacagagaccagagagatcgtgtctgatgtcattgatggcaatgagcagctctcagtggtccggtacagcccagatgggttgtacctggccattggttcccatgacaacgtgatctacatctatagtgtttccagtgatggtgccaaatccagccgctttggccgctgtatgggtcactccagcttcatcactcatcttgactggtccaaggatgggaatttcatcatgtccaattctggggactatgagattctttactgggacgtggctggaggctgcaagcagctgaagaatcgctatgagagccgagaccgggaatgggctacctacacctgtgtgctgggctttcacgtctacggcgtctggccggacggctccgatgggaccgacatcaactccctgtgccgctcccacaacgagcgcgtggtggcggtggccgacgacttctgcaaagtgcatctcttccagtacccgtgcgctcgtgccaaggcgccgagccgcatgtacgggggccacggcagccacgtgaccagcgtccgattcacgcacgacgactcgcacctcgtctcgctgggcggcaaggacgccagcatcttccagtggcgagtgctgggcgctgggggcgcggggccggcgcccgccacgccctctcgaaccccctccctgtcccccgcctcctccctcgacgtttgatcgctgcctggcgggaccgactggcccggcggcgtggccccgccccgccctgcccttccctggcccaatcccccacgactaggggccgactctttcctggactgacttcgagacattcccgatcgcgcattttcctggagggcgcgaacggcgcccctgcacacactgtttagacccgctggctgagccgggcagccccagcctaggccttgactcccgctgcctgctgaggggcaataaaccagaaccaaagtc

SEQ ID NO: 128988 - DNA, 599 bp, Homo sapiens
  Payload ID: 5226
  Gene Symbol: EML3
  Gene Name: echinoderm microtubule associated protein like 3
  ENST ID: ENST00000466886
  CDS Start-End: 218-599
atgccagagctggacggctgtctggaggcgtccccgcgtgctcctccgccccaggggctccgagcatcctccacagttcctccggtcgccctccctagttgcttgggtcttgctgtcacttcgggcttccccagcgtcattctacgccccacgtgacggccctgctcgggaggccctccagtctctgagccagcggcttcgggtgcaggagcaggagatggaactggtaaaggcagccctggcagaagcccttcgcctgctgcggctgcaggtgcccccttcctccctgcagggctctggcacaccagctcctccgggggacagtcttgcagcccccccaggactgccacccacgtgcaccccttccttggtgagccgaggcacccagacggagacagaggtggagctcaagtcatcccctggaccccctggcctgagcaatggacccccagcccctcagggggccagcgaagagcctagcgggacccaatctgaaggagggggcagcagcagcagtggtgctggctcccctggccccccggggatcctcaggcccttgcagcccccacagcgtgctgacacgccgcgaagaaattctt

SEQ ID NO: 128989 - DNA, 2909 bp, Homo sapiens
  Payload ID: 5226
  Gene Symbol: EML3
  Gene Name: echinoderm microtubule associated protein like 3
  Uniprot ID: Q32P44
  ENST ID: ENST00000529309
  CDS Start-End: 74-2827
ctctccccggccgtggcccccgcggcttagacgcctcctccgccgccgccgctcggagcaacccgggggccggatggacggggccgcggggcccggtgacggccctgctcgggaggccctccagtctctgagccagcggcttcgggtgcaggagcaggagatggaactggtaaaggcagccctggcagaagcccttcgcctgctgcggctgcaggtgcccccttcctccctgcagggctctggcacaccagctcctccgggggacagtcttgcagcccccccaggactgccacccacgtgcaccccttccttggtgagccgaggcacccagacggagacagaggtggagctcaagtcatcccctggaccccctggcctgagcaatggacccccagcccctcagggggccagcgaagagcctagcgggacccaatctgaaggagggggcagcagcagcagtggtgctggctcccctggccccccggggatcctcaggcccttgcagcccccacagcgtgctgacacgccgcgaagaaattcttcctcctcctcatccccctcagagcggcctcggcagaagctctccaggaaggcaatctcctccgccaacctgttagtgcggtccgggagcacagagagccgtgggggaaaagaccccctctccagccctgggggccctggatctcggaggagcaattacaatttggaaggcatctcagtgaagatgttccttcgagggcgccccattaccatgtacatcccgtctggcatccgcagccttgaggagctgccgagtggcccaccgccagagaccctcagccttgactgggtttatgggtacaggggtcgtgactcccgctctaatctgtttgtgttgcgctctggggaggtggtctactttatcgcctgtgtggtggtgctgtaccggcctggaggaggcccagggggtcctggaggtggcggccagagacattaccgggggcacacagactgcgttcgatgccttgctgttcaccctgatggtgttcgggtagcctcgggacagacagctggagtggataaggatggaaagcccctgcagcctgtggttcacatctgggactcagagacgctgttgaaactgcaggagattggactgggggccttcgagcggggtgttggggccctggccttttcagctgcggatcagggtgcctttctttgtgtggtggatgattccaatgagcacatgctgtcggtgtgggactgcagccggggaatgaagctggctgagatcaagagtacaaatgactcagtcctggccgttggcttcaaccctcgtgacagcagctgcatcgtcaccagtgggaaatctcacgtccacttctggaattggagtggtggagtaggggttcctgggaatgggacccttacccggaaacagggtgtctttgggaaatacaagaaacccaagtttatcccttgctttgtgttccttccggatggagacattctcactggagactcagaggggaacattctcacctgggggcggagcccttcagattccaagaccccaggcaggggtggcgccaaagagacctatgggattgtggcccaggctcacgctcatgaaggttctatcttcgccttgtgtctccggagggacgggacagtgctgagtggtggcgggcgggaccgccggctggtacagtgggggcccgggttggtggccctccaggaggctgagattcccgagcacttcggggccgtgcgagccattgctgaagggcttggctctgagctgctggtgggaaccacgaagaatgcattgctgaggggagacctggcccagggcttctcccctgtaatccagggccacactgatgagctctgggggctctgcacacacccctcccagaaccgcttcctcacctgcggccacgaccggcagctctgcctgtgggatggggagagccatgcactggcctggagcatcgacctcaaggagactggtctctgtgctgacttccacccgagtggggcagttgtggccgtaggactgaacacggggaggtggttggttttggacacagagaccagagagatcgtgtctgatgtcattgatggcaatgagcagctctcagtggtccggtacagcccagatgggttgtacctggccattggttcccatgacaacgtgatctacatctatagtgtttccagtgatggtgccaaatccagccgctttggccgctgtatgggtcactccagcttcatcactcatcttgactggtccaaggatgggaatttcatcatgtccaattctggggactatgagattctttactgggacgtggctggaggctgcaagcagctgaagaatcgctatgagagccgagaccgggaatgggctacctacacctgtgtgctgggctttcacgtctacgtacccgtgcgctcgtgccaaggcgccgagccgcatgtacgggggccacggcagccacgtgaccagcgtccgattcacgcacgacgactcgcacctcgtctcgctgggcggcaaggacgccagcatcttccagtggcgagtgctgggcgctgggggcgcggggccggcgcccgccacgccctctcgaaccccctccctgtcccccgcctcctccctcgacgtttgatcgctgcctggcgggaccgactggcccggcggcgtggccccgccccgccctgcccttccctggcccaatcccccacgactaggggccgactctttcctggactgacttcgagacattcccgatcgcgcattttcctggagggcgcgaacggcgcccctgcacacactgtttagacccgctggctgagccgggcagccccagcctaggccttgactcccgctgcctgctgaggggcaataaaccagaaccaaagtc

SEQ ID NO: 128990 - DNA, 2901 bp, Homo sapiens
  Payload ID: 5226
  Gene Symbol: EML3
  Gene Name: echinoderm microtubule associated protein like 3
  ENST ID: ENST00000494176
  CDS Start-End: 150-2819
tgtaaagttgtggggagacagaatcccctctacgctttcttcaggtgatgggtacattctgagtacctcttgcccttttcccaggtgacggccctgctcgggaggccctccagtctctgagccagcggcttcgggtgcaggagcaggagatggaactggtaaaggcagccctggcagaagcccttcgcctgctgcggctgcaggtgcccccttcctccctgcagggctctggcacaccagctcctccgggggacagcagtcttgcagcccccccaggactgccacccacgtgcaccccttccttggtgagccgaggcacccagacggagacagaggtggagctcaagtcatcccctggaccccctggcctgagcaatggacccccagcccctcagggggccagcgaagagcctagcgggacccaatctgaaggagggggcagcagcagcagtggtgctggctcccctggccccccggggatcctcaggcccttgcagcccccacagcgtgctgacacgccgcgaagaaattcttcctcctcctcatccccctcagagcggcctcggcagaagctctccaggaaggcaatctcctccgccaacctgttagtgcggtccgggagcacagagagccgtgggggaaaagaccccctctccagccctgggggccctggatctcggaggagcaattacaatttggaaggcatctcagtgaagatgttccttcgagggcgccccattaccatgtacatcccgtctggcatccgcagccttgaggagctgccgagtggcccaccgccagagaccctcagccttgactgggtttatgggtacaggggtcgtgactcccgctctaatctgtttgtgttgcgctctggggaggtggtctactttatcgcctgtgtggtggtgctgtaccggcctggaggaggcccagggggtcctggaggtggcggccagagacattaccgggggcacacagactgcgttcgatgccttgctgttcaccctgatggtgttcgggtagcctcgggacagacagctggagtggataaggatggaaagcccctgcagcctgtggttcacatctgggactcagagacgctgttgaaactgcaggagattggactgggggccttcgagcggggtgttggggccctggccttttcagctgcggatcagggtgcctttctttgtgtggtggatgattccaatgagcacatgctgtcggtgtgggactgcagccggggaatgaagctggctgagatcaagagtacaaatgactcagtcctggccgttggcttcaaccctcgtgacagcagctgcatcgtcaccagtgggaaatctcacgtccacttctggaattggagtggtggagtaggggttcctgggaatgggacccttacccggaaacagggtgtctttgggaaatacaagaaacccaagtttatcccttgctttgtgttccttccggatggagacattctcactggagactcagaggggaacattctcacctgggggcggagcccttcagattccaagaccccaggcaggggtggcgccaaagagacctatgggattgtggcccaggctcacgctcatgaaggttctatcttcgccttgtgtctccggagggacgggacagtgctgagtggtggcgggcgggaccgccggctggtacagtgggggcccgggttggtggccctccaggaggctgagattcccgagcacttcggggccgtgcgagccattgctgaagggcttggctctgagctgctggtgggaaccacgaagaatgcattgctgaggggagacctggcccagggcttctcccctgtaatccagggccacactgatgagctctgggggctctgcacacacccctcccagaaccgcttcctcacctgcggccacgaccggcagctctgcctgtgggatggggagagccatgcactggcctggagcatcgacctcaaggagactggtctctgtgctgacttccacccgagtggggcagttgtggccgtaggactgaacacggggaggtggttggttttggacacagagaccagagagatcgtgtctgatgtcattgatggcaatgagcagctctcagtggtccggtacagcccagatgggttgtacctggccattggttcccatgacaacgtgatctacatctatagtgtttccagtgatggtgccaaatccagccgctttggccgctgtatgggtcactccagcttcatcactcatcttgactggtccaaggatgggaatttcatcatgtccaattctggggactatgagattctttactgggacgtggctggaggctgcaagcagctgaagaatcgctatgagagccgagaccgggaatgggctacctacacctgtgtgctgggctttcacgtctacgtacccgtgcgctcgtgccaaggcgccgagccgcatgtacgggggccacggcagccacgtgaccagcgtccgattcacgcacgacgactcgcacctcgtctcgctgggcggcaaggacgccagcatcttccagtggcgagtgctgggcgctgggggcgcggggccggcgcccgccacgccctctcgaaccccctccctgtcccccgcctcctccctcgacgtttgatcgctgcctggcgggaccgactggcccggcggcgtggccccgccccgccctgcccttccctggcccaatcccccacgactaggggccgactctttcctggactgacttcgagacattcccgatcgcgcattttcctggagggcgcgaacggcgcccctgcacacactgtttagacccgctggctgagccgggcagccccagcctaggccttgactcccgctgcctgctgaggggcaataaaccagaaccaaagtc

SEQ ID NO: 128991 - DNA, 565 bp, Homo sapiens
  Payload ID: 5226
  Gene Symbol: EML3
  Gene Name: echinoderm microtubule associated protein like 3
  ENST ID: ENST00000466671
  CDS Start-End: 182-565
agttgcttgggtcttgctgtcacttcgggcttccccagcgtcattctacgccccacgtaactccgggcccctcgatgtttccctgccccctgcgttactccgggcctcttctcgtggtgacggccctgctcgggaggccctccagtctctgagccagcggcttcgggtgcaggagcaggagatggaactggtaaaggcagccctggcagaagcccttcgcctgctgcggctgcaggtgcccccttcctccctgcagggctctggcacaccagctcctccgggggacagcagtcttgcagcccccccaggactgccacccacgtgcaccccttccttggtgagccgaggcacccagacggagacagaggtggagctcaagtcatcccctggaccccctggcctgagcaatggacccccagcccctcagggggccagcgaagagcctagcgggacccaatctgaaggagggggcagcagcagcagtggtgctggctcccctggccccccggggatcctcaggcccttgcagcccccacagcgtgctgacacgccgcgaagaaattct

SEQ ID NO: 128992 - DNA, 5549 bp, Homo sapiens
  Payload ID: 5227
  Gene Symbol: EML4
  Gene Name: echinoderm microtubule associated protein like 4
  Uniprot ID: Q9HC35
  ENST ID: ENST00000318522
  CDS Start-End: 263-3208
ggcgcggcgctcgcggctgctgcctgggagggaggccgggcaggcggctgagcggcgcggctctcaacgtgacggggaagtggttcgggcggccgcggcttactaccccagggcgaacggacggacgacggaggcgggagccggtagccgagccgggcgacctagagaacgagcgggtcaggctcagcgtcggccactctgtcggtccgctgaatgaagtgcccgcccctctaagcccggagcccggcgctttccccgcaagatggacggtttcgccggcagtctcgatgatagtatttctgctgcaagtacttctgatgttcaagatcgcctgtcagctcttgagtcacgagttcagcaacaagaagatgaaatcactgtgctaaaggcggctttggctgatgttttgaggcgtcttgcaatctctgaagatcatgtggcctcagtgaaaaaatcagtctcaagtaaaggccaaccaagccctcgagcagttattcccatgtcctgtataaccaatggaagtggtgcaaacagaaaaccaagtcataccagtgctgtctcaattgcaggaaaagaaactctttcatctgctgctaaaagtggtacagaaaaaaagaaagaaaaaccacaaggacagagagaaaaaaaagaggaatctcattctaatgatcaaagtccacaaattcgagcatcaccttctccccagccctcttcacaacctctccaaatacacagacaaactccagaaagcaagaatgctactcccaccaaaagcataaaacgaccatcaccagctgaaaagtcacataattcttgggaaaattcagatgatagccgtaataaattgtcgaaaataccttcaacacccaaattaataccaaaagttaccaaaactgcagacaagcataaagatgtcatcatcaaccaagaaggagaatatattaaaatgtttatgcgcggtcggccaattaccatgttcattccttccgatgttgacaactatgatgacatcagaacggaactgcctcctgagaagctcaaactggagtgggcatatggttatcgaggaaaggactgtagagctaatgtttaccttcttccgaccgggaaaatagtttatttcattgcatcagtagtagtactatttaattatgaggagagaactcagcgacactacctgggccatacagactgtgtgaaatgccttgctatacatcctgacaaaattaggattgcaactggacagatagctggcgtggataaagatggaaggcctctacaaccccacgtcagagtgtgggattctgttactctatccacactgcagattattggacttggcacttttgagcgtggagtaggatgcctggatttttcaaaagcagattcaggtgttcatttatgtattattgatgactccaatgagcatatgcttactgtatgggactggcagaagaaagcaaaaggagcagaaataaagacaacaaatgaagttgttttggctgtggagtttcacccaacagatgcaaataccataattacatgcggtaaatctcatattttcttctggacctggagcggcaattcactaacaagaaaacagggaatttttgggaaatatgaaaagccaaaatttgtgcagtgtttagcattcttggggaatggagatgttcttactggagactcaggtggagtcatgcttatatggagcaaaactactgtagagcccacacctgggaaaggacctaaaggtgtatatcaaatcagcaaacaaatcaaagctcatgatggcagtgtgttcacactttgtcagatgagaaatgggatgttattaactggaggagggaaagacagaaaaataattctgtgggatcatgatctgaatcctgaaagagaaatagaggttcctgatcagtatggcacaatcagagctgtagcagaaggaaaggcagatcaatttttagtaggcacatcacgaaactttattttacgaggaacatttaatgatggcttccaaatagaagtacagggtcatacagatgagctttggggtcttgccacacatcccttcaaagatttgctcttgacatgtgctcaggacaggcaggtgtgcctgtggaactcaatggaacacaggctggaatggaccaggctggtagatgaaccaggacactgtgcagattttcatccaagtggcacagtggtggccataggaacgcactcaggcaggtggtttgttctggatgcagaaaccagagatctagtttctatccacacagacgggaatgaacagctctctgtgatgcgctactcaatagatggtaccttcctggctgtaggatctcatgacaactttatttacctctatgtagtctctgaaaatggaagaaaatatagcagatatggaaggtgcactggacattccagctacatcacacaccttgactggtccccagacaacaagtatataatgtctaactcgggagactatgaaatattgtactgggacattccaaatggctgcaaactaatcaggaatcgatcggattgtaaggacattgattggacgacatatacctgtgtgctaggatttcaagtatttggtgtctggccagaaggatctgatgggacagatatcaatgcactggtgcgatcccacaatagaaaggtgatagctgttgccgatgacttttgtaaagtccatctgtttcagtatccctgctccaaagcaaaggctcccagtcacaagtacagtgcccacagcagccatgtcaccaatgtcagttttactcacaatgacagtcacctgatatcaactggtggaaaagacatgagcatcattcagtggaaacttgtggaaaagttatctttgcctcagaatgagactgtagcggatactactctaaccaaagcccccgtctcttccactgaaagtgtcatccaatctaatactcccacaccgcctccttctcagcccttaaatgagacagctgaagaggaaagtagaataagcagttctcccacacttctggagaacagcctggaacaaactgtggagccaagtgaagaccacagcgaggaggagagtgaagagggcagcggagaccttggtgagcctctttatgaagagccatgcaacgagataagcaaggagcaggccaaagccacccttctggaggaccagcaagacccttcgccctcgtcctaacaccctggcttcagtgcaactcttttccttcagctgcatgtgattttgtgataaagttcaggtaacaggatgggcagtgatggagaatcactgttgattgagattttggtttccatgtgatttgttttcttcaatagtcttattttcagtctctcaaatacagccaacttaaagttttagtttggtgtttattgaaaattaaccaaacttaatactaggagaagactgaatcattaatgatgtctcacaaattactgtgtacctaagtggtgtgatgtaaatactggaaacaaaaacagcagttgcattgattttgaaaacaaacccccttgttatctgaacatgttttcttcaggaacaaccagaggtatcacaaacactgttactcatctactggctcagactgtactacttttttttttttttttcctgaaaaagaaaccagaaaaaaatgtactcttactgagataccctctcaccccaaatgtgtaatggaaaatttttaattaagaaaaacttcagttttgccaagtgcaatggtgttgccttctttaaaaaatgccgttttcttacactaccagtggatgtccagacatgctcttagtctactagagaggtgctgccttttctaagtcataatgaggaacagtcccttaatttcttgtgtgcaactctgttttatcctagaactaagagagcattggtttgttaaagagctttcaatgtatattaaaaccttcaatactcagaaatgatggattcctccaaggagtcctttactagcctaaacattctcaaatgtttgagattcaagtgaatggaaggaaaaccacatgcctttaaaactaaactgtaataattacctggctaatttcagctaagccttcatcataatttgttccctcagtaataggagaaatataaatacagtaagtttagattattgaattggtgcttgaaatttattggttttgttgtaattttatacagattatatgagggataagatactcatcaaattgcaaattcttttttttacagaagtgtgggtaacagtcacagcagttttttttaccaacagcatacttaacagacttgctgtgtagcagtttttttctggtggagttgctgtaagtcttgtaagtctaatgtggctatcctactcttttgggcaatgcatgtattatgcattggaaaggtattttttttaagttctgttggctagctatggttttcagtacatttcctactttaagagtaattactgacaaatatgtatttcctatatgtttatactttgattataaaaaagtattttgttttgattttttaacttgctgcattgttttgatactttctatttttttggtcaaatcatgtttagaaactttggatgagttaagaagtcttaagtatgcaggcgtttacgtgattgtgccattccaaagtgcatcagaactgtcattcccttctaatatcttctcaggagtaatacaaatcaggtatttcatcatcatttggtaatatgaaaactccagtgaactcccaaggacatttacaacatttatattcacacgctgtatggaagggtgtgggtgtgtgtgaaggggcgagtggagacactgtgtgtatctctagataagaagatatgcaccacgttgaaaatactcagtgtagatctctatgtgtataggtatctgtatatctttccttttgtttacaactgttaaaaaacctcaaaatagttctcttcaaaagaagagagattccaagcaacccatctttcttcagtatgtatgttctgtacatacttatcggagcgcgccagtaagtatcaggcatatatatctgtctgttagcaatgattattacatcatcagatcagcatgtgctatactccctgcaagaaatatactgacatgaacaggcagttcttggagaagaaagagcatttctttaagtacctggggaatacagctctcagtgatcagcagggagtttatttgaggacatcagtcacctttggggttgccatgtacaatgagatttataatcatgatactcttcggtggtagtttcaaaagacactactaatacgcaggaagcgttccagctatttaatgctggcaactactgtttaatggtcagttaaatctgtgataatggttggaagtgggtggggttatgaaattgtagatgtttttagaaaaacttgtgaatgaaaatgaatccaagtgtttcatgtgaagatgttgagccattgctatcatgcattcctgtctcatggcagaaaattttgaagattaaaaaataaaataatcaaaatgtttcctctttctaa

SEQ ID NO: 128993 - DNA, 3797 bp, Homo sapiens
  Payload ID: 5227
  Gene Symbol: EML4
  Gene Name: echinoderm microtubule associated protein like 4
  ENST ID: ENST00000401738
  CDS Start-End: 152-3130
ggcgaacggacggacgacggaggcgggagccggtagccgagccgggcgacctagagaacgagcgggtcaggctcagcgtcggccactctgtcggtccgctgaatgaagtgcccgcccctctaagcccggagcccggcgctttccccgcaagatggacggtttcgccggcagtctcgatgatagtatttctgctgcaagtacttctgatgttcaagatcgcctgtcagctcttgagtcacgagttcagcaacaagaagatgaaatcactgtgctaaaggcggctttggctgatgttttgaggcgtcttgcaatctctgaagatcatgtggcctcagtgaaaaaatcagtctcaagtaaaggccaaccaagccctcgagcagttattcccatgtcctgtataaccaatggaagtggtgcaaacagaaaaccaagtcataccagtgctgtctcaattgcaggaaaagaaactctttcatctgctgctaaaagtggtacagaaaaaaagaaagaaaaaccacaaggacagagagaaaaaaaagaggaatctcattctaatgatcaaagtccacaaattcgagcatcaccttctccccagccctcttcacaacctctccaaatacacagacaaactccagaaagcaagaatgctactcccaccaaaagcataaaacgaccatcaccagctgaaaagtcacataattcttgggaaaattcagatgatagccgtaataaattgtcgaaaataccttcaacacccaaattaataccaaaagttaccaaaactgcagacaagcataaagatgtcatcatcaaccaagcaaaaatgtcaactcgcgaaaaaaacagccaagaaggagaatatattaaaatgtttatgcgcggtcggccaattaccatgttcattccttccgatgttgacaactatgatgacatcagaacggaactgcctcctgagaagctcaaactggagtgggcatatggttatcgaggaaaggactgtagagctaatgtttaccttcttccgaccgggaaaatagtttatttcattgcatcagtagtagtactatttaattatgaggagagaactcagcgacactacctgggccatacagactgtgtgaaatgccttgctatacatcctgacaaaattaggattgcaactggacagatagctggcgtggataaagatggaaggcctctacaaccccacgtcagagtgtgggattctgttactctatccacactgcagattattggacttggcacttttgagcgtggagtaggatgcctggatttttcaaaagcagattcaggtgttcatttatgtattattgatgactccaatgagcatatgcttactgtatgggactggcagaagaaagcaaaaggagcagaaataaagacaacaaatgaagttgttttggctgtggagtttcacccaacagatgcaaataccataattacatgcggtaaatctcatattttcttctggacctggagcggcaattcactaacaagaaaacagggaatttttgggaaatatgaaaagccaaaatttgtgcagtgtttagcattcttggggaatggagatgttcttactggagactcaggtggagtcatgcttatatggagcaaaactactgtagagcccacacctgggaaaggacctaaaggtgtatatcaaatcagcaaacaaatcaaagctcatgatggcagtgtgttcacactttgtcagatgagaaatgggatgttattaactggaggagggaaagacagaaaaataattctgtgggatcatgatctgaatcctgaaagagaaatagaggttcctgatcagtatggcacaatcagagctgtagcagaaggaaaggcagatcaatttttagtaggcacatcacgaaactttattttacgaggaacatttaatgatggcttccaaatagaagtacagggtcatacagatgagctttggggtcttgccacacatcccttcaaagatttgctcttgacatgtgctcaggacaggcaggtgtgcctgtggaactcaatggaacacaggctggaatggaccaggctggtagatgaaccaggacactgtgcagattttcatccaagtggcacagtggtggccataggaacgcactcaggcaggtggtttgttctggatgcagaaaccagagatctagtttctatccacacagacgggaatgaacagctctctgtgatgcgctactcaatagatggtaccttcctggctgtaggatctcatgacaactttatttacctctatgtagtctctgaaaatggaagaaaatatagcagatatggaaggtgcactggacattccagctacatcacacaccttgactggtccccagacaacaagtatataatgtctaactcgggagactatgaaatattgtactgggacattccaaatggctgcaaactaatcaggaatcgatcggattgtaaggacattgattggacgacatatacctgtgtgctaggatttcaagtatttggtgtctggccagaaggatctgatgggacagatatcaatgcactggtgcgatcccacaatagaaaggtgatagctgttgccgatgacttttgtaaagtccatctgtttcagtatccctgctccaaagcaaaggctcccagtcacaagtacagtgcccacagcagccatgtcaccaatgtcagttttactcacaatgacagtcacctgatatcaactggtggaaaagacatgagcatcattcagtggaaacttgtggaaaagttatctttgcctcagaatgagactgtagcggatactactctaaccaaagcccccgtctcttccactgaaagtgtcatccaatctaatactcccacaccgcctccttctcagcccttaaatgagacagctgaagaggaaagtagaataagcagttctcccacacttctggagaacagcctggaacaaactgtggagccaagtgaagaccacagcgaggaggagagtgaagagggcagcggagaccttggtgagcctctttatgaagagccatgcaacgagataagcaaggagcaggccaaagccacccttctggaggaccagcaagacccttcgccctcgtcctaacaccctggcttcagtgcaactcttttccttcagctgcatgtgattttgtgataaagttcaggtaacaggatgggcagtgatggagaatcactgttgattgagattttggtttccatgtgatttgttttcttcaatagtcttattttcagtctctcaaatacagccaacttaaagttttagtttggtgtttattgaaaattaaccaaacttaatactaggagaagactgaatcattaatgatgtctcacaaattactgtgtacctaagtggtgtgatgtaaatactggaaacaaaaacagcagttgcattgattttgaaaacaaacccccttgttatctgaacatgttttcttcaggaacaaccagaggtatcacaaacactgttactcatctactggctcagactgtactacttttttttttttttttcctgaaaaagaaaccagaaaaaaatgtactcttactgagataccctctcaccccaaatgtgtaatggaaaatttttaattaagaaaaacttcagttttgccaagtgcaatggtgttgccttctttaaaaaatgccgttttcttacactaccagtggatgtccagacatgctcttagtctactagagaggtgctgccttttctaagtcataatgaggaacagtcccttaatttcttgtgt

SEQ ID NO: 128994 - DNA, 3568 bp, Homo sapiens
  Payload ID: 5227
  Gene Symbol: EML4
  Gene Name: echinoderm microtubule associated protein like 4
  Uniprot ID: Q9HC35
  ENST ID: ENST00000402711
  CDS Start-End: 260-3031
gcggcgctcgcggctgctgcctgggagggaggccgggcaggcggctgagcggcgcggctctcaacgtgacggggaagtggttcgggcggccgcggcttactaccccagggcgaacggacggacgacggaggcgggagccggtagccgagccgggcgacctagagaacgagcgggtcaggctcagcgtcggccactctgtcggtccgctgaatgaagtgcccgcccctctaagcccggagcccggcgctttccccgcaagatggacggtttcgccggcagtctcgatgatagtatttctgctgcaagtacttctgatgttcaagatcgcctgtcagctcttgagtcacgagttcagcaacaagaagatgaaatcactgtgctaaaggcggctttggctgatgttttgaggcgtcttgcaatctctgaagatcatgtggcctcagtgaaaaaatcagtctcaagtaaaggccaaccaagccctcgagcagttattcccatgtcctgtataaccaatggaagtggtgcaaacagaaaaccaagtcataccagtgctgtctcaattgcaggaaaagaaactctttcatctgctgctaaaagcataaaacgaccatcaccagctgaaaagtcacataattcttgggaaaattcagatgatagccgtaataaattgtcgaaaataccttcaacacccaaattaataccaaaagttaccaaaactgcagacaagcataaagatgtcatcatcaaccaagaaggagaatatattaaaatgtttatgcgcggtcggccaattaccatgttcattccttccgatgttgacaactatgatgacatcagaacggaactgcctcctgagaagctcaaactggagtgggcatatggttatcgaggaaaggactgtagagctaatgtttaccttcttccgaccgggaaaatagtttatttcattgcatcagtagtagtactatttaattatgaggagagaactcagcgacactacctgggccatacagactgtgtgaaatgccttgctatacatcctgacaaaattaggattgcaactggacagatagctggcgtggataaagatggaaggcctctacaaccccacgtcagagtgtgggattctgttactctatccacactgcagattattggacttggcacttttgagcgtggagtaggatgcctggatttttcaaaagcagattcaggtgttcatttatgtattattgatgactccaatgagcatatgcttactgtatgggactggcagaagaaagcaaaaggagcagaaataaagacaacaaatgaagttgttttggctgtggagtttcacccaacagatgcaaataccataattacatgcggtaaatctcatattttcttctggacctggagcggcaattcactaacaagaaaacagggaatttttgggaaatatgaaaagccaaaatttgtgcagtgtttagcattcttggggaatggagatgttcttactggagactcaggtggagtcatgcttatatggagcaaaactactgtagagcccacacctgggaaaggacctaaaggtgtatatcaaatcagcaaacaaatcaaagctcatgatggcagtgtgttcacactttgtcagatgagaaatgggatgttattaactggaggagggaaagacagaaaaataattctgtgggatcatgatctgaatcctgaaagagaaatagaggttcctgatcagtatggcacaatcagagctgtagcagaaggaaaggcagatcaatttttagtaggcacatcacgaaactttattttacgaggaacatttaatgatggcttccaaatagaagtacagggtcatacagatgagctttggggtcttgccacacatcccttcaaagatttgctcttgacatgtgctcaggacaggcaggtgtgcctgtggaactcaatggaacacaggctggaatggaccaggctggtagatgaaccaggacactgtgcagattttcatccaagtggcacagtggtggccataggaacgcactcaggcaggtggtttgttctggatgcagaaaccagagatctagtttctatccacacagacgggaatgaacagctctctgtgatgcgctactcaatagatggtaccttcctggctgtaggatctcatgacaactttatttacctctatgtagtctctgaaaatggaagaaaatatagcagatatggaaggtgcactggacattccagctacatcacacaccttgactggtccccagacaacaagtatataatgtctaactcgggagactatgaaatattgtactgggacattccaaatggctgcaaactaatcaggaatcgatcggattgtaaggacattgattggacgacatatacctgtgtgctaggatttcaagtatttggtgtctggccagaaggatctgatgggacagatatcaatgcactggtgcgatcccacaatagaaaggtgatagctgttgccgatgacttttgtaaagtccatctgtttcagtatccctgctccaaagcaaaggctcccagtcacaagtacagtgcccacagcagccatgtcaccaatgtcagttttactcacaatgacagtcacctgatatcaactggtggaaaagacatgagcatcattcagtggaaacttgtggaaaagttatctttgcctcagaatgagactgtagcggatactactctaaccaaagcccccgtctcttccactgaaagtgtcatccaatctaatactcccacaccgcctccttctcagcccttaaatgagacagctgaagaggaaagtagaataagcagttctcccacacttctggagaacagcctggaacaaactgtggagccaagtgaagaccacagcgaggaggagagtgaagagggcagcggagaccttggtgagcctctttatgaagagccatgcaacgagataagcaaggagcaggccaaagccacccttctggaggaccagcaagacccttcgccctcgtcctaacaccctggcttcagtgcaactcttttccttcagctgcatgtgattttgtgataaagttcaggtaacaggatgggcagtgatggagaatcactgttgattgagattttggtttccatgtgatttgttttcttcaatagtcttattttcagtctctcaaatacagccaacttaaagttttagtttggtgtttattgaaaattaaccaaacttaatactaggagaagactgaatcattaatgatgtctcacaaattactgtgtacctaagtggtgtgatgtaaatactggaaacaaaaacagcagttgcattgattttgaaaacaaacccccttgttatctgaacatgttttcttcaggaacaaccagaggtatcacaaacactgttactcatctactggctcagactgtactacttttttttttttttttcctgaaaaagaaaccagaaaaaaatgtactcttactgagataccctctcaccccaaatgtgtaatggaaaatttttaattaagaaaaacttcagttttgccaagtgcaa

SEQ ID NO: 128995 - DNA, 5910 bp, Homo sapiens
  Payload ID: 5228
  Gene Symbol: EML5
  Gene Name: echinoderm microtubule associated protein like 5
  Uniprot ID: Q05BV3
  ENST ID: ENST00000380664
  CDS Start-End: 1-5910
atggcggcccggagcgccccgagctgccacctgcggctcgagtgggtgtacggctaccggggccaccagtgccgcaacaacctctactacactgcggccaaggagatcgtatacttcgtggcgggggtcggcgtggtgtacagcccgcgggagcacaggcagaagttctaccggggccacagcgacgacatcatcagccttgcattgcatcctgaacgagtgttggtagcaacaggacaagttgggaaagagccttatatttgtatttgggattcatacactgtgcagaccatatcagttttaaaggatgttcatacacatggtatagcttgcttggcgtttgacttagatggacagcgcttggtttcagttggacttgattcaaagaatgcagtttgtgtttgggactggaaaaggggaaaaatgttgtctatggctcctggtcatacagatagaatatttgatatttcttgggatttgtaccagccaaataaacttgtcagctgtggtgtaaaacatatcaagttctggagtttatgtggaaatgctctgaccccaaaacgaggtgtctttggtaagacgggtgaccttcagacaatactgtgcctagcctgtgcaagggatgaattaacatattctggtgcactcaatggggatatatatgtttggaaaggaatcaatcttatacgaacaatacaaggagcccatgctgcaggaatttttagcatgaatgcttgtgaagaaggctttgctactggtggcagagatggttgtattcgtctttgggatttaacttttaaaccaattactgtgattgatctcagggaaacagaccagggatacaaaggtttgtctgtaaggagtgtgtgttggcgaggtgaccacattctagttggaacacaggacagtgaaatttttgaaattgtggtgcaagaaagaaataaaccttttctaattatgcaagggcattgtgaaggtgaactttgggcacttgctgtccatcctactaaacctttggctgtgactggaagtgatgatcgttcggtcaggatatggagcctagtagatcatgcattaatagcaaggtgtaatatggaagaaccaattcgttgtgcagctgtcaatgcagatggaatccatcttgcccttggaatgaaggatggctcattcactgtacttagagtaagagatatgacggaagttgtacatattaaagataggaaggaggcaattcatgagttaaaatattcaccagatggaacttaccttgctgttggatgcaatgacagctcggttgatatttatggagttgctcagcgttataaaaaagttggcgagtgtttgggatcccttagtttcatcactcatctggactggtcttcagacagtagatatttgcagacaaatgatggaaatgggaaaagacttttttatagaatgccaggaggaaaggaagtgacaagtacagaagaaataaaaggtgttcattgggcttcatggacatgtgtttcaggccttgaagtaaatggaatttggcccaagtattcagatatcaacgatataaattcagtagatggaaattatattggccaagttttagttacagctgatgactatggaattataaaattattccgatatccatgtttaagaaaaggggccaagtttagaaaatatattggccattcagctcacgtaactaatgtcagatggtcacatgattatcagtgggttatttctattggtggagcagatcactctgtctttcagtggaaatttattcctgaaagaaaactgaaagatgctgttcacatagcaccccaagaaagtctggctgactctcatagtgatgaatcagattcagatctgtctgatgttccagaactggattctgaaattgaacaagagacacagctcacctaccgtcgacaggtttacaaagaagatctacctcagcttaaagaacagtgcaaagagaaacaaaaaagtgctacttctaaaagaagagagcgggctccaggaaatagtattcgattacactttgttcacggttacagaggttatgactgtcgaagtaatctgttttatactcaaattggtgaaattgtgtaccatgtggcagcagtgggtgtcatttataatcgacagcaaaacacacagcgtttttatctgggtcatgatgatgatattctctgcctaactattcatcctttgaaagactacgtggcaacaggccaggttggtagagatccctcaattcatatatgggatacagagaccattaaaccattgtccatattaaagggccaccaccagtatggtgttagtgccgttgatttctcagcggatgggaaacgtttggcatcagttggcatagatgatagccatactgttgtgctctgggactggaagaaaggagagaaactttcaatagcaagaggaagtaaagataagatttttgttgtaaagatgaacccctatgtgcctgataaactaattacagctggaattaaacacatgaaattttggcgtaaagcagggggaggattgattggaagaaaaggctacataggcacactggggaaaaatgacacaatgatgtgtgcagtgtatggatggactgaagagatggctttttctggaacatccacaggagatgtgtgtatctggagagacatctttcttgtaaaaacagtgaaagcgcatgatgggccagtgttcagtatgcatgcattggaaaaagggtttgtaactggaggaaaagatggtatagtagctctttgggatgactcttttgaaagatgtctcaagacctatgctataaaaagagctgcattggccccaggatctaaaggtcttctcttggaagataatccatctatacgtgccatatcattaggacatggtcatattttagttggcacaaagaatggtgaaatactagaagtggataaaagtggcccaataacacttctggttcagggacacatggaaggagaggtgtggggtttagctacacacccttatctgcccatctgtgctactgtaagcgatgataaaaccttaagaatatgggatctctcacctagtcattgtatgttggctgtccggaagctgaaaaagggtgggaggtgttgctgtttttctcctgatggtaaagctttagccgtaggtctcaacgatggaagcttcttaatggcaaatgcggatactctagaggatcttgtgtcttttcatcacagaaaagatatgatttcagatattcgattttcacctggttctgggaaatatcttgctgtagcatcccatgacagctttatagatatatacaatgtaatgagtagtaaacgagtaggaatatgcaaaggagctaccagttacataacccatattgattgggatattagaggaaagcttttacaggtcaacactggtgctaaggaacaattattctttgaagctcccagagggaaaaaacaaaccatccccagcgtggaggtagaaaaaattgcttgggcatcatggacaagtgtacttggtttatgctgtgaaggaatttggccagtaattggagaagttacagatgtaactgcttcttgcctcaccagtgacaaaatggttctagctaccggggacgatttgggatttgtgaagttatttagatatcctactaaagggaaatttggaaagtttaagaggtatgtggcccatagtacacatgtcacaaatgttcgctggacttatgatgacagcatgttggttaccctaggcggtacagatatgtctttaatggtgtggacaaatgagatggaaggctatcgagaaaaaaggccttgtgatagtgaagaatccgacattgattctgaagaagatgggggctatgacagtgatgttacaagggagaatgaaatcagttacaccatcagagccttatcaacaaatattcgcccaatgttaggaatcaagcctcatttacaacaaaaagaaccctcaattgatgaaaggcctccagtgagcagggccccaccacagccagagaaactccagacaaacaatgtaggcaagaaaaagagacctatagaggaccttgtgttggagctcatttttggttatcgaggcagagactgtaggaataatgttcactatttaaatgatggtgatgatataatttatcacactgcatctgttggaattctgcacaatgttgctacaggttctcagagtttttatcaggaacataatgatgatattctgtgcctcacagtaaaccagcaccccaaatttatcaacatagtggcaactggccaagtaggtgattcagcagacatgtcagctacagctccttctattcacatctgggatgcaatgaacaagcagactttatctatcctaagatgctaccattcaaagggagtatgttcagtcagcttcagtgctactggcaaactattgctgtctgtgggactagacccagaacatactattaccatttggagatggcaggaaggtgccaaaattgccagcagagctggtcacaatcaacgtatttttgtggcagaattccgaccagattcagatacccagtttgtctcagtgggagtaaaacatgtgaagttctggaccctggcaggaagagctcttcttagcaaaaaagggctactgagcacactggaagatgcccggatgcagaccatgctcgctattgcatttggtgcaaataacttgacgtttacaggtaccatcagtggtgatgtctgtgtgtggaaagatcacatattgtgtagaatcgtggcgagagctcacaacgggcctgtgtttgccatgtacaccaccctgcgagatggacttatcgtgactgggggaaaggaaaggccgtcaaaagaaggaggagcggttaaactgtgggatcaggaactgaggcggtgccgtgccttcaggcttgagacaggacaagccacagattgtgttcgttctgtgtgcagaggcaaaggcaagatccttgttgggacaaggaatgctgaaataatcgaagttggagagaaaaatgcagcttgtaatattttagttaacggtcatgtggatgggccaatctggggactagcaacacatccttccagggattttttcctttctgctgcagaagatgggacagtgagactttgggatattgctgataaaaagatgttaaacaaagtgaatttgggacatgctgctcgtactgtgtgttacagccctgaaggggacatggtggctattggaatgaaaaatggagaatttatcattttactagtgagttctctaaaaatatggggaaagaagagagacaggagatgtgcaatccatgatatcagatttagtccggattcccggtatctggcagtaggttctagtgagaactcagtggatttttatgacctaacgctgggccccactcttaacagaatcagctactgcaaagacattccaagctttgtcattcaaatggacttctctgcagatagcagttatctccaggtctctagtggctgctataaacggcatgtctatgaagtgccttcaggaaaacatcttatggatcatgccgctattgacagaattacttgggctacatggactagtattctaggagatgaggttttgggaatctggtccagacatgctgagaaagctgatgtcaactgtgcctgtgtatctcattcaggaatcagtcttgttacaggagatgactttggcatggttaagttatttgacttcccatgtccagaaaaatttgcaaaacacaaaaggttcttgggtcattcgccccatgtgacaaatattcgatttaccagtggtgatcgacatgttgttagtgctggaggtgatgactgcagcttatttgtctggaaatgtgtacatacacctcactga

SEQ ID NO: 128996 - DNA, 3600 bp, Homo sapiens
  Payload ID: 5228
  Gene Symbol: EML5
  Gene Name: echinoderm microtubule associated protein like 5
  ENST ID: ENST00000553526
  CDS Start-End: 1-183
atttcagatattcgattttcacctggttctgggaaatatcttgctgtagcatcccatgacagctttatagatatatacaatgtaatgagtagtaaacgagtaggaatatgcaaaggagctaccagttacataacccatattgattgggatattagagcttttacaggtcaacactggtgctaaggaacaattattctttgaagctcccagagggaaaaaacaaaccatccccagcgtggaggtagaaaaaattgcttgggcatcatggacaagtgtacttggtttatgctgtgaaggaatttggccagtaattggagaagttacagatgtaactgcttcttgcctcaccagtgacaaaatggttctagctaccggggacgatttgggatttgtgaagttatttagatatcctactaaagggaaatttggaaagtttaagaggtatgtggcccatagtacacatgtcacaaatgttcgctggacttatgatgacagcatgttggttaccctaggcggtacagatatgtctttaatggtgtggacaaatgagatggaaggctatcgagaaaaaaggccttgtgatagtgaagaatccgacattgattctgaagaagatgggggctatgacagtgatgttacaagggagaatgaaatcagttacaccatcagagccttatcaacaaatattcgcccaatgttaggaatcaagcctcatttacaacaaaaagaaccctcaattgatgaaaggcctccagtgagcagggccccaccacagccagagaaactccagacaaacaatgtaggcaagaaaaagagacctatagaggaccttgtgttggagctcatttttggttatcgaggcagagactgtaggaataatgttcactatttaaatgatggtgatgatataatttatcacactgcatctgttggaattctgcacaatgttgctacaggttctcagagtttttatcaggaacataatgatgatattctgtgcctcacagtaaaccagcaccccaaatttatcaacatagtggcaactggccaagtaggtgattcagcagacatgtcagctacagctccttctattcacatctgggatgcaatgaacaagcagactttatctatcctaagatgctaccattcaaagggagtatgttcagtcagcttcagtgctactggcaaactattgctgtctgtgggactagacccagaacatactattaccatttggagatggcaggaaggtgccaaaattgccagcagagctggtcacaatcaacgtatttttgtggcagaattccgaccagattcagatacccagtttgtctcagtgggagtaaaacatgtgaagttctggaccctggcaggaagagctcttcttagcaaaaaagggctactgagcacactggaagatgcccggatgcagaccatgctcgctattgcatttggtgcaaataacttgacgtttacaggtaccatcagtggtgatgtctgtgtgtggaaagatcacatattgtgtagaatcgtggcgagagctcacaacgggcctgtgtttgccatgtacaccaccctgcgagatggacttatcgtgactgggggaaaggaaaggccgtcaaaagaaggaggagcggttaaactgtgggatcaggaactgaggcggtgccgtgccttcaggcttgagacaggacaagccacagattgtgttcgttctgtgtgcagaggcaaaggcaagatccttgttgggacaaggaatgctgaaataatcgaagttggagagaaaaatgcagcttgtaatattttagttaacggtcatgtggatgggccaatctggggactagcaacacatccttccagggattttttcctttctgctgcagaagatgggacagtgagactttgggatattgctgataaaaagatgttaaacaaagtgaatttgggacatgctgctcgtactgtgtgttacagccctgaaggggacatggtggctattggaatgaaaaatggagaatttatcattttactagtgagttctctaaaaatatggggaaagaagagagacaggagatgtgcaatccatgatatcagatttagtccggattcccggtatctggcagtaggttctagtgagaactcagtggatttttatgacctaacgctgggccccactcttaacagaatcagctactgcaaagacattccaagctttgtcattcaaatggacttctctgcagatagcagttatctccaggtctctagtggctgctataaacggcatgtctatgaagtgccttcaggaaaacatcttatggatcatgccgctattgacagaattacttgggctacatggactagtattctaggagatgaggttttgggaatctggtccagacatgctgagaaagctgatgtcaactgtgcctgtgtatctcattcaggaatcagtcttgttacaggagatgactttggcatggttaagttatttgacttcccatgtccagaaaaatttgcaaaacacaaaaggttcttgggtcattcgccccatgtgacaaatattcgatttaccagtggtgatcgacatgttgttagtgctggaggtgatgactgcagcttatttgtctggaaatgtgtacatacacctcactgagagatgctgagatgactacagaaattaactttgagaccagaattacagagaagaaaaaccaaaacccaaccctgcatggtcaagtggtgctaacccaagactgtaacagggagaaatgcccagaatcatcaaaatagtgaaagactgatctgttcaaaatatttgctatatgcactgggtataatccgtaatccatacactgccagataatgccatttcaaggaaggatcgaatacttgatggtaaaggccaagtccccctgtattgggaagtgtgtgatttcggcagacctgctgggaaaatttagggtagagcactctttacagaagaactcaaaaacccaatttggataattttcattatctttttagcaaaatggtttcttaatgtttatattttattttcaaggttcattgtttaatgaaatattttattcttgcatttccataaggaaagggaaagtcatgatcatcctaaaggatcacagtttttaaaaggcaaacattttccctaaggaaacagacacaagctttcctagagaatatgatgttttttaggcattaataaggtccttttttataaaggacacttttctcctagtagttttgaattcaggaacagatccaaagttagcagtatatggctgctacatttccattttcattttcgagccatcagtttatgttcagatgccatctctgtaatcgcacatttaaaacataactgtagcctcactaatggaaaagtagtatgatgaacaatcattcccaatggtgtacaatgtaagggttttagggagcaacagtatttaactggaagaaagaattgcatatttaatgtagtctaatatatacacatttgtttaacatgtaaacaaaagtgttaaattcacatatacaacattatacaatttaatcactcttggaataaaatttttatagcctttt

SEQ ID NO: 128997 - DNA, 9570 bp, Homo sapiens
  Payload ID: 5228
  Gene Symbol: EML5
  Gene Name: echinoderm microtubule associated protein like 5
  Uniprot ID: Q05BV3
  ENST ID: ENST00000554922
  CDS Start-End: 250-6183
ctgggcatccacttgacagccggcggcgctcgcggccctcagcatgttccgcgaggcgagggttttcctcccgcctgtgggctgaggcggcggcggcccccgaaacgagatgcacctgacgggcgcggcttagaggacgcggctggcgggaagtcccggcagccagcgggagggctttcgttgccgggccgccgccgcctcccgtcgccgccgcgggcccgagcgggagcggcgggtgggcgccccgacatggcggcccggagcgccccgagctgccacctgcggctcgagtgggtgtacggctaccggggccaccagtgccgcaacaacctctactacactgcggccaaggagatcgtatacttcgtggcgggggtcggcgtggtgtacagcccgcgggagcacaggcagaagttctaccggggccacagcgacgacatcatcagccttgcattgcatcctgaacgagtgttggtagcaacaggacaagttgggaaagagccttatatttgtatttgggattcatacactgtgcagaccatatcagttttaaaggatgttcatacacatggtatagcttgcttggcgtttgacttagatggacagcgcttggtttcagttggacttgattcaaagaatgcagtttgtgtttgggactggaaaaggggaaaaatgttgtctatggctcctggtcatacagatagaatatttgatatttcttgggatttgtaccagccaaataaacttgtcagctgtggtgtaaaacatatcaagttctggagtttatgtggaaatgctctgaccccaaaacgaggtgtctttggtaagacgggtgaccttcagacaatactgtgcctagcctgtgcaagggatgaattaacatattctggtgcactcaatggggatatatatgtttggaaaggaatcaatcttatacgaacaatacaaggagcccatgctgcaggaatttttagcatgaatgcttgtgaagaaggctttgctactggtggcagagatggttgtattcgtctttgggatttaacttttaaaccaattactgtgattgatctcagggaaacagaccagggatacaaaggtttgtctgtaaggagtgtgtgttggcgaggtgaccacattctagttggaacacaggacagtgaaatttttgaaattgtggtgcaagaaagaaataaaccttttctaattatgcaagggcattgtgaaggtgaactttgggcacttgctgtccatcctactaaacctttggctgtgactggaagtgatgatcgttcggtcaggatatggagcctagtagatcatgcattaatagcaaggtgtaatatggaagaaccaattcgttgtgcagctgtcaatgcagatggaatccatcttgcccttggaatgaaggatggctcattcactgtacttagagtaagagatatgacggaagttgtacatattaaagataggaaggaggcaattcatgagttaaaatattcaccagatggaacttaccttgctgttggatgcaatgacagctcggttgatatttatggagttgctcagcgttataaaaaagttggcgagtgtttgggatcccttagtttcatcactcatctggactggtcttcagacagtagatatttgcagacaaatgatggaaatgggaaaagacttttttatagaatgccaggaggaaaggaagtgacaagtacagaagaaataaaaggtgttcattgggcttcatggacatgtgtttcaggccttgaagtaaatggaatttggcccaagtattcagatatcaacgatataaattcagtagatggaaattatattggccaagttttagttacagctgatgactatggaattataaaattattccgatatccatgtttaagaaaaggggccaagtttagaaaatatattggccattcagctcacgtaactaatgtcagatggtcacatgattatcagtgggttatttctattggtggagcagatcactctgtctttcagtggaaatttattcctgaaagaaaactgaaagatgctgttcacatagcaccccaagaaagtctggctgactctcatagtgatgaatcagattcagatctgtctgatgttccagaactggattctgaaattgaacaagagacacagctcacctaccgtcgacaggtttacaaagaagatctacctcagcttaaagaacagtgcaaagagaaacaaaaaagtgctacttctaaaagaagagagcgggctccaggaaatagtattcgattacactttgttcacggttacagaggttatgactgtcgaagtaatctgttttatactcaaattggtgaaattgtgtaccatgtggcagcagtgggtgtcatttataatcgacagcaaaacacacagcgtttttatctgggtcatgatgatgatattctctgcctaactattcatcctttgaaagactacgtggcaacaggccaggttggtagagatccctcaattcatatatgggatacagagaccattaaaccattgtccatattaaagggccaccaccagtatggtgttagtgccgttgatttctcagcggatgggaaacgtttggcatcagttggcatagatgatagccatactgttgtgctctgggactggaagaaaggagagaaactttcaatagcaagaggaagtaaagataagatttttgttgtaaagatgaacccctatgtgcctgataaactaattacagctggaattaaacacatgaaattttggcgtaaagcagggggaggattgattggaagaaaaggctacataggcacactggggaaaaatgacacaatgatgtgtgcagtgtatggatggactgaagagatggctttttctggaacatccacaggagatgtgtgtatctggagagacatctttcttgtaaaaacagtgaaagcgcatgatgggccagtgttcagtatgcatgcattggaaaaagggtttgtaactggaggaaaagatggtatagtagctctttgggatgactcttttgaaagatgtctcaagacctatgctataaaaagagctgcattggccccaggatctaaaggtcttctcttggaagataatccatctatacgtgccatatcattaggacatggtcatattttagttggcacaaagaatggtgaaatactagaagtggataaaagtggcccaataacacttctggttcagggacacatggaaggagaggtgtggggtttagctacacacccttatctgcccatctgtgctactgtaagcgatgataaaaccttaagaatatgggatctctcacctagtcattgtatgttggctgtccggaagctgaaaaagggtgggaggtgttgctgtttttctcctgatggtaaagctttagccgtaggtctcaacgatggaagcttcttaatggcaaatgcggatactctagaggatcttgtgtcttttcatcacagaaaagatatgatttcagatattcgattttcacctggttctgggaaatatcttgctgtagcatcccatgacagctttatagatatatacaatgtaatgagtagtaaacgagtaggaatatgcaaaggagctaccagttacataacccatattgattgggatattagaggaaagcttttacaggtcaacactggtgctaaggaacaattattctttgaagctcccagagggaaaaaacaaaccatccccagcgtggaggtagaaaaaattgcttgggcatcatggacaagtgtacttggtttatgctgtgaaggaatttggccagtaattggagaagttacagatgtaactgcttcttgcctcaccagtgacaaaatggttctagctaccggggacgatttgggatttgtgaagttatttagatatcctactaaagggaaatttggaaagtttaagaggtatgtggcccatagtacacatgtcacaaatgttcgctggacttatgatgacagcatgttggttaccctaggcggtacagatatgtctttaatggtgtggacaaatgagatggaaggctatcgagaaaaaaggccttgtgatagtgaagaatccgacattgattctgaagaagatgggggctatgacagtgatgttacaagggagaatgaaatcagttacaccatcagagccttatcaacaaatattcgcccaatgttaggaatcaagcctcatttacaacaaaaagaaccctcaattgatgaaaggcagggagtagtaagaggttccaggcctccagtgagcagggccccaccacagccagagaaactccagacaaacaatgtaggcaagaaaaagagacctatagaggaccttgtgttggagctcatttttggttatcgaggcagagactgtaggaataatgttcactatttaaatgatggtgatgatataatttatcacactgcatctgttggaattctgcacaatgttgctacaggttctcagagtttttatcaggaacataatgatgatattctgtgcctcacagtaaaccagcaccccaaatttatcaacatagtggcaactggccaagtaggtgattcagcagacatgtcagctacagctccttctattcacatctgggatgcaatgaacaagcagactttatctatcctaagatgctaccattcaaagggagtatgttcagtcagcttcagtgctactggcaaactattgctgtctgtgggactagacccagaacatactattaccatttggagatggcaggaaggtgccaaaattgccagcagagctggtcacaatcaacgtatttttgtggcagaattccgaccagattcagatacccagtttgtctcagtgggagtaaaacatgtgaagttctggaccctggcaggaagagctcttcttagcaaaaaagggctactgagcacactggaagatgcccggatgcagaccatgctcgctattgcatttggtgcaaataacttgacgtttacaggtaccatcagtggtgatgtctgtgtgtggaaagatcacatattgtgtagaatcgtggcgagagctcacaacgggcctgtgtttgccatgtacaccaccctgcgagatggacttatcgtgactgggggaaaggaaaggccgtcaaaagaaggaggagcggttaaactgtgggatcaggaactgaggcggtgccgtgccttcaggcttgagacaggacaagccacagattgtgttcgttctgtgtgcagaggcaaaggcaagatccttgttgggacaaggaatgctgaaataatcgaagttggagagaaaaatgcagcttgtaatattttagttaacggtcatgtggatgggccaatctggggactagcaacacatccttccagggattttttcctttctgctgcagaagatgggacagtgagactttgggatattgctgataaaaagatgttaaacaaagtgaatttgggacatgctgctcgtactgtgtgttacagccctgaaggggacatggtggctattggaatgaaaaatggagaatttatcattttactagtgagttctctaaaaatatggggaaagaagagagacaggagatgtgcaatccatgatatcagatttagtccggattcccggtatctggcagtaggttctagtgagaactcagtggatttttatgacctaacgctgggccccactcttaacagaatcagctactgcaaagacattccaagctttgtcattcaaatggacttctctgcagatagcagttatctccaggtctctagtggctgctataaacggcatgtctatgaagtgccttcaggaaaacatcttatggatcatgccgctattgacagaattacttgggctacatggactagtattctaggagatgaggttttgggaatctggtccagacatgctgagaaagctgatgtcaactgtgcctgtgtatctcattcaggaatcagtcttgttacaggagatgactttggcatggttaagttatttgacttcccatgtccagaaaaatttgcaaaacacaaaaggttcttgggtcattcgccccatgtgacaaatattcgatttaccagtggtgatcgacatgttgttagtgctggaggtgatgactgcagcttatttgtctggaaatgtgtacatacacctcactgagagatgctgagatgactacagaaattaactttgagaccagaattacagagaagaaaaaccaaaacccaaccctgcatggtcaagtggtgctaacccaagactgtaacagggagaaatgcccagaatcatcaaaatagtgaaagactgatctgttcaaaatatttgctatatgcactgggtataatccgtaatccatacactgccagataatgccatttcaaggaaggatcgaatacttgatggtaaaggccaagtccccctgtattgggaagtgtgtgatttcggcagacctgctgggaaaatttagggtagagcactctttacagaagaactcaaaaacccaatttggataattttcattatctttttagcaaaatggtttcttaatgtttatattttattttcaaggttcattgtttaatgaaatattttattcttgcatttccataaggaaagggaaagtcatgatcatcctaaaggatcacagtttttaaaaggcaaacattttccctaaggaaacagacacaagctttcctagagaatatgatgttttttaggcattaataaggtccttttttataaaggacacttttctcctagtagttttgaattcaggaacagatccaaagttagcagtatatggctgctacatttccattttcattttcgagccatcagtttatgttcagatgccatctctgtaatcgcacatttaaaacataactgtagcctcactaatggaaaagtagtatgatgaacaatcattcccaatggtgtacaatgtaagggttttagggagcaacagtatttaactggaagaaagaattgcatatttaatgtagtctaatatatacacatttgtttaacatgtaaacaaaagtgttaaattcacatatacaacattatacaatttaatcactcttggaataaaatttttatagccttttttctattgggaaaatttgtttagatgtgtgccactccataggtttatttccaaaatgaatgagcccaactccatttgtaaaaacttgtcagttagaattcctttttttagtggattagggctgaattcttagatccttatttcttttcactttaaatgctgccaaagatcactactcatcattcaggaattcgctgtctagcctatctgtagtttcctgaagattgaaaattatgtagactgctatttaaaaatatatttttctaagtgtgaggtttaagatgctgtattgaccctatgagtttttaatgtgttaattatctttatagcataatagatcgctttaggttcctggaatcccatttggtctgacaggatatatgaagattcttaatacctattttctgtgtctaatacttggttaatactaaaaatagaaatgactaaattacatcacagaaagcataaccagtgattgaacctggtagttttaaagctctaaatagctgtggctgaaggactgattatggggctaagaagcttgaaacgtaagttggtacttgttcatcagtggattctcctaaattaagccaaattttgaaatacatgactattaagtttctactcatgtatttacagtcagtcaataaattaaaggaggaaaaaaatccctgaacaacctgcccataaaaagaaaaatactctacatttgagcctgctgcagttttaaattttccctctgggtcaagtttgccagcttttggctacagagaaattatatttccattacagtgcaggtagaaactctgtaaccttaagcatgtaaactacatagaataaaactgtttccactgcatttctgtccttcaaagtggccaacctgattaagtcagccttaatcactgctgctgtcagtttcacgactaaaggtcatattgactaagtagtcatcagctgaccacctcgctgtatcagccagcaacgaggggaaggtgaagaaacatgataggccatatagaatctgccctatgtttacttttttaacccagataattatttttgtgtgcagtatctaagctcctgattgtgtaacctgggacttctggcaccttttgttccattcattttatgtataaaatgcatgccaaagcacactgtgccctctggtacccttgcttccaatcgccaaccatgctcatttccttcctttttttgtggtccctttttgtggtgatcattttaaaccacgtcatccaacaaatgttttatggtcaaccttagcttgttcataagccatagcaactgaaagattaaactcttaaatatgtgtctgggcagtggctattaaatagcaaaaaacaatcagattttagtattttattatttccttgtaaaatggctgaactaaattaaacccttgtttcccatttgttctataatttatagtgaaactgagaacaaaactatctttataaatgatagctaaaagtatttccagatatttaaacaatttaaaataaatttcttctgcagagatgcaaagcatctcaacactggaatgaacaaatgccttaaattcaatggagtaaacctttagaatgaagaggaactgtcatttcacccaagccgaagacaacagccttatgcacttgtgtgctctgtctttgctgcttctcgtgtttcaagcctttcctgtgggatcagcacagcaaagtgcaacttaccaaatggtttaatgactggttaattctttcttctcccaatggaaaagcaatggcaacacaacagtagactgctggcttgacaatcttaaacgtgagcctttgcacatgtaggtttatcatcatttgagtatacgactaagcaagtcaatgaactttttttttttttttagcagtttaatttggtcctgagaatgttgcagtctttattaccccttttgcattaatccacttttctaaccaccttttaagctttaatttttaacactatacaccaagtctttgaaatcagtgatctgttatttaactctaaagcatttgacacttcttgccttaacagttttaaaaaccacacacaaaaaaactctgtaagtaatacagtaggccaaaagtttcatcctatctatcttgcagtttacctatctgatctgatctctgtaattatagttctgtcatttaaaatatactatttaaatctaatttttacatttcaaaaattatcttcagtagtaactaagtatattttctgtggattctgagaatgttatttttcagaatgtgagaatatatatgtacatttataatcttgtgactttaaagtctgttttcagatacagtatgtaaatacttgtaaaaaaatttgtataattttgtgataatgtagtttcccaaaaaaattatttagaaggcattatgttattagtaaatgagagcactgta

SEQ ID NO: 128998 - DNA, 770 bp, Homo sapiens
  Payload ID: 5228
  Gene Symbol: EML5
  Gene Name: echinoderm microtubule associated protein like 5
  ENST ID: ENST00000555823
  CDS Start-End: 1-770
gggctactgagcacactggaagatgcccggatgcagaccatgctcgctattgcatttggtgcaaataacttgacgtttacaggtaccatcagtggtgatgtctgtgtgtggaaagatcacatattgtgtagaatcgtggcgagagctcacaacgggcctgtgtttgccatgtacaccaccctgcgagatggacttatcgtgactgggggaaaggaaaggccgtcaaaagaaggaggagcggttaaactgtgggatcaggaactgaggcggtgccgtgccttcaggcttgagacaggacaagccacagattgtgttcgttctgtgtgcagaggcaaaggcaagatccttgttgggacaaggaatgctgaaataatcgaagttggagagaaaaatgcagcttgtaatattttagttaacggtcatgtggatgggccaatctggggactagcaacacatccttccagggattttttcctttctgctgcagaagatgggacagtgagactttgggatattgctgataaaatgttaaacaaagtgaatttgggacatgctgctcgtactgtgtgttacagccctgaaggggacatggtggctattggaatgaaaaatggagaatttatcattttactagtgagttctctaaaaatatggggaaagaagagagacaggagatgtgcaatccatgatatcagaatcagctactgcaaagacattccaagctttgtcattcaaatggacttctctgcagatagcagttatctccaggt

SEQ ID NO: 128999 - DNA, 3925 bp, Homo sapiens
  Payload ID: 5228
  Gene Symbol: EML5
  Gene Name: echinoderm microtubule associated protein like 5
  ENST ID: ENST00000553281
  CDS Start-End: 1-617
cagatggaacttaccttgctgttggatgcaatgacagctcggttgatatttatggagttgctcagcgttataaaaaagttggcgagtgtttgggatcccttagtttcatcactcatctggactggtcttcagacagtagatatttgcagacaaatgatggaaatgggaaaagacttttttatagaatgccaggaggaaaggaagtgacaagtacagaagaaataaaaggtgttcattgggcttcatggacatgtgtttcaggccttgaagtaaatggaatttggcccaagtattcagatatcaacgatataaattcagtagatggaaattatattggccaagttttagttacagctgatgactatggaattataaaattattccgatatccatgtttaagaaaaggggccaagtttagaaaatatattggccattcagctcacgtaactaatgtcagatggtcacatgattatcagtgggttatttctattggtggagcagatcactctgtctttcagtggaaatttattcctgaaagaaaactgaaagatgctgttcacatagcaccccaaggttatattcacttatatttgcacagacatttaaatttgatgtagcggtcattggggagccagtgaagggatttaaaggagctattgagtttgcagtgagtggagaggaagataatctgtagtacagtttactgacatctgtgtcacttgaatagaaagtctggctgactctcatagtgatgaatcagattcagatctgtctgatgttccagaactggattctgaaattgaacaagagacacagctcacctaccgtcgacaggtttacaaagaagatctacctcagcttaaagaacagtgcaaagagaaacaaaaaagtgctacttctaaaagaagagagcgggctccaggaaatagtattcgattacactttgttcacggttacagaggttatgactgtcgaagtaatctgttttatactcaaattggtgaaattgtgtaccatgtggcagcagtgggtgtcatttataatcgacagcaaaacacacagcgtttttatctgggtcatgatgatgatattctctgcctaactattcatcctttgaaagactacgtggcaacaggccaggttggtagagatccctcaattcatatatgggatacagagaccattaaaccattgtccatattaaagggccaccaccagtatggtgttagtgccgttgatttctcagcggatgggaaacgtttggcatcagttggcatagatgatagccatactgttgtgctctgggactggaagaaaggagagaaactttcaatagcaagaggaagtaaagataagatttttgttgtaaagatgaacccctatgtgcctgataaactaattacagctggaattaaacacatgaaattttggcgtaaagcaggagatgtgtgtatctggagagacatctttcttgtaaaaacagtgaaagcgcatgatgggccagtgttcagtatgcatgcattggaaaaagggtttgtaactggaggaaaagatggtatagtagctctttgggatgactcttttgaaagatgtctcaagacctatgctataaaaagagctgcattggccccaggatctaaaggtcttctcttggaagataatccatctatacgtgccatatcattaggacatggtcatattttagttggcacaaagaatggtgaaatactagaagtggataaaagtggcccaataacacttctggttcagggacacatggaaggagaggtgtggggtttagctacacacccttatctgcccatctgtgctactgtaagcgatgataaaaccttaagaatatgggatctctcacctagtcattgtatgttggctgtccggaagctgaaaaagggtgggaggtgttgctgtttttctcctgatggtaaagctttagccgtaggtctcaacgatggaagcttcttaatggcaaatgcggatactctagaggatcttgtgtcttttcatcacagaaaagatatgatttcagatattcgattttcacctggttctgggaaatatcttgctgtagcatcccatgacagctttatagatatatacaatgtaatgagtagtaaacgagtaggaatatgcaaaggagctaccagttacataacccatattgattgggatattagaggaaagcttttacaggtcaacactggtgctaaggaacaattattctttgaagctcccagagggaaaaaacaaaccatccccagcgtggaggtagaaaaaattgcttgggcatcatggacaagtgtacttggtttatgctgtgaaggaatttggccagtaattggagaagttacagatgtaactgcttcttgcctcaccagtgacaaaatggttctagctaccggggacgatttgggatttgtgaagttatttagatatcctactaaagggaaatttggaaagtttaagaggtatgtggcccatagtacacatgtcacaaatgttcgctggacttatgatgacagcatgttggttaccctaggcggtacagatatgtctttaatggtgtggacaaatgagatggaaggctatcgagaaaaaaggccttgtgatagtgaagaatccgacattgattctgaagaagatgggggctatgacagtgatgttacaagggagaatgaaatcagttacaccatcagagccttatcaacaaatattcgcccaatgttaggaatcaagcctcatttacaacaaaaagaaccctcaattgatgaaaggcctccagtgagcagggccccaccacagccagagaaactccagacaaacaatgtaggcaagaaaaagagacctatagaggaccttgtgttggagctcatttttggttatcgaggcagagactgtaggaataatgttcactatttaaatgatggtgatgatataatttatcacactgcatctgttggaattctgcacaatgttgctacaggttctcagagtttttatcaggaacataatgatgatattctgtgcctcacagtaaaccagcaccccaaatttatcaacatagtggcaactggccaagtaggtgattcagcagacatgtcagctacagctccttctattcacatctgggatgcaatgaacaagcagactttatctatcctaagatgctaccattcaaagggagtatgttcagtcagcttcagtgctactggcaaactattgctgtctgtgggactagacccagaacatactattaccatttggagatggcaggaaggtgccaaaattgccagcagagctggtcacaatcaacgtatttttgtggcagaattccgaccagattcagatacccagtttgtctcagtgggagtaaaacatgtgaagttctggaccctggcaggaagagctcttcttagcaaaaaagggctactgagcacactggaagatgcccggatgcagaccatgctcgctattgcatttggtgcaaataacttgacgtttacaggtaccatcagtggtgatgtctgtgtgtggaaagatcacatattgtgtagaatcgtggcgagagctcacaacgggcctgtgtttgccatgtacaccaccctgcgagatggacttatcgtgactgggggaaaggaaaggccgtcaaaagaaggaggagcggttaaactgtgggatcaggaactgaggcggtgccgtgccttcaggcttgagacaggacaagccacagattgtgttcgttctgtgtgcagaggcaaagtatttacaagagaggattttgaaagtttccatcacaaagaaatgataaatgtctgaggtgatggttatgcgtattaccctatgccctatagatatgtataattatgtgtcaatttcaaaataaaaattcaaaactacaactcctatg

SEQ ID NO: 129000 - DNA, 8320 bp, Homo sapiens
  Payload ID: 5229
  Gene Symbol: EML6
  Gene Name: echinoderm microtubule associated protein like 6
  Uniprot ID: Q6ZMW3
  ENST ID: ENST00000356458
  CDS Start-End: 521-6397
gatatagactgtcaatttcggatccaaagacggcgatggcagagctcacccgggttgcctgtcaaatcaaggctatcgcagaataaatcccgccgcctgccgcgaagccccggcgcaccgcaaacttcagtgagcgaactgggtgatcgctgttgggatatgcagattcctgatgtaaaaggcggggtggcccccccgagagcctctcccgggggccggagcccgcaggtgcagtgaggcgcgcgcgccggtgccggcgcccccagagccgccttgcccgggtagagggagcccggcgcccggcggggtctggcggccgcacaccggcggcggcggcttgtctgcggcggctgcagcggatgatggtggcggccggcccgctgggctgtgcctgtgtgtcgccgcggaaatcagcgccctgcgccgcgcgctgagcccctgcaggtccgccgcagccccagcctcggcgaggacggccccggcgcgcgggggggcggggggcgcgcggggtcggcttatcatggcggatcggacggcgccccgctgccagctccggctggagtgggtgtacgggtaccggggtcaccagtgccgcaacaacctgtactacacggcaggcaaggaggtggtctactttgtggctggggtcggggtggtttacaacacccgcgagcacagccaaaaattcttcctgggacacaacgacgacattatcagccttgccttacacccagacaaaactctcgttgcaactggccaagtcgggaaggagccatatatatgcatatgggattcctataatgtccagactgtgtctcttcttaaagatgtccatacacatggagttgcctgcctggcttttgactcagatggacagcgtttagcctctgtggggttggatgccaaaaacacagtctgcatttgggactggaggaagggaaaacttctggcgtcagccaccggccattctgacaggatttttgatatttcctgggatccatatcagccaaacagagtggttagctgtggagtaaaacacataaagttttggacactgtgtggaaatgccctgactgcaaaaagagggatatttggcaaaacaggggatcttcagaccatcctttgccttgcatgtgccaaagaagacatcacctactctggtgctttaaatggtgacatctatgtctggaaagggctcaatttagtccgcaccattcaaggagcacatagtgctggaatctttagcatgtatgcttgtgaagaaggctttgccactggtgggcgagatgggtgtatacgactgtgggacactgatttcaaaccaataaccaaaattgatctcagggagacagaacaaggatacaaaggcctctctatccggagcgtgtgctggaaagcagaccgccttctagcagggacccaggacagtgagatatttgaagtgattgtgcgagagcgagacaagccgatgttgatcctacagggccactgcgagggtgagctctgggctctggccctgcaccccaagaagcctctggctgtgacaggcagcgatgaccgctctgtcaggctgtggagcctggctgatcatgccttgatcgcccgctgtaacatggaagaggcggttcgcagtgtagctttcagccccgacggatctcagctggccctgggcatgaaggacggctctttcattgttctccgagtcagagatatgacagaagtagttcacatcaaagatcgaaaagaagtcattcatgaaatgaaattttctccagatggttcttaccttgcagtgggatccaatgatggcccagtagatgtctatgctgttgcccagaggtataagaaaattggagaatgcagcaagtcccttagtttcatcacgcatattgactggtccttggatagtaaatacttacaaactaatgacggtgcaggagaacgattgttctacagaatgccatctgggaagcctttaacaagtaaagaagaaattaaagggattccttgggcctcctggacatgcgtgaaaggccctgaagtgagtggaatttggcccaaatacactgaggttactgacatcaactcagtggatgcgaattacaacagctcagtgctggtgtctggagatgattttggactggttaaattgtttaaatttccttgtctcaagagaggagccaaatttagaaagtatgtgggccattctgcacatgtcacaaatgtccgctggtcccatgactttcagtgggtgttgagcacaggaggggctgatcactcagttttccagtggaggtttattccagaaggtgtcagcaacggcatgctggaaactgcaccccaagaaggtggagctgattcctacagtgaagaatctgattcagatttatctgatgtgcccgaactggactctgatattgagcaagaagctcaaatcaattatgatcgccaggtttacaaagaagatctacctcagctaaagcaacaaagtaaagagaaaaaccacgcagtgcccttcctcaaacgagaaaaggctcctgaggacagcttgaaactccagttcatacacggttatagaggctacgactgtagaaacaatctgttctacacacaagctggagaagtagtctaccacattgctgcagttgctgtcgtgtataatcggcagcagcactcccagaggctgtacctggggcacgatgacgacattctcagcctgaccatccatccagtgaaggactatgtggctactgggcaggttggaagagatgctgctattcatgtgtgggacacacaaactctaaaatgtttgtcgctgttgaaaggacaacatcagagaggagtgtgtgcacttgatttttcagccgatggaaaatgtctggtgtcggttggtttagacgattttcacagtattgtattttgggactggaaaaagggagaaaagatagccacaacaagaggacataaagataagatatttgtggtaaagtgtaacccacaccatgttgacaaactggttacagttgggataaaacacatcaaattctggcaacaagcaggtgggggcttcacttctaaaagaggaacttttggaagcgttggaaaattggaaacaatgatgtgtgtttcttacggacgaatggaagatctagtgttctcaggagcagctactggagatatttttatttggaaagacattctactactgaagacagtgaaagctcatgatgggcctgtgtttgctatgtatgcactggataagggctttgtaacaggtggaaaggacggcatcgtggagctctgggatgatatgtttgaaagatgtttgaagacttatgccattaaaagatcagcattgtcgactagctcaaaaggcttgcttttggaagataacccttcaattcgtgccatcactttgggacatggacatatcctggtgggaacaaaaaatggagagattctggaaattgataagagtggcccaatgacactgcttgttcaggggcacatggaaggagaagtgtgggggttggcagctcaccctctcctgcccatctgtgcaacagtgagcgatgataaaacacttcgcatctgggaactatctgcccagcaccgtatgctggcagtacggaaactcaaaaaaggtggaagatgctgtgccttttcccctgatgggaaagccttagcggttggcttgaacgatgggagtttcctggtggtaaatgctgacactgttgaagacatggtctctttccatcacagaaaagaaatgatctctgatattaagttttcaaaagatacgggaaaataccttgccgtggcatcccatgataactttgtggatatttacaacgtacttacaagcaaaagggttggcatctgtaaaggtgcttctagttatattacacacattgactgggactctagaggaaaattattgcaagtgaattcaggtgccagagaacaacttttttttgaagctccaagaggcaaacggcatataataagaccttcagagatcgagaagatagagtgggacacatggacctgtgtcctggggcccacctgtgagggaatctggccagcacatagcgatataactgacgtaaatgctgccagtcttaccaaagactgttcccttttagccaccggagatgattttggtttcgttaagcttttttcatatcctgtcaagggacagcacgcaagattcaagaagtatgtggggcacagtgcacatgtcactaacgtgaggtggctgcacaatgactctgtgctgctcacggtgggcggcgccgacacagccctgatgatctggaccagggagtttgtggggacccaggagagcaagctggtggacagcgaggagtcagacaccgacgtggaagaggatggaggctatgacagcgatgttgctagagaaaaggccattgactacaccaccaagatttatgctgtgagcatcagggaaatggaaggcaccaagccacaccagcagctgaaggaagtttccgtggaagaaagaccacccgttagccgagcagctccccagcctgagaaactgcagaagaacaatatcaccaaaaaaaagaaactggttgaggagctggctctagaccacgtgtttggctacagaggtttcgactgtcgaaataacctgcattaccttaatgatggcgctgacatcatcttccacacagcagcggctggcatcgttcagaacctctccacagggagccagagcttctatctggagcacacagatgacatcctctgtctcacagtgaaccagcaccccaagtacagaaacgtggtggccaccagccagatagggacaacaccttccatccacatatgggacgccatgaccaaacacaccctctccatgctgcggtgcttccactccaagggggtgaattacatcaacttcagtgcaactggaaagctcctggtgtcggtgggagtggaccctgagcacaccatcactgtctggcgatggcaggaaggtgccaaggttgccagccgagggggtcacctggagcgcatatttgtggtggaatttcgccccgactcagacacgcagtttgtatctgtcggggtcaaacatatgaagttctggaccctggcaggcagcgccttgctttacaagaaaggggtcatcgggtccctgggagctgccaaaatgcagacgatgctctccgtggccttcggtgctaacaatctcactttcacgggtgccatcaatggagatgtctacgtctggaaggaccacttcctcatccggctggtggccaaggctcacacaggccccgtgttcacaatgtacacaacccttcgggatggactcatagtgaccggcggaaaagagaggccgaccaaagaaggaggtgctgtaaaattgtgggaccaggagatgaagcgctgccgggcctttcagctggagaccgggcagctggtggagtgtgtgcgctccgtgtgccgtggaaaaggaaaaatcttagtgggaaccaaagacggagaaataattgaagttggtgaaaaaaatgctgcttctaacatcctgattgatggtcacatggaaggggagatctggggcctggccactcacccttccaaggacctcttcatctctgccagcaacgatggcacagcccggatctgggacctggctgacaagaagctgttaaacaaggtgagcttgggccatgcggccaggtgtgcagcctacagccctgatggggagatggtggccattggcatgaagaatggagagtttgtcatcttgttggtgaacagcctgaaagtttgggggaaaaaacgagaccggaaatctgctatccaagatatcagaatcagcccagacaaccgattcttagccgttggttcttctgaacacacagttgacttctatgacctcactcagggcacaaatctgaaccgcattggctactgcaaagatatcccaagctttgtcattcagatggatttttctgcggatggcaaatacattcaggtgtcaacaggtgcctataagcgccaggtgcatgaggtccccctggggaagcaggtaactgaagccgtggtcattgagaagatcacctgggcctcctggacaagcgtcctgggagatgaagtcattggaatctggccacgaaatgcagacaaggctgatgtcaactgcgcatgtgtgacccacgctggcctgaacattgtcacaggagatgactttgggctggtgaagctctttgattttccatgcacagaaaaatttgccaaacataagcgatacttcggtcactcggctcacgtgacgaacatccgtttctcttatgatgacaagtatgtggtcagcactggaggagacgactgcagtgtatttgtgtggcgatgtctgtaaaatgccagaagcctcttatgttattgctgctgctgctaccagccagcaactgcagaggccatgctgaggtgcctccttgccaccagccgttgggaaatgcctaccatgctgccccggatgcacaagctcaaaacgctgcagaagttacacaactgctcccataatctggactctccaaaaccgtgatgccacgaaggaaggtcaagttttaaaatgttaaagactgcttgcctctgttcctgagactaaacagtatacatactaactacattgacaaagaaatcctatctgataatgtagcccgctgacgaattttgaagcctcggttaccctaaccaatatgtagcttttaatttgcatcaaaacttttacaaagatgttttgctattgtttctatatacttcaagaatgttcatttttacaaataagttgaacaagacagcctaagttagatgcaccgaagtactagaaatatcgctagcctctgttctccagtttagctttcaaaaccaaatgagccatgtataaaggagttgagaaacttaatttttaaatgtttcatttgcagagttttatatccattaagtgcctttgaaagtttccagttgtgtgggctgctgtctcacctcccaccaatttctcctttctccatatggtgctaaaacctcaaagctgaggagggctgcaggacccttagcagattcagtgtgtcacccttgtcctgtgttcacgccaaggcttcctaaatgaaagacatcggttacctgcttatgggaaggtgagcagcaaaggaattgaagttcgggacagggtagaattatgggttttcattgtgtttcatgccaaacccacaaaatccaaaatagaattcaagttaaacaaacttctactacaaaatggaaggggaaaaaggctcaggaaggtctatgagaatgagctgacttatctcgttaaatcttaagataaatgagggtaacccaaggctgcaccttggtgtaccaccctgagtggagttgaggtgacttcatttgattgcttcaggcgaactatataggtcaagtccagattataaaaaaattatctgcagaacaaattgtaaacccaaggaatagctggtaaatcaaaattataaagtgagttagagttccttggagttggttgtatgacggaatatgacttggacaatctttaccagaagccatccgtaagcccctcagtcacactttccatgtagctgaccagtgactacaggatgtggctgacagtgctcactgaaaggagagttggtgcgggactggtggttctgagcacatagacgcctattagtccttctggtcagtgaacgaaaattctagacctacagttactggctacttgcatttgtcagtttagagaaaaggtaaaatgaggcattttcaattgtagaatagactaacatttaccacagaagtgcttcagcattctaaatggattagatcactcattaagctatttttatatgccaatttactaatgccttacatcaatccactaataggttgttgggcccgcagtagagtccctatgcagtcccaattctgttttctgtaaccatgtgactggtgatgcagagtgataaccatgtctgcctatcttgtactagactcttcatgctgatcggatcttgcattgaaataaccatgtggaagaacaatgaatcgattaatgatgacatgtacaaccatatttaaagagcaatagtgtccgtgtgtcatgaaaaacttatttgtaaacgtttatatggtatgattttgattttatgtatgttcataaatcctgcactgtatgatatatgtgagttaaaacattggtgcatgaatttattttcaaagtataaaacacatcacttaaacattttatgtgtcaaataaaatttgattatgt

SEQ ID NO: 129001 - DNA, 1860 bp, Homo sapiens
  Payload ID: 5230
  Gene Symbol: EVI2A
  Gene Name: ecotropic viral integration site 2A
  Uniprot ID: P22794
  ENST ID: ENST00000247270
  CDS Start-End: 338-1117
agagaagttggagctttttcgttgtttttttttttttccctcctgtgacatgtgctttagttgcagtggaaaggaaatgtgtcatctgtggtttggttttaaaagtggaaaactagctgcacatatccttttttactgcagatttactttaaggctcatattctccaagtctattctgctttaaaaagaagacaagaaaagaagtggtttatcaaaatcacgttataatcagattttgaccaagcattttgtaagtatacaaatgtcagccaatgacatataacaaccatttcttataaaaccttgatgttcaaaagcctgactagcagtggcatccatgttgcttaggagttggtttggaaacaaagactttcaggccctacctatactagctagattgccaagcatgcccacggacatggaacacacaggacattacctacatcttgcctttctgatgacaacagttttttctttgtctcctggaacaaaagcaaactatacccgtctgtgggctaacagtacttcttcctgggattcagttattcaaaacaagacaggcagaaaccaaaatgaaaacattaacacaaaccctataactcctgaagtagattataaaggtaattctacaaacatgcctgaaacatctcacatcgtagctttaacttctaaatctgaacaggagctttatataccttctgtcgtcagcaacagtccttcaacagtacagagcattgaaaacacaagcaaaagtcatggtgaaattttcaaaaaggatgtctgtgcggaaaacaacaacaacatggctatgctaatttgcttaattataattgcagtgctttttcttatctgtacctttctatttctatcaactgtggttttggcaaacaaagtctcttctctcagacgatcaaaacaagtaggcaagcgtcagcctagaagcaatggcgattttctggcaagcggtctatggcccgctgaatcagacacttggaaaagaacaaaacagctcacaggacccaacctagtgatgcaatctactggagtgctcacagctacaagggaaagaaaagatgaagaaggaactgaaaaacttactaacaaacagataggttagtgaagaaaaatgcaaagtagcaatgagaaggcttatggagtaaaaatgaagtcagttggtatttaatcccaaagtgttgttctgattatctaaaatttgacatggtagaccttgcaatttagaatcaagcaggtgagacagggagaagtatgcctgcttaattatttaaactgtgtacttttgttttgacactgaatattttaaaaagcaaataataaaataactaagcatttgaggaaaattttaaggataaattgaggaaactgattaatagagatagcaagggataattaaataaatattccctatgtagcaacagtggttagatgatctttgtctgaatgtaattaaactttgaatagttttagtgtgtccttaaagccaagtatatgctttaacatcaaatggaagtcaaattcctaatgcatagatagagagagctaaactgtgtaatttaatggtatcttccttgctggatgtggcagaatccacaccagcttatcaaccaacacagctaattttagaatagatcctttatctttccatatggcacacgtaagaaagtgtttttctactattaatattaaattaaaacctttacttttgtataataaattaaaactcagaataaacctgtgaccacgtatatttgcattcactttattactttagagaacacattgtaaagatcaataagaaatagagcacaactaaaataaataagatttatagccacaccaata

SEQ ID NO: 129002 - DNA, 1540 bp, Homo sapiens
  Payload ID: 5230
  Gene Symbol: EVI2A
  Gene Name: ecotropic viral integration site 2A
  Uniprot ID: P22794
  ENST ID: ENST00000461237
  CDS Start-End: 87-797
atacagtttgtttatttgggcactgcagtacatctggctgaagacaatcaacagcaggcctattatctgttccgtgattgccaagcatgcccacggacatggaacacacaggacattacctacatcttgcctttctgatgacaacagttttttctttgtctcctggaacaaaagcaaactatacccgtctgtgggctaacagtacttcttcctgggattcagttattcaaaacaagacaggcagaaaccaaaatgaaaacattaacacaaaccctataactcctgaagtagattataaaggtaattctacaaacatgcctgaaacatctcacatcgtagctttaacttctaaatctgaacaggagctttatataccttctgtcgtcagcaacagtccttcaacagtacagagcattgaaaacacaagcaaaagtcatggtgaaattttcaaaaaggatgtctgtgcggaaaacaacaacaacatggctatgctaatttgcttaattataattgcagtgctttttcttatctgtacctttctatttctatcaactgtggttttggcaaacaaagtctcttctctcagacgatcaaaacaagtaggcaagcgtcagcctagaagcaatggcgattttctggcaagcggtctatggcccgctgaatcagacacttggaaaagaacaaaacagctcacaggacccaacctagtgatgcaatctactggagtgctcacagctacaagggaaagaaaagatgaagaaggaactgaaaaacttactaacaaacagataggttagtgaagaaaaatgcaaagtagcaatgagaaggcttatggagtaaaaatgaagtcagttggtatttaatcccaaagtgttgttctgattatctaaaatttgacatggtagaccttgcaatttagaatcaagcaggtgagacagggagaagtatgcctgcttaattatttaaactgtgtacttttgttttgacactgaatattttaaaaagcaaataataaaataactaagcatttgaggaaaattttaaggataaattgaggaaactgattaatagagatagcaagggataattaaataaatattccctatgtagcaacagtggttagatgatctttgtctgaatgtaattaaactttgaatagttttagtgtgtccttaaagccaagtatatgctttaacatcaaatggaagtcaaattcctaatgcatagatagagagagctaaactgtgtaatttaatggtatcttccttgctggatgtggcagaatccacaccagcttatcaaccaacacagctaattttagaatagatcctttatctttccatatggcacacgtaagaaagtgtttttctactattaatattaaattaaaacctttacttttgtataataaattaaaactcagaataaacctgtgaccacgtatatttgcattcactttattactttagagaacacattgtaaagatcaataagaaatagagcacaactaaaataaataagatttatagccacaccaata

SEQ ID NO: 129003 - DNA, 1854 bp, Homo sapiens
  Payload ID: 5230
  Gene Symbol: EVI2A
  Gene Name: ecotropic viral integration site 2A
  Uniprot ID: P22794
  ENST ID: ENST00000462804
  CDS Start-End: 401-1111
cttttgaatgacactaaagcatgtagcaggcctatagaatgagcatactgtcaaaaggcattaagtggaaaaccctccctgctctggaggcggggattggttctacaaagcctcctgtcatgccagtggccaactagagaagttggagctttttcgttgtttttttttttttccctcctgtgacatgtgctttagttgcagtggaaaggaaatgtgtcatctgtggtttggttttaaaagtggaaaactagctgcacatatccttttttactgcagatttactttaaggctcatattctccaagtctattctgctttaaaaagaagacaagaaaagaagtggtttatcaaaatcacgttataatcagattttgaccaagcattttgtaagattgccaagcatgcccacggacatggaacacacaggacattacctacatcttgcctttctgatgacaacagttttttctttgtctcctggaacaaaagcaaactatacccgtctgtgggctaacagtacttcttcctgggattcagttattcaaaacaagacaggcagaaaccaaaatgaaaacattaacacaaaccctataactcctgaagtagattataaaggtaattctacaaacatgcctgaaacatctcacatcgtagctttaacttctaaatctgaacaggagctttatataccttctgtcgtcagcaacagtccttcaacagtacagagcattgaaaacacaagcaaaagtcatggtgaaattttcaaaaaggatgtctgtgcggaaaacaacaacaacatggctatgctaatttgcttaattataattgcagtgctttttcttatctgtacctttctatttctatcaactgtggttttggcaaacaaagtctcttctctcagacgatcaaaacaagtaggcaagcgtcagcctagaagcaatggcgattttctggcaagcggtctatggcccgctgaatcagacacttggaaaagaacaaaacagctcacaggacccaacctagtgatgcaatctactggagtgctcacagctacaagggaaagaaaagatgaagaaggaactgaaaaacttactaacaaacagataggttagtgaagaaaaatgcaaagtagcaatgagaaggcttatggagtaaaaatgaagtcagttggtatttaatcccaaagtgttgttctgattatctaaaatttgacatggtagaccttgcaatttagaatcaagcaggtgagacagggagaagtatgcctgcttaattatttaaactgtgtacttttgttttgacactgaatattttaaaaagcaaataataaaataactaagcatttgaggaaaattttaaggataaattgaggaaactgattaatagagatagcaagggataattaaataaatattccctatgtagcaacagtggttagatgatctttgtctgaatgtaattaaactttgaatagttttagtgtgtccttaaagccaagtatatgctttaacatcaaatggaagtcaaattcctaatgcatagatagagagagctaaactgtgtaatttaatggtatcttccttgctggatgtggcagaatccacaccagcttatcaaccaacacagctaattttagaatagatcctttatctttccatatggcacacgtaagaaagtgtttttctactattaatattaaattaaaacctttacttttgtataataaattaaaactcagaataaacctgtgaccacgtatatttgcattcactttattactttagagaacacattgtaaagatcaataagaaatagagcacaactaaaataaataagatttatagccacaccaata

SEQ ID NO: 129004 - DNA, 1999 bp, Homo sapiens
  Payload ID: 5231
  Gene Symbol: EVI2B
  Gene Name: ecotropic viral integration site 2B
  Uniprot ID: P34910
  ENST ID: ENST00000330927
  CDS Start-End: 156-1502
agaaactatttcagtttgctagaggaacattttaaatctgaattgaaccacccattttcctttcttagccaaatcaccaaaatgtccagttagaacaagaatttagcattctgcaaaagaagttaacagctgagataacgaggaaatattctgaaatggatcccaaatatttcatcttaattttgttttgtggacacctgaacaatacatttttttcaaagacagagacaattacaacagagaagcagtcacagcctaccttattcacatcatcaatgtcacaggtattggctaattctcaaaacacaacagggaatcctttgggtcaaccaacacaattcagcgacactttttctggacaatcaatatcacctgccaaagtcactgctggacaaccaacaccagctgtctatacctcttctgaaaaaccagaagcacatacttctgctggacaaccacttgcctacaacaccaaacaaccaacaccaatagccaacacctcctcccagcaagccgtgttcacctctgccagacaactaccatctgcccgtacttctaccacacaaccaccaaagtcatttgtctatacttttactcaacaatcatcatctgtccagatcccttctagaaaacaaataactgttcataatccatccacacaaccaacatcaactgtcaaaaattcacctaggagtacaccaggatttatcttagatactaccagtaacaaacaaaccccacaaaaaaacaattataattcaatagctgccatactaattggtgtacttctgacttctatgttggtagctataatcatcattgtactttggaaatgcttaaggaaaccagttttaaatgatcaaaattgggcaggtagatctccatttgctgatggagaaacccctgacatttgtatggataacatcagagaaaatgaaatatccacaaaacgtacatcaatcatttcacttacaccctggaaaccaagcaaaagcacacttttagcagatgacttagaaattaagttgtttgaatcaagtgaaaacattgaagactccaacaaccccaaaacagagaaaataaaagatcaagtaaatggtacatcagaagatagtgctgatggttcaacagttggaactgctgtttcttcttcagatgatgcagatctgcctccaccacctccccttctggatttggaaggacaggaaagtaaccaatctgacaaacccacaatgacaattgtatctcctcttccaaatgattctactagtctccctccatctctggactgtctcaatcaagactgtggagatcataaatctgagataatacaatcatttccaccgcttgactcacttaacttgcccctgccaccagtagattttatgaaaaaccaagaagattccaaccttgagatccagtgtcaggagttctctattcctcccaactctgatcaagatcttaatgaatccctgccacctccacctgcagaactgttataaatattacaacttgctttttagctgatcttccatcctcaaatgactcttttttctttatatgttaacatatataaaatggcaactgatagtcaattttgatttttattcaggaactatctgaaatctgctcagagcctatgtgcatagatgaaacttttttttaaaaaaagttatttaacagtaatctatttactaattatagtacctatctttaaagtatagtacattttacatatgtaaatggtatgtttcaataatttaagaactctgaaacaatctacatatacttattacccagtacagttttttttcccctgaaaagctgtgtataaaattatggtgaataaacttttatgtttccatttcaaagaccagggtggagaggaataagagactaagtatatgcttcaagttttaaattaatacctcaagtattaaataaatattccaagtttgtgggaatgggagattaaaatgcatgtttgagaatagagaaa

SEQ ID NO: 129005 - DNA, 1597 bp, Homo sapiens
  Payload ID: 5231
  Gene Symbol: EVI2B
  Gene Name: ecotropic viral integration site 2B
  Uniprot ID: P34910
  ENST ID: ENST00000577894
  CDS Start-End: 222-1568
atttcagtttgctagaggaacattttaaatctgaattgaaccacccattttcctttcttagccaaatcaccaaaatgtccagttagaacaagaatttagcattctgcaaaagaagttaacagctgagggccatttatcatcactgtgtaccaagtggtagaggagtaagcaatgatatgctgtttagatatgctgaaaagataacgaggaaatattctgaaatggatcccaaatatttcatcttaattttgttttgtggacacctgaacaatacatttttttcaaagacagagacaattacaacagagaagcagtcacagcctaccttattcacatcatcaatgtcacaggtattggctaattctcaaaacacaacagggaatcctttgggtcaaccaacacaattcagcgacactttttctggacaatcaatatcacctgccaaagtcactgctggacaaccaacaccagctgtctatacctcttctgaaaaaccagaagcacatacttctgctggacaaccacttgcctacaacaccaaacaaccaacaccaatagccaacacctcctcccagcaagccgtgttcacctctgccagacaactaccatctgcccgtacttctaccacacaaccaccaaagtcatttgtctatacttttactcaacaatcatcatctgtccagatcccttctagaaaacaaataactgttcataatccatccacacaaccaacatcaactgtcaaaaattcacctaggagtacaccaggatttatcttagatactaccagtaacaaacaaaccccacaaaaaaacaattataattcaatagctgccatactaattggtgtacttctgacttctatgttggtagctataatcatcattgtactttggaaatgcttaaggaaaccagttttaaatgatcaaaattgggcaggtagatctccatttgctgatggagaaacccctgacatttgtatggataacatcagagaaaatgaaatatccacaaaacgtacatcaatcatttcacttacaccctggaaaccaagcaaaagcacacttttagcagatgacttagaaattaagttgtttgaatcaagtgaaaacattgaagactccaacaaccccaaaacagagaaaataaaagatcaagtaaatggtacatcagaagatagtgctgatggttcaacagttggaactgctgtttcttcttcagatgatgcagatctgcctccaccacctccccttctggatttggaaggacaggaaagtaaccaatctgacaaacccacaatgacaattgtatctcctcttccaaatgattctactagtctccctccatctctggactgtctcaatcaagactgtggagatcataaatctgagataatacaatcatttccaccgcttgactcacttaacttgcccctgccaccagtagattttatgaaaaaccaagaagattccaaccttgagatccagtgtcaggagttctctattcctcccaactctgatcaagatcttaatgaatccctgccacctccacctgcagaactgttataaatattacaacttgctttttagctgatctt

SEQ ID NO: 129006 - DNA, 7403 bp, Homo sapiens
  Payload ID: 5232
  Gene Symbol: EVI5
  Gene Name: ecotropic viral integration site 5
  Uniprot ID: O60447
  ENST ID: ENST00000370331
  CDS Start-End: 11-2443
tctgcttatcatggttaccaacaaaatgactgctgcctttagaaaccctagtgggaaacaggtggcgacagacaaagttgcagaaaagctgagctctactctctcatgggtgaagaacacagtatcgcatacagtcagtcagatggccagtcaggtggcaagtccatctacttcattacataccacatcctcatctaccacactatcaacaccagccctttcaccatcttccccatcacagttgagtccagacgacttagaactcctggctaaactggaagaacagaatagattgttagaaacggatagtaagtctttaagatctgtaaatgggtcaagaagaaacagtggctcttctcttgtgtcgagttcatcagcctctagcaacctcagtcaccttgaagaagattcttggattctttggggaagaattgttaatgaatgggaagatgtacgcaaaaagaaggaaaagcaagttaaggaacttgttcataaagggataccccatcactttagagcaatagtttggcaacttttatgcagtgcacaaagtatgccaattaaggatcagtattcagaactcctgaaaatgacctcgccttgtgaaaaattgatccgaagggacattgctagaacttaccctgaacacaacttttttaaggaaaaagatagccttggacaggaggttttatttaatgtaatgaaggcttactctttagtagatcgtgaggttggttactgtcaaggaagtgcttttatagttggattgttgcttatgcagatgccagaagaagaagctttctgtgtatttgttaaattaatgcaagattatagacttcgtgaactttttaaaccaagtatggcagaattgggcctttgtatgtaccagtttgaatgtatgatacaggagcatcttccagagctctttgtacattttcaatctcagagttttcatacctcaatgtatgcatcatcctggtttctgactatctttcttacaacttttccactaccaattgcaacaaggatatttgatatctttatgtctgagggtttagaaatagtgtttcgtgtaggattagcacttcttcagatgaatcaggcagaactgatgcaacttgacatggaagggatgttacagcactttcaaaaggtcattccacatcagtttgatggtgtcccagacaagctaatccaagcagcttaccaagtcaaatacaattcaaaaaaaatgaaaaagcttgaaaaggaatacactacaataaaaacgaaagaaatggaagagcaagttgaaattaaaaggttacgcacagaaaatagacttttaaaacagcgcatcgagacattagaaaaacataaatgcagttccaactacaacgaagattttgtgctacagctagagaaggaattggtccaagcccgactgagtgaagctgagtctcagtgtgcattaaaagagatgcaggataaagtcttggatatagagaagaggaataactcccttcctgatgagaataatattgcaaggcttcaggaagaactcattgctgtgaaacttagagaagcagaagccattatgggtttgaaagaacttagacagcaagtcaaggatttagaggaacactggcagcgccacttagctcgtactactgggagatggaaagacccacccaagaaaaatgctatgaatgagttacaagatgaactgatgaccattcgacttagagaagctgaaacacaagcagaaataagagaaataaaacaaaggatgatggaaatggaaacacagaaccagatcaatagtaaccatcttcgaagagcagaacaagaggtgattagcctacaggagaaagtgcagtatctttctgcacagaacaaaggactccttactcaattaagtgaagcaaagcgtaaacaagcagagattgaatgcaagaataaggaagaagtgatggctgtgaggcttcgggaagcagatagcatagctgctgtggctgaactacgacaacacattgctgagcttgaaatccagaaagaagaaggaaagcttcaaggacagcttaacaagtctgattctaaccagtatattggggaactgaaagatcagatagcagagctgaatcatgagctcaggtgcctaaaaggccagaggggcttctcaggccaacctccttttgatggaatccacattgtcaaccatttaataggagatgatgaatcattccattcctccgatgaagattttatagataattccttacaggaaactggtgttggttttcctttgcacggaaaatctggttcgatgtctttggaccccgcagtggcagatggtagtgagagcgaaacagaagacagtgtgctggagaccagagagagcaaccaagtggttcaaaaggagcggcccccgagaagaagagagtcgtattcaaccactgtctgaccatcactgtgacctagactatggatttatttaagggatcagttatcatatgattagggctttttggaaataatttgtttcatatgtacatatatatatatatatatatatatatatatatatatatatatatatatatatatattttacagtcttatctgcctttttatctttgccaaatctttaccactgatttaccattgccataaagtagactggtatatggttaatgtgtaaaacaaggttctaacagtattactgaatattaatgtttcttgtttagaaaatgcaactatatctatatgtgggaaccattctgaagttcaaaactatggaaaattgaattttcttcagacaaaactgctcttgtgcaatattttatgctcagtgagcaaattgtgtatttatgtttatcaatttgttctcaaggtggctgtctacagacatttgaccaagacatacatctgatttaccttgtgtttttttttttattgttgtttttttttttaagacagagattcagtctgtcacccaggctggagtgctgtggtgtgatcttagctcactgcaacctccgcctcccaggttcaagcaattttcctgcctcagcctcccgagtacctgggactatatgtgcgcaccaccacgcctggctaattttttgtatttttagtagagatggggtttcaccatgttggctgggctggtctcgaactcctaacctcaagtgatccacccgcctcagcctcccaaagtgctgggattacaggtgtgagccactgcacccagcctaccttgtctgtttgtgtctgggaggttttttttttctatttttattttttcatgaaaattattggtgggccactgaaagtccccacacacaaagcctttattctatataattttataaacacaaattcatgattatctgttttgagagttttaagttttgttttaatgtttaacttttatgtgcatatgatgcttccatgtgttggttactagagtagtaggttaactacagacatactgttttgtttgtacatatttataaatctgtaccacctaacattgaacatcattttatatgaagaacatacatgttgcaaaatgactgctttcagcatctaacaggacttctgtaaataataggttaaaagttaaaaataaaacactaatgttttaagagctttagtattttgcttagcattcaatactagcagattcataactgatgcctgttcaaaaacactgttggtggaatcttttatttcatgtgtatgtaactactaaatttttcatgactgaagaggttatagcacatattagttagtgctaatattctactgaatataatttaagcaatgggctaaggtccaagaaacatagcaattatatctacaaataatctattaacatgatcttcagaatctctagtttttgttctatagataaagccataagaatcctttcctaccagtttttcctatatcatttagatattatttcctagaaaacaggatgcctgtcactgataagttagagaaaacacccaaattatacttgcactatggaaagacgacatgaatatgttgactgggtactttctactctcatttttgttagcctatgaaaaaaaaaacattttgttaacctatggaaaaagccttggaagagaaaagtagaattcagtatgtatggaggcacagttttgcacagtatgttgcatgcggcaaaaaaaaaaatatgaaatagagtagaagagataaaagtagttttctgtcaaaaactaggagttaagccttcaggtacgttgtggactaggctttccagcaaggtttttgtagctatttgcttgcctgagaaatgaaattgaaaacatacccctgcgtgtctgtccttaacaccaggctaaattctggtggttaaataacttatctgtggttacaagctagtaagtagcagagccaagattttttttaatatagagacaggtgtctcactgtgttgtccaggctggtcttgaactcctggcctcaagtggtcctcctgcctcagcctcccaaagtgtggggattacaggtgcgagctactgctcccagcaagagccaagattttaacctagatctccctaacaccaaagcttttgaaagggttcagctgaagaatttctcaattctctgttttgttttgtttttatttttgttttttgagatgaagtctcactgcactcaggctggagtgcagtggtacgatcttggctcactgcaacctccacctcccgggttcaagcgattctcctgcctcagctcccaagtagctgggactacaggtgcacgccaccacaactggctaatttttgtatttttagtagagatggggtttcgctatgttggccaggctgatctcaaacttctgacctcaggtgatccacccactttgacctcccaaagtgctgggattactagacgtaagccaccacacctggcaattccctgcttttttgacaacataatttaaatgaatttgatttaaatgtttcctgaatatatatacagatagatagatgagtatcaacacttacaagctctacacagtctgtgagtgtagatactacttactcgtaggattgtcttgtgctttggggatttttgttcggagttctatactatcagcccagaaagctatcaatgtccaagtgaagtgagatgatgcatggccacattattgctttgaccctcacatcaagaaatctgaatgatctggaccaggggtcagcaaagtgcagcctacaagctattgcagtcagctgccagtttttacttttttaaatagttgggaaaaaaattccaaagactgatattttgtgtcacatgaaaattatatgaaattcaaattgcagtgtccataagtaaagttttattggggcacacccatgctcacccttttaaatattgtgtatggccgctttgtgctacagtagcagagttgagtcattgcaagggagaccatatggcccaggtagcctaaaatatttatctgatcctttacagaaaaagtttgctaacccttgataacagatactctaaaatgcaggtttttcttcttcaatttagctcagtggtaggtcaaattgtttgcttttgctattaagcttatgatttggaaacgtaaaatttcatggtggatattataatcagaactattcaaaagggaaaacatgccagccattttatatgatgaagtctcttattccatagaaaactgtagaaagatatctgtatctttggagaaggagaaagaaaggaaagaactccagaatcccatcactgttctttaaagcatgcatcacagacctttaagagtatgctttattgagtaaaggttatagtttgactttaagataagaaattttctagaatcatgtttgaattctaaacgttgatattcttaagtaccatttctgattaggaattaggtgttaaaagaatcatggtaaggaaaccttaatccgttgaaactcttgtaatttggacaacaaaaaactagaaataacactcttttctttgaagatctgattcaaatacaccttagaagagtttaaaatctcccaggcctttaggatgcaataggatattatgccttggtttgactccttttcattcaaattaatgtaagtatgttgttcaagactttgaagcattgaacaatgttctcgatgaattttatttaattactgacattttgtgatatttgaatgttattaagttaaacacttagagttgagtatattcaggggagaaaagtgaatgaaatgactcataataagaaagcttgctcccttgggacagttaccttcctggtgtcattgccatcctgggttgacaagctgagagtagaggatacaagtgatgtgaataaaatggaaattgcattgagttaatgaaacagacacttttagatcaagaaaacacttcaacagcctttttagaaattggcacactcctatagtcccacctactcaagaggctgaggcaggaggatcactagagtacaggagtttggggctgtagtgtgtaatgatcacacctgtgaaagaataaccactgcactccaacctgggcaacatggcaagaccctgtctctttaaaaaaaaaaaaaatcctgggaaaagaagtcaaagatgtaattttacacaatttctgcccccaccgtcttttttgtttgtttgtttgtttgtttgttttttggctagatactaggtattcagtgtttgctgagatgacaggtttctactaatcagccagttatttgggaaggagaaaaactttttctcaattctgaacatgatgcagcttgttaactctccagatagtgcctttgattgaaaataaggtctacacctttttaagtatattatttctgacatcgtaagaaataatttagttccttattctcatttatcttttatataatgtactgtaatattcaggtttaaagtaaaataagtatatgaattatattttggtaaaactgtttcatgaccagcttgattaatgtatattaacataccagacattgacagcgaacatttcatgaaatcagttatttacttaccaaaacaatgagttttagcttgaaagttactgctgctctattattaacaaaactaagttttaaaaattaattttaattctactgaagtttaatttctggttaaaggtatagtggatgctatttatgatccaagtttttacatcacatccattgatctgcctatcccttctttttactccaaagaggagatgatagaataatacattcagtatactaccaagaagcaaagttataatgtgtttcattttgctattggaattttttattgtaacattgtatgataacctgaaatgtttacttgtgccttttctttaaacaattaaagttttccattttataagaa

SEQ ID NO: 129007 - DNA, 7436 bp, Homo sapiens
  Payload ID: 5232
  Gene Symbol: EVI5
  Gene Name: ecotropic viral integration site 5
  Uniprot ID: O60447
  ENST ID: ENST00000540033
  CDS Start-End: 11-2476
tctgcttatcatggttaccaacaaaatgactgctgcctttagaaaccctagtgggaaacaggtggcgacagacaaagttgcagaaaagctgagctctactctctcatgggtgaagaacacagtatcgcatacagtcagtcagatggccagtcaggtggcaagtccatctacttcattacataccacatcctcatctaccacactatcaacaccagccctttcaccatcttccccatcacagttgagtccagacgacttagaactcctggctaaactggaagaacagaatagattgttagaaacggatagtaagtctttaagatctgtaaatgggtcaagaagaaacagtggctcttctcttgtgtcgagttcatcagcctctagcaacctcagtcaccttgaagaagattcttggattctttggggaagaattgttaatgaatgggaagatgtacgcaaaaagaaggaaaagcaagttaaggaacttgttcataaagggataccccatcactttagagcaatagtttggcaacttttatgcagtgcacaaagtatgccaattaaggatcagtattcagaactcctgaaaatgacctcgccttgtgaaaaattgatccgaagggacattgctagaacttaccctgaacacaacttttttaaggaaaaagatagccttggacaggaggttttatttaatgtaatgaaggcttactctttagtagatcgtgaggttggttactgtcaaggaagtgcttttatagttggattgttgcttatgcagatgccagaagaagaagctttctgtgtatttgttaaattaatgcaagattatagacttcgtgaactttttaaaccaagtatggcagaattgggcctttgtatgtaccagtttgaatgtatgatacaggagcatcttccagagctctttgtacattttcaatctcagagttttcatacctcaatgtatgcatcatcctggtttctgactatctttcttacaacttttccactaccaattgcaacaaggatatttgatatctttatgtctgagggtttagaaatagtgtttcgtgtaggattagcacttcttcagatgaatcaggcagaactgatgcaacttgacatggaagggatgttacagcactttcaaaaggtcattccacatcagtttgatggtgtcccagacaagctaatccaagcagcttaccaagtcaaatacaattcaaaaaaaatgaaaaagcttgaaaaggaatacactacaataaaaacgaaagaaatggaagagcaagttgaaattaaaaggttacgcacagaaaatagacttttaaaacagcgcatcgagacattagaaaaagaaagtgcttccttggcagatagattgatacagcataaatgcagttccaactacaacgaagattttgtgctacagctagagaaggaattggtccaagcccgactgagtgaagctgagtctcagtgtgcattaaaagagatgcaggataaagtcttggatatagagaagaggaataactcccttcctgatgagaataatattgcaaggcttcaggaagaactcattgctgtgaaacttagagaagcagaagccattatgggtttgaaagaacttagacagcaagtcaaggatttagaggaacactggcagcgccacttagctcgtactactgggagatggaaagacccacccaagaaaaatgctatgaatgagttacaagatgaactgatgaccattcgacttagagaagctgaaacacaagcagaaataagagaaataaaacaaaggatgatggaaatggaaacacagaaccagatcaatagtaaccatcttcgaagagcagaacaagaggtgattagcctacaggagaaagtgcagtatctttctgcacagaacaaaggactccttactcaattaagtgaagcaaagcgtaaacaagcagagattgaatgcaagaataaggaagaagtgatggctgtgaggcttcgggaagcagatagcatagctgctgtggctgaactacgacaacacattgctgagcttgaaatccagaaagaagaaggaaagcttcaaggacagcttaacaagtctgattctaaccagtatattggggaactgaaagatcagatagcagagctgaatcatgagctcaggtgcctaaaaggccagaggggcttctcaggccaacctccttttgatggaatccacattgtcaaccatttaataggagatgatgaatcattccattcctccgatgaagattttatagataattccttacaggaaactggtgttggttttcctttgcacggaaaatctggttcgatgtctttggaccccgcagtggcagatggtagtgagagcgaaacagaagacagtgtgctggagaccagagagagcaaccaagtggttcaaaaggagcggcccccgagaagaagagagtcgtattcaaccactgtctgaccatcactgtgacctagactatggatttatttaagggatcagttatcatatgattagggctttttggaaataatttgtttcatatgtacatatatatatatatatatatatatatatatatatatatatatatatatatatatattttacagtcttatctgcctttttatctttgccaaatctttaccactgatttaccattgccataaagtagactggtatatggttaatgtgtaaaacaaggttctaacagtattactgaatattaatgtttcttgtttagaaaatgcaactatatctatatgtgggaaccattctgaagttcaaaactatggaaaattgaattttcttcagacaaaactgctcttgtgcaatattttatgctcagtgagcaaattgtgtatttatgtttatcaatttgttctcaaggtggctgtctacagacatttgaccaagacatacatctgatttaccttgtgtttttttttttattgttgtttttttttttaagacagagattcagtctgtcacccaggctggagtgctgtggtgtgatcttagctcactgcaacctccgcctcccaggttcaagcaattttcctgcctcagcctcccgagtacctgggactatatgtgcgcaccaccacgcctggctaattttttgtatttttagtagagatggggtttcaccatgttggctgggctggtctcgaactcctaacctcaagtgatccacccgcctcagcctcccaaagtgctgggattacaggtgtgagccactgcacccagcctaccttgtctgtttgtgtctgggaggttttttttttctatttttattttttcatgaaaattattggtgggccactgaaagtccccacacacaaagcctttattctatataattttataaacacaaattcatgattatctgttttgagagttttaagttttgttttaatgtttaacttttatgtgcatatgatgcttccatgtgttggttactagagtagtaggttaactacagacatactgttttgtttgtacatatttataaatctgtaccacctaacattgaacatcattttatatgaagaacatacatgttgcaaaatgactgctttcagcatctaacaggacttctgtaaataataggttaaaagttaaaaataaaacactaatgttttaagagctttagtattttgcttagcattcaatactagcagattcataactgatgcctgttcaaaaacactgttggtggaatcttttatttcatgtgtatgtaactactaaatttttcatgactgaagaggttatagcacatattagttagtgctaatattctactgaatataatttaagcaatgggctaaggtccaagaaacatagcaattatatctacaaataatctattaacatgatcttcagaatctctagtttttgttctatagataaagccataagaatcctttcctaccagtttttcctatatcatttagatattatttcctagaaaacaggatgcctgtcactgataagttagagaaaacacccaaattatacttgcactatggaaagacgacatgaatatgttgactgggtactttctactctcatttttgttagcctatgaaaaaaaaaacattttgttaacctatggaaaaagccttggaagagaaaagtagaattcagtatgtatggaggcacagttttgcacagtatgttgcatgcggcaaaaaaaaaaatatgaaatagagtagaagagataaaagtagttttctgtcaaaaactaggagttaagccttcaggtacgttgtggactaggctttccagcaaggtttttgtagctatttgcttgcctgagaaatgaaattgaaaacatacccctgcgtgtctgtccttaacaccaggctaaattctggtggttaaataacttatctgtggttacaagctagtaagtagcagagccaagattttttttaatatagagacaggtgtctcactgtgttgtccaggctggtcttgaactcctggcctcaagtggtcctcctgcctcagcctcccaaagtgtggggattacaggtgcgagctactgctcccagcaagagccaagattttaacctagatctccctaacaccaaagcttttgaaagggttcagctgaagaatttctcaattctctgttttgttttgtttttatttttgttttttgagatgaagtctcactgcactcaggctggagtgcagtggtacgatcttggctcactgcaacctccacctcccgggttcaagcgattctcctgcctcagctcccaagtagctgggactacaggtgcacgccaccacaactggctaatttttgtatttttagtagagatggggtttcgctatgttggccaggctgatctcaaacttctgacctcaggtgatccacccactttgacctcccaaagtgctgggattactagacgtaagccaccacacctggcaattccctgcttttttgacaacataatttaaatgaatttgatttaaatgtttcctgaatatatatacagatagatagatgagtatcaacacttacaagctctacacagtctgtgagtgtagatactacttactcgtaggattgtcttgtgctttggggatttttgttcggagttctatactatcagcccagaaagctatcaatgtccaagtgaagtgagatgatgcatggccacattattgctttgaccctcacatcaagaaatctgaatgatctggaccaggggtcagcaaagtgcagcctacaagctattgcagtcagctgccagtttttacttttttaaatagttgggaaaaaaattccaaagactgatattttgtgtcacatgaaaattatatgaaattcaaattgcagtgtccataagtaaagttttattggggcacacccatgctcacccttttaaatattgtgtatggccgctttgtgctacagtagcagagttgagtcattgcaagggagaccatatggcccaggtagcctaaaatatttatctgatcctttacagaaaaagtttgctaacccttgataacagatactctaaaatgcaggtttttcttcttcaatttagctcagtggtaggtcaaattgtttgcttttgctattaagcttatgatttggaaacgtaaaatttcatggtggatattataatcagaactattcaaaagggaaaacatgccagccattttatatgatgaagtctcttattccatagaaaactgtagaaagatatctgtatctttggagaaggagaaagaaaggaaagaactccagaatcccatcactgttctttaaagcatgcatcacagacctttaagagtatgctttattgagtaaaggttatagtttgactttaagataagaaattttctagaatcatgtttgaattctaaacgttgatattcttaagtaccatttctgattaggaattaggtgttaaaagaatcatggtaaggaaaccttaatccgttgaaactcttgtaatttggacaacaaaaaactagaaataacactcttttctttgaagatctgattcaaatacaccttagaagagtttaaaatctcccaggcctttaggatgcaataggatattatgccttggtttgactccttttcattcaaattaatgtaagtatgttgttcaagactttgaagcattgaacaatgttctcgatgaattttatttaattactgacattttgtgatatttgaatgttattaagttaaacacttagagttgagtatattcaggggagaaaagtgaatgaaatgactcataataagaaagcttgctcccttgggacagttaccttcctggtgtcattgccatcctgggttgacaagctgagagtagaggatacaagtgatgtgaataaaatggaaattgcattgagttaatgaaacagacacttttagatcaagaaaacacttcaacagcctttttagaaattggcacactcctatagtcccacctactcaagaggctgaggcaggaggatcactagagtacaggagtttggggctgtagtgtgtaatgatcacacctgtgaaagaataaccactgcactccaacctgggcaacatggcaagaccctgtctctttaaaaaaaaaaaaaatcctgggaaaagaagtcaaagatgtaattttacacaatttctgcccccaccgtcttttttgtttgtttgtttgtttgtttgttttttggctagatactaggtattcagtgtttgctgagatgacaggtttctactaatcagccagttatttgggaaggagaaaaactttttctcaattctgaacatgatgcagcttgttaactctccagatagtgcctttgattgaaaataaggtctacacctttttaagtatattatttctgacatcgtaagaaataatttagttccttattctcatttatcttttatataatgtactgtaatattcaggtttaaagtaaaataagtatatgaattatattttggtaaaactgtttcatgaccagcttgattaatgtatattaacataccagacattgacagcgaacatttcatgaaatcagttatttacttaccaaaacaatgagttttagcttgaaagttactgctgctctattattaacaaaactaagttttaaaaattaattttaattctactgaagtttaatttctggttaaaggtatagtggatgctatttatgatccaagtttttacatcacatccattgatctgcctatcccttctttttactccaaagaggagatgatagaataatacattcagtatactaccaagaagcaaagttataatgtgtttcattttgctattggaattttttattgtaacattgtatgataacctgaaatgtttacttgtgccttttctttaaacaattaaagttttccattttataagaa

SEQ ID NO: 129008 - DNA, 3855 bp, Homo sapiens
  Payload ID: 5233
  Gene Symbol: EVI5L
  Gene Name: ecotropic viral integration site 5-like
  Uniprot ID: Q96CN4
  ENST ID: ENST00000270530
  CDS Start-End: 197-2581
ggcagcggcggagccggcggcggccgcggtcccggggggcggctgagggggccgggccggggctgcggggcgaacggcgcggctaggatccggcggctcagcccggggcggcgaggctcggcacggagatggcggcgcgctcggcgcagacagagctgtgaaccaaccccgctcacggctaacaagcccacccaccatggcgagccccactctgagccccgactcctcatcccaggaggccctgtcggcccccacctgctccccaacctctgactccgagaacctcagccccgatgagctggagctgctggccaagctcgaagagcagaaccggctcctggaggccgactccaagtccatgcgctccatgaatggctcgcggcggaacagtggctcctcgctagtgtccagctcctcggcctcctccaacctgagccacctggaggaggacacgtggatcctgtggggccggatcgccaacgagtgggaggagtggcggcgcaggaaggagaagctgctcaaggagctgatccgcaagggcatcccccaccacttccgggccatcgtgtggcagcttctgtgcagcgccacggacatgcccgtcaagaaccagtactccgagctgctcaagatgtcctcgccgtgcgagaagctgatccgcagggacatcgcccgcacctacccggaacatgagttcttcaagggccaggacagcctgggccaggaggtcctcttcaacgtcatgaaggcatactcgctggtagaccgggaggtgggctactgccagggaagcgccttcatcgtgggcctgctcctcatgcagatgcctgaggaggaggccttctgtgtgttcgtgcggctgatgcaggagtaccggctgcgggagctcttcaaacccagcatggccgagctcgggctctgcatctatcagttcgagtacatgctgcaggagcagctcccagacctcaacacccacttccgttcccaaagcttccacacatccatgtatgcctcgtcctggttcctcacactgttcctgaccaccttcccactccccgtcgccacccgggtctttgacatcttcatgtatgaggggctggagatcgtgttccgagtgggcctcgccctgctgcaggtgaaccaggcagagctgatgcagctggacatggaggggatgtcccagtacttccagagagtgatcccccaccagttcgacagctgcccggacaagctggtcctcaaagcctaccaggtcaagtacaaccccaagaagatgaagaggctggagaaggagtacgcagccatgaagagcaaggagatggaggagcagatcgagatcaaaagacttcggacggagaaccggctcctgaaacagcggattgaaaccctagagaaggggcaagtgacacgggcgcaggaggcggaggagaactacgtcatcaagcgggagctggcggtggtgcggcagcagtgcagctcggcggccgaggacctgcagaaggcacagagcaccatccggcagctacaggagcagcaggagaacccccgcctcacagaagacttcgtgtcccacctggagaccgagctggagcagtcgaggctgcgggagacggagacactgggggcccttcgggagatgcaggacaaggttctcgacatggaaaagaggaacagctcgctgcccgacgagaacaatgtggcgcagctgcaggaggagctgaaggcgctcaaggtgcgggaaggccaggcggtggcctcgacgcgagagcttaaactgcagctgcaggagctctcggacacctggcaggcccatctggcccgcggcggccgctggaaggagtccccacggaagctggtcgtgggcgagctgcaggacgagctgatgagcgtgcgtctgcgcgaggcccaggccctggccgagggccgcgagctgcggcagcgcgtggtggaacttgagacgcaggaccacatccaccgcaaccttctgaaccgcgtggaggcggagcgcgcggcgctgcaggagaagctgcagtacctggctgcacagaacaaggggctgcagacgcagctcagcgaaagccgccgcaagcaggccgaggccgagtgcaagagcaaggaggaggtgatggctgtgcgactgcgggaggcggacagcatggctgcggtggccgagatgcggcagcgcattgccgagctggagatccagagggaggaaggccgcatccagggccagctgaaccactcggactcatcgcagtacatccgcgagctcaaggaccagatcgaggagctgaaggccgaggtgcggctgctgaagggcccgccgcccttcgaggacccgctggctttcgatgggctgagcctggcgcggcacttggacgaggactcgctgccgtcgtcggacgaggagctacttggcgtaggcgtgggcgctgccctgcaggacgcattgtaccctctgtccccgcgcgatgcgcgcttcttccgccgtctggagcggccggccaaggacagcgagggcagctcagacagcgacgccgatgagctggccgcgccctacagccagggtctggacaactgaggccatgcccagcgcgcccggagtcaggaggccgcagccgcggggggcgcccgggcagtccgcgttctgctccccacctgccgcacttgacaaactacgcgccctctgtggctcggccacccctaaagcgaggcccggcgaggcagcgcagagggtagggtccgacctgggctcctcagggccccggggcaggctctctatccccagcagtgtttacccatcttggtctgtacccctccgggccctctggcgttccaggggtgcctggaggggctgactgctctcttaacaggagggcagagggcaggggacagacgacccagaggtcccagcactgaatgagcaggcagctcccacctcctggcaggcttccttctgggacaggggcgacattgctgggaagtgctcaggaggtagccgaggcctgaggaaggagagcgccagctctgggctggacatcagcaccccacaacactcctcgggatgaagtgacccttgactagcccctggccatctctaggggagtcaggccgctggggacagatggccaggccggcctctcctgcctggcgcaggcaccgtggcccctgcagcggaaaccaaagtccccctactatgtgcggggcgcctggggactgagtggctaacgggaagcctccctgcttctctggggccagagcagcttccaggaagtgaagagacccctctccccagtgccccacatctttctctgggagacactcgcgccccctatcctggccagtgatggaggggtatctctacaggggtcctcggtctccatctacttccctttcttcatgtgtttccagccccaccctcagccagagccaggcccccaggcaggagcttcccagcgagcggcctcccctcacttcctcctggtggtcccgttgtctctgctgaatcagagctgagaacggtgccaaaatccaacgatgccccccaggccccttcctcccttcccccggccccccgggcctcatgaccctgggggctgcccccctcggtgctcccggagcctccagtagagtagcgtcacaagcaatctccctggcgcttcctgggtggggacccctgctccgtccccgcttcctagctgcccacttttcagtgttacgaagcctggggaccggggcaggcacccacggggctctccacacgccccctacactgcccgccaccattttgcacactgcctgttcacatgtcgcccaggcgggaaaaatggaaaataaagtgtatttacacagtca

SEQ ID NO: 129009 - DNA, 2418 bp, Homo sapiens
  Payload ID: 5233
  Gene Symbol: EVI5L
  Gene Name: ecotropic viral integration site 5-like
  Uniprot ID: Q96CN4
  ENST ID: ENST00000538904
  CDS Start-End: 1-2418
atggcgagccccactctgagccccgactcctcatcccaggaggccctgtcggcccccacctgctccccaacctctgactccgagaacctcagccccgatgagctggagctgctggccaagctcgaagagcagaaccggctcctggaggccgactccaagtccatgcgctccatgaatggctcgcggcggaacagtggctcctcgctagtgtccagctcctcggcctcctccaacctgagccacctggaggaggacacgtggatcctgtggggccggatcgccaacgagtgggaggagtggcggcgcaggaaggagaagctgctcaaggagctgatccgcaagggcatcccccaccacttccgggccatcgtgtggcagcttctgtgcagcgccacggacatgcccgtcaagaaccagtactccgagctgctcaagatgtcctcgccgtgcgagaagctgatccgcagggacatcgcccgcacctacccggaacatgagttcttcaagggccaggacagcctgggccaggaggtcctcttcaacgtcatgaaggcatactcgctggtagaccgggaggtgggctactgccagggaagcgccttcatcgtgggcctgctcctcatgcagatgcctgaggaggaggccttctgtgtgttcgtgcggctgatgcaggagtaccggctgcgggagctcttcaaacccagcatggccgagctcgggctctgcatctatcagttcgagtacatgctgcaggagcagctcccagacctcaacacccacttccgttcccaaagcttccacacatccatgtatgcctcgtcctggttcctcacactgttcctgaccaccttcccactccccgtcgccacccgggtctttgacatcttcatgtatgaggggctggagatcgtgttccgagtgggcctcgccctgctgcaggtgaaccaggcagagctgatgcagctggacatggaggggatgtcccagtacttccagagagtgatcccccaccagttcgacagctgcccggacaagctggtcctcaaagcctaccaggtcaagtacaaccccaagaagatgaagaggctggagaaggagtacgcagccatgaagagcaaggagatggaggagcagatcgagatcaaaagacttcggacggagaaccggctcctgaaacagcggattgaaaccctagagaaggagagcgctgctctggctgataggttaatccaggggcaagtgacacgggcgcaggaggcggaggagaactacgtcatcaagcgggagctggcggtggtgcggcagcagtgcagctcggcggccgaggacctgcagaaggcacagagcaccatccggcagctacaggagcagcaggagaacccccgcctcacagaagacttcgtgtcccacctggagaccgagctggagcagtcgaggctgcgggagacggagacactgggggcccttcgggagatgcaggacaaggttctcgacatggaaaagaggaacagctcgctgcccgacgagaacaatgtggcgcagctgcaggaggagctgaaggcgctcaaggtgcgggaaggccaggcggtggcctcgacgcgagagcttaaactgcagctgcaggagctctcggacacctggcaggcccatctggcccgcggcggccgctggaaggagtccccacggaagctggtcgtgggcgagctgcaggacgagctgatgagcgtgcgtctgcgcgaggcccaggccctggccgagggccgcgagctgcggcagcgcgtggtggaacttgagacgcaggaccacatccaccgcaaccttctgaaccgcgtggaggcggagcgcgcggcgctgcaggagaagctgcagtacctggctgcacagaacaaggggctgcagacgcagctcagcgaaagccgccgcaagcaggccgaggccgagtgcaagagcaaggaggaggtgatggctgtgcgactgcgggaggcggacagcatggctgcggtggccgagatgcggcagcgcattgccgagctggagatccagagggaggaaggccgcatccagggccagctgaaccactcggactcatcgcagtacatccgcgagctcaaggaccagatcgaggagctgaaggccgaggtgcggctgctgaagggcccgccgcccttcgaggacccgctggctttcgatgggctgagcctggcgcggcacttggacgaggactcgctgccgtcgtcggacgaggagctacttggcgtaggcgtgggcgctgccctgcaggacgcattgtaccctctgtccccgcgcgatgcgcgcttcttccgccgtctggagcggccggccaaggacagcgagggcagctcagacagcgacgccgatgagctggccgcgccctacagccagggtctggacaactga

SEQ ID NO: 129010 - DNA, 417 bp, Homo sapiens
  Payload ID: 5233
  Gene Symbol: EVI5L
  Gene Name: ecotropic viral integration site 5-like
  ENST ID: ENST00000601766
  CDS Start-End: 1-417
ttcgtgtcccacctggagaccgagctggagcagtcgaggctgcgggagacggagacactgggggcccttcgggagatgcaggacaaggttctcgacatggaaaagaggaacagctcgctgcccgacgagaacaatgtggcgcagctgcaggaggagctgaaggcgctcaaggtgcgggaaggccaggcggtggcctcgacgcgagagcttaaactgcagctgcaggagctctcggacacctggcaggaccagatcgaggagctgaaggccgaggtgcggctgctgaagggcccgccgcccttcgaggacccgctggctttcgatgggctgagcctggcgcggcacttggacgaggactcgctgccgtcgtcggacgaggagctacttggcgtaggcgtgggcgctgccctgcaggac

SEQ ID NO: 129011 - DNA, 610 bp, Homo sapiens
  Payload ID: 5233
  Gene Symbol: EVI5L
  Gene Name: ecotropic viral integration site 5-like
  ENST ID: ENST00000599036
  CDS Start-End: 1-534
gtgttcgtgcggctgatgcaggagtaccggctgcgggagctcttcaaacccagcatggccgagctcgggctctgcatctatcagttcgagtacatgctgcaggagcagctcccagacctcaacacccacttccgttcccaaagcttccacacatccatgtatgcctcgtcctggttcctcacactgttcctgaccaccttcccactccccgtcgccacccgggtctttgacatcttcatgtatgaggggctggagatcgtgttccgagtgggcctcgccctgctgcaggtgaaccaggcagagctgatgcagctggacatggaggggatgtcccagtacttccagagagtgatcccccaccagttcgacagctgcccggacaagctggtcctcaaagcctaccaggtcaagtacaaccccaagaagatgaagaggctggagaaggagtacgcagccatgaagagcaaggagatggaggagcagatcgagatcaaagccagctgtgagcgcctcccccgcctgacgccgcggtaaccaagacagtcaaggtccctgccccgctgggccgcccagcgtcatggggaagcaatcaataaaccactgaactaga

SEQ ID NO: 129012 - DNA, 1501 bp, Homo sapiens
  Payload ID: 5234
  Gene Symbol: ECSIT
  Gene Name: ECSIT signalling integrator
  Uniprot ID: Q9BQ95
  ENST ID: ENST00000252440
  CDS Start-End: 100-990
gctctctgggccaatatggcagcgcccagcaacaagacagagctggcctggagtccgcggctggccgcgtgagtaggtgattgtctgacaagcagaggcatgagctgggtccaggccaccctactggcccgaggcctctgtagggcctggggaggcacctgcggggccgccctcacaggaacctccatctctcaggtccctcgccggctccctcggggcctccactgcagcgcagctgcccatagctctgaacagtccctggttcccagcccaccggaaccccggcagaggcccaccaaggctctggtgccctttgaggacctgtttgggcaggcgcctggtggggaacgggacaaggcgagcttcctgcagacggtgcagaaatttgcggagcacagcgtgcgtaagcggggccacattgacttcatctacctggccctgcgcaagatgcgggagtatggtgtcgagcgggacctggctgtgtacaaccagctgctcaacatcttccccaaggaggtcttccggcctcgcaacatcatccagcgcatcttcgtccactaccctcggcagcaggagtgtgggattgctgtcctggagcagatggagaaccacggtgtgatgcccaacaaggagacggagttcctgctgattcagatctttggacgcaaaagctaccccatgctcaagttggtgcgcctgaagctgtggttccctcgattcatgaacgtcaaccccttcccagtgccccgggacctgccccaggaccctgtggagctggccatgtttggcctgcggcacatggagcctgaccttagtgccagggtcaccatctaccaggttcctttgcccaaagactcaacaggtgcagcagatcccccccagccccacatcgtaggaagtggaagagacgccggaggagtggaacctctactacccgatgcagctggacctggagtatgtgaggagtggctgggacaactacgagtttgacatcaatgaagtggaggaaggccctgtcttcgccatgtgcatggcgggtgctcatgaccaggcgacgatggctaagtggatccagggcctgcaggagaccaacccaaccctggcccagatccccgtggtcttccgcctcgccgggtccacccgggagctccagacatcctctgcagggctggaggagccgcccctgcccgaggaccaccaggaagaagacgacaacctgcagcgacagcagcagggccagagctagtctgagccggcgcgagggcacgggctgtggcccgaggaggcggtggactgaaggcatgagatgccctttgagtgtacagcaaatcaatgttttcctgcttggggctctcttccctcatctctagcagtatggcatcccctccccaggatctcgggctgccagcgatgggcaggcgagacccctccagaatctgcaggcgcctctggttctccgaattcaaataaaaaggggcgggagcgctgttggttgtgcgca

SEQ ID NO: 129013 - DNA, 1700 bp, Homo sapiens
  Payload ID: 5234
  Gene Symbol: ECSIT
  Gene Name: ECSIT signalling integrator
  Uniprot ID: Q9BQ95
  ENST ID: ENST00000270517
  CDS Start-End: 137-1432
ttgatttgctacctccctggagctccctgacccggacgctctctgggccaatatggcagcgcccagcaacaagacagagctggcctggagtccgcggctggccgcgtgagtaggtgattgtctgacaagcagaggcatgagctgggtccaggccaccctactggcccgaggcctctgtagggcctggggaggcacctgcggggccgccctcacaggaacctccatctctcaggtccctcgccggctccctcggggcctccactgcagcgcagctgcccatagctctgaacagtccctggttcccagcccaccggaaccccggcagaggcccaccaaggctctggtgccctttgaggacctgtttgggcaggcgcctggtggggaacgggacaaggcgagcttcctgcagacggtgcagaaatttgcggagcacagcgtgcgtaagcggggccacattgacttcatctacctggccctgcgcaagatgcgggagtatggtgtcgagcgggacctggctgtgtacaaccagctgctcaacatcttccccaaggaggtcttccggcctcgcaacatcatccagcgcatcttcgtccactaccctcggcagcaggagtgtgggattgctgtcctggagcagatggagaaccacggtgtgatgcccaacaaggagacggagttcctgctgattcagatctttggacgcaaaagctaccccatgctcaagttggtgcgcctgaagctgtggttccctcgattcatgaacgtcaaccccttcccagtgccccgggacctgccccaggaccctgtggagctggccatgtttggcctgcggcacatggagcctgaccttagtgccagggtcaccatctaccaggttcctttgcccaaagactcaacaggtgcagcagatcccccccagccccacatcgtaggaatccagagtcccgatcagcaggccgccctggcccgccacaatccagcccggcctgtctttgttgagggccccttctccctgtggctccgcaacaagtgtgtgtattaccacatcctcagagctgacttgctgcccccggaggagagggaagtggaagagacgccggaggagtggaacctctactacccgatgcagctggacctggagtatgtgaggagtggctgggacaactacgagtttgacatcaatgaagtggaggaaggccctgtcttcgccatgtgcatggcgggtgctcatgaccaggcgacgatggctaagtggatccagggcctgcaggagaccaacccaaccctggcccagatccccgtggtcttccgcctcgccgggtccacccgggagctccagacatcctctgcagggctggaggagccgcccctgcccgaggaccaccaggaagaagacgacaacctgcagcgacagcagcagggccagagctagtctgagccggcgcgagggcacgggctgtggcccgaggaggcggtggactgaaggcatgagatgccctttgagtgtacagcaaatcaatgttttcctgcttggggctctcttccctcatctctagcagtatggcatcccctccccaggatctcgggctgccagcgatgggcaggcgagacccctccagaatctgcaggcgcctctggttctccgaattcaaataaaaaggggcgggagcgctgttggttgtgcgcatgcgcagtttcca

SEQ ID NO: 129014 - DNA, 970 bp, Homo sapiens
  Payload ID: 5234
  Gene Symbol: ECSIT
  Gene Name: ECSIT signalling integrator
  Uniprot ID: Q9BQ95
  ENST ID: ENST00000417981
  CDS Start-End: 135-788
gatttgctacctccctggagctccctgacccggacgctctctgggccaatatggcagcgcccagcaacaagacagagctggcctggagtccgcggctggccgcgtgagtaggtgattgtctgacaagcagaggcatgagctgggtccaggccaccctactggcccgaggcctctgtagggcctggggaggcacctgcggggccgccctcacaggaacctccatctctcaggttcctttgcccaaagactcaacaggtgcagcagatcccccccagccccacatcgtaggaatccagagtcccgatcagcaggccgccctggcccgccacaatccagcccggcctgtctttgttgagggccccttctccctgtggctccgcaacaagtgtgtgtattaccacatcctcagagctgacttgctgcccccggaggagagggaagtggaagagacgccggaggagtggaacctctactacccgatgcagctggacctggagtatgtgaggagtggctgggacaactacgagtttgacatcaatgaagtggaggaaggccctgtcttcgccatgtgcatggcgggtgctcatgaccaggcgacgatggctaagtggatccagggcctgcaggagaccaacccaaccctggcccagatccccgtggtcttccgcctcgccgggtccacccgggagctccagacatcctctgcagggctggaggagccgcccctgcccgaggaccaccaggaagaagacgacaacctgcagcgacagcagcagggccagagctagtctgagccggcgcgagggcacgggctgtggcccgaggaggcggtggactgaaggcatgagatgccctttgagtgtacagcaaatcaatgttttcctgcttggggctctcttccctcatctctagcagtatggcatcccctccccaggatctcgggctgccagcgatgggcaggcgagacccc

SEQ ID NO: 129015 - DNA, 993 bp, Homo sapiens
  Payload ID: 5234
  Gene Symbol: ECSIT
  Gene Name: ECSIT signalling integrator
  ENST ID: ENST00000585318
  CDS Start-End: 324-993
ctgggccaatatggcagcgcccagcaacaagacagagctggcctggagtccgcggctggccgcgtgagtaggtccctcgccggctccctcggggcctccactgcagcgcagctgcccatagctctgaacagtccctggttcccagcccaccggaaccccggcagaggcccaccaaggctctggtgccctttgaggacctgtttgggcaggcgcctggtggggaacgggacaaggcgagcttcctgcagacggtgcagaaatttgcggagcacagcgtgcgtaagcggggccacattgacttcatctacctggccctgcgcaagatgcgggagtatggtgtcgagcgggacctggctgtgtacaaccagctgctcaacatcttccccaaggaggtcttccggcctcgcaacatcatccagcgcatcttcgtccactaccctcggcagcaggagtgtgggattgctgtcctggagcagatggagaaccacggtgtgatgcccaacaaggagacggagttcctgctgattcagatctttggacgcaaaagctaccccatgctcaagttggtgcgcctgaagctgtggttccctcgattcatgaacgtcaaccccttcccagtgccccgggacctgccccaggaccctgtggagctggccatgtttggcctgcggcacatggagcctgaccttagtgccagggtcaccatctaccaggttcctttgcccaaagactcaacaggtgcagcagatcccccccagccccacatcgtaggaatccagagtcccgatcagcaggccgccctggcccgccacaatccagcccggcctgtctttgttgagggccccttctccctgtggctccgcaacaagtgtgtgtattaccacatcctcagagctgacttgctgcccccggaggagagggaagtggaagagacgccggaggagtggaacctctactacccgatgcagctggacctggagtatgtgaggagtg

SEQ ID NO: 129016 - DNA, 745 bp, Homo sapiens
  Payload ID: 5234
  Gene Symbol: ECSIT
  Gene Name: ECSIT signalling integrator
  ENST ID: ENST00000593231
  CDS Start-End: 1-178
gatgcgggagtatggtgtcgagcgggacctggctgtgtacaaccagctgctcaacatcttccccaaggaggtcttccggcctcgcaacatcatccagcgcatcttcgtccactaccctcggcagcaggagtgtgggattgctgtcctggagcagatggagaaccacgcacaggtgtgatgcccaacaaggagacggagttcctgctgattcagatctttggacgcaaaagctaccccatgctcaagttggtgcgcctgaagctgtggttccctcgattcatgaacgtcaaccccttcccagtgccccgggacctgccccaggaccctgtggagctggccatgtttggcctgcggcacatggagcctgaccttagtgccagggtcaccatctaccaggttcctttgcccaaagactcaacaggtgcagcagatcccccccagccccacatcgtaggtaagtccgagagcatgggggcagccaagtctctaaccttacccaggccctgccaggttctcgctgggcctaggctgggctccctgggcctctgggccgagtcccttgcagggcacagggcatgtatgtctccacaccaggaatccagagtcccgatcagcaggccgccctggcccgccacaatccagcccggcctgtctttgttgagggccccttctccctgtggctccgcaacaagtgtgtgtattaccacatcctcagagctgacttgctgcccccggaggagagggt

SEQ ID NO: 129017 - DNA, 941 bp, Homo sapiens
  Payload ID: 5234
  Gene Symbol: ECSIT
  Gene Name: ECSIT signalling integrator
  ENST ID: ENST00000592571
  CDS Start-End: 1-215
acgtcaaccccttcccagtgccccgggacctgccccaggaccctgtggagctggccatgtttggcctgcggcacatggagcctgaccttagtgccagggtcaccatctaccaggccccgtgcgctgcccctgacgccgcccgtctccctccccagaggttcctttgcccaaagactcaacaggtgcagcagatcccccccagccccacatcgtaggaatccagagtcccgatcagcaggccgccctggcccgccacaatccagcccggcctgtctttgttgagggccccttctccctgtggctccgcaacaagtgtgtgtattaccacatcctcagagctgacttgctgcccccggaggagagggaagtggaagagacgccggaggagtggaacctctactacccgatgcagctggacctggagtatgtgaggagtggctgggacaactacgagtttgacatcaatgaagtggaggaaggccctgtcttcgccatgtgcatggcgggtgctcatgaccaggcgacgatggctaagtggatccagggcctgcaggagaccaacccaaccctggcccagatccccgtggtcttccgcctcgccgggtccacccgggagctccagacatcctctgcagggctggaggagccgcccctgcccgaggaccaccaggaagaagacgacaacctgcagcgacagcagcagggccagagctagtctgagccggcgcgagggcacgggctgtggcccgaggaggcggtggactgaaggcatgagatgccctttgagtgtacagcaaatcaatgttttcctgcttggggctctcttccctcatctctagcagtatggcatcccctccccaggatctcgggctgccagcgatgggcaggcgagacccctccagaatctgcaggcgcctctggttctccgaattcaaataaaa

SEQ ID NO: 129018 - DNA, 642 bp, Homo sapiens
  Payload ID: 5234
  Gene Symbol: ECSIT
  Gene Name: ECSIT signalling integrator
  ENST ID: ENST00000592665
  CDS Start-End: 336-642
ggcaaccgggcaggatttggaatccgcgtctgcctttttcccccaagagacccagaatcctggcagccggtttcaaagctgttgtccctcgccggctccctcggggcctccactgcagcgcagctgcccatagctctgaacagtccctggttcccagcccaccggaaccccggcagaggcccaccaaggctctggtgccctttgaggacctgtttgggcaggcgcctggtggggaacgggacaaggcgagcttcctgcagacggtgcagaaatttgcggagcacagcgtgcgtaagcggggccacattgacttcatctacctggccctgcgcaagatgcgggagtatggtgtcgagcgggacctggctgtgtacaaccagctgctcaacatcttccccaaggaggtcttccggcctcgcaacatcatccagcgcatcttcgtccactaccctcggcagcaggagtgtgggattgctgtcctggagcagatggagaaccacggtgtgatgcccaacaaggagacggagttcctgctgattcagatctttggacgcaaaagctaccccatgctcaagttggtgcgcctgaagctgtggttccctcgattcatgaacgtcaaccccttcccagtgccccgggacc

SEQ ID NO: 129019 - DNA, 258 bp, Homo sapiens
  Payload ID: 5234
  Gene Symbol: ECSIT
  Gene Name: ECSIT signalling integrator
  ENST ID: ENST00000586149
  CDS Start-End: 185-258
agagctggcctggagtccgcggctggccgcgtgagtagatggagttttgctgttgttccccaggctgaggtgtaatggcatcatcttggctcactgcaacctctgcctcctgggttcaagcaattctcctacgtcagccttcccagtagctggaattacaggtgattgtctgacaagcagaggcatgagctgggtccaggccaccctactggcccgaggcctctgtagggcctggggaggcacctgcggggccgccct

SEQ ID NO: 129020 - DNA, 1319 bp, Homo sapiens
  Payload ID: 5234
  Gene Symbol: ECSIT
  Gene Name: ECSIT signalling integrator
  Uniprot ID: Q9BQ95
  ENST ID: ENST00000591104
  CDS Start-End: 145-1035
ttttgcagatgacctcgcgagaggtcacgccgcaagtcggcaaccgggcaggatttggaatccgcgtctgcctttttcccccaagagacccagaatcctggcagccggtttcaaagctgttgtgattgtctgacaagcagaggcatgagctgggtccaggccaccctactggcccgaggcctctgtagggcctggggaggcacctgcggggccgccctcacaggaacctccatctctcaggtccctcgccggctccctcggggcctccactgcagcgcagctgcccatagctctgaacagtccctggttcccagcccaccggaaccccggcagaggcccaccaaggctctggtgccctttgaggacctgtttgggcaggcgcctggtggggaacgggacaaggcgagcttcctgcagacggtgcagaaatttgcggagcacagcgtgcgtaagcggggccacattgacttcatctacctggccctgcgcaagatgcgggagtatggtgtcgagcgggacctggctgtgtacaaccagctgctcaacatcttccccaaggaggtcttccggcctcgcaacatcatccagcgcatcttcgtccactaccctcggcagcaggagtgtgggattgctgtcctggagcagatggagaaccacggtgtgatgcccaacaaggagacggagttcctgctgattcagatctttggacgcaaaagctaccccatgctcaagttggtgcgcctgaagctgtggttccctcgattcatgaacgtcaaccccttcccagtgccccgggacctgccccaggaccctgtggagctggccatgtttggcctgcggcacatggagcctgaccttagtgccagggtcaccatctaccaggttcctttgcccaaagactcaacaggtgcagcagatcccccccagccccacatcgtagagctgacttgctgcccccggaggagagggaagtggaagagacgccggaggagtggaacctctactacccgatgcagctggacctggagtatgtgaggagtggctgggacaactacgagtttgacatcaatgaagtggaggaaggccctgtcttcgccatgtgcatggcgggtgctcatgaccaggcgacgatggctaagtggatccagggcctgcaggagaccaacccaaccctggcccagatccccgtggtcttccgcctcgccgggtccacccgggagctccagacatcctctgcagggctggaggagccgcccctgcccgaggaccaccaggaagaagacgacaacctgcagcgacagcagcagggccagagctag

SEQ ID NO: 129021 - DNA, 1286 bp, Homo sapiens
  Payload ID: 5234
  Gene Symbol: ECSIT
  Gene Name: ECSIT signalling integrator
  ENST ID: ENST00000592312
  CDS Start-End: 316-1119
atatggcagcgcccagcaacaagacagagctggcctggagtccgcggctggccgcgtgagtaggtccctcgccggctccctcggggcctccactgcagcgcagctgcccatagctctgaacagtccctggttcccagcccaccggaaccccggcagaggcccaccaaggctctggtgccctttgaggacctgtttgggcaggcgcctggtggggaacgggacaaggcgagcttcctgcagacggtgcagaaatttgcggagcacagcgtgcgtaagcggggccacattgacttcatctacctggccctgcgcaagatgcgggagtatggtgtcgagcgggacctggctgtgtacaaccagctgctcaacatcttccccaaggaggtcttccggcctcgcaacatcatccagcgcatcttcgtccactaccctcggcagcaggagtgtgggattgctgtcctggagcagatggagaaccacggtgtgatgcccaacaaggagacggagttcctgctgattcagatctttggacgcaaaagctaccccatgctcaagttggtgcgcctgaagctgtggttccctcgattcatgaacgtcaaccccttcccagtgccccgggacctgccccaggaccctgtggagctggccatgtttggcctgcggcacatggagcctgaccttagtgccagggtcaccatctaccaggttcctttgcccaaagactcaacaggtgcagcagatcccccccagccccacatcgtaggtaagtccgagagcatgggggcagccaagtctctaaccttacccaggccctgccaggttctcgctgggcctaggctgggctccctgggcctctgggccgagtcccttgcagggcacagggcatgtatgtctccacaccaggaatccagagtcccgatcagcaggccgccctggcccgccacaatccagcccggcctgtctttgttgagggccccttctccctgtggctccgcaacaagtgtgtgtattaccacatcctcagagctgacttgctgcccccggaggagagggaagtggaagagacgccggaggagtggaacctctactacccgatgcagctggacctggagtatgtgaggagtggctgggacaactacgagtttgacatcaatgaagtggaggaaggccctgtcttcgccatgtgcatggcgggtgctcatgaccaggcgacgatggctaagtggatccagggcctgcaggagaccaacccaaccctggcccagatccccgtggtcttccgcctc

SEQ ID NO: 129022 - DNA, 873 bp, Homo sapiens
  Payload ID: 5234
  Gene Symbol: ECSIT
  Gene Name: ECSIT signalling integrator
  ENST ID: ENST00000590480
  CDS Start-End: 191-873
gggccaatatggcagcgcccagcaacaagacagagctggcctggagtccgcggctggccgcgtgagtagtagagacagggtttctccatgttggtcaggctggtctcgaactcccgacctcaggtgatcagctggcctggacctcccaacgtgctgggattacacacgtgattgtctgacaagcagaggcatgagctgggtccaggccaccctactggcccgaggcctctgtagggcctggggaggcacctgcggggccgccctcacaggaacctccatctctcaggtccctcgccggctccctcggggcctccactgcagcgcagctgcccatagctctgaacagtccctggttcccagcccaccggaaccccggcagaggcccaccaaggctctggtgccctttgaggacctgtttgggcaggcgcctggtggggaacgggacaaggcgagcttcctgcagacggtgcagaaatttgcggagcacagcgtgcgtaagcggggccacattgacttcatctacctggccctgcgcaagatgcgggagtatggtgtcgagcgggacctggctgtgtacaaccagctgctcaacatcttccccaaggaggtcttccggcctcgcaacatcatccagcgcatcttcgtccactaccctcggcagcaggagtgtgggattgctgtcctggagcagatggagaaccacggtgtgatgcccaacaaggagacggagttcctgctgattcagatctttggacgcaaaagctaccccatgctcaagttggtgcgcctgaagctgtggttccctcgattcatgaacgtcaaccccttcccagtgccccgggacctgccccaggaccctgtggagctggccat

SEQ ID NO: 129023 - DNA, 818 bp, Homo sapiens
  Payload ID: 5234
  Gene Symbol: ECSIT
  Gene Name: ECSIT signalling integrator
  ENST ID: ENST00000588998
  CDS Start-End: 59-307
gctggcctggagtccgcggctggccgcgtgagtaggtgattgtctgacaagcagaggcatgagctgggtccaggccaccctactggcccgaggcctctgtagggcctggggaggcacctgcggggccgccctcacaggaacctccatctctcaggttcctttgcccaaagactcaacaggtgcagcagatcccccccagccccacatcgtaggaagtggaagagacgccggaggagtggaacctctactacccgatgcagctggacctggagtatgtgaggagtggctgggacaactacgagtttgacatcaatgaagtggaggaaggccctgtcttcgccatgtgcatggcgggtgctcatgaccaggcgacgatggctaagtggatccagggcctgcaggagaccaacccaaccctggcccagatccccgtggtcttccgcctcgccgggtccacccgggagctccagacatcctctgcagggctggaggagccgcccctgcccgaggaccaccaggaagaagacgacaacctgcagcgacagcagcagggccagagctagtctgagccggcgcgagggcacgggctgtggcccgaggaggcggtggactgaaggcatgagatgccctttgagtgtacagcaaatcaatgttttcctgcttggggctctcttccctcatctctagcagtatggcatcccctccccaggatctcgggctgccagcgatgggcaggcgagacccctccagaatctgcaggcgcctctggttctccgaattcaaataaaaaggggcgggagcgctgttggttgtgcgca

SEQ ID NO: 129024 - DNA, 5520 bp, Homo sapiens
  Payload ID: 5235
  Gene Symbol: ENC1
  Gene Name: ectodermal-neural cortex 1 (with BTB domain)
  Uniprot ID: O14682
  ENST ID: ENST00000302351
  CDS Start-End: 1132-2901
agagtccagccgggggtgccgcacccactggggagtggggagggaggacacataggaaatgcctggggctggagtctctttggctctctgccagcaagaaacttaaacgtcctggcttgctcaacccgagtgtccctaaactgtccagacttttgcccgtccattgccactatctctccccactctgggtgtcctacccaaggcgctgtctatgcgtgcccagggcctgtcctgcggatacccagctcgccccttgcagccctttttagagcatctcgcgggctctggcatcaccaagcgcacagccccgggctgcgctcccctaaggtgggtccctcagatccggggctgtccattaaccaggctggcccaaagaggcgcagacactcgaacccgggaaaacttattttattctcggttcccggggttgcagctgccagcggctgagacagtgcgtccgctttgtctctctgcactccccgcagcccccctctcccgcttcctctcccgattaactcccccgacacgctcttctctagctcctctcctcctcccactccttctcctcctcttcctcctcctacaccacaggccgcgctaatgcgcttcctccctcccccggtgtcggtctctttgcatacgcgccccctcccctccccgccgcgccacttatagcggggcgcacggcggcggggcgcagactgctctggcagccggagaggaggcggtgcggcggtggcgctgcggagacccggtccagacgcctggcggccgccggcacacaaggcgctttctagctccctcccccgagcgcacagcccgcctccttccgcggcgcctgcagtggcaggcttgctctgccctaccgtgacgcgctccggagacgctctgcgggtcctggacaccgggtccgcggcgtggggacgacagacggaggcgaacgccatcggtagccggtccgcgagccatcgttcggggcgcagtcctctccccggctggccctcctttctccggggcattcgccaccgcttccctgggctgagacgaccggttcgtcgcctccttgcccgtgaccgtcgctagaactcagttgtgcgttgcggccagtcgccactgctgagtggaaacaaaatgtcagtcagtgtgcatgagaaccgcaagtccagggccagcagcggctccattaacatctatctgtttcacaagtcctcctacgctgacagcgtcctcactcacctgaatcttttacgccagcagcgtctcttcactgacgtccttctccatgccggaaataggaccttcccttgccaccgggcagtgctggctgcatgcagtcgctactttgaggccatgttcagtggtggcctgaaagagagccaggacagtgaggtcaactttgacaattccatccacccagaagtcttggagctgctgcttgactatgcgtactcctcccgggtcatcatcaatgaagaaaatgcagaatcgctcctggaagctggtgacatgctggagtttcaagacatccgggatgcatgtgcagagttcctggaaaagaacctgcatcccaccaactgcctgggcatgctgctgctgtctgatgcacaccagtgcaccaagctgtacgaactatcttggagaatgtgtctcagcaacttccaaaccatcaggaagaatgaagatttcctccagctgccccaggacatggtagtgcaactcttgtccagtgaagagctggagacagaggatgaaaggcttgtgtacgagtctgcaattaactggatcagctatgacctgaagaagcgctattgctacctcccagaactgttgcagacagtaaggctggcacttctgccagccatctatctcatggagaatgtggccatggaggaactcatcaccaagcagagaaagagtaaggaaattgtggaagaggccatcaggtgcaaactgaaaatcctgcagaatgacggtgtggtaaccagcctctgtgcccgacctcggaaaactggccatgccctcttccttctgggaggacagactttcatgtgtgacaagttgtatctggtagaccagaaggccaaagaaatcattcccaaggctgacattcccagcccaagaaaagagtttagtgcatgtgcgattggctgcaaagtgtacattactggggggcgggggtctgaaaatggggtctcaaaagatgtctgggtttatgataccctgcacgaggagtggtccaaggctgcccccatgctggtggccaggtttggccatggctctgctgaactgaagcactgcctgtatgtggttggggggcacacggccgcaactggctgcctcccggcctccccctcagtctctctaaagcaggtagaacattatgaccccacaatcaacaaatggaccatggtggccccactccgagaaggcgttagcaacgccgcagtagtgagtgccaaacttaagttatttgctttcggaggtaccagtgtcagtcatgacaagctccccaaagttcagtgttacgatcagtgtgaaaacaggtggactgtaccggccacctgtccccagccctggcgttacacagcagcagctgtgctggggaaccagatttttattatggggggtgatacagaattctctgcctgctctgcttataaattcaacagtgagacttaccagtggaccaaggtgggagatgtgacagcaaagcgcatgagctgccatgctgtggcctctggaaacaaactctacgtggttggaggatactttggcattcagcgatgcaagactttggactgctacgatccaacattagacgtgtggaacagcatcaccactgtcccgtactcgctgattcctactgcatttgtcagcacctggaaacatctgccttcttaaatgcagtacattctaaagagagtgagcatgagctcactccatcactcgatgagataatatgagatttctacttcggagaggccaagtctaatgaagagaaaaaaaggaaaagaagttgcaagactcgaataaaatctgctgcaccttgtaaatgctctaactggacatgaaggaaaggggcgagggaggggggtgggatttttggtgcaagtagcacatggtttaaatatgaatgaacaaacctgtgatctagtccttgtcttgtaattgtggattaatgtcaatgttaatcagcccctcaaagggagagaaaagctggaccttttcccttgctgtaccatattcagcatttgatttccatgggccccaccatttatgtgtagaatttgaaatggttgtcacctctctctgaggacagagcttgaagcctccacaccagctgctgctggagattcaaagcccaactgtgggtccgagagggaagctggctgggctggctgaagaatgaagaccactggactctccgttaatctctaaggggtctgctccccaggaacgtttctgaacaatggggactttgttggtagccatttggtagatgttcttttctatttataagtgactttaaactttcccttggctgttaagaagtttgttatagatttagctatttattgttcgatgcctgcatgctgaaacaatgcctacagctgtcttcacatgtatggacgtgtgtgaatggttgtacgttttgcacattttgtggctgttgagatgtgctttgctgcacaaacatgaaaatttttgagttacaatttggagcataactggagggtgggttggggaggggtggatttttaaaatgtcaagacagggaaggatgacaaaatggaaatttaaatgacatcctagaggtagagaaaccgtggagatcgcttttctcagactcaccaacttttaatgggatttcatggggtttggttgtgctgatagggtaaggggaggctgctttctgcccttctccccactcccatctgatttacttaattcagtctcagctgctgaaatttggaaaggaccaaattgctttacagtttttttctttgtgtagtatcttgaaatcctggaaaattctatggaatagttctgtatatagggcacaagtaaaggcattgtccaaagtttatttatttatttattaccctaagaatgctttgccataaccacatttaatgggaaaaacggcagtatcacagatgtaaattaactcaccagatttactgggcctgaactcattctcttcttgctatatgatttagcaagttctagaaggtctccaagacaataattacattggcacaatgtatacttcagtgctcacccgtaggcaaatctctttttaaaaaactctttggtgcacaagtaacacatttggccacaaaacaccaaagaattgtaggcagtggcccctattgagaagttttccggtagagttggaaatcagttgtgaatacattctttgctagttggagtgcttgtttactaagcatgtgccgtcgtaggtattagtgctagtctcagataggtgcttcccctgaggtgcaggggaagaccaaagtttgcaactcgaactgctttcgtccatgtttctcacattgctgtattttagaaaataggggttaagactgataacaaccttttacattgtgactgtgtttgcattgtctaatgacagataaatccttaacatttctctccaccttagtactttagactaattgtgtttgtccgtccatgccatgaatgagtgggctgtagttgggcctaaataaatgagctgttggaagaaaagaatcacagtactttccagcagtcagtccctggttcctagatgtgttctaagcaatgcaaatgtctaattgtcccccagtgggcatagtcagtgtcgtttatattgtagcagttacagctctgtagtttatgatgcaaatctgccaagagagatgtatgtgtcactgcatggcttctgaaagcaggatgaattttctgcagctgtttcaaagttggggtctgttcttgaatcctctattaattactgtgtgtgagccagagggagctgtggtaagggttgggcccccagcctgtagggaactttctggactcccactctttgaatcgatataggcatttggtctcactacttgaccattctcaccctgtgaaacgtcccacactttgaagcaaatacaattcacagcacagtacacacaaaaaccttggcataagacagagaaggttcttcttattttgtgggctggttgctgtagaaacacataacaaagggcagccctccacttctggtataattgtgtagccccttttctttgggcttgacacctgtcttgaataagagtgattagagctgcataatgtccctctcttggctattgaccatgtggttcacgtacaaaactctgtataagttgaaggaaaatgttcatgttcatatgtacttgtttgctatgactacattttgaggttttgtaaaactgttatttttttttttttcacaatgtgaaactgaaggtcaataaattattagagattttctcttcatta

SEQ ID NO: 129025 - DNA, 1405 bp, Homo sapiens
  Payload ID: 5235
  Gene Symbol: ENC1
  Gene Name: ectodermal-neural cortex 1 (with BTB domain)
  ENST ID: ENST00000508331
  CDS Start-End: 1257-1405
agagtccagccgggggtgccgcacccactggggagtggggagggaggacacataggaaatgcctggggctggagtctctttggctctctgccagcaagaaacttaaacgtcctggcttgctcaacccgagtgtccctaaactgtccagacttttgcccgtccattgccactatctctccccactctgggtgtcctacccaaggcgctgtctatgcgtgcccagggcctgtcctgcggatacccagctcgccccttgcagccctttttagagcatctcgcgggctctggcatcaccaagcgcacagccccgggctgcgctcccctaaggtgggtccctcagatccggggctgtccattaaccaggctggcccaaagaggcgcagacactcgaacccgggaaaacttattttattctcggttcccggggttgcagctgccagcggctgagacagtgcgtccgctttgtctctctgcactccccgcagcccccctctcccgcttcctctcccgattaactcccccgacacgctcttctctagctcctctcctcctcccactccttctcctcctcttcctcctcctacaccacaggccgcgctaatgcgcttcctccctcccccggtgtcggtctctttgcatacgcgccccctcccctccccgccgcgccacttatagcggggcgcacggcggcggggcgcagactgctctggcagccggagaggaggcggtgcggcggtggcgctgcggagacccggtccagacgcctggcggccgccggcacacaaggcgctttctagctccctcccccgagcgcacagcccgcctccttccgcggcgcctgcagtggcaggcttgctctgccctaccgtgacgcgctccggagacgctctgcgggtcctggacaccgggtccgcggcgtggggacgacagacggaggcgaacgccatcggtagccggtccgcgagccatcgttcggggcgcagtcctctccccggctggccctcctttctccggggcattcgccaccgcttccctgggctgagacgaccggttcgtcgcctccttgcccgtgaccgtcgctagaactcagttgtgcgttgcggccagtcgccactgctctggttttccaagaattgatataaagcgggaagaacagaaaacagcagtcataagtatgctactcaaaatattcttctttttatgtgccaaatcctcacattggaagctgtcccgagcaagacaggagtggaaacaaaatgtcagtcagtgtgcatgagaaccgcaagtccagggccagcagcggctccattaacatctatctgtttcacaagtcctcctacgctgacagcgtcctcactcacctgaatcttttacgccagcagcgtctcttcactgacgtccttct

SEQ ID NO: 129026 - DNA, 5381 bp, Homo sapiens
  Payload ID: 5235
  Gene Symbol: ENC1
  Gene Name: ectodermal-neural cortex 1 (with BTB domain)
  Uniprot ID: O14682
  ENST ID: ENST00000510316
  CDS Start-End: 1215-2765
agagtccagccgggggtgccgcacccactggggagtggggagggaggacacataggaaatgcctggggctggagtctctttggctctctgccagcaagaaacttaaacgtcctggcttgctcaacccgagtgtccctaaactgtccagacttttgcccgtccattgccactatctctccccactctgggtgtcctacccaaggcgctgtctatgcgtgcccagggcctgtcctgcggatacccagctcgccccttgcagccctttttagagcatctcgcgggctctggcatcaccaagcgcacagccccgggctgcgctcccctaaggtgggtccctcagatccggggctgtccattaaccaggctggcccaaagaggcgcagacactcgaacccgggaaaacttattttattctcggttcccggggttgcagctgccagcggctgagacagtgcgtccgctttgtctctctgcactccccgcagcccccctctcccgcttcctctcccgattaactcccccgacacgctcttctctagctcctctcctcctcccactccttctcctcctcttcctcctcctacaccacaggccgcgctaatgcgcttcctccctcccccggtgtcggtctctttgcatacgcgccccctcccctccccgccgcgccacttatagcggggcgcacggcggcggggcgcagactgctctggcagccggagaggaggcggtgcggcggtggcgctgcggagacccggtccagacgcctggcggccgccggcacacaaggcgctttctagctccctcccccgagcgcacagcccgcctccttccgcggcgcctgcagtggcaggcttgctctgccctaccgtgacgcgctccggagacgctctgcgggtcctggacaccgggtccgcggcgtggggacgacagacggaggcgaacgccatcggtagccggtccgcgagccatcgttcggggcgcagtcctctccccggctggccctcctttctccggggcattcgccaccgcttccctgggctgagacgaccggttcgtcgcctccttgcccgtgaccgtcgctagaactcagttgtgcgttgcggccagtcgccactgctcagcgtctcttcactgacgtccttctccatgccggaaataggaccttcccttgccaccgggcagtgctggctgcatgcagtcgctactttgaggccatgttcagtggtggcctgaaagagagccaggacagtgaggtcaactttgacaattccatccacccagaagtcttggagctgctgcttgactatgcgtactcctcccgggtcatcatcaatgaagaaaatgcagaatcgctcctggaagctggtgacatgctggagtttcaagacatccgggatgcatgtgcagagttcctggaaaagaacctgcatcccaccaactgcctgggcatgctgctgctgtctgatgcacaccagtgcaccaagctgtacgaactatcttggagaatgtgtctcagcaacttccaaaccatcaggaagaatgaagatttcctccagctgccccaggacatggtagtgcaactcttgtccagtgaagagctggagacagaggatgaaaggcttgtgtacgagtctgcaattaactggatcagctatgacctgaagaagcgctattgctacctcccagaactgttgcagacagtaaggctggcacttctgccagccatctatctcatggagaatgtggccatggaggaactcatcaccaagcagagaaagagtaaggaaattgtggaagaggccatcaggtgcaaactgaaaatcctgcagaatgacggtgtggtaaccagcctctgtgcccgacctcggaaaactggccatgccctcttccttctgggaggacagactttcatgtgtgacaagttgtatctggtagaccagaaggccaaagaaatcattcccaaggctgacattcccagcccaagaaaagagtttagtgcatgtgcgattggctgcaaagtgtacattactggggggcgggggtctgaaaatggggtctcaaaagatgtctgggtttatgataccctgcacgaggagtggtccaaggctgcccccatgctggtggccaggtttggccatggctctgctgaactgaagcactgcctgtatgtggttggggggcacacggccgcaactggctgcctcccggcctccccctcagtctctctaaagcaggtagaacattatgaccccacaatcaacaaatggaccatggtggccccactccgagaaggcgttagcaacgccgcagtagtgagtgccaaacttaagttatttgctttcggaggtaccagtgtcagtcatgacaagctccccaaagttcagtgttacgatcagtgtgaaaacaggtggactgtaccggccacctgtccccagccctggcgttacacagcagcagctgtgctggggaaccagatttttattatggggggtgatacagaattctctgcctgctctgcttataaattcaacagtgagacttaccagtggaccaaggtgggagatgtgacagcaaagcgcatgagctgccatgctgtggcctctggaaacaaactctacgtggttggaggatactttggcattcagcgatgcaagactttggactgctacgatccaacattagacgtgtggaacagcatcaccactgtcccgtactcgctgattcctactgcatttgtcagcacctggaaacatctgccttcttaaatgcagtacattctaaagagagtgagcatgagctcactccatcactcgatgagataatatgagatttctacttcggagaggccaagtctaatgaagagaaaaaaaggaaaagaagttgcaagactcgaataaaatctgctgcaccttgtaaatgctctaactggacatgaaggaaaggggcgagggaggggggtgggatttttggtgcaagtagcacatggtttaaatatgaatgaacaaacctgtgatctagtccttgtcttgtaattgtggattaatgtcaatgttaatcagcccctcaaagggagagaaaagctggaccttttcccttgctgtaccatattcagcatttgatttccatgggccccaccatttatgtgtagaatttgaaatggttgtcacctctctctgaggacagagcttgaagcctccacaccagctgctgctggagattcaaagcccaactgtgggtccgagagggaagctggctgggctggctgaagaatgaagaccactggactctccgttaatctctaaggggtctgctccccaggaacgtttctgaacaatggggactttgttggtagccatttggtagatgttcttttctatttataagtgactttaaactttcccttggctgttaagaagtttgttatagatttagctatttattgttcgatgcctgcatgctgaaacaatgcctacagctgtcttcacatgtatggacgtgtgtgaatggttgtacgttttgcacattttgtggctgttgagatgtgctttgctgcacaaacatgaaaatttttgagttacaatttggagcataactggagggtgggttggggaggggtggatttttaaaatgtcaagacagggaaggatgacaaaatggaaatttaaatgacatcctagaggtagagaaaccgtggagatcgcttttctcagactcaccaacttttaatgggatttcatggggtttggttgtgctgatagggtaaggggaggctgctttctgcccttctccccactcccatctgatttacttaattcagtctcagctgctgaaatttggaaaggaccaaattgctttacagtttttttctttgtgtagtatcttgaaatcctggaaaattctatggaatagttctgtatatagggcacaagtaaaggcattgtccaaagtttatttatttatttattaccctaagaatgctttgccataaccacatttaatgggaaaaacggcagtatcacagatgtaaattaactcaccagatttactgggcctgaactcattctcttcttgctatatgatttagcaagttctagaaggtctccaagacaataattacattggcacaatgtatacttcagtgctcacccgtaggcaaatctctttttaaaaaactctttggtgcacaagtaacacatttggccacaaaacaccaaagaattgtaggcagtggcccctattgagaagttttccggtagagttggaaatcagttgtgaatacattctttgctagttggagtgcttgtttactaagcatgtgccgtcgtaggtattagtgctagtctcagataggtgcttcccctgaggtgcaggggaagaccaaagtttgcaactcgaactgctttcgtccatgtttctcacattgctgtattttagaaaataggggttaagactgataacaaccttttacattgtgactgtgtttgcattgtctaatgacagataaatccttaacatttctctccaccttagtactttagactaattgtgtttgtccgtccatgccatgaatgagtgggctgtagttgggcctaaataaatgagctgttggaagaaaagaatcacagtactttccagcagtcagtccctggttcctagatgtgttctaagcaatgcaaatgtctaattgtcccccagtgggcatagtcagtgtcgtttatattgtagcagttacagctctgtagtttatgatgcaaatctgccaagagagatgtatgtgtcactgcatggcttctgaaagcaggatgaattttctgcagctgtttcaaagttggggtctgttcttgaatcctctattaattactgtgtgtgagccagagggagctgtggtaagggttgggcccccagcctgtagggaactttctggactcccactctttgaatcgatataggcatttggtctcactacttgaccattctcaccctgtgaaacgtcccacactttgaagcaaatacaattcacagcacagtacacacaaaaaccttggcataagacagagaaggttcttcttattttgtgggctggttgctgtagaaacacataacaaagggcagccctccacttctggtataattgtgtagccccttttctttgggcttgacacctgtcttgaataagagtgattagagctgcataatgtccctctcttggctattgaccatgtggttcacgtacaaaactctgtataagttgaaggaaaatgttcatgttcatatgtacttgtttgctatgactacattttgaggttttgtaaaactgttatttttttttttttcacaatgtgaaactgaaggtcaataaattattagagattttctcttca

SEQ ID NO: 129027 - DNA, 584 bp, Homo sapiens
  Payload ID: 5235
  Gene Symbol: ENC1
  Gene Name: ectodermal-neural cortex 1 (with BTB domain)
  ENST ID: ENST00000509127
  CDS Start-End: 573-584
gcagactgctctggcagccggagaggaggcggtgcggcggtggcgctgcggagacccggtccagacgcctggcggccgccggcacacaaggcgctttctagctccctcccccgagcgcacagcccgcctccttccgcggcgcctgcagtggcaggcttgctctgccctaccgtgacgcgctccggagacgctctgcgggtcctggacaccgggtccgcggcgtggggacgacagacggaggcgaacgccatcggtagccggtccgcgagccatcgttcggggcgcagtcctctccccggctggccctcctttctccggggcattcgccaccgcttccctgggctgagacgaccggttcgtcgcctccttgcccgtgaccgtcgctagaactcagttgtgcgttgcggccagtcgccactgctgtgtcagcatttgcaggtatacaggaacagtcctagtgatgcactatttaatcaaaagacggatggatcttttgttcttgcagctggttttccaagaattgatataaagcgggaagaacagaaaacagcagtcataagagtggaaacaaaatgtcagtcagt

SEQ ID NO: 129028 - DNA, 2024 bp, Homo sapiens
  Payload ID: 5235
  Gene Symbol: ENC1
  Gene Name: ectodermal-neural cortex 1 (with BTB domain)
  Uniprot ID: O14682
  ENST ID: ENST00000537006
  CDS Start-End: 159-1928
cggcacacaaggcgctttctagctggccctcctttctccggggcattcgccaccgcttccctgggctgagacgaccggttcgtcgcctccttgcccgtgaccgtcgctagaactcagttgtgcgttgcggccagtcgccactgctgagtggaaacaaaatgtcagtcagtgtgcatgagaaccgcaagtccagggccagcagcggctccattaacatctatctgtttcacaagtcctcctacgctgacagcgtcctcactcacctgaatcttttacgccagcagcgtctcttcactgacgtccttctccatgccggaaataggaccttcccttgccaccgggcagtgctggctgcatgcagtcgctactttgaggccatgttcagtggtggcctgaaagagagccaggacagtgaggtcaactttgacaattccatccacccagaagtcttggagctgctgcttgactatgcgtactcctcccgggtcatcatcaatgaagaaaatgcagaatcgctcctggaagctggtgacatgctggagtttcaagacatccgggatgcatgtgcagagttcctggaaaagaacctgcatcccaccaactgcctgggcatgctgctgctgtctgatgcacaccagtgcaccaagctgtacgaactatcttggagaatgtgtctcagcaacttccaaaccatcaggaagaatgaagatttcctccagctgccccaggacatggtagtgcaactcttgtccagtgaagagctggagacagaggatgaaaggcttgtgtacgagtctgcaattaactggatcagctatgacctgaagaagcgctattgctacctcccagaactgttgcagacagtaaggctggcacttctgccagccatctatctcatggagaatgtggccatggaggaactcatcaccaagcagagaaagagtaaggaaattgtggaagaggccatcaggtgcaaactgaaaatcctgcagaatgacggtgtggtaaccagcctctgtgcccgacctcggaaaactggccatgccctcttccttctgggaggacagactttcatgtgtgacaagttgtatctggtagaccagaaggccaaagaaatcattcccaaggctgacattcccagcccaagaaaagagtttagtgcatgtgcgattggctgcaaagtgtacattactggggggcgggggtctgaaaatggggtctcaaaagatgtctgggtttatgataccctgcacgaggagtggtccaaggctgcccccatgctggtggccaggtttggccatggctctgctgaactgaagcactgcctgtatgtggttggggggcacacggccgcaactggctgcctcccggcctccccctcagtctctctaaagcaggtagaacattatgaccccacaatcaacaaatggaccatggtggccccactccgagaaggcgttagcaacgccgcagtagtgagtgccaaacttaagttatttgctttcggaggtaccagtgtcagtcatgacaagctccccaaagttcagtgttacgatcagtgtgaaaacaggtggactgtaccggccacctgtccccagccctggcgttacacagcagcagctgtgctggggaaccagatttttattatggggggtgatacagaattctctgcctgctctgcttataaattcaacagtgagacttaccagtggaccaaggtgggagatgtgacagcaaagcgcatgagctgccatgctgtggcctctggaaacaaactctacgtggttggaggatactttggcattcagcgatgcaagactttggactgctacgatccaacattagacgtgtggaacagcatcaccactgtcccgtactcgctgattcctactgcatttgtcagcacctggaaacatctgccttcttaaatgcagtacattctaaagagagtgagcatgagctcactccatcactcgatgagataatatgagatttctacttcggagaggccaagtctaatgaag

SEQ ID NO: 129029 - DNA, 5657 bp, Homo sapiens
  Payload ID: 5235
  Gene Symbol: ENC1
  Gene Name: ectodermal-neural cortex 1 (with BTB domain)
  Uniprot ID: O14682
  ENST ID: ENST00000618628
  CDS Start-End: 1269-3038
agagtccagccgggggtgccgcacccactggggagtggggagggaggacacataggaaatgcctggggctggagtctctttggctctctgccagcaagaaacttaaacgtcctggcttgctcaacccgagtgtccctaaactgtccagacttttgcccgtccattgccactatctctccccactctgggtgtcctacccaaggcgctgtctatgcgtgcccagggcctgtcctgcggatacccagctcgccccttgcagccctttttagagcatctcgcgggctctggcatcaccaagcgcacagccccgggctgcgctcccctaaggtgggtccctcagatccggggctgtccattaaccaggctggcccaaagaggcgcagacactcgaacccgggaaaacttattttattctcggttcccggggttgcagctgccagcggctgagacagtgcgtccgctttgtctctctgcactccccgcagcccccctctcccgcttcctctcccgattaactcccccgacacgctcttctctagctcctctcctcctcccactccttctcctcctcttcctcctcctacaccacaggccgcgctaatgcgcttcctccctcccccggtgtcggtctctttgcatacgcgccccctcccctccccgccgcgccacttatagcggggcgcacggcggcggggcgcagactgctctggcagccggagaggaggcggtgcggcggtggcgctgcggagacccggtccagacgcctggcggccgccggcacacaaggcgctttctagctccctcccccgagcgcacagcccgcctccttccgcggcgcctgcagtggcaggcttgctctgccctaccgtgacgcgctccggagacgctctgcgggtcctggacaccgggtccgcggcgtggggacgacagacggaggcgaacgccatcggtagccggtccgcgagccatcgttcggggcgcagtcctctccccggctggccctcctttctccggggcattcgccaccgcttccctgggctgagacgaccggttcgtcgcctccttgcccgtgaccgtcgctagaactcagttgtgcgttgcggccagtcgccactgctgtgtcagcatttgcaggtatacaggaacagtcctagtgatgcactatttaatcaaaagacggatggatcttttgttcttgcagctggttttccaagaattgatataaagcgggaagaacagaaaacagcagtcataagagtggaaacaaaatgtcagtcagtgtgcatgagaaccgcaagtccagggccagcagcggctccattaacatctatctgtttcacaagtcctcctacgctgacagcgtcctcactcacctgaatcttttacgccagcagcgtctcttcactgacgtccttctccatgccggaaataggaccttcccttgccaccgggcagtgctggctgcatgcagtcgctactttgaggccatgttcagtggtggcctgaaagagagccaggacagtgaggtcaactttgacaattccatccacccagaagtcttggagctgctgcttgactatgcgtactcctcccgggtcatcatcaatgaagaaaatgcagaatcgctcctggaagctggtgacatgctggagtttcaagacatccgggatgcatgtgcagagttcctggaaaagaacctgcatcccaccaactgcctgggcatgctgctgctgtctgatgcacaccagtgcaccaagctgtacgaactatcttggagaatgtgtctcagcaacttccaaaccatcaggaagaatgaagatttcctccagctgccccaggacatggtagtgcaactcttgtccagtgaagagctggagacagaggatgaaaggcttgtgtacgagtctgcaattaactggatcagctatgacctgaagaagcgctattgctacctcccagaactgttgcagacagtaaggctggcacttctgccagccatctatctcatggagaatgtggccatggaggaactcatcaccaagcagagaaagagtaaggaaattgtggaagaggccatcaggtgcaaactgaaaatcctgcagaatgacggtgtggtaaccagcctctgtgcccgacctcggaaaactggccatgccctcttccttctgggaggacagactttcatgtgtgacaagttgtatctggtagaccagaaggccaaagaaatcattcccaaggctgacattcccagcccaagaaaagagtttagtgcatgtgcgattggctgcaaagtgtacattactggggggcgggggtctgaaaatggggtctcaaaagatgtctgggtttatgataccctgcacgaggagtggtccaaggctgcccccatgctggtggccaggtttggccatggctctgctgaactgaagcactgcctgtatgtggttggggggcacacggccgcaactggctgcctcccggcctccccctcagtctctctaaagcaggtagaacattatgaccccacaatcaacaaatggaccatggtggccccactccgagaaggcgttagcaacgccgcagtagtgagtgccaaacttaagttatttgctttcggaggtaccagtgtcagtcatgacaagctccccaaagttcagtgttacgatcagtgtgaaaacaggtggactgtaccggccacctgtccccagccctggcgttacacagcagcagctgtgctggggaaccagatttttattatggggggtgatacagaattctctgcctgctctgcttataaattcaacagtgagacttaccagtggaccaaggtgggagatgtgacagcaaagcgcatgagctgccatgctgtggcctctggaaacaaactctacgtggttggaggatactttggcattcagcgatgcaagactttggactgctacgatccaacattagacgtgtggaacagcatcaccactgtcccgtactcgctgattcctactgcatttgtcagcacctggaaacatctgccttcttaaatgcagtacattctaaagagagtgagcatgagctcactccatcactcgatgagataatatgagatttctacttcggagaggccaagtctaatgaagagaaaaaaaggaaaagaagttgcaagactcgaataaaatctgctgcaccttgtaaatgctctaactggacatgaaggaaaggggcgagggaggggggtgggatttttggtgcaagtagcacatggtttaaatatgaatgaacaaacctgtgatctagtccttgtcttgtaattgtggattaatgtcaatgttaatcagcccctcaaagggagagaaaagctggaccttttcccttgctgtaccatattcagcatttgatttccatgggccccaccatttatgtgtagaatttgaaatggttgtcacctctctctgaggacagagcttgaagcctccacaccagctgctgctggagattcaaagcccaactgtgggtccgagagggaagctggctgggctggctgaagaatgaagaccactggactctccgttaatctctaaggggtctgctccccaggaacgtttctgaacaatggggactttgttggtagccatttggtagatgttcttttctatttataagtgactttaaactttcccttggctgttaagaagtttgttatagatttagctatttattgttcgatgcctgcatgctgaaacaatgcctacagctgtcttcacatgtatggacgtgtgtgaatggttgtacgttttgcacattttgtggctgttgagatgtgctttgctgcacaaacatgaaaatttttgagttacaatttggagcataactggagggtgggttggggaggggtggatttttaaaatgtcaagacagggaaggatgacaaaatggaaatttaaatgacatcctagaggtagagaaaccgtggagatcgcttttctcagactcaccaacttttaatgggatttcatggggtttggttgtgctgatagggtaaggggaggctgctttctgcccttctccccactcccatctgatttacttaattcagtctcagctgctgaaatttggaaaggaccaaattgctttacagtttttttctttgtgtagtatcttgaaatcctggaaaattctatggaatagttctgtatatagggcacaagtaaaggcattgtccaaagtttatttatttatttattaccctaagaatgctttgccataaccacatttaatgggaaaaacggcagtatcacagatgtaaattaactcaccagatttactgggcctgaactcattctcttcttgctatatgatttagcaagttctagaaggtctccaagacaataattacattggcacaatgtatacttcagtgctcacccgtaggcaaatctctttttaaaaaactctttggtgcacaagtaacacatttggccacaaaacaccaaagaattgtaggcagtggcccctattgagaagttttccggtagagttggaaatcagttgtgaatacattctttgctagttggagtgcttgtttactaagcatgtgccgtcgtaggtattagtgctagtctcagataggtgcttcccctgaggtgcaggggaagaccaaagtttgcaactcgaactgctttcgtccatgtttctcacattgctgtattttagaaaataggggttaagactgataacaaccttttacattgtgactgtgtttgcattgtctaatgacagataaatccttaacatttctctccaccttagtactttagactaattgtgtttgtccgtccatgccatgaatgagtgggctgtagttgggcctaaataaatgagctgttggaagaaaagaatcacagtactttccagcagtcagtccctggttcctagatgtgttctaagcaatgcaaatgtctaattgtcccccagtgggcatagtcagtgtcgtttatattgtagcagttacagctctgtagtttatgatgcaaatctgccaagagagatgtatgtgtcactgcatggcttctgaaagcaggatgaattttctgcagctgtttcaaagttggggtctgttcttgaatcctctattaattactgtgtgtgagccagagggagctgtggtaagggttgggcccccagcctgtagggaactttctggactcccactctttgaatcgatataggcatttggtctcactacttgaccattctcaccctgtgaaacgtcccacactttgaagcaaatacaattcacagcacagtacacacaaaaaccttggcataagacagagaaggttcttcttattttgtgggctggttgctgtagaaacacataacaaagggcagccctccacttctggtataattgtgtagccccttttctttgggcttgacacctgtcttgaataagagtgattagagctgcataatgtccctctcttggctattgaccatgtggttcacgtacaaaactctgtataagttgaaggaaaatgttcatgttcatatgtacttgtttgctatgactacattttgaggttttgtaaaactgttatttttttttttttcacaatgtgaaactgaaggtcaataaattattagagattttctcttcatta

SEQ ID NO: 129030 - DNA, 1233 bp, Homo sapiens
  Payload ID: 5236
  Gene Symbol: EDA
  Gene Name: ectodysplasin A
  Uniprot ID: Q92838
  ENST ID: ENST00000338901
  CDS Start-End: 243-686
attccctcggcgggccgagcctcccctctctcccgcccctcctcctccctttcccacccctcggagtagagctgcacatgcggctgctccctgctccgtcccgcccagccactgtcgcgcaggaacgggtccctgcagcccccagccgatggcaggacagtagccgcctgtcagaggtcgtgaacggctgaggcagacgcagcggctcccgggcctcaagagagtgggtgtctccggaggccatgggctacccggaggtggagcgcagggaactcctgcctgcagcagcgccgcgggagcgagggagccagggctgcgggtgtggcggggcccctgcccgggcgggcgaagggaacagctgcctgctcttcctgggtttctttggcctctcgctggccctccacctgctgacgttgtgctgctacctagagttgcgctcggagttgcggcgggaacgtggagccgagtcccgccttggcggctcgggcacccctggcacctctggcaccctaagcagcctcggtggcctcgaccctgacagccccatcaccagtcaccttgggcagccgtcacctaagcagcagccattggaaccgggagaagccgcactccactctgactcccaggacgggcaccaggtgagtcacctagtaggggcggcggcggccccctcccctcgcgggtagggcgagggccctccgccacaggggcctgggagcactcagcaacctcgagccaatttagagggcaggaccagggagggaccaggcgagcaagggagaagttgcccagggcaggttgtcttcggtccctggcccagctaatccagactccctggggaccccttgacttggaaagtctcgcgcgcgcccgcggcccctggctgcgggctgcctcgagaaaagttggcgacgctcccgtcgaggaggtgcctgcgctgccccccggccgactaacggcttggcccttctgctcgtgatgaggttctctgcccgcggtgcttgttttttcgtgtctagagctgatgccagaaccagcaggctcccctttggagttggagctgtaaacagctgtaataactgttccacgcccgcccgttgaaacaacttttaaccgcattttcagcgcgggtccttgtgcgctgaccagaacgtgggcttgttcacacttacctgcaatttgagactgattgtcctcggcgttctagtgaggatcagcgcccctgaggaattc

SEQ ID NO: 129031 - DNA, 5278 bp, Homo sapiens
  Payload ID: 5236
  Gene Symbol: EDA
  Gene Name: ectodysplasin A
  Uniprot ID: Q92838
  ENST ID: ENST00000374552
  CDS Start-End: 243-1418
attccctcggcgggccgagcctcccctctctcccgcccctcctcctccctttcccacccctcggagtagagctgcacatgcggctgctccctgctccgtcccgcccagccactgtcgcgcaggaacgggtccctgcagcccccagccgatggcaggacagtagccgcctgtcagaggtcgtgaacggctgaggcagacgcagcggctcccgggcctcaagagagtgggtgtctccggaggccatgggctacccggaggtggagcgcagggaactcctgcctgcagcagcgccgcgggagcgagggagccagggctgcgggtgtggcggggcccctgcccgggcgggcgaagggaacagctgcctgctcttcctgggtttctttggcctctcgctggccctccacctgctgacgttgtgctgctacctagagttgcgctcggagttgcggcgggaacgtggagccgagtcccgccttggcggctcgggcacccctggcacctctggcaccctaagcagcctcggtggcctcgaccctgacagccccatcaccagtcaccttgggcagccgtcacctaagcagcagccattggaaccgggagaagccgcactccactctgactcccaggacgggcaccagatggccctattgaatttcttcttccctgatgaaaagccatactctgaagaagaaagtaggcgtgttcgccgcaataaaagaagcaaaagcaatgaaggagcagatggcccagttaaaaacaagaaaaagggaaagaaagcaggacctcctggacccaatggccctccaggacccccaggacctccaggaccccagggacccccaggaattccagggattcctggaattccaggaacaactgttatgggaccacctggtcctccaggtcctcctggtcctcaaggaccccctggcctccagggaccttctggtgctgctgataaagctggaactcgagaaaaccagccagctgtggtgcatctacagggccaagggtcagcaattcaagtcaagaatgatctttcaggtggagtgctcaatgactggtctcgcatcactatgaaccccaaggtgtttaagctacatccccgcagcggggagctggaggtactggtggacggcacctacttcatctatagtcaggtagaagtatactacatcaacttcactgactttgccagctatgaggtggtggtggatgagaagcccttcctgcagtgcacacgcagcatcgagacgggcaagaccaactacaacacttgctataccgcaggcgtctgcctcctcaaggcccggcagaagatcgccgtcaagatggtgcacgctgacatctccatcaacatgagcaagcacaccacgttctttggggccatcaggctgggtgaagcccctgcatcctagattccccccattttgcctctgtccgtgccccttccctgggtttgggagccaggactcccagaacctctaagtgctgctgtggagtgaggtgtattggtgttgcagccgcagagaaatgccccagtgttatttattccccagtgactccagggtgacaaggcctgcttgactttccagaatgaccttgagttaacaggacagttgatggagccccagggtttacatgaagcagaaccttctttggttccatgttgactgacttatggcatgactcttcaaccccgaggtccctgttgtcagatctattgtttgttgcactaaaatgaggatccagggcagcaggccagagaaagcaaaggtgcactccagactctgggggtggacatctgaccccaagggggctgctgctcctctcttgggtagggtagtggctggggtggagtgggaagggagcattgcagcctaagaagaaggccagagagggaaaaggcaggtgcttttggcagagaccataagagaaacctgccaaggagcatccttggcagtgggaatgttctttctgctctatactgtggcctgcaggagggttggagtgctcttcccactccagctgacagccacaccgtggcagcttgctgggctttgggaagtttgctgtgctttggaacaatcacagggaatggccacaaacctgcccgcctaagaccctgaatccgtacttgggtcacatgactctcattttatttacagctgtgctccacactcagaaaattccctggggtcaccttctagttgcccccattcccagcctgactagaactcctgtcttctttctccatggagcctacctctgtctgagacaggtgcctaacctgggacctgtggtcatgtgagtctgggatattctttagcttacctgggcacaaacagaattttccatttattaagcagtacaaatgtttttcatccattcctaatcaaattctgtctggggacgaagggttggacgggatgacctccagaagtcccttcaatttctagtacctgtgactcttagccctcaccacagccttctaaattcccaaatcctagactgctcctgggcattagcaaggcagagcctttttacctggcctagaaagggcaaggggtgaggataggacagagggattttgttcaagtttgctgcaacccaagtggacgttaggccaggccttatctgaaaggccagcagctgatgctgtactaacccagtctttcttcactctggcttcaaaaagccacagcagagcattgtcaccgcaggtgctcatgctgctcccctaaagccaggctcaggagaagccagtgtctaggcactgagcagggatctgccccctagttcaggtccaaattcaccttcccctaaaccccaagcttcccaacagatcatatggtaggaccctcgagagccttacttcaaagtgcctgggctcagcctggtttctgggtgctagatccagcccaaacctgggaaggccagccttgtacagtctgctcctcttgttcctgaaatgtgtttccttttcaggagatggggaataatttccttcaggcagctgaaattcaccaagaacagcgggtacttatttctcagctgtgccttccctttctaagcaaccacactgcttggcccttcaagggtcagggtgagacgtgatgggctaggcctccgttgtctggttgctaatgacagccttgcaacccaaggtgaggtgaactccaggcatgtgtctggccctaactcctataaagtgcctcggacagtccgcagttgtagcagaaaccaacaagaaccactccttcatgtttggaaaataatttctcttgtattatctcctttgaagaaggcaaggctgataatatgacaaacatcattgtttagatgaggctcagagaggtagcactctcagagtgttttgaccagtttaagccgcagacctggagcttcagccaggtctgactccaaagctgttccattacaccacagcattgtgtggaatttgaggtctagagagaaccaataaaagtggtaattgggaactgaaatccttgagagttccggggagaaacccagagatgcctgatttcattcctcgatggtaatacccgtcctctcggctgccaggggctctgtggcaaaaagagtcagacatttctttggaaaacagcgaacagccttagagctcttgtgttcagaagaatcttcctggcacaatgttggagcagcaggcctctgggacccacagaacttgtggcctttatgttctttcacccatcctaggaaccagccaaccatcatgtgtagagcccctactgtgggcaaagtcctcctttcattaccctacagacagcttacaggagccagcctgcttcccacaactactagtgtgactccttatctctttccaccataccttagagactttgatactaccagggtctctcagggatggagggaagacctgaaagagaggactggttctgaggccagaaaggtgtgaggagagaggaggaaaagtcttcctaattgtgcccctaaagagcatcctgataccattctattctccagacatggaggggatgataaaggaaataggatctccactggacccttgattcattctgaaccctccaaaggaactctagagggcgagggatgatgagggaagcaataggtagctggggagccctattgctgctaagtcattggcaaagtgacaaagcaatttactgatgagagaatgtggaaatagatgtgcagtttggaattatgttggtgtgaatttgccagaggaccaatgcttgcatggagaatgggacgaggacatttgtgggcaagcagatgacagaggtttgaaggagaatggcatggcaggagtctctgccagttacttgggcttcaacagccaagctggcacaaaagacagctggcggaggctgctcggctactggttacctggagaagtagtatttgcctatttcccccttcatccatcctgagccaaatttcttttgctgaacaggaaagagctaggaaccctggaggtaaacaaagactttgatccatgtatgagtgtatgtgtttatgtaacttcctgtggatgcaaatagattcagagaaatttagagctaaaaaggcccttagagggaatctagcccaacctacattccaccctgttacttatgtagaaactgaggcccagagagggaagatgacctgccccaagtggtgagcaagcaccaacctccagactcagcagagtgagggggtaaagcagttcctgtcccacatggccatcttctttcttccacccacaaactccaggctggaagtacttggcccccttcaggagcctggccaggcagggagagagtagctgcagccttcatcagaactcttcctcctcccaaggcattctcccagctctagcctctggactggaaagcacaagactggcccagtgccagcaagtccttaggctactgtaatgctgcctcaggacccatccctgcctggaggctcctctaggccctgtgagcacaaagaagaaagctgatttttgtcttttaatccatttcaggactctctccaggagggctcggggtgtgtcatttctatattcctccagctgggattggggggtgggctttgttgtgagaatggcctggagcaggcccaatgctgcttttgggggtcagcatccagtgtgagatactgtgtatataaactatatataatgtatataaactgggatgtaagtttgtgtaaattaatggtttattctttgcaaataaaacgctttccccgtctgttcttg

SEQ ID NO: 129032 - DNA, 5272 bp, Homo sapiens
  Payload ID: 5236
  Gene Symbol: EDA
  Gene Name: ectodysplasin A
  Uniprot ID: Q92838
  ENST ID: ENST00000374553
  CDS Start-End: 243-1412
attccctcggcgggccgagcctcccctctctcccgcccctcctcctccctttcccacccctcggagtagagctgcacatgcggctgctccctgctccgtcccgcccagccactgtcgcgcaggaacgggtccctgcagcccccagccgatggcaggacagtagccgcctgtcagaggtcgtgaacggctgaggcagacgcagcggctcccgggcctcaagagagtgggtgtctccggaggccatgggctacccggaggtggagcgcagggaactcctgcctgcagcagcgccgcgggagcgagggagccagggctgcgggtgtggcggggcccctgcccgggcgggcgaagggaacagctgcctgctcttcctgggtttctttggcctctcgctggccctccacctgctgacgttgtgctgctacctagagttgcgctcggagttgcggcgggaacgtggagccgagtcccgccttggcggctcgggcacccctggcacctctggcaccctaagcagcctcggtggcctcgaccctgacagccccatcaccagtcaccttgggcagccgtcacctaagcagcagccattggaaccgggagaagccgcactccactctgactcccaggacgggcaccagatggccctattgaatttcttcttccctgatgaaaagccatactctgaagaagaaagtaggcgtgttcgccgcaataaaagaagcaaaagcaatgaaggagcagatggcccagttaaaaacaagaaaaagggaaagaaagcaggacctcctggacccaatggccctccaggacccccaggacctccaggaccccagggacccccaggaattccagggattcctggaattccaggaacaactgttatgggaccacctggtcctccaggtcctcctggtcctcaaggaccccctggcctccagggaccttctggtgctgctgataaagctggaactcgagaaaaccagccagctgtggtgcatctacagggccaagggtcagcaattcaagtcaagaatgatctttcaggtggagtgctcaatgactggtctcgcatcactatgaaccccaaggtgtttaagctacatccccgcagcggggagctggaggtactggtggacggcacctacttcatctatagtcaggtatactacatcaacttcactgactttgccagctatgaggtggtggtggatgagaagcccttcctgcagtgcacacgcagcatcgagacgggcaagaccaactacaacacttgctataccgcaggcgtctgcctcctcaaggcccggcagaagatcgccgtcaagatggtgcacgctgacatctccatcaacatgagcaagcacaccacgttctttggggccatcaggctgggtgaagcccctgcatcctagattccccccattttgcctctgtccgtgccccttccctgggtttgggagccaggactcccagaacctctaagtgctgctgtggagtgaggtgtattggtgttgcagccgcagagaaatgccccagtgttatttattccccagtgactccagggtgacaaggcctgcttgactttccagaatgaccttgagttaacaggacagttgatggagccccagggtttacatgaagcagaaccttctttggttccatgttgactgacttatggcatgactcttcaaccccgaggtccctgttgtcagatctattgtttgttgcactaaaatgaggatccagggcagcaggccagagaaagcaaaggtgcactccagactctgggggtggacatctgaccccaagggggctgctgctcctctcttgggtagggtagtggctggggtggagtgggaagggagcattgcagcctaagaagaaggccagagagggaaaaggcaggtgcttttggcagagaccataagagaaacctgccaaggagcatccttggcagtgggaatgttctttctgctctatactgtggcctgcaggagggttggagtgctcttcccactccagctgacagccacaccgtggcagcttgctgggctttgggaagtttgctgtgctttggaacaatcacagggaatggccacaaacctgcccgcctaagaccctgaatccgtacttgggtcacatgactctcattttatttacagctgtgctccacactcagaaaattccctggggtcaccttctagttgcccccattcccagcctgactagaactcctgtcttctttctccatggagcctacctctgtctgagacaggtgcctaacctgggacctgtggtcatgtgagtctgggatattctttagcttacctgggcacaaacagaattttccatttattaagcagtacaaatgtttttcatccattcctaatcaaattctgtctggggacgaagggttggacgggatgacctccagaagtcccttcaatttctagtacctgtgactcttagccctcaccacagccttctaaattcccaaatcctagactgctcctgggcattagcaaggcagagcctttttacctggcctagaaagggcaaggggtgaggataggacagagggattttgttcaagtttgctgcaacccaagtggacgttaggccaggccttatctgaaaggccagcagctgatgctgtactaacccagtctttcttcactctggcttcaaaaagccacagcagagcattgtcaccgcaggtgctcatgctgctcccctaaagccaggctcaggagaagccagtgtctaggcactgagcagggatctgccccctagttcaggtccaaattcaccttcccctaaaccccaagcttcccaacagatcatatggtaggaccctcgagagccttacttcaaagtgcctgggctcagcctggtttctgggtgctagatccagcccaaacctgggaaggccagccttgtacagtctgctcctcttgttcctgaaatgtgtttccttttcaggagatggggaataatttccttcaggcagctgaaattcaccaagaacagcgggtacttatttctcagctgtgccttccctttctaagcaaccacactgcttggcccttcaagggtcagggtgagacgtgatgggctaggcctccgttgtctggttgctaatgacagccttgcaacccaaggtgaggtgaactccaggcatgtgtctggccctaactcctataaagtgcctcggacagtccgcagttgtagcagaaaccaacaagaaccactccttcatgtttggaaaataatttctcttgtattatctcctttgaagaaggcaaggctgataatatgacaaacatcattgtttagatgaggctcagagaggtagcactctcagagtgttttgaccagtttaagccgcagacctggagcttcagccaggtctgactccaaagctgttccattacaccacagcattgtgtggaatttgaggtctagagagaaccaataaaagtggtaattgggaactgaaatccttgagagttccggggagaaacccagagatgcctgatttcattcctcgatggtaatacccgtcctctcggctgccaggggctctgtggcaaaaagagtcagacatttctttggaaaacagcgaacagccttagagctcttgtgttcagaagaatcttcctggcacaatgttggagcagcaggcctctgggacccacagaacttgtggcctttatgttctttcacccatcctaggaaccagccaaccatcatgtgtagagcccctactgtgggcaaagtcctcctttcattaccctacagacagcttacaggagccagcctgcttcccacaactactagtgtgactccttatctctttccaccataccttagagactttgatactaccagggtctctcagggatggagggaagacctgaaagagaggactggttctgaggccagaaaggtgtgaggagagaggaggaaaagtcttcctaattgtgcccctaaagagcatcctgataccattctattctccagacatggaggggatgataaaggaaataggatctccactggacccttgattcattctgaaccctccaaaggaactctagagggcgagggatgatgagggaagcaataggtagctggggagccctattgctgctaagtcattggcaaagtgacaaagcaatttactgatgagagaatgtggaaatagatgtgcagtttggaattatgttggtgtgaatttgccagaggaccaatgcttgcatggagaatgggacgaggacatttgtgggcaagcagatgacagaggtttgaaggagaatggcatggcaggagtctctgccagttacttgggcttcaacagccaagctggcacaaaagacagctggcggaggctgctcggctactggttacctggagaagtagtatttgcctatttcccccttcatccatcctgagccaaatttcttttgctgaacaggaaagagctaggaaccctggaggtaaacaaagactttgatccatgtatgagtgtatgtgtttatgtaacttcctgtggatgcaaatagattcagagaaatttagagctaaaaaggcccttagagggaatctagcccaacctacattccaccctgttacttatgtagaaactgaggcccagagagggaagatgacctgccccaagtggtgagcaagcaccaacctccagactcagcagagtgagggggtaaagcagttcctgtcccacatggccatcttctttcttccacccacaaactccaggctggaagtacttggcccccttcaggagcctggccaggcagggagagagtagctgcagccttcatcagaactcttcctcctcccaaggcattctcccagctctagcctctggactggaaagcacaagactggcccagtgccagcaagtccttaggctactgtaatgctgcctcaggacccatccctgcctggaggctcctctaggccctgtgagcacaaagaagaaagctgatttttgtcttttaatccatttcaggactctctccaggagggctcggggtgtgtcatttctatattcctccagctgggattggggggtgggctttgttgtgagaatggcctggagcaggcccaatgctgcttttgggggtcagcatccagtgtgagatactgtgtatataaactatatataatgtatataaactgggatgtaagtttgtgtaaattaatggtttattctttgcaaataaaacgctttccccgtctgttcttg

SEQ ID NO: 129033 - DNA, 557 bp, Homo sapiens
  Payload ID: 5236
  Gene Symbol: EDA
  Gene Name: ectodysplasin A
  ENST ID: ENST00000503592
  CDS Start-End: 148-557
aactagatagaccattagtgtatccagagttgacattacctgtgttaaggctcttcgatcaagaacataactaggaatcattcgaggtgattcaaggcctgttttcctcaggtcttgctaagcctgtgacctgtcagctatgcttagatggccctattgaatttcttcttccctgatgaaaagccatactctgaagaagaaagtaggcgtgttcgccgcaataaaagaagcaaaagcaatgaaggagcagatggcccagttaaaaacaagaaaaagggaaagaaagcaggacctcctggacccaatggccctccaggacccccaggacctccaggaccccagggacccccaggaattccagggattcctggaattccaggaacaactgttatgggaccacctggtcctccaggtcctcctggtcctcaaggaccccctggcctccagggaccttctggtgctgctgataaagctggaactcgagaaaaccagccagctgtggtgcatctacagggccaagggtcagcaattcaagtcaagaatgatctttcaggtgg

SEQ ID NO: 129034 - DNA, 1381 bp, Homo sapiens
  Payload ID: 5236
  Gene Symbol: EDA
  Gene Name: ectodysplasin A
  Uniprot ID: Q92838
  ENST ID: ENST00000524573
  CDS Start-End: 193-1353
ttcccacccctcggagtagagctgcacatgcggctgctccctgctccgtcccgcccagccactgtcgcgcaggaacgggtccctgcagcccccagccgatggcaggacagtagccgcctgtcagaggtcgtgaacggctgaggcagacgcagcggctcccgggcctcaagagagtgggtgtctccggaggccatgggctacccggaggtggagcgcagggaactcctgcctgcagcagcgccgcgggagcgagggagccagggctgcgggtgtggcggggcccctgcccgggcgggcgaagggaacagctgcctgctcttcctgggtttctttggcctctcgctggccctccacctgctgacgttgtgctgctacctagagttgcgctcggagttgcggcgggaacgtggagccgagtcccgccttggcggctcgggcacccctggcacctctggcaccctaagcagcctcggtggcctcgaccctgacagccccatcaccagtcaccttgggcagccgtcacctaagcagcagccattggaaccgggagaagccgcactccactctgactcccaggacgggcaccagatggccctattgaatttcttcttccctgatgaaaagccatactctgaagaagaaagtaggcgtgttcgccgcaataaaagaagcaaaagcaatgaaggagcagatggcccagttaaaaacaagaaaaagggaaagaaagcaggacctcctggacccaatggccctccaggacccccaggacctccaggaccccagggacccccaggaattccagggattcctggaattccaggaacaactgttatgggaccacctggtcctccaggtcctcctggtcctcaaggaccccctggcctccagggaccttctggtgctgctgataaagctggaactcgagaaaaccagccagctgtggtgcatctacagggccaagggtcagcaattcaagtcaagaatggtggagtgctcaatgactggtctcgcatcactatgaaccccaaggtgtttaagctacatccccgcagcggggagctggaggtactggtggacggcacctacttcatctatagtcaggtatactacatcaacttcactgactttgccagctatgaggtggtggtggatgagaagcccttcctgcagtgcacacgcagcatcgagacgggcaagaccaactacaacacttgctataccgcaggcgtctgcctcctcaaggcccggcagaagatcgccgtcaagatggtgcacgctgacatctccatcaacatgagcaagcacaccacgttctttggggccatcaggctgggtgaagcccctgcatcctagattccccccattttgcctctgtccgtgc

SEQ ID NO: 129035 - DNA, 843 bp, Homo sapiens
  Payload ID: 5236
  Gene Symbol: EDA
  Gene Name: ectodysplasin A
  Uniprot ID: Q92838
  ENST ID: ENST00000525810
  CDS Start-End: 243-650
attccctcggcgggccgagcctcccctctctcccgcccctcctcctccctttcccacccctcggagtagagctgcacatgcggctgctccctgctccgtcccgcccagccactgtcgcgcaggaacgggtccctgcagcccccagccgatggcaggacagtagccgcctgtcagaggtcgtgaacggctgaggcagacgcagcggctcccgggcctcaagagagtgggtgtctccggaggccatgggctacccggaggtggagcgcagggaactcctgcctgcagcagcgccgcgggagcgagggagccagggctgcgggtgtggcggggcccctgcccgggcgggcgaagggaacagctgcctgctcttcctgggtttctttggcctctcgctggccctccacctgctgacgttgtgctgctacctagagttgcgctcggagttgcggcgggaacgtggagccgagtcccgccttggcggctcgggcacccctggcacctctggcaccctaagcagcctcggtggcctcgaccctgacagccccatcaccagtcaccttgggcagccgtcacctaagcagcagccattggaaccgggagaagccgcactccactctgactcccaggacgggcaccagggacaccaatgagttgtgtcttccctctgtccactctcagcaccttcactctgaagatctgttaaaagcacacgagtcgtctcagtccctcagtgggagctgtttcacctggcgtcatctagtcagccatcttcaataataactgttaaatgaacatttatatccactgaaaccactaagtgaaataaagatgtgtttaggcaaa

SEQ ID NO: 129036 - DNA, 927 bp, Homo sapiens
  Payload ID: 5236
  Gene Symbol: EDA
  Gene Name: ectodysplasin A
  Uniprot ID: Q92838
  ENST ID: ENST00000527388
  CDS Start-End: 243-689
attccctcggcgggccgagcctcccctctctcccgcccctcctcctccctttcccacccctcggagtagagctgcacatgcggctgctccctgctccgtcccgcccagccactgtcgcgcaggaacgggtccctgcagcccccagccgatggcaggacagtagccgcctgtcagaggtcgtgaacggctgaggcagacgcagcggctcccgggcctcaagagagtgggtgtctccggaggccatgggctacccggaggtggagcgcagggaactcctgcctgcagcagcgccgcgggagcgagggagccagggctgcgggtgtggcggggcccctgcccgggcgggcgaagggaacagctgcctgctcttcctgggtttctttggcctctcgctggccctccacctgctgacgttgtgctgctacctagagttgcgctcggagttgcggcgggaacgtggagccgagtcccgccttggcggctcgggcacccctggcacctctggcaccctaagcagcctcggtggcctcgaccctgacagccccatcaccagtcaccttgggcagccgtcacctaagcagcagccattggaaccgggagaagccgcactccactctgactcccaggacgggcaccaggactttgactacatcatttcattctcttatggcctacaaggtttctgctgagaaatccactgatattctaatggatattcctttggacaccaatgagttgtgtcttccctctgtccactctcagcaccttcactctgaagatctgttaaaagcacacgagtcgtctcagtccctcagtgggagctgtttcacctggcgtcatctagtcagccatcttcaataataactgttaaatgaacatttatatccactgaaaccactaagtgaaataaagatgtgtttaggcaaa

SEQ ID NO: 129037 - DNA, 4643 bp, Homo sapiens
  Payload ID: 5236
  Gene Symbol: EDA
  Gene Name: ectodysplasin A
  ENST ID: ENST00000616899
  CDS Start-End: 4-783
cagatggccctattgaatttcttcttccctgatgaaaagccatactctgaagaagaaagtaggcgtgttcgccgcaataaaagaagcaaaagcaatgaaggagcagatggcccagttaaaaacaagaaaaagggaaagaaagcaggacctcctggacccaatggccctccaggacccccaggacctccaggaccccagggacccccaggaattccagggattcctggaattccaggaacaactgttatgggaccacctggtcctccaggtcctcctggtcctcaaggaccccctggcctccagggaccttctggtgctgctgataaagctggaactcgagaaaaccagccagctgtggtgcatctacagggccaagggtcagcaattcaagtcaagaatgatctttcaggtggagtgctcaatgactggtctcgcatcactatgaaccccaaggtgtttaagctacatccccgcagcggggagctggaggtactggtggacggcacctacttcatctatagtcaggtagaagtatactacatcaacttcactgactttgccagctatgaggtggtggtggatgagaagcccttcctgcagtgcacacgcagcatcgagacgggcaagaccaactacaacacttgctataccgcaggcgtctgcctcctcaaggcccggcagaagatcgccgtcaagatggtgcacgctgacatctccatcaacatgagcaagcacaccacgttctttggggccatcaggctgggtgaagcccctgcatcctagattccccccattttgcctctgtccgtgccccttccctgggtttgggagccaggactcccagaacctctaagtgctgctgtggagtgaggtgtattggtgttgcagccgcagagaaatgccccagtgttatttattccccagtgactccagggtgacaaggcctgcttgactttccagaatgaccttgagttaacaggacagttgatggagccccagggtttacatgaagcagaaccttctttggttccatgttgactgacttatggcatgactcttcaaccccgaggtccctgttgtcagatctattgtttgttgcactaaaatgaggatccagggcagcaggccagagaaagcaaaggtgcactccagactctgggggtggacatctgaccccaagggggctgctgctcctctcttgggtagggtagtggctggggtggagtgggaagggagcattgcagcctaagaagaaggccagagagggaaaaggcaggtgcttttggcagagaccataagagaaacctgccaaggagcatccttggcagtgggaatgttctttctgctctatactgtggcctgcaggagggttggagtgctcttcccactccagctgacagccacaccgtggcagcttgctgggctttgggaagtttgctgtgctttggaacaatcacagggaatggccacaaacctgcccgcctaagaccctgaatccgtacttgggtcacatgactctcattttatttacagctgtgctccacactcagaaaattccctggggtcaccttctagttgcccccattcccagcctgactagaactcctgtcttctttctccatggagcctacctctgtctgagacaggtgcctaacctgggacctgtggtcatgtgagtctgggatattctttagcttacctgggcacaaacagaattttccatttattaagcagtacaaatgtttttcatccattcctaatcaaattctgtctggggacgaagggttggacgggatgacctccagaagtcccttcaatttctagtacctgtgactcttagccctcaccacagccttctaaattcccaaatcctagactgctcctgggcattagcaaggcagagcctttttacctggcctagaaagggcaaggggtgaggataggacagagggattttgttcaagtttgctgcaacccaagtggacgttaggccaggccttatctgaaaggccagcagctgatgctgtactaacccagtctttcttcactctggcttcaaaaagccacagcagagcattgtcaccgcaggtgctcatgctgctcccctaaagccaggctcaggagaagccagtgtctaggcactgagcagggatctgccccctagttcaggtccaaattcaccttcccctaaaccccaagcttcccaacagatcatatggtaggaccctcgagagccttacttcaaagtgcctgggctcagcctggtttctgggtgctagatccagcccaaacctgggaaggccagccttgtacagtctgctcctcttgttcctgaaatgtgtttccttttcaggagatggggaataatttccttcaggcagctgaaattcaccaagaacagcgggtacttatttctcagctgtgccttccctttctaagcaaccacactgcttggcccttcaagggtcagggtgagacgtgatgggctaggcctccgttgtctggttgctaatgacagccttgcaacccaaggtgaggtgaactccaggcatgtgtctggccctaactcctataaagtgcctcggacagtccgcagttgtagcagaaaccaacaagaaccactccttcatgtttggaaaataatttctcttgtattatctcctttgaagaaggcaaggctgataatatgacaaacatcattgtttagatgaggctcagagaggtagcactctcagagtgttttgaccagtttaagccgcagacctggagcttcagccaggtctgactccaaagctgttccattacaccacagcattgtgtggaatttgaggtctagagagaaccaataaaagtggtaattgggaactgaaatccttgagagttccggggagaaacccagagatgcctgatttcattcctcgatggtaatacccgtcctctcggctgccaggggctctgtggcaaaaagagtcagacatttctttggaaaacagcgaacagccttagagctcttgtgttcagaagaatcttcctggcacaatgttggagcagcaggcctctgggacccacagaacttgtggcctttatgttctttcacccatcctaggaaccagccaaccatcatgtgtagagcccctactgtgggcaaagtcctcctttcattaccctacagacagcttacaggagccagcctgcttcccacaactactagtgtgactccttatctctttccaccataccttagagactttgatactaccagggtctctcagggatggagggaagacctgaaagagaggactggttctgaggccagaaaggtgtgaggagagaggaggaaaagtcttcctaattgtgcccctaaagagcatcctgataccattctattctccagacatggaggggatgataaaggaaataggatctccactggacccttgattcattctgaaccctccaaaggaactctagagggcgagggatgatgagggaagcaataggtagctggggagccctattgctgctaagtcattggcaaagtgacaaagcaatttactgatgagagaatgtggaaatagatgtgcagtttggaattatgttggtgtgaatttgccagaggaccaatgcttgcatggagaatgggacgaggacatttgtgggcaagcagatgacagaggtttgaaggagaatggcatggcaggagtctctgccagttacttgggcttcaacagccaagctggcacaaaagacagctggcggaggctgctcggctactggttacctggagaagtagtatttgcctatttcccccttcatccatcctgagccaaatttcttttgctgaacaggaaagagctaggaaccctggaggtaaacaaagactttgatccatgtatgagtgtatgtgtttatgtaacttcctgtggatgcaaatagattcagagaaatttagagctaaaaaggcccttagagggaatctagcccaacctacattccaccctgttacttatgtagaaactgaggcccagagagggaagatgacctgccccaagtggtgagcaagcaccaacctccagactcagcagagtgagggggtaaagcagttcctgtcccacatggccatcttctttcttccacccacaaactccaggctggaagtacttggcccccttcaggagcctggccaggcagggagagagtagctgcagccttcatcagaactcttcctcctcccaaggcattctcccagctctagcctctggactggaaagcacaagactggcccagtgccagcaagtccttaggctactgtaatgctgcctcaggacccatccctgcctggaggctcctctaggccctgtgagcacaaagaagaaagctgatttttgtcttttaatccatttcaggactctctccaggagggctcggggtgtgtcatttctatattcctccagctgggattggggggtgggctttgttgtgagaatggcctggagcaggcccaatgctgcttttgggggtcagcatccagtgtgagatactgtgtatataaactatatataatgtatataaactgggatgtaagtttgtgtaaattaatggtttattctttgcaaataaaacgctttccccgtctgttcttg

SEQ ID NO: 129038 - DNA, 4214 bp, Homo sapiens
  Payload ID: 5237
  Gene Symbol: EDAR
  Gene Name: ectodysplasin A receptor
  Uniprot ID: Q9UNE0
  ENST ID: ENST00000258443
  CDS Start-End: 432-1778
ggggcagacggccggagagccaggtgtgccagggacctatggcagcagggctgaacgtgcccgctccagcctctccagtgctgggagagacctctagatggtgcaggtgagtttgcaatgagggaaagcccctcggcaaggactgagtttccaaacttgcagacagggcagggagcggtcaaggaagagttcccgggaagccctttaaacggaaaggaagcggggctagtgtcagagaggtgtgccaggtcccaggcagccctgctggcccctaaggacatagagtacctgcttctgagagggctgccacggtggccacctgtgaagcctgtcacccagaactggatggtacctgactttcttcatagacccatcttctgctgggactgaagctgacctccaacagaagccaggtgagcccttgggagaggatggcccatgtgggggactgcacgcagacgccctggctccccgtcctggtggtgtctctgatgtgctcagcccgagcggaatactcaaactgcggtgagaacgagtactacaaccagactacggggctgtgccaggagtgccccccgtgtgggccgggagaggagccctacctgtcctgtggctacggcaccaaagacgaggactacggctgcgtcccctgcccggcggagaagttttccaaaggaggctaccagatatgcaggcgtcacaaagactgtgagggcttcttccgggccaccgtgctgacaccaggggacatggagaatgacgctgagtgtggcccttgcctccctggctactacatgctggagaacagaccgaggaacatctatggcatggtctgctactcctgcctcctggcaccccccaacaccaaggaatgtgtgggagccacttcaggagcttctgccaacttccctggcacctcgggcagcagcaccctgtctcccttccagcacgcccacaaagaactctcaggccaaggacacctggccactgccctgatcattgcaatgtccaccatcttcatcatggccatcgccatcgtcctcatcatcatgttctacatcctgaagacaaagccctctgccccagcctgttgcaccagccacccggggaagagcgtggaggcccaagtgagcaaggacgaggagaagaaagaggccccagacaacgtggtgatgttctccgagaaggatgaatttgagaagctgacagcaactccagcaaagcccaccaagagcgagaacgatgcctcatccgagaatgagcagctgctgagccggagcgtcgacagtgatgaggagcccgcccctgacaagcagggctccccggagctgtgcctgctgtcgctggttcacctggccagggagaagtctgccaccagcaacaagtcagccgggattcaaagccggaggaaaaagatcctcgatgtgtatgccaacgtgtgtggagtcgtggaaggtcttagccccacggagctgccatttgattgcctcgagaagactagccgaatgctcagctccacgtacaactctgagaaggctgttgtgaaaacgtggcgccacctcgccgagagcttcggcctgaagagggatgagattgggggcatgacagacggcatgcaactctttgaccgcatcagcacggcaggctacagcatccctgagctactcacaaaactggtgcagattgagcggctggatgctgtggagtccttgtgtgcagacatactggagtgggcgggggttgtgccacctgcctcccagccacatgctgcatcctgaaaagcatgcctgtgggctgtcctcccaggacaagccaaggagccaacgagggctctggagctgtgagtggtgccaaaagactgccaagaatcaaggcttttgtgatatgtcaccgtatgccttaggatgttcaaggagccagacgaaataaggcctgtcttccaatttaaccaaagataaaggactagagccgggatactttcagatgctcgcctgtacctcaccaggcagagtaaatatctactcactcatacagccagcccaccagcccaccattaactcactgaacaatgagacaatgttgaggactcaaatgaatcaaaccccgtgggaatgacagaagtgaagaatctggtccctgtctttaaggagtttgcactccagtagaagacagaaggaacgtatgtttacaaaccacttcactggaagacgtcaaacaagctgaatgaaggggcgcttagaaaacgttaatagaagttctaagcgggagatgactccctactgggatgatgaaggatggcatcctagtgaagaagcagctcaaacattttgataaaatggcaacaaaatgcagacaccctgctccaggtattatttcaggtttagtacaagtctgttaataccctatgtggtttcattaggataactttttacctatccttgaggtcatccatattcttacaggccttccagtcaataatggaagagctcactctatacaaaaccaatatgcaaggcatgtgtttgtccaagcaattggatgtgtgcagtagccaatttcatttactgcattactctttggcctgggaaccctgtggtctgcactacatgtgaatggccttccacttcagtcttaggcagatttgaccttttaggggcagcaatgctgaaggacacagcaatttaaattataatgtgtcaggctgtgttttcacttcaaacatgtatgagtagtcagctgtaattagagaaatgatgacttcctaagagttcagccacgcataattctagatttcaagagcatctaagacttgtggattagcctcatggcatgagagtttcagactcagccttctgagccagtcagggaaagtggagttctgcagcgcaaatgagagcctgggcttgatgtcgagggagctggcttctagttgtgccaccttgggccttgtcttttcctctctctgcctcagtttctcgtctgccaatgagatgttagttagtgattctataattggggcaggtagggttcaggtgagcaaaaagaaagtggagctataggaaatgccaggcctttgaggtgctctatggaagtcaacacagtgtggtttgtccatttaaatgggaataaaaacagaaaaactcagacttggcattttcacaataactgcaatggtttgacataacatttataggcagaaagttaataaactggcattgttcttggcatattattgtactatccctgtaactgccaagagctcaggagccaggctagtgatcacaccaggggttagagttcactgctgaactccctgatggcaggtctgtgtttattactacattaaaacaaagtctctgacttataaagcgaggttgtaaaaattacaagttgcatgactgaaaaaatgctttagggggaaaatcagtcatatctttaacaccaacaagcaatttcccaccaacgaatgtagtacatactgtgagaggatcataatgaggtcctgaatatttaatatcatcatttactgtgtctgtttgctgctgtttttcgaacctatttggtttaccctgcaagctaaatactccacggcagagcttaattatccttttaattcctctttgaaatcctgtggtgcccccttccccctgccttgtgatgatgatgagtgagtctccccttaattagactgcaaatgtcacttgtgatgagtgtgccattccaggataacagcttgcaccctcctcagaatgttttcagcgaaagagtggggtggctgttctctgctcctggtgctttggcctcatttcacactattagaattctggggctgtaaggccagccagtgtcagctcatgttccattggctctccacctgccatttttagggagctattccttatatagttacaaattcccttgtcatttacttatttggaaacatgggatttactctgacaagctttagcctatgttatgggattcagaacaatgagatcataataattctcactgaccaaagctgggactccatcctgccatttttgtgtggagatattcataattctgcaatactttaaaacatttagaaaacaccccagggtaggtctgtggcccttagacagtgaagtcttaattgtcaatattatttttgtctaattctgtatatatataacttattatattttataatctcaataaacacattaataaga

SEQ ID NO: 129039 - DNA, 4303 bp, Homo sapiens
  Payload ID: 5237
  Gene Symbol: EDAR
  Gene Name: ectodysplasin A receptor
  Uniprot ID: Q9UNE0
  ENST ID: ENST00000376651
  CDS Start-End: 432-1874
ggggcagacggccggagagccaggtgtgccagggacctatggcagcagggctgaacgtgcccgctccagcctctccagtgctgggagagacctctagatggtgcaggtgagtttgcaatgagggaaagcccctcggcaaggactgagtttccaaacttgcagacagggcagggagcggtcaaggaagagttcccgggaagccctttaaacggaaaggaagcggggctagtgtcagagaggtgtgccaggtcccaggcagccctgctggcccctaaggacatagagtacctgcttctgagagggctgccacggtggccacctgtgaagcctgtcacccagaactggatggtacctgactttcttcatagacccatcttctgctgggactgaagctgacctccaacagaagccaggtgagcccttgggagaggatggcccatgtgggggactgcacgcagacgccctggctccccgtcctggtggtgtctctgatgtgctcagcccgagcggaatactcaaactgcggtgagaacgagtactacaaccagactacggggctgtgccaggagtgccccccgtgtgggccgggagaggagccctacctgtcctgtggctacggcaccaaagacgaggactacggctgcgtcccctgcccggcggagaagttttccaaaggaggctaccagatatgcaggcgtcacaaagactgtgagggcttcttccgggccaccgtgctgacaccaggggacatggagaatgacgctgagtgtggcccttgcctccctggctactacatgctggagaacagaccgaggaacatctatggcatggtctgctactcctgcctcctggcaccccccaacaccaaggaatgtgtgggagccacttcaggagcttctgccaacttccctggcacctcgggcagcagcaccctgtctcccttccagcacgcccacaaagaactctcaggccaaggacacctggccactgccctgatcattgcaatgtccaccatcttcatcatggccatcgccatcgtcctcatcatcatgttctacatcctgaagacaaagccctctgccccaggtgacggcccccatgcgccggtgccctgcttcctggactctccgtcaactccccctgtcggagagcctggctgctcactccctcctctctccccagcctgttgcaccagccacccggggaagagcgtggaggcccaagtgagcaaggacgaggagaagaaagaggccccagacaacgtggtgatgttctccgagaaggatgaatttgagaagctgacagcaactccagcaaagcccaccaagagcgagaacgatgcctcatccgagaatgagcagctgctgagccggagcgtcgacagtgatgaggagcccgcccctgacaagcagggctccccggagctgtgcctgctgtcgctggttcacctggccagggagaagtctgccaccagcaacaagtcagccgggattcaaagccggaggaaaaagatcctcgatgtgtatgccaacgtgtgtggagtcgtggaaggtcttagccccacggagctgccatttgattgcctcgagaagactagccgaatgctcagctccacgtacaactctgagaaggctgttgtgaaaacgtggcgccacctcgccgagagcttcggcctgaagagggatgagattgggggcatgacagacggcatgcaactctttgaccgcatcagcacggcaggctacagcatccctgagctactcacaaaactggtgcagattgagcggctggatgctgtggagtccttgtgtgcagacatactggagtgggcgggggttgtgccacctgcctcccagccacatgctgcatcctgaaaagcatgcctgtgggctgtcctcccaggacaagccaaggagccaacgagggctctggagctgtgagtggtgccaaaagactgccaagaatcaaggcttttgtgatatgtcaccgtatgccttaggatgttcaaggagccagacgaaataaggcctgtcttccaatttaaccaaagataaaggactagagccgggatactttcagatgctcgcctgtacctcaccaggcagagtaaatatctactcactcatacagccagcccaccagcccaccattaactcactgaacaatgagacaatgttgaggactcaaatgaatcaaaccccgtgggaatgacagaagtgaagaatctggtccctgtctttaaggagtttgcactccagtagaagacagaaggaacgtatgtttacaaaccacttcactggaagacgtcaaacaagctgaatgaaggggcgcttagaaaacgttaatagaagttctaagcgggagatgactccctactgggatgatgaaggatggcatcctagtgaagaagcagctcaaacattttgataaaatggcaacaaaatgcagacaccctgctccaggtattatttcaggtttagtacaagtctgttaataccctatgtggtttcattaggataactttttacctatccttgaggtcatccatattcttacaggccttccagtcaataatggaagagctcactctatacaaaaccaatatgcaaggcatgtgtttgtccaagcaattggatgtgtgcagtagccaatttcatttactgcattactctttggcctgggaaccctgtggtctgcactacatgtgaatggccttccacttcagtcttaggcagatttgaccttttaggggcagcaatgctgaaggacacagcaatttaaattataatgtgtcaggctgtgttttcacttcaaacatgtatgagtagtcagctgtaattagagaaatgatgacttcctaagagttcagccacgcataattctagatttcaagagcatctaagacttgtggattagcctcatggcatgagagtttcagactcagccttctgagccagtcagggaaagtggagttctgcagcgcaaatgagagcctgggcttgatgtcgagggagctggcttctagttgtgccaccttgggccttgtcttttcctctctctgcctcagtttctcgtctgccaatgagatgttagttagtgattctataattggggcaggtagggttcaggtgagcaaaaagaaagtggagctataggaaatgccaggcctttgaggtgctctatggaagtcaacacagtgtggtttgtccatttaaatgggaataaaaacagaaaaactcagacttggcattttcacaataactgcaatggtttgacataacatttataggcagaaagttaataaactggcattgttcttggcatattattgtactatccctgtaactgccaagagctcaggagccaggctagtgatcacaccaggggttagagttcactgctgaactccctgatggcaggtctgtgtttattactacattaaaacaaagtctctgacttataaagcgaggttgtaaaaattacaagttgcatgactgaaaaaatgctttagggggaaaatcagtcatatctttaacaccaacaagcaatttcccaccaacgaatgtagtacatactgtgagaggatcataatgaggtcctgaatatttaatatcatcatttactgtgtctgtttgctgctgtttttcgaacctatttggtttaccctgcaagctaaatactccacggcagagcttaattatccttttaattcctctttgaaatcctgtggtgcccccttccccctgccttgtgatgatgatgagtgagtctccccttaattagactgcaaatgtcacttgtgatgagtgtgccattccaggataacagcttgcaccctcctcagaatgttttcagcgaaagagtggggtggctgttctctgctcctggtgctttggcctcatttcacactattagaattctggggctgtaaggccagccagtgtcagctcatgttccattggctctccacctgccatttttagggagctattccttatatagttacaaattcccttgtcatttacttatttggaaacatgggatttactctgacaagctttagcctatgttatgggattcagaacaatgagatcataataattctcactgaccaaagctgggactccatcctgccatttttgtgtggagatattcataattctgcaatactttaaaacatttagaaaacaccccagggtaggtctgtggcccttagacagtgaagtcttaattgtcaatattatttttgtctaattctgtatatatataacttattatattttataatctcaataaacacatt

SEQ ID NO: 129040 - DNA, 4323 bp, Homo sapiens
  Payload ID: 5237
  Gene Symbol: EDAR
  Gene Name: ectodysplasin A receptor
  Uniprot ID: Q9UNE0
  ENST ID: ENST00000409271
  CDS Start-End: 445-1887
caggtgagtttgcaatgagggaaagcccctcggcaaggactgagtttccaaacttgcagacagggcagggagcggtcaaggaagagttcccgggaagccctttaaacggaaaggaagcggggctagtgtcagagaggtgtgccaggtcccaggcagccctgctggcccctaaggacatagagtacctgcttctgagagggctgccacggtggccacctgtgaagcctgtcacccagaactggatggtacctgactttcttcatagacccatcttctgctgggactgaagctgacctccaacagaagccagaccatccgagccatcctgggaggctcagcctccaccacccatgtgggcaccttctgcattacctacaatagccagcctgagaggagcagcaagccctctgcaggccctcgggacacgtgagcccttgggagaggatggcccatgtgggggactgcacgcagacgccctggctccccgtcctggtggtgtctctgatgtgctcagcccgagcggaatactcaaactgcggtgagaacgagtactacaaccagactacggggctgtgccaggagtgccccccgtgtgggccgggagaggagccctacctgtcctgtggctacggcaccaaagacgaggactacggctgcgtcccctgcccggcggagaagttttccaaaggaggctaccagatatgcaggcgtcacaaagactgtgagggcttcttccgggccaccgtgctgacaccaggggacatggagaatgacgctgagtgtggcccttgcctccctggctactacatgctggagaacagaccgaggaacatctatggcatggtctgctactcctgcctcctggcaccccccaacaccaaggaatgtgtgggagccacttcaggagcttctgccaacttccctggcacctcgggcagcagcaccctgtctcccttccagcacgcccacaaagaactctcaggccaaggacacctggccactgccctgatcattgcaatgtccaccatcttcatcatggccatcgccatcgtcctcatcatcatgttctacatcctgaagacaaagccctctgccccaggtgacggcccccatgcgccggtgccctgcttcctggactctccgtcaactccccctgtcggagagcctggctgctcactccctcctctctccccagcctgttgcaccagccacccggggaagagcgtggaggcccaagtgagcaaggacgaggagaagaaagaggccccagacaacgtggtgatgttctccgagaaggatgaatttgagaagctgacagcaactccagcaaagcccaccaagagcgagaacgatgcctcatccgagaatgagcagctgctgagccggagcgtcgacagtgatgaggagcccgcccctgacaagcagggctccccggagctgtgcctgctgtcgctggttcacctggccagggagaagtctgccaccagcaacaagtcagccgggattcaaagccggaggaaaaagatcctcgatgtgtatgccaacgtgtgtggagtcgtggaaggtcttagccccacggagctgccatttgattgcctcgagaagactagccgaatgctcagctccacgtacaactctgagaaggctgttgtgaaaacgtggcgccacctcgccgagagcttcggcctgaagagggatgagattgggggcatgacagacggcatgcaactctttgaccgcatcagcacggcaggctacagcatccctgagctactcacaaaactggtgcagattgagcggctggatgctgtggagtccttgtgtgcagacatactggagtgggcgggggttgtgccacctgcctcccagccacatgctgcatcctgaaaagcatgcctgtgggctgtcctcccaggacaagccaaggagccaacgagggctctggagctgtgagtggtgccaaaagactgccaagaatcaaggcttttgtgatatgtcaccgtatgccttaggatgttcaaggagccagacgaaataaggcctgtcttccaatttaaccaaagataaaggactagagccgggatactttcagatgctcgcctgtacctcaccaggcagagtaaatatctactcactcatacagccagcccaccagcccaccattaactcactgaacaatgagacaatgttgaggactcaaatgaatcaaaccccgtgggaatgacagaagtgaagaatctggtccctgtctttaaggagtttgcactccagtagaagacagaaggaacgtatgtttacaaaccacttcactggaagacgtcaaacaagctgaatgaaggggcgcttagaaaacgttaatagaagttctaagcgggagatgactccctactgggatgatgaaggatggcatcctagtgaagaagcagctcaaacattttgataaaatggcaacaaaatgcagacaccctgctccaggtattatttcaggtttagtacaagtctgttaataccctatgtggtttcattaggataactttttacctatccttgaggtcatccatattcttacaggccttccagtcaataatggaagagctcactctatacaaaaccaatatgcaaggcatgtgtttgtccaagcaattggatgtgtgcagtagccaatttcatttactgcattactctttggcctgggaaccctgtggtctgcactacatgtgaatggccttccacttcagtcttaggcagatttgaccttttaggggcagcaatgctgaaggacacagcaatttaaattataatgtgtcaggctgtgttttcacttcaaacatgtatgagtagtcagctgtaattagagaaatgatgacttcctaagagttcagccacgcataattctagatttcaagagcatctaagacttgtggattagcctcatggcatgagagtttcagactcagccttctgagccagtcagggaaagtggagttctgcagcgcaaatgagagcctgggcttgatgtcgagggagctggcttctagttgtgccaccttgggccttgtcttttcctctctctgcctcagtttctcgtctgccaatgagatgttagttagtgattctataattggggcaggtagggttcaggtgagcaaaaagaaagtggagctataggaaatgccaggcctttgaggtgctctatggaagtcaacacagtgtggtttgtccatttaaatgggaataaaaacagaaaaactcagacttggcattttcacaataactgcaatggtttgacataacatttataggcagaaagttaataaactggcattgttcttggcatattattgtactatccctgtaactgccaagagctcaggagccaggctagtgatcacaccaggggttagagttcactgctgaactccctgatggcaggtctgtgtttattactacattaaaacaaagtctctgacttataaagcgaggttgtaaaaattacaagttgcatgactgaaaaaatgctttagggggaaaatcagtcatatctttaacaccaacaagcaatttcccaccaacgaatgtagtacatactgtgagaggatcataatgaggtcctgaatatttaatatcatcatttactgtgtctgtttgctgctgtttttcgaacctatttggtttaccctgcaagctaaatactccacggcagagcttaattatccttttaattcctctttgaaatcctgtggtgcccccttccccctgccttgtgatgatgatgagtgagtctccccttaattagactgcaaatgtcacttgtgatgagtgtgccattccaggataacagcttgcaccctcctcagaatgttttcagcgaaagagtggggtggctgttctctgctcctggtgctttggcctcatttcacactattagaattctggggctgtaaggccagccagtgtcagctcatgttccattggctctccacctgccatttttagggagctattccttatatagttacaaattcccttgtcatttacttatttggaaacatgggatttactctgacaagctttagcctatgttatgggattcagaacaatgagatcataataattctcactgaccaaagctgggactccatcctgccatttttgtgtggagatattcataattctgcaatactttaaaacatttagaaaacaccccagggtaggtctgtggcccttagacagtgaagtcttaattgtcaatattatttttgtctaattctgtatatatataacttattatattttataatctcaataaacacattaataaga

SEQ ID NO: 129041 - DNA, 957 bp, Homo sapiens
  Payload ID: 5238
  Gene Symbol: EDA2R
  Gene Name: ectodysplasin A2 receptor
  Uniprot ID: Q9HAV5
  ENST ID: ENST00000253392
  CDS Start-End: 1-957
atggattgccaagaaaatgagtactgggaccaatggggacggtgtgtcacctgccaacggtgtggtcctggacaggagctatccaaggattgtggttatggagagggtggagatgcctactgcacagcctgccctcctcgcaggtacaaaagcagctggggccaccacagatgtcagagttgcatcacctgtgctgtcatcaatcgtgttcagaaggtcaactgcacagctacctctaatgctgtctgtggggactgtttgcccaggttctaccgaaagacacgcattggaggcctgcaggaccaagagtgcatcccgtgcacgaagcagacccccacctctgaggttcaatgtgccttccagttgagcttagtggaggcagatacacccacagtgccccctcaggaggccacacttgttgcactggtgagcagcctgctagtggtgtttaccctggccttcctggggctcttcttcctctactgcaagcagttcttcaacagacattgccagcgtgagaaattgattattttctctgatccagtaccagctagcctcaatctgatacctgaatttgcaggaggtttgctgcagtttgaggctgataaaacagcaaaggaggaatctctcttccccgtgccacccagcaaggagaccagtgctgagtcccaagtgagtgagaacatctttcagacccagccacttaaccctatcctcgaggacgactgcagctcgactagtggcttccccacacaggagtcctttaccatggcctcctgcacctcagagagccactcccactgggtccacagccccatcgaatgcacagagctggacctgcaaaagttttccagctctgcctcctatactggagctgagaccttggggggaaacacagtcgaaagcactggagacaggctggagctcaatgtgccctttgaagttcccagcccttaa

SEQ ID NO: 129042 - DNA, 3418 bp, Homo sapiens
  Payload ID: 5238
  Gene Symbol: EDA2R
  Gene Name: ectodysplasin A2 receptor
  Uniprot ID: Q9HAV5
  ENST ID: ENST00000374719
  CDS Start-End: 58-951
ccggagtcccatttgggagcaagagccatctactcgtccgttaccggccttcccaccatggattgccaagaaaatgagtactgggaccaatggggacggtgtgtcacctgccaacggtgtggtcctggacaggagctatccaaggattgtggttatggagagggtggagatgcctactgcacagcctgccctcctcgcaggtacaaaagcagctggggccaccacagatgtcagagttgcatcacctgtgctgtcatcaatcgtgttcagaaggtcaactgcacagctacctctaatgctgtctgtggggactgtttgcccaggttctaccgaaagacacgcattggaggcctgcaggaccaagagtgcatcccgtgcacgaagcagacccccacctctgaggttcaatgtgccttccagttgagcttagtggaggcagatacacccacagtgccccctcaggaggccacacttgttgcactggtgagcagcctgctagtggtgtttaccctggccttcctggggctcttcttcctctactgcaagcagttcttcaacagacattgccagcgtggaggtttgctgcagtttgaggctgataaaacagcaaaggaggaatctctcttccccgtgccacccagcaaggagaccagtgctgagtcccaagtgagtgagaacatctttcagacccagccacttaaccctatcctcgaggacgactgcagctcgactagtggcttccccacacaggagtcctttaccatggcctcctgcacctcagagagccactcccactgggtccacagccccatcgaatgcacagagctggacctgcaaaagttttccagctctgcctcctatactggagctgagaccttggggggaaacacagtcgaaagcactggagacaggctggagctcaatgtgccctttgaagttcccagcccttaactctaatgaggtctcttgggcccctggcagccttgcccagttgttctctctggactctgttcctataccacaacagcagcaggggcctgaaatgtgatgtccacaagagctaataccctacagatggggcatatcctatcccatcccaccagaggattgattctccatttcacaaggactgatctggagcatttcttgcttcccttttgtagtctggggagccagattccacattcatgggactaccagacatgttcctagctcaacttgattatagagaagaggagagaggacagtgaatggggtagggttttcatgtctgcatttttggtcaggtaagcctctcaaaattgtgttggcacatctacctagcactttagggacaaaatcaaacccttctccccttttagctcctccacactgtctccctcctcaacacacacacacacacatacacacacatatacatagacacacaaacacacacacacacattaatatctatcttgggggaggcctcgtgccataattcccaagttcatgtctcagactgctgcattgcagcatgaggcagggcaaacactttccctctagatccctggggcctcaccctgtatttgaggttctcaccaccctcagcagggagaagggctgaagttcgccattttggaaccttacagaacatttctgagccaaagtaatcttccttctggggcctgagttccccaaactaccccacagcagtccctcaaagacagccctcaatccatgtagggacatctgagtatgcctctttctattgaaatgtcaattcaatcccagctttctcaccaccgttcccctttgattctttctcaattgtctttttgcctttagctcccacctatacatctcatgctcagagaaaaacaagttccttagaggttgtattctttattctccaagaatctgtctgaaacttgtacagctagttcctgtcccacaactattaagtggtttattaagtacattaggcagaatgtgcacttcatcaccaggttctagctctggcaaaggagtgctgtctacagcaagatttttgcttttagaattttattaactacatcttttgggttcatccatctacaaacactgattaagggcccctggggcaaccaattgatcagattactaaaaggacttgggaaaaagcaaaaaggtcccattgtactggactgaggattagaagcaattgaaatacaagcctgtaccaagcaagcagcctggccccacacaggtattagcaaatatgtggtaaccaaggttttaggccttggcctttaggtttcctgttttttttttgtttttgtttttgtttttgtttttctgcaacaggttattcttatctcactggctttcactgatcatgtttagaccttctggtagaagaaataatatccagacaggggatgatttggcttcagcaggctgcaggtgttcaaaggttgccatgtggctggcagtggttcaagcccacatttgacactgctgctctagaggaaagataatgatggtaacacagtaataataataataataacaaaaatatgataaagtgaaagagtaagacttcttcagtgtgcttgctcatggcatgaatgctatgtggacagcccaagccatacccagaatcaccttaattccaactttttgaggttcagcaattggaggtggcaattggctttgcattttaaagtatttcgggtaaaggtgaagtgaaggattttcgtctttataatttctgtttggccatggcaaataccatagttgagtatttgcttcaggagagttctttttacagttttacttttcaatgctgaggcatatttctttgagcactgtgcttttatgtgtctttctacaaaggggttattggtcagtggaagaacaaagtacacttgataaaaacattttcaacatacattgagcctaaacagcagttaagttgtctctaaatgaactagcaaaaaaaaaaaatgtagtttttgtttgtaaggaaggggaggtatttcctgagaatgaatttttttttttttggattactgtttttctctccatataccttgacttggattttgacaggagggagcctgggaaaataattttttcctccaagattctcagatccaggttaggaaaggattcagcactacagcatacccctctacaacatacagccctgtcacattgagatcataatccctcctgtcccactcctctctaccaaccccaccctactagctaggtcttcagtgttttacattgaatattggtacattttaattattttttctcataaatgggttatttatagaaattttgttaactcttgagccatatgcatgtgtagatactggcagggctatgtttgtttatgatgctctgcaaacatttcatattggccaataaacagaaatatatccaaaaa

SEQ ID NO: 129043 - DNA, 3429 bp, Homo sapiens
  Payload ID: 5238
  Gene Symbol: EDA2R
  Gene Name: ectodysplasin A2 receptor
  Uniprot ID: Q9HAV5
  ENST ID: ENST00000396050
  CDS Start-End: 11-967
ccttcccaccatggattgccaagaaaatgagtactgggaccaatggggacggtgtgtcacctgccaacggtgtggtcctggacaggagctatccaaggattgtggttatggagagggtggagatgcctactgcacagcctgccctcctcgcaggtacaaaagcagctggggccaccacagatgtcagagttgcatcacctgtgctgtcatcaatcgtgttcagaaggtcaactgcacagctacctctaatgctgtctgtggggactgtttgcccaggttctaccgaaagacacgcattggaggcctgcaggaccaagagtgcatcccgtgcacgaagcagacccccacctctgaggttcaatgtgccttccagttgagcttagtggaggcagatacacccacagtgccccctcaggaggccacacttgttgcactggtgagcagcctgctagtggtgtttaccctggccttcctggggctcttcttcctctactgcaagcagttcttcaacagacattgccagcgtgagaaattgattattttctctgatccagtaccagctagcctcaatctgatacctgaatttgcaggaggtttgctgcagtttgaggctgataaaacagcaaaggaggaatctctcttccccgtgccacccagcaaggagaccagtgctgagtcccaagtgagtgagaacatctttcagacccagccacttaaccctatcctcgaggacgactgcagctcgactagtggcttccccacacaggagtcctttaccatggcctcctgcacctcagagagccactcccactgggtccacagccccatcgaatgcacagagctggacctgcaaaagttttccagctctgcctcctatactggagctgagaccttggggggaaacacagtcgaaagcactggagacaggctggagctcaatgtgccctttgaagttcccagcccttaactctaatgaggtctcttgggcccctggcagccttgcccagttgttctctctggactctgttcctataccacaacagcagcaggggcctgaaatgtgatgtccacaagagctaataccctacagatggggcatatcctatcccatcccaccagaggattgattctccatttcacaaggactgatctggagcatttcttgcttcccttttgtagtctggggagccagattccacattcatgggactaccagacatgttcctagctcaacttgattatagagaagaggagagaggacagtgaatggggtagggttttcatgtctgcatttttggtcaggtaagcctctcaaaattgtgttggcacatctacctagcactttagggacaaaatcaaacccttctccccttttagctcctccacactgtctccctcctcaacacacacacacacacatacacacacatatacatagacacacaaacacacacacacacattaatatctatcttgggggaggcctcgtgccataattcccaagttcatgtctcagactgctgcattgcagcatgaggcagggcaaacactttccctctagatccctggggcctcaccctgtatttgaggttctcaccaccctcagcagggagaagggctgaagttcgccattttggaaccttacagaacatttctgagccaaagtaatcttccttctggggcctgagttccccaaactaccccacagcagtccctcaaagacagccctcaatccatgtagggacatctgagtatgcctctttctattgaaatgtcaattcaatcccagctttctcaccaccgttcccctttgattctttctcaattgtctttttgcctttagctcccacctatacatctcatgctcagagaaaaacaagttccttagaggttgtattctttattctccaagaatctgtctgaaacttgtacagctagttcctgtcccacaactattaagtggtttattaagtacattaggcagaatgtgcacttcatcaccaggttctagctctggcaaaggagtgctgtctacagcaagatttttgcttttagaattttattaactacatcttttgggttcatccatctacaaacactgattaagggcccctggggcaaccaattgatcagattactaaaaggacttgggaaaaagcaaaaaggtcccattgtactggactgaggattagaagcaattgaaatacaagcctgtaccaagcaagcagcctggccccacacaggtattagcaaatatgtggtaaccaaggttttaggccttggcctttaggtttcctgttttttttttgtttttgtttttgtttttgtttttctgcaacaggttattcttatctcactggctttcactgatcatgtttagaccttctggtagaagaaataatatccagacaggggatgatttggcttcagcaggctgcaggtgttcaaaggttgccatgtggctggcagtggttcaagcccacatttgacactgctgctctagaggaaagataatgatggtaacacagtaataataataataataacaaaaatatgataaagtgaaagagtaagacttcttcagtgtgcttgctcatggcatgaatgctatgtggacagcccaagccatacccagaatcaccttaattccaactttttgaggttcagcaattggaggtggcaattggctttgcattttaaagtatttcgggtaaaggtgaagtgaaggattttcgtctttataatttctgtttggccatggcaaataccatagttgagtatttgcttcaggagagttctttttacagttttacttttcaatgctgaggcatatttctttgagcactgtgcttttatgtgtctttctacaaaggggttattggtcagtggaagaacaaagtacacttgataaaaacattttcaacatacattgagcctaaacagcagttaagttgtctctaaatgaactagcaaaaaaaaaaaatgtagtttttgtttgtaaggaaggggaggtatttcctgagaatgaatttttttttttttggattactgtttttctctccatataccttgacttggattttgacaggagggagcctgggaaaataattttttcctccaagattctcagatccaggttaggaaaggattcagcactacagcatacccctctacaacatacagccctgtcacattgagatcataatccctcctgtcccactcctctctaccaaccccaccctactagctaggtcttcagtgttttacattgaatattggtacattttaattattttttctcataaatgggttatttatagaaattttgttaactcttgagccatatgcatgtgtagatactggcagggctatgtttgtttatgatgctctgcaaacatttcatattggccaataaacagaaatatatcc

SEQ ID NO: 129044 - DNA, 3464 bp, Homo sapiens
  Payload ID: 5238
  Gene Symbol: EDA2R
  Gene Name: ectodysplasin A2 receptor
  Uniprot ID: Q9HAV5
  ENST ID: ENST00000451436
  CDS Start-End: 109-1002
ggtaagcttaccgtgaaaggagggtttgggctgttgttgctacacgtggatgtgaaatgagtcaagcggaactttgattacaaggaatttcatatactccttcccaccatggattgccaagaaaatgagtactgggaccaatggggacggtgtgtcacctgccaacggtgtggtcctggacaggagctatccaaggattgtggttatggagagggtggagatgcctactgcacagcctgccctcctcgcaggtacaaaagcagctggggccaccacagatgtcagagttgcatcacctgtgctgtcatcaatcgtgttcagaaggtcaactgcacagctacctctaatgctgtctgtggggactgtttgcccaggttctaccgaaagacacgcattggaggcctgcaggaccaagagtgcatcccgtgcacgaagcagacccccacctctgaggttcaatgtgccttccagttgagcttagtggaggcagatacacccacagtgccccctcaggaggccacacttgttgcactggtgagcagcctgctagtggtgtttaccctggccttcctggggctcttcttcctctactgcaagcagttcttcaacagacattgccagcgtggaggtttgctgcagtttgaggctgataaaacagcaaaggaggaatctctcttccccgtgccacccagcaaggagaccagtgctgagtcccaagtgagtgagaacatctttcagacccagccacttaaccctatcctcgaggacgactgcagctcgactagtggcttccccacacaggagtcctttaccatggcctcctgcacctcagagagccactcccactgggtccacagccccatcgaatgcacagagctggacctgcaaaagttttccagctctgcctcctatactggagctgagaccttggggggaaacacagtcgaaagcactggagacaggctggagctcaatgtgccctttgaagttcccagcccttaactctaatgaggtctcttgggcccctggcagccttgcccagttgttctctctggactctgttcctataccacaacagcagcaggggcctgaaatgtgatgtccacaagagctaataccctacagatggggcatatcctatcccatcccaccagaggattgattctccatttcacaaggactgatctggagcatttcttgcttcccttttgtagtctggggagccagattccacattcatgggactaccagacatgttcctagctcaacttgattatagagaagaggagagaggacagtgaatggggtagggttttcatgtctgcatttttggtcaggtaagcctctcaaaattgtgttggcacatctacctagcactttagggacaaaatcaaacccttctccccttttagctcctccacactgtctccctcctcaacacacacacacacacatacacacacatatacatagacacacaaacacacacacacacattaatatctatcttgggggaggcctcgtgccataattcccaagttcatgtctcagactgctgcattgcagcatgaggcagggcaaacactttccctctagatccctggggcctcaccctgtatttgaggttctcaccaccctcagcagggagaagggctgaagttcgccattttggaaccttacagaacatttctgagccaaagtaatcttccttctggggcctgagttccccaaactaccccacagcagtccctcaaagacagccctcaatccatgtagggacatctgagtatgcctctttctattgaaatgtcaattcaatcccagctttctcaccaccgttcccctttgattctttctcaattgtctttttgcctttagctcccacctatacatctcatgctcagagaaaaacaagttccttagaggttgtattctttattctccaagaatctgtctgaaacttgtacagctagttcctgtcccacaactattaagtggtttattaagtacattaggcagaatgtgcacttcatcaccaggttctagctctggcaaaggagtgctgtctacagcaagatttttgcttttagaattttattaactacatcttttgggttcatccatctacaaacactgattaagggcccctggggcaaccaattgatcagattactaaaaggacttgggaaaaagcaaaaaggtcccattgtactggactgaggattagaagcaattgaaatacaagcctgtaccaagcaagcagcctggccccacacaggtattagcaaatatgtggtaaccaaggttttaggccttggcctttaggtttcctgttttttttttgtttttgtttttgtttttgtttttctgcaacaggttattcttatctcactggctttcactgatcatgtttagaccttctggtagaagaaataatatccagacaggggatgatttggcttcagcaggctgcaggtgttcaaaggttgccatgtggctggcagtggttcaagcccacatttgacactgctgctctagaggaaagataatgatggtaacacagtaataataataataataacaaaaatatgataaagtgaaagagtaagacttcttcagtgtgcttgctcatggcatgaatgctatgtggacagcccaagccatacccagaatcaccttaattccaactttttgaggttcagcaattggaggtggcaattggctttgcattttaaagtatttcgggtaaaggtgaagtgaaggattttcgtctttataatttctgtttggccatggcaaataccatagttgagtatttgcttcaggagagttctttttacagttttacttttcaatgctgaggcatatttctttgagcactgtgcttttatgtgtctttctacaaaggggttattggtcagtggaagaacaaagtacacttgataaaaacattttcaacatacattgagcctaaacagcagttaagttgtctctaaatgaactagcaaaaaaaaaaaatgtagtttttgtttgtaaggaaggggaggtatttcctgagaatgaatttttttttttttggattactgtttttctctccatataccttgacttggattttgacaggagggagcctgggaaaataattttttcctccaagattctcagatccaggttaggaaaggattcagcactacagcatacccctctacaacatacagccctgtcacattgagatcataatccctcctgtcccactcctctctaccaaccccaccctactagctaggtcttcagtgttttacattgaatattggtacattttaattattttttctcataaatgggttatttatagaaattttgttaactcttgagccatatgcatgtgtagatactggcagggctatgtttgtttatgatgctctgcaaacatttcatattggccaataaacagaaatatatcc

SEQ ID NO: 129045 - DNA, 2982 bp, Homo sapiens
  Payload ID: 5239
  Gene Symbol: ENOX1
  Gene Name: ecto-NOX disulfide-thiol exchanger 1
  Uniprot ID: Q8TC92
  ENST ID: ENST00000261488
  CDS Start-End: 579-2510
gcagatccccgctctcccgggcgccgctactcacacaggcttccagccgccacggggcgtcctctgtctgctgcagcggcggcggcagcagagggaacggcgactgcagcccggccgcgtctcccagctccgtgcccgggacagagtccgggagaagcaaaggaggaggaggacgccgaggctaggaggagccgcgccgcgcccggcgccccactccgcgcagcgggttgcctccgctccccatacggcggccccaggtcctttgctgccagcatgatgtcgtatttataatatgtggaggagagagagctcaccatgctcaggtaaagggatggtatgtgcaccacaaataacaagcagaagcctctgatatgtcagaaccatgctgtcttccatgagacttcctttgtgaagagcatccatttaaaagacttttatgaatacatggtttcaatcaagtccccagagaacacatttgtcttctgagctgctggcagttttgagaatctgatgacctccgaggggaccctgcactcagccatcaaagtgttcctgcccctctggacactcataattcaatggtagatgcaggtggagttgagaacatcacccagcttccccaggagcttcctcagatgatggctgcagcagccgatggtttggggagtatagcgatagacacgacccagctcaacatgtccgtgacagatcccacagcctgggctacagccatgaataacctgggcatggttcccgtagggttgcctggacagcagctcgtgtctgactcaatctgtgtcccaggctttgatccaagcctcaacatgatgactggaatcacccccattaacccaatgataccaggccttggactggtacctcccccaccaccaacagaagtggctgttgtcaaagaaataatccactgcaaaagctgtactctttttcctcaaaatccaaatcttccacctccttccacaagagaacgacctcctgggtgtaagaccgtgtttgtcggaggattaccagaaaatgctactgaggaaattattcaagaagtctttgaacagtgcggtgatattacagcaattcggaaaagcaagaagaatttttgtcacattcgctttgcagaggaattcatggttgataaagccatttacctttctggttataggatgcgattagggtctagcaccgacaaaaaggattcaggccgccttcatgtggactttgcccaggccagggatgacttctatgagtgggaatgcaagcagaggatgcgtgcccgggaggagcggcaccggcgcaagctggaggaggaccggctcaggcccccatccccgcctgccataatgcactactcggagcacgaagccgctctgctggctgaaaagctgaaagatgatagcaagttttcagaggctatcacagtgctgctttcctggattgaacgaggggaagtgaatcggcgctctgcaaaccagttctattccatggtgcagtcggccaacagccacgtccgccggctaatgaatgaaaaagccacccatgagcaagagatggaggaagccaaggagaattttaaaaatgccttaactgggattctcactcaatttgagcagattgtggccgttttcaacgcttctaccagacaaaaagcttgggaccatttctcgaaagcccagcgcaagaacatagacatttggcgaaagcattctgaggagctccggaatgctcaaagtgagcagctcatgggcatccgccgcgaagaagaaatggaaatgtctgatgatgagaactgtgacagccctacaaagaaaatgagagtcgatgaatcagccctggctgcccaggcctacgctctgaaagaggagaatgacagtctccgctggcagctggatgcctacaggaatgaggtggagctgctgaaacaagaaaaagaacagcttttccgaacagaagaaaacctcaccaaggaccagcaactgcagtttctgcagcaaaccatgcaaggcatgcagcagcaattgctaaccatccaggaggagttaaacaacaaaaagtcagaattggaacaagcaaaggaagagcagtcccatacacaagcgttactaaaagtcctgcaggaacaattaaaaggtaccaaggaattggtcgagaccaatggccacagccatgaggattcaaatgaaatcaatgtgttgacagttgcattagtcaaccaagaccgagagaacaatattgagaaaagaagccaaggcttaaaatcagagaaagaagctctgctaataggtatcatatcaacgtttcttcacgtccatccttttggagccaacatagaatatctttggtcatacatgcagcagctggactccaagatatctgcaaatgaaatagaaatgcttttgatgaggctgccacgcatgttcaaacaggaattcacgggtgtgggagccacgctggaaaaaagatggaagctgtgtgcctttgaaggaattaaaactacctaactgcgaagagcaaagcatctctggaaatgaaaccatgtgaacctggccagggcggtgcgacggggaagcaggaggtgtggggttggtccagcacgcaacctttgtggagccatcgaagcctgcctttagttatatctgtggcgttctcttgtaagtggaaatgtaattgtgtaccagtttcttaaaataaacaaagcttcatactgtgacagatctgtttcctatgaaaaccaaacaatgattccacagtcataatgatggcaaaatcttaaaatgtgctacatttgagaatagctcaccaagcaaaatatttaaagttaatgatggtgtagcaatgattgttgctaggctacagagttgtatatgtaatgtatagctgaaatcattaaatgacattttcctgaaagtctttctgttttagtaaaaaaaaaaaaaaaaaaaaaaagaaaaagaaaaagaaaaaaagaaaaaa

SEQ ID NO: 129046 - DNA, 2610 bp, Homo sapiens
  Payload ID: 5239
  Gene Symbol: ENOX1
  Gene Name: ecto-NOX disulfide-thiol exchanger 1
  Uniprot ID: Q8TC92
  ENST ID: ENST00000412891
  CDS Start-End: 257-2188
gatggacagaagatggaaaaatttcttacatgaatgaaaagcctctgatatgtcagaaccatgctgtcttccatgagacttcctttgtgaagagcatccatttaaaagacttttatgaatacatggtttcaatcaagtccccagagaacacatttgtcttctgagctgctggcagttttgagaatctgatgacctccgaggggaccctgcactcagccatcaaagtgttcctgcccctctggacactcataattcaatggtagatgcaggtggagttgagaacatcacccagcttccccaggagcttcctcagatgatggctgcagcagccgatggtttggggagtatagcgatagacacgacccagctcaacatgtccgtgacagatcccacagcctgggctacagccatgaataacctgggcatggttcccgtagggttgcctggacagcagctcgtgtctgactcaatctgtgtcccaggctttgatccaagcctcaacatgatgactggaatcacccccattaacccaatgataccaggccttggactggtacctcccccaccaccaacagaagtggctgttgtcaaagaaataatccactgcaaaagctgtactctttttcctcaaaatccaaatcttccacctccttccacaagagaacgacctcctgggtgtaagaccgtgtttgtcggaggattaccagaaaatgctactgaggaaattattcaagaagtctttgaacagtgcggtgatattacagcaattcggaaaagcaagaagaatttttgtcacattcgctttgcagaggaattcatggttgataaagccatttacctttctggttataggatgcgattagggtctagcaccgacaaaaaggattcaggccgccttcatgtggactttgcccaggccagggatgacttctatgagtgggaatgcaagcagaggatgcgtgcccgggaggagcggcaccggcgcaagctggaggaggaccggctcaggcccccatccccgcctgccataatgcactactcggagcacgaagccgctctgctggctgaaaagctgaaagatgatagcaagttttcagaggctatcacagtgctgctttcctggattgaacgaggggaagtgaatcggcgctctgcaaaccagttctattccatggtgcagtcggccaacagccacgtccgccggctaatgaatgaaaaagccacccatgagcaagagatggaggaagccaaggagaattttaaaaatgccttaactgggattctcactcaatttgagcagattgtggccgttttcaacgcttctaccagacaaaaagcttgggaccatttctcgaaagcccagcgcaagaacatagacatttggcgaaagcattctgaggagctccggaatgctcaaagtgagcagctcatgggcatccgccgcgaagaagaaatggaaatgtctgatgatgagaactgtgacagccctacaaagaaaatgagagtcgatgaatcagccctggctgcccaggcctacgctctgaaagaggagaatgacagtctccgctggcagctggatgcctacaggaatgaggtggagctgctgaaacaagaaaaagaacagcttttccgaacagaagaaaacctcaccaaggaccagcaactgcagtttctgcagcaaaccatgcaaggcatgcagcagcaattgctaaccatccaggaggagttaaacaacaaaaagtcagaattggaacaagcaaaggaagagcagtcccatacacaagcgttactaaaagtcctgcaggaacaattaaaaggtaccaaggaattggtcgagaccaatggccacagccatgaggattcaaatgaaatcaatgtgttgacagttgcattagtcaaccaagaccgagagaacaatattgagaaaagaagccaaggcttaaaatcagagaaagaagctctgctaataggtatcatatcaacgtttcttcacgtccatccttttggagccaacatagaatatctttggtcatacatgcagcagctggactccaagatatctgcaaatgaaatagaaatgcttttgatgaggctgccacgcatgttcaaacaggaattcacgggtgtgggagccacgctggaaaaaagatggaagctgtgtgcctttgaaggaattaaaactacctaactgcgaagagcaaagcatctctggaaatgaaaccatgtgaacctggccagggcggtgcgacggggaagcaggaggtgtggggttggtccagcacgcaacctttgtggagccatcgaagcctgcctttagttatatctgtggcgttctcttgtaagtggaaatgtaattgtgtaccagtttcttaaaataaacaaagcttcatactgtgacagatctgtttcctatgaaaaccaaacaatgattccacagtcataatgatggcaaaatcttaaaatgtgctacatttgagaatagctcaccaagcaaaatatttaaagttaatgatggtgtagcaatgattgttgctaggctacagagttgtatatgtaatgtatagctgaaatcattaaatgacattttcctgaaagtctttctgttttagt

SEQ ID NO: 129047 - DNA, 4263 bp, Homo sapiens
  Payload ID: 5240
  Gene Symbol: ENOX2
  Gene Name: ecto-NOX disulfide-thiol exchanger 2
  Uniprot ID: Q16206
  ENST ID: ENST00000338144
  CDS Start-End: 502-2334
acatttcccatgaagccatgggctcgggcctccggcttccccggtgaccagtagccaataggagacgccgcagtgggcaccctgtgtgtgagagtccagccttgggccagagtgccgggtctaggcctggaagcgcgaggcgggcatttcggaagagagtggcgcggcgtggggcgccgcgagggcactacgagcccaggaactgccgcgccggcccgattttccgcggctgtataaggactagcgcttcggtagccggggagctggagggaacctgatttgagatcaattcttggagaacacaaagaagtgtgatggattgaaccagctgccctttgaccctgctaacaacaacgagcccctgcagtttggtagtgccagtggccctctggtcacagaaggcctcattgagaatggaggggaatcaagcaagaaaagaaagagaacaaatactccttcagaaatgatgacagagctaagttcacagttgaggaccacacaatgcaaagagattttagatggctgtgggtctacgaaataggctatgcagccgataacagtagaactctgaacgtggattccactgcaatgacactacctatgtctgatccaactgcatgggccacagcaatgaataatcttggaatggcaccgctgggaattgccggacaaccaattttacctgactttgatcctgctcttggaatgatgactggaattccaccaataactccaatgatgcctggtttgggaatagtacctccaccaattcctccagatatgccagtagtaaaagagatcatacactgtaaaagctgcacgctcttccctccaaatccaaatctcccacctcctgcaacccgagaaagaccaccaggatgcaaaacagtatttgtgggtggtctgcctgaaaatgggacagagcaaatcattgtggaagttttcgagcagtgtggagagatcattgccattcgcaagagcaagaagaacttctgccacattcgctttgctgaggagtacatggtggacaaagccctgtatctgtctggttaccgcattcgcctgggctctagtactgacaagaaggacacaggcagactccacgttgatttcgcacaggctcgagatgacctgtatgagtgggagtgtaaacagcgtatgctagccagagaggagcgccatcgtagaagaatggaagaagaaagattgcgtccaccatctccacccccagtggtccactattcagatcatgaatgcagcattgttgctgaaaaattaaaagatgattccaaattctcagaagctgtacagaccttgcttacctggatagagcgaggagaggtcaaccgtcgtagcgccaataacttctactccatgatccagtcggccaacagccatgtccgccgcctggtgaacgagaaagctgcccatgagaaagatatggaagaagcaaaggagaagttcaagcaggccctttctggaattctcattcaatttgagcagatagtggctgtgtaccattccgcctccaagcagaaggcatgggaccacttcacaaaagcccagcggaagaacatcagcgtgtggtgcaaacaagctgaggaaattcgcaacattcataatgatgaattaatgggaatcaggcgagaagaagaaatggaaatgtctgatgatgaaatagaagaaatgacagaaacaaaagaaactgaggaatcagccttagtatcacaggcagaagctctgaaggaagaaaatgacagcctccgttggcagctcgatgcctaccggaatgaagtagaactgctcaagcaagaacaaggcaaagtccacagagaagatgaccctaacaaagaacagcagctgaaactcctgcaacaagccctgcaaggaatgcaacagcatctactcaaagtccaagaggaatacaaaaagaaagaagctgaacttgaaaaactcaaagatgacaagttacaggtggaaaaaatgttggaaaatcttaaagaaaaggaaagctgtgcttctaggctgtgtgcctcaaaccaggatagcgaataccctcttgagaagaccatgaacagcagtcctatcaaatctgaacgtgaagcactgctagtggggattatctccacattccttcatgttcacccatttggagcaagcattgaatacatctgttcctacttgcaccgtcttgataataagatctgcaccagcgatgtggagtgtctcatgggtagactccagcataccttcaagcaggaaatgactggagttggagccagcctggaaaagagatggaaattctgtggcttcgagggcttgaagctgacctaaatctctttgcctaacaacttgggatcctgaagataaatatgtgttggacaagcatagaaagtgatttatatttttaatggttttcaagtggaagttcctttgaatttgtcagttcattcctggaaaatcttttgagttaaaataaggatcctaggacagcacctcgaactacaggccctaaagagaaattgcctcaaaccacaagtgctgtaacttcctcccctttctgtcaattggttgtctttaaatattgcaaaagtcctgatgctaaacagtatttggagtgttttcagtgtctgtactactgttgtagaccttggtatttttttaaacactgttaactgaaatgttttgatgatttgtatgtgatttgtgtttctaaacttctctttacattaatgttgttactggtgaaaggcatgagagcagcactaagtcctctgtgtaactgccattgtctttccaatccccagtagaccagtaaataaataacacatcagtgtcttctagaaggtgcctgaccaggttcaccttttaaacgacaaagcatggtttgtggctttttgcaaaattactatgaaccaaaagttgacaaatgttccaaagttattttctctaacatatcacattaaagatctgtttcagaattgtaaaaagtacatctagatgtgtttacagaaagcaagtatccagtatgactggcatgtgttcatgctattcagaatcacttgtaaatagtctgcttttaaaggagggcatgttcagttttctgtgaattaaaatatgctcatgtgtgggcacacacgcacaaacacacacacgcacgcacacagtggcagaagggatttatattaatattctttcccctctggccttcttacagtctgttggtccctttgcttctgttgtcagtgtgttgaattgcaaaccgagtactgctgtaaatactatgtttacttcatgctgaatgtttgcaaagacttgatataagtattaatagtaatgaatcaatgaataaataatgagctagggtttgtgaggctttctacaaataggtcagctccacctggagtgcgaattgccagagacaccttggtagtgcccatcggcaaatcgcaatggcagcatgtgagtggaccattcagaaacttctgcttggtggaaagtaaacagagaggatggaggtttggggcgaatgtcctgaggcagagatggtctttattgtgtgtggtggtggttgtggtatttataataatgcaagcataccctcccttgagtctcaattgaagataaaagaatgtactgagcaagcaaagccaatggagagtatttcacaaaaatactttgtaaatgagatgccagtagtgttcaaagttgtatttttaaaagataaatattcctttttatacctcagttttgtgtcctgtttttaatgacttacgctctaagtaatccattagtagttatctcagttccttcctttgggttactagaatgttggaaaaagatgccaagtctgtcttgacaactggaaacagggttccacagcagcccattcgtgctgaaaactggcttccccctgaagcaccctgctgtggcaccagcaggaagctcaggttaattttacactagcttgctcactgatgcatctctcatcaatgctacggaaggctttgattcatcagtctcgggctcttggaatacctaattttaataatatctatgaaatcaagggaaactttccatttacagttatttcttgtttaaataaactaaattaatttttaggggagagcagtaggaaaaagagctaatgcatgcggggtttaatacctaggtgatgggttgaggtgcagcaaaaccaccatggcacacgttcacctatgtaacaaacctgcacatcctgcacatgtaccccggaacttactt

SEQ ID NO: 129048 - DNA, 3788 bp, Homo sapiens
  Payload ID: 5240
  Gene Symbol: ENOX2
  Gene Name: ecto-NOX disulfide-thiol exchanger 2
  Uniprot ID: Q16206
  ENST ID: ENST00000370927
  CDS Start-End: 23-1855
gttcacagttgaggaccacacaatgcaaagagattttagatggctgtgggtctacgaaataggctatgcagccgataacagtagaactctgaacgtggattccactgcaatgacactacctatgtctgatccaactgcatgggccacagcaatgaataatcttggaatggcaccgctgggaattgccggacaaccaattttacctgactttgatcctgctcttggaatgatgactggaattccaccaataactccaatgatgcctggtttgggaatagtacctccaccaattcctccagatatgccagtagtaaaagagatcatacactgtaaaagctgcacgctcttccctccaaatccaaatctcccacctcctgcaacccgagaaagaccaccaggatgcaaaacagtatttgtgggtggtctgcctgaaaatgggacagagcaaatcattgtggaagttttcgagcagtgtggagagatcattgccattcgcaagagcaagaagaacttctgccacattcgctttgctgaggagtacatggtggacaaagccctgtatctgtctggttaccgcattcgcctgggctctagtactgacaagaaggacacaggcagactccacgttgatttcgcacaggctcgagatgacctgtatgagtgggagtgtaaacagcgtatgctagccagagaggagcgccatcgtagaagaatggaagaagaaagattgcgtccaccatctccacccccagtggtccactattcagatcatgaatgcagcattgttgctgaaaaattaaaagatgattccaaattctcagaagctgtacagaccttgcttacctggatagagcgaggagaggtcaaccgtcgtagcgccaataacttctactccatgatccagtcggccaacagccatgtccgccgcctggtgaacgagaaagctgcccatgagaaagatatggaagaagcaaaggagaagttcaagcaggccctttctggaattctcattcaatttgagcagatagtggctgtgtaccattccgcctccaagcagaaggcatgggaccacttcacaaaagcccagcggaagaacatcagcgtgtggtgcaaacaagctgaggaaattcgcaacattcataatgatgaattaatgggaatcaggcgagaagaagaaatggaaatgtctgatgatgaaatagaagaaatgacagaaacaaaagaaactgaggaatcagccttagtatcacaggcagaagctctgaaggaagaaaatgacagcctccgttggcagctcgatgcctaccggaatgaagtagaactgctcaagcaagaacaaggcaaagtccacagagaagatgaccctaacaaagaacagcagctgaaactcctgcaacaagccctgcaaggaatgcaacagcatctactcaaagtccaagaggaatacaaaaagaaagaagctgaacttgaaaaactcaaagatgacaagttacaggtggaaaaaatgttggaaaatcttaaagaaaaggaaagctgtgcttctaggctgtgtgcctcaaaccaggatagcgaataccctcttgagaagaccatgaacagcagtcctatcaaatctgaacgtgaagcactgctagtggggattatctccacattccttcatgttcacccatttggagcaagcattgaatacatctgttcctacttgcaccgtcttgataataagatctgcaccagcgatgtggagtgtctcatgggtagactccagcataccttcaagcaggaaatgactggagttggagccagcctggaaaagagatggaaattctgtggcttcgagggcttgaagctgacctaaatctctttgcctaacaacttgggatcctgaagataaatatgtgttggacaagcatagaaagtgatttatatttttaatggttttcaagtggaagttcctttgaatttgtcagttcattcctggaaaatcttttgagttaaaataaggatcctaggacagcacctcgaactacaggccctaaagagaaattgcctcaaaccacaagtgctgtaacttcctcccctttctgtcaattggttgtctttaaatattgcaaaagtcctgatgctaaacagtatttggagtgttttcagtgtctgtactactgttgtagaccttggtatttttttaaacactgttaactgaaatgttttgatgatttgtatgtgatttgtgtttctaaacttctctttacattaatgttgttactggtgaaaggcatgagagcagcactaagtcctctgtgtaactgccattgtctttccaatccccagtagaccagtaaataaataacacatcagtgtcttctagaaggtgcctgaccaggttcaccttttaaacgacaaagcatggtttgtggctttttgcaaaattactatgaaccaaaagttgacaaatgttccaaagttattttctctaacatatcacattaaagatctgtttcagaattgtaaaaagtacatctagatgtgtttacagaaagcaagtatccagtatgactggcatgtgttcatgctattcagaatcacttgtaaatagtctgcttttaaaggagggcatgttcagttttctgtgaattaaaatatgctcatgtgtgggcacacacgcacaaacacacacacgcacgcacacagtggcagaagggatttatattaatattctttcccctctggccttcttacagtctgttggtccctttgcttctgttgtcagtgtgttgaattgcaaaccgagtactgctgtaaatactatgtttacttcatgctgaatgtttgcaaagacttgatataagtattaatagtaatgaatcaatgaataaataatgagctagggtttgtgaggctttctacaaataggtcagctccacctggagtgcgaattgccagagacaccttggtagtgcccatcggcaaatcgcaatggcagcatgtgagtggaccattcagaaacttctgcttggtggaaagtaaacagagaggatggaggtttggggcgaatgtcctgaggcagagatggtctttattgtgtgtggtggtggttgtggtatttataataatgcaagcataccctcccttgagtctcaattgaagataaaagaatgtactgagcaagcaaagccaatggagagtatttcacaaaaatactttgtaaatgagatgccagtagtgttcaaagttgtatttttaaaagataaatattcctttttatacctcagttttgtgtcctgtttttaatgacttacgctctaagtaatccattagtagttatctcagttccttcctttgggttactagaatgttggaaaaagatgccaagtctgtcttgacaactggaaacagggttccacagcagcccattcgtgctgaaaactggcttccccctgaagcaccctgctgtggcaccagcaggaagctcaggttaattttacactagcttgctcactgatgcatctctcatcaatgctacggaaggctttgattcatcagtctcgggctcttggaatacctaattttaataatatctatgaaatcaagggaaactttccatttacagttatttcttgtttaaataaactaaattaatttttaggggagagcagtaggaaaaagagctaatgcatgcggggtttaatacctaggtgatgggttgaggtgcagcaaaaccaccatggcacacgttcacctatgtaacaaacctgcacatcctgcacatgtaccccggaacttacttaaaa

SEQ ID NO: 129049 - DNA, 3963 bp, Homo sapiens
  Payload ID: 5240
  Gene Symbol: ENOX2
  Gene Name: ecto-NOX disulfide-thiol exchanger 2
  Uniprot ID: Q16206
  ENST ID: ENST00000370935
  CDS Start-End: 273-2018
gtgtgtgagagtccagccttgggccagagtgccgggtctaggcctggaagcgcgaggcgggcatttcggaagagagtggcgcggcgtggggcgccgcgagggcactacgagcccaggaactgccgcgccggcccgattttccgcggctgtataaggactagcgcttcggtagccggggagctggagggaacctgatttgagatcaattcttggagaacacaaagaagtgtgatgccgataacagtagaactctgaacgtggattccactgcaatgacactacctatgtctgatccaactgcatgggccacagcaatgaataatcttggaatggcaccgctgggaattgccggacaaccaattttacctgactttgatcctgctcttggaatgatgactggaattccaccaataactccaatgatgcctggtttgggaatagtacctccaccaattcctccagatatgccagtagtaaaagagatcatacactgtaaaagctgcacgctcttccctccaaatccaaatctcccacctcctgcaacccgagaaagaccaccaggatgcaaaacagtatttgtgggtggtctgcctgaaaatgggacagagcaaatcattgtggaagttttcgagcagtgtggagagatcattgccattcgcaagagcaagaagaacttctgccacattcgctttgctgaggagtacatggtggacaaagccctgtatctgtctggttaccgcattcgcctgggctctagtactgacaagaaggacacaggcagactccacgttgatttcgcacaggctcgagatgacctgtatgagtgggagtgtaaacagcgtatgctagccagagaggagcgccatcgtagaagaatggaagaagaaagattgcgtccaccatctccacccccagtggtccactattcagatcatgaatgcagcattgttgctgaaaaattaaaagatgattccaaattctcagaagctgtacagaccttgcttacctggatagagcgaggagaggtcaaccgtcgtagcgccaataacttctactccatgatccagtcggccaacagccatgtccgccgcctggtgaacgagaaagctgcccatgagaaagatatggaagaagcaaaggagaagttcaagcaggccctttctggaattctcattcaatttgagcagatagtggctgtgtaccattccgcctccaagcagaaggcatgggaccacttcacaaaagcccagcggaagaacatcagcgtgtggtgcaaacaagctgaggaaattcgcaacattcataatgatgaattaatgggaatcaggcgagaagaagaaatggaaatgtctgatgatgaaatagaagaaatgacagaaacaaaagaaactgaggaatcagccttagtatcacaggcagaagctctgaaggaagaaaatgacagcctccgttggcagctcgatgcctaccggaatgaagtagaactgctcaagcaagaacaaggcaaagtccacagagaagatgaccctaacaaagaacagcagctgaaactcctgcaacaagccctgcaaggaatgcaacagcatctactcaaagtccaagaggaatacaaaaagaaagaagctgaacttgaaaaactcaaagatgacaagttacaggtggaaaaaatgttggaaaatcttaaagaaaaggaaagctgtgcttctaggctgtgtgcctcaaaccaggatagcgaataccctcttgagaagaccatgaacagcagtcctatcaaatctgaacgtgaagcactgctagtggggattatctccacattccttcatgttcacccatttggagcaagcattgaatacatctgttcctacttgcaccgtcttgataataagatctgcaccagcgatgtggagtgtctcatgggtagactccagcataccttcaagcaggaaatgactggagttggagccagcctggaaaagagatggaaattctgtggcttcgagggcttgaagctgacctaaatctctttgcctaacaacttgggatcctgaagataaatatgtgttggacaagcatagaaagtgatttatatttttaatggttttcaagtggaagttcctttgaatttgtcagttcattcctggaaaatcttttgagttaaaataaggatcctaggacagcacctcgaactacaggccctaaagagaaattgcctcaaaccacaagtgctgtaacttcctcccctttctgtcaattggttgtctttaaatattgcaaaagtcctgatgctaaacagtatttggagtgttttcagtgtctgtactactgttgtagaccttggtatttttttaaacactgttaactgaaatgttttgatgatttgtatgtgatttgtgtttctaaacttctctttacattaatgttgttactggtgaaaggcatgagagcagcactaagtcctctgtgtaactgccattgtctttccaatccccagtagaccagtaaataaataacacatcagtgtcttctagaaggtgcctgaccaggttcaccttttaaacgacaaagcatggtttgtggctttttgcaaaattactatgaaccaaaagttgacaaatgttccaaagttattttctctaacatatcacattaaagatctgtttcagaattgtaaaaagtacatctagatgtgtttacagaaagcaagtatccagtatgactggcatgtgttcatgctattcagaatcacttgtaaatagtctgcttttaaaggagggcatgttcagttttctgtgaattaaaatatgctcatgtgtgggcacacacgcacaaacacacacacgcacgcacacagtggcagaagggatttatattaatattctttcccctctggccttcttacagtctgttggtccctttgcttctgttgtcagtgtgttgaattgcaaaccgagtactgctgtaaatactatgtttacttcatgctgaatgtttgcaaagacttgatataagtattaatagtaatgaatcaatgaataaataatgagctagggtttgtgaggctttctacaaataggtcagctccacctggagtgcgaattgccagagacaccttggtagtgcccatcggcaaatcgcaatggcagcatgtgagtggaccattcagaaacttctgcttggtggaaagtaaacagagaggatggaggtttggggcgaatgtcctgaggcagagatggtctttattgtgtgtggtggtggttgtggtatttataataatgcaagcataccctcccttgagtctcaattgaagataaaagaatgtactgagcaagcaaagccaatggagagtatttcacaaaaatactttgtaaatgagatgccagtagtgttcaaagttgtatttttaaaagataaatattcctttttatacctcagttttgtgtcctgtttttaatgacttacgctctaagtaatccattagtagttatctcagttccttcctttgggttactagaatgttggaaaaagatgccaagtctgtcttgacaactggaaacagggttccacagcagcccattcgtgctgaaaactggcttccccctgaagcaccctgctgtggcaccagcaggaagctcaggttaattttacactagcttgctcactgatgcatctctcatcaatgctacggaaggctttgattcatcagtctcgggctcttggaatacctaattttaataatatctatgaaatcaagggaaactttccatttacagttatttcttgtttaaataaactaaattaatttttaggggagagcagtaggaaaaagagctaatgcatgcggggtttaatacctaggtgatgggttgaggtgcagcaaaaccaccatggcacacgttcacctatgtaacaaacctgcacatcctgcacatgtaccccggaacttacttaaaaaataaaagaaaa

SEQ ID NO: 129050 - DNA, 4174 bp, Homo sapiens
  Payload ID: 5240
  Gene Symbol: ENOX2
  Gene Name: ecto-NOX disulfide-thiol exchanger 2
  Uniprot ID: Q16206
  ENST ID: ENST00000394363
  CDS Start-End: 500-2245
acatttcccatgaagccatgggctcgggcctccggcttccccggtgaccagtagccaataggagacgccgcagtgggcaccctgtgtgtgagagtccagccttgggccagagtgccgggtctaggcctggaagcgcgaggcgggcatttcggaagagagtggcgcggcgtggggcgccgcgagggcactacgagcccaggaactgccgcgccggcccgattttccgcggctgtataaggactagcgcttcggtagccggggagctggagggaacctgatttgagatcaattcttggagaacacaaagaagtgtgatggattgaaccagctgccctttgaccctgctaacaacaacgagcccctgcagtttggtagtgccagtggccctctggtcacagaaggcctcattgagaatggaggggaatcaagcaagaaaagaaagagaacaaatactccttcagccgataacagtagaactctgaacgtggattccactgcaatgacactacctatgtctgatccaactgcatgggccacagcaatgaataatcttggaatggcaccgctgggaattgccggacaaccaattttacctgactttgatcctgctcttggaatgatgactggaattccaccaataactccaatgatgcctggtttgggaatagtacctccaccaattcctccagatatgccagtagtaaaagagatcatacactgtaaaagctgcacgctcttccctccaaatccaaatctcccacctcctgcaacccgagaaagaccaccaggatgcaaaacagtatttgtgggtggtctgcctgaaaatgggacagagcaaatcattgtggaagttttcgagcagtgtggagagatcattgccattcgcaagagcaagaagaacttctgccacattcgctttgctgaggagtacatggtggacaaagccctgtatctgtctggttaccgcattcgcctgggctctagtactgacaagaaggacacaggcagactccacgttgatttcgcacaggctcgagatgacctgtatgagtgggagtgtaaacagcgtatgctagccagagaggagcgccatcgtagaagaatggaagaagaaagattgcgtccaccatctccacccccagtggtccactattcagatcatgaatgcagcattgttgctgaaaaattaaaagatgattccaaattctcagaagctgtacagaccttgcttacctggatagagcgaggagaggtcaaccgtcgtagcgccaataacttctactccatgatccagtcggccaacagccatgtccgccgcctggtgaacgagaaagctgcccatgagaaagatatggaagaagcaaaggagaagttcaagcaggccctttctggaattctcattcaatttgagcagatagtggctgtgtaccattccgcctccaagcagaaggcatgggaccacttcacaaaagcccagcggaagaacatcagcgtgtggtgcaaacaagctgaggaaattcgcaacattcataatgatgaattaatgggaatcaggcgagaagaagaaatggaaatgtctgatgatgaaatagaagaaatgacagaaacaaaagaaactgaggaatcagccttagtatcacaggcagaagctctgaaggaagaaaatgacagcctccgttggcagctcgatgcctaccggaatgaagtagaactgctcaagcaagaacaaggcaaagtccacagagaagatgaccctaacaaagaacagcagctgaaactcctgcaacaagccctgcaaggaatgcaacagcatctactcaaagtccaagaggaatacaaaaagaaagaagctgaacttgaaaaactcaaagatgacaagttacaggtggaaaaaatgttggaaaatcttaaagaaaaggaaagctgtgcttctaggctgtgtgcctcaaaccaggatagcgaataccctcttgagaagaccatgaacagcagtcctatcaaatctgaacgtgaagcactgctagtggggattatctccacattccttcatgttcacccatttggagcaagcattgaatacatctgttcctacttgcaccgtcttgataataagatctgcaccagcgatgtggagtgtctcatgggtagactccagcataccttcaagcaggaaatgactggagttggagccagcctggaaaagagatggaaattctgtggcttcgagggcttgaagctgacctaaatctctttgcctaacaacttgggatcctgaagataaatatgtgttggacaagcatagaaagtgatttatatttttaatggttttcaagtggaagttcctttgaatttgtcagttcattcctggaaaatcttttgagttaaaataaggatcctaggacagcacctcgaactacaggccctaaagagaaattgcctcaaaccacaagtgctgtaacttcctcccctttctgtcaattggttgtctttaaatattgcaaaagtcctgatgctaaacagtatttggagtgttttcagtgtctgtactactgttgtagaccttggtatttttttaaacactgttaactgaaatgttttgatgatttgtatgtgatttgtgtttctaaacttctctttacattaatgttgttactggtgaaaggcatgagagcagcactaagtcctctgtgtaactgccattgtctttccaatccccagtagaccagtaaataaataacacatcagtgtcttctagaaggtgcctgaccaggttcaccttttaaacgacaaagcatggtttgtggctttttgcaaaattactatgaaccaaaagttgacaaatgttccaaagttattttctctaacatatcacattaaagatctgtttcagaattgtaaaaagtacatctagatgtgtttacagaaagcaagtatccagtatgactggcatgtgttcatgctattcagaatcacttgtaaatagtctgcttttaaaggagggcatgttcagttttctgtgaattaaaatatgctcatgtgtgggcacacacgcacaaacacacacacgcacgcacacagtggcagaagggatttatattaatattctttcccctctggccttcttacagtctgttggtccctttgcttctgttgtcagtgtgttgaattgcaaaccgagtactgctgtaaatactatgtttacttcatgctgaatgtttgcaaagacttgatataagtattaatagtaatgaatcaatgaataaataatgagctagggtttgtgaggctttctacaaataggtcagctccacctggagtgcgaattgccagagacaccttggtagtgcccatcggcaaatcgcaatggcagcatgtgagtggaccattcagaaacttctgcttggtggaaagtaaacagagaggatggaggtttggggcgaatgtcctgaggcagagatggtctttattgtgtgtggtggtggttgtggtatttataataatgcaagcataccctcccttgagtctcaattgaagataaaagaatgtactgagcaagcaaagccaatggagagtatttcacaaaaatactttgtaaatgagatgccagtagtgttcaaagttgtatttttaaaagataaatattcctttttatacctcagttttgtgtcctgtttttaatgacttacgctctaagtaatccattagtagttatctcagttccttcctttgggttactagaatgttggaaaaagatgccaagtctgtcttgacaactggaaacagggttccacagcagcccattcgtgctgaaaactggcttccccctgaagcaccctgctgtggcaccagcaggaagctcaggttaattttacactagcttgctcactgatgcatctctcatcaatgctacggaaggctttgattcatcagtctcgggctcttggaatacctaattttaataatatctatgaaatcaagggaaactttccatttacagttatttcttgtttaaataaactaaattaatttttaggggagagcagtaggaaaaagagctaatgcatgcggggtttaatacctaggtgatgggttgaggtgcagcaaaaccaccatggcacacgttcacctatgtaacaaacctgcacatcctgcacatgtaccccggaacttactt

SEQ ID NO: 129051 - DNA, 1515 bp, Homo sapiens
  Payload ID: 5240
  Gene Symbol: ENOX2
  Gene Name: ecto-NOX disulfide-thiol exchanger 2
  ENST ID: ENST00000432489
  CDS Start-End: 387-1515
gccgggtctaggcctggaagcgcgaggcgggcatttcggaagagagtggcgcggcgtggggcgccgcgagggcactacgagcccaggaactgccgcgccggcccgattttccgcggctgtataaggactagcgcttcggtagccggggagctggagggaacctgatttgagatcaattcttggagaacacaaagaagtgtgatggattgaaccagctgccctttgaccctgctaacaacaacgagcccctgcagtttggtagtgccagtggccctctggtcacagaaggcctcattgagaatggaggggaatcaagcaagaaaagaaagagaacaaatactccttcagccgataacagtagaactctgaacgtggattccactgcaatgacactacctatgtctgatccaactgcatgggccacagcaatgaataatcttggaatggcaccgctgggaattgccggacaaccaattttacctgactttgatcctgctcttggaatgatgactggaattccaccaataactccaatgatgcctggtttgggaatagtacctccaccaattcctccagatatgccagtagtaaaagagatcatacactgtaaaagctgcacgctcttccctccaaatccaaatctcccacctcctgcaacccgagaaagaccaccaggatgcaaaacagtatttgtgggtggtctgcctgaaaatgggacagagcaaatcattgtggaagttttcgagcagtgtggagagatcattgccattcgcaagagcaagaagaacttctgccacattcgctttgctgaggagtacatggtggacaaagccctgtatctgtctggttaccgcattcgcctgggctctagtactgacaagaaggacacaggcagactccacgttgatttcgcacaggctcgagatgacctgtatgagtgggagtgtaaacagcgtatgctagccagagaggagcgccatcgtagaagaatggaagaagaaagattgcgtccaccatctccacccccagtggtccactattcagatcatgaatgcagcattgttgctgaaaaattaaaagatgattccaaattctcagaagctgtacagaccttgcttacctggatagagcgaggagaggtcaaccgtcgtagcgccaataacttctactccatgatccagtcggccaacagccatgtccgccgcctggtgaacgagaaagctgcccatgagaaagatatggaagaagcaaaggagaagttcaagcaggccctttctggaattctcattcaatttgagcagatagtggctgtgtaccattccgcctccaagcagaaggcatgggaccacttcacaaaagcccagcggaagaacatcagcgtgtggtgcaaacaagctgaggaaattcgcaacattcataatgatgaattaatgggaatcaggcgagaagaagaaatggaaatgtctgatgatgaaatagaagaaatgacagaaacaaaagaaactgaggaatcag

SEQ ID NO: 129052 - DNA, 2422 bp, Homo sapiens
  Payload ID: 5240
  Gene Symbol: ENOX2
  Gene Name: ecto-NOX disulfide-thiol exchanger 2
  ENST ID: ENST00000610637
  CDS Start-End: 219-1010
tggatagagcgaggagaggtcaaccgtcgtagcgccaataacttctactccatgatccagtcggccaacagccatgtccgccgcctggtgaacgagaaagctgcccatgagaaagatatggaagaagcaaaggagaagttcaagcaggccctttctggaattctcattcaatttgagcagatagtggctgtgtaccattccgcctccaagcagaaggcatgggaccacttcacaaaagcccagcgaagaacatcagcgtgtggtgcaaacaagctgaggaaattcgcaacattcataatgatgaattaatgggaatcaggcgagaagaagaaatggaaatgtctgatgatgaaatagaagaaatgacagaaacaaaagaaactgaggaatcagccttagtatcacaggcagaagctctgaaggaagaaaatgacagcctccgttggcagctcgatgcctaccggaatgaagtagaactgctcaagcaagaacaaggcaaagtccacagagaagatgaccctaacaaagaacagcagctgaaactcctgcaacaagccctgcaaggaatgcaacagcatctactcaaagtccaagaggaatacaaaaagaaagaagctgaacttgaaaaactcaaagatgacaagttacaggtggaaaaaatgttggaaaatcttaaagaaaaggaaagctgtgcttctaggctgtgtgcctcaaaccaggatagcgaataccctcttgagaagaccatgaacagcagtcctatcaaatctgaacgtgaagcactgctagtggggattatctccacattccttcatgttcacccatttggagcaagcattgaatacatctgttcctacttgcaccgtcttgataataagatctgcaccagcgatgtggagtgtctcatgggtagactccagcataccttcaagcaggaaatgactggagttggagccagcctggaaaagagatggaaattctgtggcttcgagggcttgaagctgacctaaatctctttgcctaacaacttgggatcctgaagataaatatgtgttggacaagcatagaaagtgatttatatttttaatggttttcaagtggaagttcctttgaatttgtcagttcattcctggaaaatcttttgagttaaaataaggatcctaggacagcacctcgaactacaggccctaaagagaaattgcctcaaaccacaagtgctgtaacttcctcccctttctgtcaattggttgtctttaaatattgcaaaagtcctgatgctaaacagtatttggagtgttttcagtgtctgtactactgttgtagaccttggtatttttttaaacactgttaactgaaatgttttgatgatttgtatgtgatttgtgtttctaaacttctctttacattaatgttgttactggtgaaaggcatgagagcagcactaagtcctctgtgtaactgccattgtctttccaatccccagtagaccagtaaataaataacacatcagtgtcttctagaaggtgcctgaccaggttcaccttttaaacgacaaagcatggtttgtggctttttgcaaaattactatgaaccaaaagttgacaaatgttccaaagttattttctctaacatatcacattaaagatctgtttcagaattgtaaaaagtacatctagatgtgtttacagaaagcaagtatccagtatgactggcatgtgttcatgctattcagaatcacttgtaaatagtctgcttttaaaggagggcatgttcagttttctgtgaattaaaatatgctcatgtgtgggcacacacgcacaaacacacacacgcacgcacacagtggcagaagggatttatattaatattctttcccctctggccttcttacagtctgttggtccctttgcttctgttgtcagtgtgttgaattgcaaaccgagtactgctgtaaatactatgtttacttcatgctgaatgtttgcaaagacttgatataagtattaatagtaatgaatcaatgaataaataatgagctagggtttgtgaggctttctacaaataggtcagctccacctggagtgcgaattgccagagacaccttggtagtgcccatcggcaaatcgcaatggcagcatgtgagtggaccattcagaaacttctgcttggtggaaagtaaacagagaggatggaggtttggggcgaatgtcctgaggcagagatggtctttattgtgtgtggtggtggttgtggtatttataataatgcaagcataccctcccttgagtctcaattgaagataaaagaatgtactgagcaagcaaagccaatggagagtatttcacaaaaatactttgtaaatgagatgccagtagtgttcaaagttgtatttttaaaagataaatattcctttttatacctc

SEQ ID NO: 129053 - DNA, 2035 bp, Homo sapiens
  Payload ID: 5241
  Gene Symbol: ENTPD1
  Gene Name: ectonucleoside triphosphate diphosphohydrolase 1
  Uniprot ID: P49961
  ENST ID: ENST00000371205
  CDS Start-End: 284-1816
gcttcaaggatgcaaaaaattacaacctggaaaaggcttcgagtaactttaggaaaatgagctgctggactcctcagtcaatctgtcctttctagtcaatgaaaaagacagggtttgaggttccttccgaaacggggccggctaatttagcccctcccacgagcccaagggtctgttatatctctgtttccttgaggacctctctcacggagacggaccacagcaagcagaggctgggggggggaaagacgaggaaagaggaggaaaacaaaagctgctacttatggaagatacaaaggagtctaacgtgaagacattttgctccaagaatatcctagccatccttggcttctcctctatcatagctgtgatagctttgcttgctgtggggttgacccagaacaaagcattgccagaaaacgttaagtatgggattgtgctggatgcgggttcttctcacacaagtttatacatctataagtggccagcagaaaaggagaatgacacaggcgtggtgcatcaagtagaagaatgcagggttaaaggtcctggaatctcaaaatttgttcagaaagtaaatgaaataggcatttacctgactgattgcatggaaagagctagggaagtgattccaaggtcccagcaccaagagacacccgtttacctgggagccacggcaggcatgcggttgctcaggatggaaagtgaagagttggcagacagggttctggatgtggtggagaggagcctcagcaactacccctttgacttccagggtgccaggatcattactggccaagaggaaggtgcctatggctggattactatcaactatctgctgggcaaattcagtcagaaaacaaggtggttcagcatagtcccatatgaaaccaataatcaggaaacctttggagctttggaccttgggggagcctctacacaagtcacttttgtaccccaaaaccagactatcgagtccccagataatgctctgcaatttcgcctctatggcaaggactacaatgtctacacacatagcttcttgtgctatgggaaggatcaggcactctggcagaaactggccaaggacattcaggttgcaagtaatgaaattctcagggacccatgctttcatcctggatataagaaggtagtgaacgtaagtgacctttacaagaccccctgcaccaagagatttgagatgactcttccattccagcagtttgaaatccagggtattggaaactatcaacaatgccatcaaagcatcctggagctcttcaacaccagttactgcccttactcccagtgtgccttcaatgggattttcttgccaccactccagggggattttggggcattttcagctttttactttgtgatgaagtttttaaacttgacatcagagaaagtctctcaggaaaaggtgactgagatgatgaaaaagttctgtgctcagccttgggaggagataaaaacatcttacgctggagtaaaggagaagtacctgagtgaatactgcttttctggtacctacattctctccctccttctgcaaggctatcatttcacagctgattcctgggagcacatccatttcattggcaagatccagggcagcgacgccggctggactttgggctacatgctgaacctgaccaacatgatcccagctgagcaaccattgtccacacctctctcccactccacctatgtcttcctcatggttctattctccctggtccttttcacagtggccatcataggcttgcttatctttcacaagccttcatatttctggaaagatatggtatagcaaaagcagctgaaatatgctggctggagtgaggaaaaaaatcgtccagggagcattttcctccatcgcagtgttcaaggccatccttccctgtctgccagggccagtcttgacgagtgtgaagcttccttggcttttactgaagcctttcttttggaggtattcaatatcctttgcctcaaggacttcggcagatactgtctctttcatgagtttttc

SEQ ID NO: 129054 - DNA, 1903 bp, Homo sapiens
  Payload ID: 5241
  Gene Symbol: ENTPD1
  Gene Name: ectonucleoside triphosphate diphosphohydrolase 1
  Uniprot ID: P49961
  ENST ID: ENST00000371207
  CDS Start-End: 64-1632
cctgttgctctttgctctaatgagccttgagaaaggattgctggtcatgggaccagaggctttatggggagggaagaactgttcttgactttcagtttttcgagcgggtttcaagagtctaacgtgaagacattttgctccaagaatatcctagccatccttggcttctcctctatcatagctgtgatagctttgcttgctgtggggttgacccagaacaaagcattgccagaaaacgttaagtatgggattgtgctggatgcgggttcttctcacacaagtttatacatctataagtggccagcagaaaaggagaatgacacaggcgtggtgcatcaagtagaagaatgcagggttaaaggtcctggaatctcaaaatttgttcagaaagtaaatgaaataggcatttacctgactgattgcatggaaagagctagggaagtgattccaaggtcccagcaccaagagacacccgtttacctgggagccacggcaggcatgcggttgctcaggatggaaagtgaagagttggcagacagggttctggatgtggtggagaggagcctcagcaactacccctttgacttccagggtgccaggatcattactggccaagaggaaggtgcctatggctggattactatcaactatctgctgggcaaattcagtcagaaaacaaggtggttcagcatagtcccatatgaaaccaataatcaggaaacctttggagctttggaccttgggggagcctctacacaagtcacttttgtaccccaaaaccagactatcgagtccccagataatgctctgcaatttcgcctctatggcaaggactacaatgtctacacacatagcttcttgtgctatgggaaggatcaggcactctggcagaaactggccaaggacattcaggttgcaagtaatgaaattctcagggacccatgctttcatcctggatataagaaggtagtgaacgtaagtgacctttacaagaccccctgcaccaagagatttgagatgactcttccattccagcagtttgaaatccagggtattggaaactatcaacaatgccatcaaagcatcctggagctcttcaacaccagttactgcccttactcccagtgtgccttcaatgggattttcttgccaccactccagggggattttggggcattttcagctttttactttgtgatgaagtttttaaacttgacatcagagaaagtctctcaggaaaaggtgactgagatgatgaaaaagttctgtgctcagccttgggaggagataaaaacatcttacgctggagtaaaggagaagtacctgagtgaatactgcttttctggtacctacattctctccctccttctgcaaggctatcatttcacagctgattcctgggagcacatccatttcattggcaagatccagggcagcgacgccggctggactttgggctacatgctgaacctgaccaacatgatcccagctgagcaaccattgtccacacctctctcccactccacctatgtcttcctcatggttctattctccctggtccttttcacagtggccatcataggcttgcttatctttcacaagccttcatatttctggaaagatatggtatagcaaaagcagctgaaatatgctggctggagtgaggaaaaaaatcgtccagggagcattttcctccatcgcagtgttcaaggccatccttccctgtctgccagggccagtcttgacgagtgtgaagcttccttggcttttactgaagcctttcttttggaggtattcaatatcctttgcctcaaggacttcggcagatactgtctctttcatgagtttttcccagctacacctttctcctttgtactttgtgcttgtataggttttaaagacc

SEQ ID NO: 129055 - DNA, 5044 bp, Homo sapiens
  Payload ID: 5241
  Gene Symbol: ENTPD1
  Gene Name: ectonucleoside triphosphate diphosphohydrolase 1
  Uniprot ID: P49961
  ENST ID: ENST00000453258
  CDS Start-End: 179-1732
gtgtacgtgtaaaattatgatcaaataaatttgtatgccttttctcctattaacctgccttttttgtcagcgattgtcagtgaaacttcagagggcaaaggggaagttttccttggcccctccagttttggtgctgtgaacaggataccaaagctgctctgttcttctggaagctgcaatgaagggaaccaaggacctgacaagccagcagaaggagtctaacgtgaagacattttgctccaagaatatcctagccatccttggcttctcctctatcatagctgtgatagctttgcttgctgtggggttgacccagaacaaagcattgccagaaaacgttaagtatgggattgtgctggatgcgggttcttctcacacaagtttatacatctataagtggccagcagaaaaggagaatgacacaggcgtggtgcatcaagtagaagaatgcagggttaaaggtcctggaatctcaaaatttgttcagaaagtaaatgaaataggcatttacctgactgattgcatggaaagagctagggaagtgattccaaggtcccagcaccaagagacacccgtttacctgggagccacggcaggcatgcggttgctcaggatggaaagtgaagagttggcagacagggttctggatgtggtggagaggagcctcagcaactacccctttgacttccagggtgccaggatcattactggccaagaggaaggtgcctatggctggattactatcaactatctgctgggcaaattcagtcagaaaacaaggtggttcagcatagtcccatatgaaaccaataatcaggaaacctttggagctttggaccttgggggagcctctacacaagtcacttttgtaccccaaaaccagactatcgagtccccagataatgctctgcaatttcgcctctatggcaaggactacaatgtctacacacatagcttcttgtgctatgggaaggatcaggcactctggcagaaactggccaaggacattcaggttgcaagtaatgaaattctcagggacccatgctttcatcctggatataagaaggtagtgaacgtaagtgacctttacaagaccccctgcaccaagagatttgagatgactcttccattccagcagtttgaaatccagggtattggaaactatcaacaatgccatcaaagcatcctggagctcttcaacaccagttactgcccttactcccagtgtgccttcaatgggattttcttgccaccactccagggggattttggggcattttcagctttttactttgtgatgaagtttttaaacttgacatcagagaaagtctctcaggaaaaggtgactgagatgatgaaaaagttctgtgctcagccttgggaggagataaaaacatcttacgctggagtaaaggagaagtacctgagtgaatactgcttttctggtacctacattctctccctccttctgcaaggctatcatttcacagctgattcctgggagcacatccatttcattggcaagatccagggcagcgacgccggctggactttgggctacatgctgaacctgaccaacatgatcccagctgagcaaccattgtccacacctctctcccactccacctatgtcttcctcatggttctattctccctggtccttttcacagtggccatcataggcttgcttatctttcacaagccttcatatttctggaaagatatggtatagcaaaagcagctgaaatatgctggctggagtgaggaaaaaaatcgtccagggagcattttcctccatcgcagtgttcaaggccatccttccctgtctgccagggccagtcttgacgagtgtgaagcttccttggcttttactgaagcctttcttttggaggtattcaatatcctttgcctcaaggacttcggcagatactgtctctttcatgagtttttcccagctacacctttctcctttgtactttgtgcttgtataggttttaaagacctgacacctttcataatctttgctttataaaagaacaatattgactttgtctagaagaactgagagtcttgagtcctgtgataggaggctgagctggctgaaagaagaatctcaggaactggttcagttgtactctttaagaacccctttctctctcctgtttgccatccattaagaaagccatatgatgcctttggagaaggcagacacacattccattcccagcctgctctgtgggtaggagaattttctacagtaggcaaatatgtgctaaagccaaagagttttataaggaaatatatgtgctcatgcagtcaatacagttctcaatcccacccaaagcaggtatgtcaataaatcacatattcctaggtgatacccaaatgctacagagtggaacactcagacctgagatttgcaaaaagcagatgtaaatatatgcattcaaacatcagggcttactatgaggtaggtggtatatacatgtcacaaataaaaatacagttacaactcagggtcacaaaaaatgcatcttccaatgcatatttttattatggtaaaatatacataaatataattcaccattttaacatttaattcatattaaatacgtacaaatcagtgacatttagtacattcacagtgttgtgccaccatcaccactatttagttccagaacatttgcatcatcaatacattgtctagagacaagactatcctgggtaggcagaaaccatagatcttttgtgtttacagctatggaaaccaactgtaccataaagatagttcactgagttttaaagccaagccacatcttatttttccaaggtttaatttagtgagagggcagcattagtgtggagtggcatgcttttgccctatcgtggaatttacacatcagaatgtgcaggatccaagtctgaaagtgttgccacccgtcacacaacatgggctttgtttgcttattccatgaagcagcagctatagaccttaccatggaaacatgaagagaccctgcacccctttccttaaggattgctgcaagagttacctgttgagcaggattgactggtgatgtttcattctgaccttgtcccaagctctccatctctagatctggggactgactgttgagctgatggggaaagaaaagctctcacacaaaccggaagccaaatgtcccctatctcttgaatgatcaagtcacttttgacaacatccaggtgaatataaaaacttaataaagctgtggaaaggaactcttaatcttcttttctgctacttaggttaaattcactagatcttgattaggaatcaaaattcgaattgggacatgttcaaattctttcttgtggtagttgcctatactgtcatcgctgctgttggttgagcatttgtggtgtaccacgctgtgtgctcaagggtattacattcatcttctcatttaatcctcacaacaatctgaagaaggtaggtattacaattcccacttcatagaaacagaaactgaggttcagagaggttaagtcatttgcccaaatggctgagccaaagcctaccatgtacctaacctttattttctttcccgaacataccaggctgtctcctcataacttccaagcatgcacttaaaactccacatgaatacaaggttcatgggacttggtattcatagaaagggaggcagaaagctggtctgttcctgataggcttgtaatttaatatcattctgttcatgtgctttggatggaagcacatctggcatatgatgctaatcagtggttcccatacccctggcttcctaattttaatgtttgctcacagcatagtagattgacatcaaatagtggccgatgatgatgaaaataaaggtcaaataagttgagccaataacagccgcttttttccttctgtctgcgtatacaaagcactgtcatgcacacaatctattctgaccctcacaacaacccataagggtgtaaatagtatttccattttacaaatgaggatcacacaaactactacatggcagagcagatactccaactcatgtcttctggttgaagcctattgctttttcttttctaaacactttccctcagcaagttggaattagacttcacaagtctccttcagagaacacaaatcttttcttattccattcctgtttggttgcctacgtccaatctccccctccccagagatgccaaaaaaaaaatcctttaaggtatttgggagccaaactcaacttgttaaaatctcaaattatggagacaatcagcagacacaacctaaccccaattattttggcaggaaggttggtttagaggcagatccagcaatctgctttgggccactctgggtggggtaggtgaaataagattggtcactgttaactaattttaatattggattggccattggttatcactgattaccattctcccctggattttcacccaggactcaaaacttggttctgctaaccctgttcctttatgaggaaccttttaaagattcctttataaggtgggagttttttttctatgaacctataggggagaaaaaagatcagcagaagtcattacttttttttttttttttttttttttttgagagagagtctcactccattgcccaggctggagtgcagtggtgctatctcggctcactgcaacctccgcctcctgggttcaagcaattctcctgcctcagcctcccgagtagctgggattgcaggtgcccaccaccacacccggctaatttttgtatttttagtaaagacagggtttcaccatgttggccaggctggtctccaactcccaatctcaggtgatcctattgcctcgggctcccaaagtgctgggattacaggagtgagccaccatgcctggccagaagtggttacttctgtagacaaaagaataatgctacttaatcaggctttctgtgtgacaagaaagagaaagaaaataaagaagtttcaattcatccaattcttaataagaaatatgtaaataaaattttttaaaattacacttc

SEQ ID NO: 129056 - DNA, 1579 bp, Homo sapiens
  Payload ID: 5241
  Gene Symbol: ENTPD1
  Gene Name: ectonucleoside triphosphate diphosphohydrolase 1
  Uniprot ID: P49961
  ENST ID: ENST00000543964
  CDS Start-End: 196-1404
cgagcgggtttcaagtatgggattgtgctggatgcgggttcttctcacacaagtttatacatctataagtggccagcagaaaaggagaatgacacaggcgtggtgcatcaagtagaagaatgcagggttaaaggtcctggaatctcaaaatttgttcagaaagtaaatgaaataggcatttacctgactgattgcatggaaagagctagggaagtgattccaaggtcccagcaccaagagacacccgtttacctgggagccacggcaggcatgcggttgctcaggatggaaagtgaagagttggcagacagggttctggatgtggtggagaggagcctcagcaactacccctttgacttccagggtgccaggatcattactggccaagaggaaggtgcctatggctggattactatcaactatctgctgggcaaattcagtcagaaaacaaggtggttcagcatagtcccatatgaaaccaataatcaggaaacctttggagctttggaccttgggggagcctctacacaagtcacttttgtaccccaaaaccagactatcgagtccccagataatgctctgcaatttcgcctctatggcaaggactacaatgtctacacacatagcttcttgtgctatgggaaggatcaggcactctggcagaaactggccaaggacattcaggttgcaagtaatgaaattctcagggacccatgctttcatcctggatataagaaggtagtgaacgtaagtgacctttacaagaccccctgcaccaagagatttgagatgactcttccattccagcagtttgaaatccagggtattggaaactatcaacaatgccatcaaagcatcctggagctcttcaacaccagttactgcccttactcccagtgtgccttcaatgggattttcttgccaccactccagggggattttggggcattttcagctttttactttgtgatgaagtttttaaacttgacatcagagaaagtctctcaggaaaaggtgactgagatgatgaaaaagttctgtgctcagccttgggaggagataaaaacatcttacgctggagtaaaggagaagtacctgagtgaatactgcttttctggtacctacattctctccctccttctgcaaggctatcatttcacagctgattcctgggagcacatccatttcattggcaagatccagggcagcgacgccggctggactttgggctacatgctgaacctgaccaacatgatcccagctgagcaaccattgtccacacctctctcccactccacctatgtcttcctcatggttctattctccctggtccttttcacagtggccatcataggcttgcttatctttcacaagccttcatatttctggaaagatatggtatagcaaaagcagctgaaatatgctggctggagtgaggaaaaaaatcgtccagggagcattttcctccatcgcagtgttcaaggccatccttccctgtctgccagggccagtcttgacgagtgtgaagcttccttggcttttactgaagcctttcttttggaggtattcaatatccttt

SEQ ID NO: 129057 - DNA, 1638 bp, Homo sapiens
  Payload ID: 5241
  Gene Symbol: ENTPD1
  Gene Name: ectonucleoside triphosphate diphosphohydrolase 1
  ENST ID: ENST00000635076
  CDS Start-End: 62-217
gcaagcagaggctgggggggggaaagacgaggaaagaggaggaaaacaaaagctgctacttatggaagatacaaaggagtctaacgtgaagacattttgctccaagaatatcctagccatccttggcttctcctctatcatagctgtgatagctttgcttgctgtggggttgacccagaacaaagcattgccagaaaacgttaaggatggaaagtgaagagttggcagacagggttctggatgtggtggagaggagcctcagcaactacccctttgacttccagggtgccaggatcattactggccaagaggaaggtgcctatggctggattactatcaactatctgctgggcaaattcagtcagaaaacaaggtggttcagcatagtcccatatgaaaccaataatcaggaaacctttggagctttggaccttgggggagcctctacacaagtcacttttgtaccccaaaaccagactatcgagtccccagataatgctctgcaatttcgcctctatggcaaggactacaatgtctacacacatagcttcttgtgctatgggaaggatcaggcactctggcagaaactggccaaggacattcaggttgcaagtaatgaaattctcagggacccatgctttcatcctggatataagaaggtagtgaacgtaagtgacctttacaagaccccctgcaccaagagatttgagatgactcttccattccagcagtttgaaatccagggtattggaaactatcaacaatgccatcaaagcatcctggagctcttcaacaccagttactgcccttactcccagtgtgccttcaatgggattttcttgccaccactccagggggattttggggcattttcagctttttactttgtgatgaagtttttaaacttgacatcagagaaagtctctcaggaaaaggtgactgagatgatgaaaaagttctgtgctcagccttgggaggagataaaaacatcttacgctggagtaaaggagaagtacctgagtgaatactgcttttctggtacctacattctctccctccttctgcaaggctatcatttcacagctgattcctgggagcacatccatttcattggcaagatccagggcagcgacgccggctggactttgggctacatgctgaacctgaccaacatgatcccagctgagcaaccattgtccacacctctctcccactccacctatgtcttcctcatggttctattctccctggtccttttcacagtggccatcataggcttgcttatctttcacaagccttcatatttctggaaagatatggtatagcaaaagcagctgaaatatgctggctggagtgaggaaaaaaatcgtccagggagcattttcctccatcgcagtgttcaaggccatccttccctgtctgccagggccagtcttgacgagtgtgaagcttccttggcttttactgaagcctttcttttggaggtattcaatatcctttgcctcaaggacttcggcagatactgtctctttcatgagtttttcccagctacacctttctcctttgtactttgtgcttgtataggttttaaagacctgacacctttcataatctttgctttataaaagaacaatattg

SEQ ID NO: 129058 - DNA, 773 bp, Homo sapiens
  Payload ID: 5241
  Gene Symbol: ENTPD1
  Gene Name: ectonucleoside triphosphate diphosphohydrolase 1
  ENST ID: ENST00000483213
  CDS Start-End: 278-469
tctcacggagacggaccacagcaagcagaggctgggggggggaaagacgaggaaagaggaggaaaacaaaagctgctacttatggaagatacaaaggtatgggattgtgctggatgcgggttcttctcacacaagtttatacatctataagtggccagcagaaaaggagaatgacacaggcgtggtgcatcaagtagaagaatgcagggttaaaggtcctggaatctcaaaatttgttcagaaagtaaatgaaataggcatttacctgactgattgcatggaaagagctagggaagtgattccaaggtcccagcaccaagagacacccgtttacctgggagccacggcaggcatgcggttgctcagggtgccaggatcattactggccaagaggaaggtgcctatggctggattactatcaactatctgctgggcaaattcagtcagaaaacaaggtggttcagcatagtcccatatgaaaccaataatcaggaaacctttggagctttggaccttgggggagcctctacacaagtcacttttgtaccccaaaaccagactatcgagtccccagataatgctctgcaatttcgcctctatggcaaggactacaatgtctacacacatagcttcttgtgctatgggaaggatcaggcactctggcagaaactggccaaggacattcaggttgcaagtaatgaaattctcagggacccatgctttcatcctggatataagaaggtagtgaacgtaagtgacctttacaagacccc

SEQ ID NO: 129059 - DNA, 1119 bp, Homo sapiens
  Payload ID: 5242
  Gene Symbol:
  Gene Name: Ectonucleoside triphosphate diphosphohydrolase 1 [Source:UniProtKB/Swiss-Prot Acc:P49961]
  Uniprot ID: P49961
  ENST ID: ENST00000539125
  CDS Start-End: 1-1119
atggaaagtgaagagttggcagacagggttctggatgtggtggagaggagcctcagcaactacccctttgacttccagggtgccaggatcattactggccaagaggaaggtgcctatggctggattactatcaactatctgctgggcaaattcagtcagaaaacaaggtggttcagcatagtcccatatgaaaccaataatcaggaaacctttggagctttggaccttgggggagcctctacacaagtcacttttgtaccccaaaaccagactatcgagtccccagataatgctctgcaatttcgcctctatggcaaggactacaatgtctacacacatagcttcttgtgctatgggaaggatcaggcactctggcagaaactggccaaggacattcaggttgcaagtaatgaaattctcagggacccatgctttcatcctggatataagaaggtagtgaacgtaagtgacctttacaagaccccctgcaccaagagatttgagatgactcttccattccagcagtttgaaatccagggtattggaaactatcaacaatgccatcaaagcatcctggagctcttcaacaccagttactgcccttactcccagtgtgccttcaatgggattttcttgccaccactccagggggattttggggcattttcagctttttactttgtgatgaagtttttaaacttgacatcagagaaagtctctcaggaaaaggtgactgagatgatgaaaaagttctgtgctcagccttgggaggagataaaaacatcttacgctggagtaaaggagaagtacctgagtgaatactgcttttctggtacctacattctctccctccttctgcaaggctatcatttcacagctgattcctgggagcacatccatttcattggcaagatccagggcagcgacgccggctggactttgggctacatgctgaacctgaccaacatgatcccagctgagcaaccattgtccacacctctctcccactccacctatgtcttcctcatggttctattctccctggtccttttcacagtggccatcataggcttgcttatctttcacaagccttcatatttctggaaagatatggtatag

SEQ ID NO: 129060 - DNA, 1500 bp, Homo sapiens
  Payload ID: 5243
  Gene Symbol: ENTPD2
  Gene Name: ectonucleoside triphosphate diphosphohydrolase 2
  Uniprot ID: Q9Y5L3
  ENST ID: ENST00000312665
  CDS Start-End: 22-1440
ctcccgcgcgcccgcccgcccatggccgggaaggtgcggtcactgctgccgccgctgctgctggccgccgcgggcctcgccggcctcctactgctgtgcgtccccacccgcgacgtccgggagccgcccgccctcaagtatggcatcgtcctggacgctggttcttcacacacgtccatgtttatctacaagtggccggcagacaaggagaacgacacaggcattgtgggccagcacagctcctgtgatgttccaggtgggggcatctccagctatgcagacaacccttctggggccagccagagtcttgttggatgcctcgaacaggcgcttcaggatgtgcccaaagagagacacgcgggcacacccctctacctgggagccacagcgggtatgcgcctgctcaacctgaccaatccagaggcctcgaccagtgtgctcatggcagtgactcacacactgacccagtacccctttgacttccggggtgcacgcatcctctcgggccaggaagagggggtgtttggctgggtgactgccaactacctgctggagaacttcatcaagtacggctgggtgggccggtggttccggccacggaaggggacactgggggccatggacctggggggtgcctctacccagatcacttttgagacaaccagtccagctgaggacagagccagcgaggtccagctgcatctctacggccagcactaccgagtctacacccacagcttcctctgctatggccgtgaccaggtcctccagaggctgctggccagcgccctccagacccacggcttccacccctgctggccgaggggcttttccacccaagtgctgctcggggatgtgtaccagtcaccatgcaccatggcccagcggccccagaacttcaacagcagtgccagggtcagcctgtcagggagcagtgacccccacctctgccgagatctggtttctgggctcttcagcttctcctcctgccccttctcccgatgctctttcaatggggtcttccagcccccagtggctgggaactttgtggccttctctgccttcttctacactgtggactttttgcggacttcgatggggctgcccgtggccaccctgcagcagctggaggcagccgcagtgaatgtctgcaaccagacctgggctcagcagctgctgagtcgcggctacggcttcgacgagcgcgccttcggcggcgtgatcttccagaagaaggccgcggacactgcagtgggctgggcgctcggctacatgctgaacctgaccaacctgatccccgccgacccgccggggctgcgcaagggcacagacttcagctcctgggtcgtcctcctgctgctcttcgcctccgcgctcctggctgcgcttgtcctgctgctgcgtcaggtgcactccgccaagctgccaagcaccatttaggggccgacgggggcagctgccccatccctcccccaacccctgtatccccaccccgtactc

SEQ ID NO: 129061 - DNA, 2095 bp, Homo sapiens
  Payload ID: 5243
  Gene Symbol: ENTPD2
  Gene Name: ectonucleoside triphosphate diphosphohydrolase 2
  Uniprot ID: Q9Y5L3
  ENST ID: ENST00000355097
  CDS Start-End: 49-1536
ccgcactctccgggtccacgcatcgtcctcccgcgcgcccgcccgcccatggccgggaaggtgcggtcactgctgccgccgctgctgctggccgccgcgggcctcgccggcctcctactgctgtgcgtccccacccgcgacgtccgggagccgcccgccctcaagtatggcatcgtcctggacgctggttcttcacacacgtccatgtttatctacaagtggccggcagacaaggagaacgacacaggcattgtgggccagcacagctcctgtgatgttccaggtgggggcatctccagctatgcagacaacccttctggggccagccagagtcttgttggatgcctcgaacaggcgcttcaggatgtgcccaaagagagacacgcgggcacacccctctacctgggagccacagcgggtatgcgcctgctcaacctgaccaatccagaggcctcgaccagtgtgctcatggcagtgactcacacactgacccagtacccctttgacttccggggtgcacgcatcctctcgggccaggaagagggggtgtttggctgggtgactgccaactacctgctggagaacttcatcaagtacggctgggtgggccggtggttccggccacggaaggggacactgggggccatggacctggggggtgcctctacccagatcacttttgagacaaccagtccagctgaggacagagccagcgaggtccagctgcatctctacggccagcactaccgagtctacacccacagcttcctctgctatggccgtgaccaggtcctccagaggctgctggccagcgccctccagacccacggcttccacccctgctggccgaggggcttttccacccaagtgctgctcggggatgtgtaccagtcaccatgcaccatggcccagcggccccagaacttcaacagcagtgccagggtcagcctgtcagggagcagtgacccccacctctgccgagatctggtttctgggctcttcagcttctcctcctgccccttctcccgatgctctttcaatggggtcttccagcccccagtggctgggaactttgtggccttctctgccttcttctacactgtggactttttgcggacttcgatggggctgcccgtggccaccctgcagcagctggaggcagccgcagtgaatgtctgcaaccagacctgggctcagctgcaagctcgggtgccagggcaacgggcccgcctggccgactactgcgccggggccatgttcgtgcagcagctgctgagtcgcggctacggcttcgacgagcgcgccttcggcggcgtgatcttccagaagaaggccgcggacactgcagtgggctgggcgctcggctacatgctgaacctgaccaacctgatccccgccgacccgccggggctgcgcaagggcacagacttcagctcctgggtcgtcctcctgctgctcttcgcctccgcgctcctggctgcgcttgtcctgctgctgcgtcaggtgcactccgccaagctgccaagcaccatttaggggccgacgggggcagctgccccatccctcccccaacccctgtatccccaccccgtactcccacccctcccacaacccctgtacctcccacccctgtatccccacccctccacccacccctctcccaacctctctccccgcccctgtatcctgcattcctccacccaccctctatcccccaccgctccaccccaccactgtcttctccatccttccaccccaccctcagcgtctctgcccctaaggcagcccaggaaataggaactgagactctggtacccacaggagcctgggtgggcaaagagcgctcaatccagctccttgaacccctccagcccgcttcagcctgggcatcactgcaggccccgtgctcctcctcctcctcctcagggctgggtctccagagagtggggccttggtcctgagaatcagcccttagaggctccttctgtgtagtctgggtctgtactggggagggtcacagcccacgggctggcagccagcccagcacctacttgtaaaaattttgtaataaaaagtttttcctagagacgtgaaa

SEQ ID NO: 129062 - DNA, 2819 bp, Homo sapiens
  Payload ID: 5244
  Gene Symbol: ENTPD3
  Gene Name: ectonucleoside triphosphate diphosphohydrolase 3
  Uniprot ID: O75355
  ENST ID: ENST00000301825
  CDS Start-End: 119-1708
atacccggcgccgcctcccggcgtctgagctgacacctccttagcgctggccgcgggccgcctctgcggcagcgctagtcgccttctccgaatcggctccgcacagctaggagaaaagatgttcactgtgctgacccgccaaccatgtgagcaagcaggcctcaaggccctctaccgaactccaaccatcattgccttggtggtcttgcttgtgagtattgtggtacttgtgagtatcactgtcatccagatccacaagcaagaggtcctccctccaggactgaagtatggtattgtgctggatgccgggtcttcaagaaccacagtctacgtgtatcaatggccagcagaaaaagagaataataccggagtggtcagtcaaaccttcaaatgtagtgtgaaaggctctggaatctccagctatggaaataacccccaagatgtccccagagcctttgaggagtgtatgcaaaaagtcaaggggcaggttccatcccacctccacggatccacccccattcacctgggagccacggctgggatgcgcttgctgaggttgcaaaatgaaacagcagctaatgaagtccttgaaagcatccaaagctacttcaagtcccagccctttgactttaggggtgctcaaatcatttctgggcaagaagaaggggtatatggatggattacagccaactatttaatgggaaatttcctggagaagaacctgtggcacatgtgggtgcacccgcatggagtggaaaccacgggtgccctggacttaggtggtgcctccacccaaatatccttcgtggcaggagagaagatggatctgaacaccagcgacatcatgcaggtgtccctgtatggctacgtatacacgctctacacacacagcttccagtgctatggccggaatgaggctgagaagaagtttctggcaatgctcctgcagaattctcctaccaaaaaccatctcaccaatccctgttaccctcgggattatagcatcagcttcaccatgggccatgtatttgatagcctgtgcactgtggaccagaggccagaaagttataaccccaatgatgtcatcacttttgaaggaactggggacccatctctgtgtaaggagaaggtggcttccatatttgacttcaaagcttgccatgatcaagaaacctgttcttttgatggggtttatcagccaaagattaaagggccatttgtggcttttgcaggattctactacacagccagtgctttaaatctttcaggtagcttttccctggacaccttcaactccagcacctggaatttctgctcacagaattggagtcagctcccactgctgctccccaaatttgatgaggtatatgcccgctcttactgcttctcagccaactacatctaccacttgtttgtgaacggttacaaattcacagaggagacttggccccaaatacactttgaaaaagaagtggggaatagcagcatagcctggtctcttggctacatgctcagcctgaccaaccagatcccagctgaaagccctctgatccgtctgcccatagaaccacctgtctttgtgggcaccctcgctttcttcacagcggcagccttgctgtgtctggcatttcttgcatacctgtgttcagcaaccagaagaaagaggcactccgagcatgcctttgaccatgcagtggattctgactgagccttcaaagcagctcctggagtccaatggctgcttagagtcagcctgggtggcaccaggcaatgcaggtgaagtggctgccttcaggaaatacaactaactaaaatcaaacacctaggtcacgtgcctctcaaatactgatttctgccacagcacctcttgaggcatcccttggctattctgtgcatattgttcttcagagacctcactacccacatgctgatctattggggaacagagaagagacaggccacgaaggtcaggctctttatattaagttccccagaggaagagtaagttgagaaggtatcagtttaatgttgaagaattgacctcagggctcagtttccatttccctccctcagtattcttcctggcaagatacccattaagcatttcgccaatcagaatctcattttatagtttttcccattggtctttaactaagactttcttgtagcaatctcgtaagcagtgaaccccctcagatcagtagaatatagtatctgggggagaagacttacttccttcagggcagcagccacagccaggcttctgtcatacaggtagatcccgaagcacagagacataaaaaaggtctcccagaaaactatagaccattctccaagtggaattcccacttagggctctggtcactagattgcaacctgtgtgtttgtcatcatcctcatctcaccattgtattgctatgccctcccataaaaacacattgatccctagcaagattattgcattccagattttactgcctttgctaggcttttgcttagcaaagggctgactttccattgttatcatggtgtatatatttttgtcaccattcccacaagtatacttgatgttgtcatagaacgaacatcctactctatgatttactaaccaattactttcccagatcatagacctctctgcatagtagtcataggtcttgactttggggaaagaaaaggaagctgcaggaatatttatctccaaagtcgaatgagaaagaactccagcaaatccaatggctacaaactaaaaatcagcattatttcatattgctgtttcttagctgaatatggaataaagaactattattttattttga

SEQ ID NO: 129063 - DNA, 1749 bp, Homo sapiens
  Payload ID: 5244
  Gene Symbol: ENTPD3
  Gene Name: ectonucleoside triphosphate diphosphohydrolase 3
  Uniprot ID: O75355
  ENST ID: ENST00000456402
  CDS Start-End: 160-1749
gaatcggctccgcacaggtaagatcaggggacccggcgcctgagctgccgaggaaggagtcgggggtgctgcgtgagactgagagttgggaggcaaagaaacaaaatcggatttcctcagagggccagaggaagagactgaaacacgctaggagaaaagatgttcactgtgctgacccgccaaccatgtgagcaagcaggcctcaaggccctctaccgaactccaaccatcattgccttggtggtcttgcttgtgagtattgtggtacttgtgagtatcactgtcatccagatccacaagcaagaggtcctccctccaggactgaagtatggtattgtgctggatgccgggtcttcaagaaccacagtctacgtgtatcaatggccagcagaaaaagagaataataccggagtggtcagtcaaaccttcaaatgtagtgtgaaaggctctggaatctccagctatggaaataacccccaagatgtccccagagcctttgaggagtgtatgcaaaaagtcaaggggcaggttccatcccacctccacggatccacccccattcacctgggagccacggctgggatgcgcttgctgaggttgcaaaatgaaacagcagctaatgaagtccttgaaagcatccaaagctacttcaagtcccagccctttgactttaggggtgctcaaatcatttctgggcaagaagaaggggtatatggatggattacagccaactatttaatgggaaatttcctggagaagaacctgtggcacatgtgggtgcacccgcatggagtggaaaccacgggtgccctggacttaggtggtgcctccacccaaatatccttcgtggcaggagagaagatggatctgaacaccagcgacatcatgcaggtgtccctgtatggctacgtatacacgctctacacacacagcttccagtgctatggccggaatgaggctgagaagaagtttctggcaatgctcctgcagaattctcctaccaaaaaccatctcaccaatccctgttaccctcgggattatagcatcagcttcaccatgggccatgtatttgatagcctgtgcactgtggaccagaggccagaaagttataaccccaatgatgtcatcacttttgaaggaactggggacccatctctgtgtaaggagaaggtggcttccatatttgacttcaaagcttgccatgatcaagaaacctgttcttttgatggggtttatcagccaaagattaaagggccatttgtggcttttgcaggattctactacacagccagtgctttaaatctttcaggtagcttttccctggacaccttcaactccagcacctggaatttctgctcacagaattggagtcagctcccactgctgctccccaaatttgatgaggtatatgcccgctcttactgcttctcagccaactacatctaccacttgtttgtgaacggttacaaattcacagaggagacttggccccaaatacactttgaaaaagaagtggggaatagcagcatagcctggtctcttggctacatgctcagcctgaccaaccagatcccagctgaaagccctctgatccgtctgcccatagaaccacctgtctttgtgggcaccctcgctttcttcacagcggcagccttgctgtgtctggcatttcttgcatacctgtgttcagcaaccagaagaaagaggcactccgagcatgcctttgaccatgcagtggattctgactga

SEQ ID NO: 129064 - DNA, 1658 bp, Homo sapiens
  Payload ID: 5244
  Gene Symbol: ENTPD3
  Gene Name: ectonucleoside triphosphate diphosphohydrolase 3
  Uniprot ID: O75355
  ENST ID: ENST00000445129
  CDS Start-End: 62-1420
gaggccggggcggtggacttactgacatcctgtattctctcacctgcagctaggagaaaagatgttcactgtgctgacccgccaaccatgtgagcaagcaggcctcaaggccctctaccgaactccaaccatcattgccttggtggtcttgcttgtgagtattgtggtacttgtgagtatcactgtcatccagatccacaagcaagaggtcctccctccaggactgaagtatggtattgtgctggatgccgggtcttcaagaaccacagtctacgtgtatcaatggccagcagaaaaagagaataataccggagtggtcagtcaaaccttcaaatgtagtgtgaaaggctctggaatctccagctatggaaataacccccaagatgtccccagagcctttgaggagtgtatgcaaaaagtcaaggggcaggttccatcccacctccacggatccacccccattcacctgggagccacggctgggatgcgcttgctgaggttgcaaaatgaaacagcagctaatgaagtccttgaaagcatccaaagctacttcaagtcccagccctttgactttaggggtgctcaaatcatttctgggcaagaagaaggggtatatggatggattacagccaactatttaatgggaaatttcctggagaagaacctgtggcacatgtgggtgcacccgcatggagtggaaaccacgggtgccctggacttaggtggtgcctccacccaaatatccttcgtggcaggagagaagatggatctgaacaccagcgacatcatgcaggtgtccctgtatggctacgtatacacgctctacacacacagcttccagtgctatggccggaatgaggctgagaagaagtttctggcaatgctcctgcagaattctcctaccaaaaaccatctcaccaatccctgttaccctcgggattatagcatcagcttcaccatgggccatgtatttgatagcctgtgcactgtggaccagaggccagaaagttataaccccaatgatgtcatcacttttgaaggaactggggacccatctctgtgtaaggagaaggtggcttccatatttgacttcaaagcttgccatgatcaagaaacctgttcttttgatggggtttatcagccaaagattaaagggccatttgtggcttttgcaggattctactacacagccagtgctttaaatctttcaggtagcttttccctggacaccttcaactccagcacctggaatttctgctcacagaattggagtcagctcccactgctgctccccaaatttgatgaggtatatgcccgctcttactgcttctcagccaactacatctaccacttgtttgtgaacggttacaaattcacagaggagacttggccccaaatacactttgaaaaagaagaatagctgatatgaagcctgaaggatgtctggagtcagcctgttcaataccagcttcagcaataattagattaaaccaatcaatatcctgcattaggcctctgactatctacttttacataaataaaattgagtcatctacaaaaaaataaggatgtctggagacataaggactgttggtagcatgtactctctaagctttgcttctaataaatctaattaccagtaaagtatattataagaa

SEQ ID NO: 129065 - DNA, 551 bp, Homo sapiens
  Payload ID: 5244
  Gene Symbol: ENTPD3
  Gene Name: ectonucleoside triphosphate diphosphohydrolase 3
  ENST ID: ENST00000439533
  CDS Start-End: 160-551
gaatcggctccgcacaggtaagatcaggggacccggcgcctgagctgccgaggaaggagtcgggggtgctgcgtgagactgagagttgggaggcaaagaaacaaaatcggatttcctcagagggccagaggaagagactgaaacacgctaggagaaaagatgttcactgtgctgacccgccaaccatgtgagcaagcaggcctcaaggccctctaccgaactccaaccatcattgccttggtggtcttgcttgtgagtattgtggtacttgtgagtatcactgtcatccagatccacaagcaagaggtcctccctccaggactgaagatagggtttcaccgtgttgaccaggctagtcttgaactcctgacctcaggtgatccacccacctcagcctcccagagtggtgggattataagcatgagccaccgtgcccagccgcaactaagatatggtattgtgctggatgccgggtcttcaagaaccacagtctacgtgtatcaatggccagcagaaaaagagaataataccggagtggtcagtcaaacctt

SEQ ID NO: 129066 - DNA, 2097 bp, Homo sapiens
  Payload ID: 5245
  Gene Symbol: ENTPD4
  Gene Name: ectonucleoside triphosphate diphosphohydrolase 4
  ENST ID: ENST00000356206
  CDS Start-End: 237-1952
gcaggcggtgacgtgttgccggcgggggccgggcgggggtgcggctccaggaaaggagcgcggcctccaggaagccggctggccgtgatgctgcccactggtggtcccccgctcccggggtccccggccggccaagcaggagggctctaactccgtgaggaccccagcattatttctataattgtttgtgagaaggactgaatcccagagcattgccttgttgctgacctttcagtatggggaggattggcatctcctgtctttttcctgcttcttggcattttagcatatctccagtagggtgtcctcgaattctgaataccaatttacgccaaattatggtcattagtgtcctggctgctgctgtttcacttttatatttttctgttgtcataatccgaaataagtatgggcgactaaccagagacaagaaatttcaaaggtacctggcacgagttaccgacattgaagctacagacaccaataaccccaatgtgaactatgggatcgtggtggactgtggtagcagtgggtctcgagtatttgtttactgctggccaaggcataatggcaatccacatgatctgttggatatcaggcaaatgagggataaaaaccgaaagccagtggtcatgaagataaaaccgggcatttcagaatttgctacctctccagagaaagtcagtgattacatttctccacttttgaactttgctgcagagcatgtgccacgggcaaaacacaaagagacacctctctacattctctgcacggctggaatgagaatcctccccgaaagccagcagaaagctattctggaagaccttctgaccgatatccccgtgcactttgactttctgttttctgactctcatgcagaagtaatttctgggaaacaagaaggtgtgtatgcttggattggcattaattttgtccttggacgatttgagcatattgaagatgatgatgaggccgttgtggaagttaacattcctggaagtgaaagcagcgaagccattgtccgtaaaaggacagcgggcattctcgacatgggcggcgtgtcgactcagatagcgtacgaagtccccaaaactgaagaagtagctaaaaacttgttagctgaatttaacttgggatgtgatgttcaccaaactgagcatgtgtatcgagtctatgtggccacgtttcttgggtttggtggcaatgctgctcgacagagatacgaagacagaatatttgccaacaccattcaaaagaacaggctcctgggtaaacagactggtctgactcctgatatgccgtacttggacccctgcctacccctagacattaaagatgaaatccagcaaaatggacaaaccatatacctacgagggactggagactttgacctgtgtcgagagactatccagcctttcatgaataaaacaaacgagacccagacttccctcaatggggtctaccagcccccaattcacttccagaacagtgaattctatggcttctccgaattctactactgcaccgaggatgtgttacgaatggggggagactacaatgctgctaaatttactaaagctgcaaaggattattgtgcaacaaagtggtccattttgcgggaacgctttgaccgaggactgtacgcctctcatgctgacctccacaggcttaagtatcagtgcttcaaatcggcctggatgtttgaggtgtttcataggggcttttcgtttcctgtcaactataaaagcttaaagactgccttgcaagtttacgacaaggaggttcagtggacccttggagccatcctctacaggacccgctttctaccattaaggaaaatagggatgctgataataccttgctcagggggttgtccaaagctgtgttgtgcagtatggcagccaccaccatatggggccaccaaacacttgcaatgtgctgcttggaattgagatgcgctgcaaacgcaaagtacgtgctggatttcaaagacttagtacaaaaagaaaaaagaacgcaaaacatctcattaataatttttgtattgattccatattgaaatatattgcatcaaataaaatatatctttaacattga

SEQ ID NO: 129067 - DNA, 5861 bp, Homo sapiens
  Payload ID: 5245
  Gene Symbol: ENTPD4
  Gene Name: ectonucleoside triphosphate diphosphohydrolase 4
  Uniprot ID: Q9Y227
  ENST ID: ENST00000358689
  CDS Start-End: 237-2087
gcaggcggtgacgtgttgccggcgggggccgggcgggggtgcggctccaggaaaggagcgcggcctccaggaagccggctggccgtgatgctgcccactggtggtcccccgctcccggggtccccggccggccaagcaggagggctctaactccgtgaggaccccagcattatttctataattgtttgtgagaaggactgaatcccagagcattgccttgttgctgacctttcagtatggggaggattggcatctcctgtctttttcctgcttcttggcattttagcatatctccagtagggtgtcctcgaattctgaataccaatttacgccaaattatggtcattagtgtcctggctgctgctgtttcacttttatatttttctgttgtcataatccgaaataagtatgggcgactaaccagagacaagaaatttcaaaggtacctggcacgagttaccgacattgaagctacagacaccaataaccccaatgtgaactatgggatcgtggtggactgtggtagcagtgggtctcgagtatttgtttactgctggccaaggcataatggcaatccacatgatctgttggatatcaggcaaatgagggataaaaaccgaaagccagtggtcatgaagataaaaccgggcatttcagaatttgctacctctccagagaaagtcagtgattacatttctccacttttgaactttgctgcagagcatgtgccacgggcaaaacacaaagagacacctctctacattctctgcacggctggaatgagaatcctccccgaaagccagcagaaagctattctggaagaccttctgaccgatatccccgtgcactttgactttctgttttctgactctcatgcagaagtaatttctgggaaacaagaaggtgtgtatgcttggattggcattaattttgtccttggacgatttgagcatattgaagatgatgatgaggccgttgtggaagttaacattcctggaagtgaaagcagcgaagccattgtccgtaaaaggacagcgggcattctcgacatgggcggcgtgtcgactcagatagcgtacgaagtccccaaaactgtaagctttgcgtcctcacagcaggaagaagtagctaaaaacttgttagctgaatttaacttgggatgtgatgttcaccaaactgagcatgtgtatcgagtctatgtggccacgtttcttgggtttggtggcaatgctgctcgacagagatacgaagacagaatatttgccaacaccattcaaaagaacaggctcctgggtaaacagactggtctgactcctgatatgccgtacttggacccctgcctacccctagacattaaagatgaaatccagcaaaatggacaaaccatatacctacgagggactggagactttgacctgtgtcgagagactatccagcctttcatgaataaaacaaacgagacccagacttccctcaatggggtctaccagcccccaattcacttccagaacagtgaattctatggcttctccgaattctactactgcaccgaggatgtgttacgaatggggggagactacaatgctgctaaatttactaaagctgcaaaggattattgtgcaacaaagtggtccattttgcgggaacgctttgaccgaggactgtacgcctctcatgctgacctccacaggcttaagtatcagtgcttcaaatcggcctggatgtttgaggtgtttcataggggcttttcgtttcctgtcaactataaaagcttaaagactgccttgcaagtttacgacaaggaggttcagtggacccttggagccatcctctacaggacccgctttctaccattaagagacatccagcaggaggccttccgagccagtcacacccactggcggggcgtttcctttgtctacaaccactacctgttctctggctgcttcctggtggtgctgctggccatcctgctgtacctgctgcggctgcggcgcatccacaggcgcactccccggagcagctcggccgccgccctctggatggaggagggccttcccgcccagaatgccccggggaccttgtgatccagctcacagctccacgaagactcaaaaggaaaagccatttttgcctcagggtttctcctctttattttcctgtggttttgttttttctttcccttttttgttcctccaaacaaaaacaaaatgcaggccgagcgcggtggctcacgcctgtaatcccagcactttgggaggccgaggcgggcggatcatgaggtcaggagatcgagaccatcctggctaacacggtgaaaccccgtctctactaaaaatacaaaaaattagctgggtgtggtggcgggcgcccgtagtcccagctactcaggaggctgaggcaggagaatggcatgaacctgggaggcagagcttgcagtgagccgagatcacaccactgcactccagcctgggcgacagagtgagactccgtctcaaaaaaaaaaaatgcattgtttataagccctgctgtctagaagtattgcgtttagccattttgagtacagcattaaattgaggagtggggaagagggaaattcacttgatttttgctgcacaggatatctgccaaaaataaatgagatttctggggtttctctaaggaatgttaaatttaaacacatgcactttgatactggagggaggtggaaagatgcattctgtcagtggagaggggactgaatagtgatgctttcatagaaccaaaaaacttactgcctgaaatgataatcctcttttttctctatcttgaaagctctaacctgaagagggtgatttttttttttatttattgttcaggtctgttactgtatatgttttctttgcaaatttaaattttttaaaccatttatatccaaaacagagaaacatgggcaccaggagataaccatttataaaagtgatagtgaactatcgactacagctttgtgcgagtgtgtgaaaaatcccaagaaaccagcgtgaggggaggcaatgctggttctttaaaaacacacacttcagaatttactggtacattttatttagaaaaatcctcgttactgttatcttttcctgaccgcaggtaattacgctccttattccatatttcagtggcattagaacactgtggttttgaaagaattggaaattcctagtttcaccagtttcggttttattggaactagagcacatgcccacttcttgctcagtattcctcagtgtttctgcttaatcgtgcctcagtttcttccagcttccaattggtgtttcccccaccccccttaattaaaagtcatctcagcttttaatcgtactgggagaccccatgcacagcctgccgagtcctcttcctaaccgcattgactgaggctgttgctggcagcaccactgtaaatccagaagggaagagtctgcatccaatacaggaaataaattcacattttgaaggaaaaaattcgacaatttaagccaaaatctaaaaaggacaattggattggcatatgtgagattggtgttttttcacctatttatttagttgagaagtttggggaattctcgtacagtttttttaggtggagtttgttttgtgcgagtgtctgtgtgtgctgttccctaactccagaacagttaaattcctgtagttggtagcagattagtacccagaagtggggttgttgctataacagataactgaggatattataaaagtggctttggaactaggtactgggcagaggctgggagagtttggagaaacaggagagaaaaggcctgtattgccatgaactgagcattaggggcagttctgctgagggatcagaagagaagaccaagggaattctgtcccagttgtggctcaaactgcctcaggtgcagcttaacctgcgtctctggaaggtaaaatgcatctgatccttgaggcaagagctgtgggggcatggctccctcacctggatttcaaagcgtgttaccagcagcctggggacccaggctctgcctctggatttacctgcatcgtatttgcgcttcgtggtcaaagttgttaagaaaggggtgagcttctggctacctaataagttggtcttggccacctgcctgcgacacttcctggaggagccatggattattggtggaggctgcagggagctggcgatggagccactggtgtcagcagcagagagggaagaaaggaaaggaaggggccacaaatggttgaagtgggcaggtgggcacccagggagttaggggaccccgccttccagctctgggcatagaagagttagtcacatacctgaggatcctgaaacaagggctgagaaaacctcattgctccagctgagaggtagtagtggatttgccatttttaaacagttgcctaagaaaaaacgttgaagaatatgcagcagacactatatgtggcctgtaaagcctagaatatttactaaaatatttacagaaaaagtttgctggtccttgtgagaacaatgcagttcaaaaaaggatacagacagaagcatcctcttaaatcaggaatgtagtttccatttgtgggcacgaaaagatggacaagagaagtaaccaaacttcaatcttaaaatatttgttgcaccagaatttcacttcggatttttccgtctagattattttcaagatgagttttgaaacaaaccaagaaacctgcccctcacccaaaattgtttaaaaagagaccactcaagggagttcattatgccgtatggagatgtctgcagtcgcagcaaatcacattccagagaaggtctcgcgtaggtgaagacagccaggtgctttctctaagagatacagggtgggtgagagacaagccagggaggatcttaattcaagagaagaattcataccaagagctgaccaagaaggcagtaaattctgtgtacttgtagcagaagaaattggactaggaacttgcccaaagctttatcaaagaaaagcattgtgttcaatcttggtagaaacatgccagcaataagtgcttatgttccatagccatatcatgggcttctcacttttaaacctcctccaggggatgttctcagacatttcacaatccctctggggacattacagtagaagagaaacacatggaactgtaccagtgctttttgcccatgttcatcctaagctccggctttaggcagtgctttctgacctgggcggagtgaagacgctgctggtggctgaggccagtaacatggggcccctgcccagccaccctgaaggctgggtaggtccctcttttcaccaccagttttccacatctgtgtactctagattaacaaactctggataaacagatatttacattttaaactcaggcctacacagagtagttttccttataaggagcatgtatcacttagcaagaaactaaaaatggcaaatgagtttttcatcctttaagaaaaaaatcagctttagaattctctgcggtcagttgtgtgcaatgcaacaaaactacctttcagtaaattacttagttatttatttcagtgttttgtttcttttgatactaagtttccctttcaataatgaatgatgtgaccaaccaaggagaatttgtttgttctgtactaaaattatattttacagttaggaattataaaaagcaagggagcatctttaaatgttttttgtttaagcgatgtcttccatccaaagtaagaataatactctcggaaggtccttttggtgtcatgtcacttgctgtatgtggcagccttacagtgccacacttgggtactgaaaaatcaataaaacgaaagttcatcatcccatggcccgtag

SEQ ID NO: 129068 - DNA, 2063 bp, Homo sapiens
  Payload ID: 5245
  Gene Symbol: ENTPD4
  Gene Name: ectonucleoside triphosphate diphosphohydrolase 4
  Uniprot ID: Q9Y227
  ENST ID: ENST00000417069
  CDS Start-End: 237-2063
gcaggcggtgacgtgttgccggcgggggccgggcgggggtgcggctccaggaaaggagcgcggcctccaggaagccggctggccgtgatgctgcccactggtggtcccccgctcccggggtccccggccggccaagcaggagggctctaactccgtgaggaccccagcattatttctataattgtttgtgagaaggactgaatcccagagcattgccttgttgctgacctttcagtatggggaggattggcatctcctgtctttttcctgcttcttggcattttagcatatctccagtagggtgtcctcgaattctgaataccaatttacgccaaattatggtcattagtgtcctggctgctgctgtttcacttttatatttttctgttgtcataatccgaaataagtatgggcgactaaccagagacaagaaatttcaaaggtacctggcacgagttaccgacattgaagctacagacaccaataaccccaatgtgaactatgggatcgtggtggactgtggtagcagtgggtctcgagtatttgtttactgctggccaaggcataatggcaatccacatgatctgttggatatcaggcaaatgagggataaaaaccgaaagccagtggtcatgaagataaaaccgggcatttcagaatttgctacctctccagagaaagtcagtgattacatttctccacttttgaactttgctgcagagcatgtgccacgggcaaaacacaaagagacacctctctacattctctgcacggctggaatgagaatcctccccgaaagccagcagaaagctattctggaagaccttctgaccgatatccccgtgcactttgactttctgttttctgactctcatgcagaagtaatttctgggaaacaagaaggtgtgtatgcttggattggcattaattttgtccttggacgatttgagcatattgaagatgatgatgaggccgttgtggaagttaacattcctggaagtgaaagcagcgaagccattgtccgtaaaaggacagcgggcattctcgacatgggcggcgtgtcgactcagatagcgtacgaagtccccaaaactgaagaagtagctaaaaacttgttagctgaatttaacttgggatgtgatgttcaccaaactgagcatgtgtatcgagtctatgtggccacgtttcttgggtttggtggcaatgctgctcgacagagatacgaagacagaatatttgccaacaccattcaaaagaacaggctcctgggtaaacagactggtctgactcctgatatgccgtacttggacccctgcctacccctagacattaaagatgaaatccagcaaaatggacaaaccatatacctacgagggactggagactttgacctgtgtcgagagactatccagcctttcatgaataaaacaaacgagacccagacttccctcaatggggtctaccagcccccaattcacttccagaacagtgaattctatggcttctccgaattctactactgcaccgaggatgtgttacgaatggggggagactacaatgctgctaaatttactaaagctgcaaaggattattgtgcaacaaagtggtccattttgcgggaacgctttgaccgaggactgtacgcctctcatgctgacctccacaggcttaagtatcagtgcttcaaatcggcctggatgtttgaggtgtttcataggggcttttcgtttcctgtcaactataaaagcttaaagactgccttgcaagtttacgacaaggaggttcagtggacccttggagccatcctctacaggacccgctttctaccattaagagacatccagcaggaggccttccgagccagtcacacccactggcggggcgtttcctttgtctacaaccactacctgttctctggctgcttcctggtggtgctgctggccatcctgctgtacctgctgcggctgcggcgcatccacaggcgcactccccggagcagctcggccgccgccctctggatggaggagggccttcccgcccagaatgccccggggaccttgtga

SEQ ID NO: 129069 - DNA, 351 bp, Homo sapiens
  Payload ID: 5245
  Gene Symbol: ENTPD4
  Gene Name: ectonucleoside triphosphate diphosphohydrolase 4
  ENST ID: ENST00000519839
  CDS Start-End: 1-351
tatttgtttactgctggccaaggcataatggcaatccacatgatctgttggatatcaggcaaatgagggataaaaaccgaaagccagtggtcatgaagataaaaccggagcatgtgccacgggcaaaacacaaagagacacctctctacattctctgcacggctggaatgagaatcctccccgaaagccagcagaaagctattctggaagaccttctgaccgatatccccgtgcactttgactttctgttttctgactctcatgcagaagtaatttctgggaaacaagaaggtgtgtatgcttggattggcattaattttgtccttggacgatttgagcatattgaagatg

SEQ ID NO: 129070 - DNA, 566 bp, Homo sapiens
  Payload ID: 5245
  Gene Symbol: ENTPD4
  Gene Name: ectonucleoside triphosphate diphosphohydrolase 4
  ENST ID: ENST00000518718
  CDS Start-End: 186-566
aggaaaggagcgcggcctccaggaagccggctggccgtgatgctgcccactggtggtcccccgctcccggggtccccggccggccaagcaggattggcatctcctgtctttttcctgcttcttggcattttagcatatctccagtagggtgtcctcgaattctgaataccaatttacgccaaattatggtcattagtgtcctggctgctgctgtttcacttttatatttttctgttgtcataatccgaaataagtatgggcgactaaccagagacaagaaatttcaaaggtacctggcacgagttaccgacattgaagctacagacaccaataaccccaatgtgaactatgggatcgtggtggactgtggtagcagtgggtctcgagtatttgtttactgctggccaaggcataatggcaatccacatgatctgttggatatcaggcaaatgagggataaaaaccgaaagccagtggtcatgaagataaaaccgggcatttcagaatttgctacctctccagagaaagtcagtgattacatttctccacttttgaactttgctgca

SEQ ID NO: 129071 - DNA, 790 bp, Homo sapiens
  Payload ID: 5245
  Gene Symbol: ENTPD4
  Gene Name: ectonucleoside triphosphate diphosphohydrolase 4
  ENST ID: ENST00000518471
  CDS Start-End: 1-645
acaaacgagacccagacttccctcaatggggtctaccagcccccaattcacttccagaacagtgaattctatggcttctccgaattctactactgcaccgaggatgtgttacgaatggggggagactacaatgctgctaaatttactaaagctgcaaaggattattgtgcaacaaagtggtccattttgcgggaacgctttgaccgaggactgtacgcctctcatgctgacctccacaggcttaagtatcagtgcttcaaatcggcctggatgtttgaggtgtttcataggggcttttcgtttcctgtcaactataaaagcttaaagactgccttgcaagtttacgacaaggaggttcagtggacccttggagccatcctctacaggacccgctttctaccattaagccatcggagaccagagccgccccctctgctcgagaaaggggctcagcggcggcggaagcggagggggaccaccgtggagagcgcggtcccagcccggccactgcggatccctgaaaccaagaaaatagggatgctgataataccttgctcagggggttgtccaaagctgtgttgtgcagtatggcagccaccaccatatggggccaccaaacacttgcaatgtgctgcttggaattgagatgcgctgcaaacgcaaagtacgtgctggatttcaaagacttagtacaaaaagaaaaaagaacgcaaaacatctcattaataatttttgtattgattccatattgaaatatattgcatcaaataaaatatatctttaacattga

SEQ ID NO: 129072 - DNA, 5842 bp, Homo sapiens
  Payload ID: 5246
  Gene Symbol: ENTPD5
  Gene Name: ectonucleoside triphosphate diphosphohydrolase 5
  Uniprot ID: O75356
  ENST ID: ENST00000334696
  CDS Start-End: 321-1607
tagcccaggcgccgcggcgcgcggggtggggcggaggtcgcgccgagggcggcgggctgccgcgcaagggtggcgcgcgcgcgttttccttgttcctggtcaacaaagaaatgtggagtgtcttggctgaatcctcatacagacaagatcattatggtgctgttaggtaggacttgtatccagatgtaaggttgaaaaagtgatataataaaggaaccaaggagaaaattcagaaggaaagaaaaaattgcctctgcaggtgtgcgagcaggattgcttctgcaacaaaagcctccacccagccacatcttgggaaaagaatggccacttcttggggcacagtctttttcatgctggtggtatcctgtgtttgcagcgctgtctcccacaggaaccagcagacttggtttgagggtatcttcctgtcttccatgtgccccatcaatgtcagcgccagcaccttgtatggaattatgtttgatgcagggagcactggaactcgaattcatgtttacacctttgtgcagaaaatgccaggacagcttccaattctagaaggggaagtttttgattctgtgaagccaggactttctgcttttgtagatcaacctaagcagggtgctgagaccgttcaagggctcttagaggtggccaaagactcaatcccccgaagtcactggaaaaagaccccagtggtcctaaaggcaacagcaggactacgcttactgccagaacacaaagccaaggctctgctctttgaggtaaaggagatcttcaggaagtcacctttcctggtaccaaagggcagtgttagcatcatggatggatccgacgaaggcatattagcttgggttactgtgaattttctgacaggtcagctgcatggccacagacaggagactgtggggaccttggacctagggggagcctccacccaaatcacgttcctgccccagtttgagaaaactctggaacaaactcctaggggctacctcacttcctttgagatgtttaacagcacttataagctctatacacatagttacctgggatttggattgaaagctgcaagactagcaaccctgggagccctggagacagaagggactgatgggcacactttccggagtgcctgtttaccgagatggttggaagcagagtggatctttgggggtgtgaaataccagtatggtggcaaccaagaaggggaggtgggctttgagccctgctatgccgaagtgctgagggtggtacgaggaaaacttcaccagccagaggaggtccagagaggttccttctatgctttctcttactattatgaccgagctgttgacacagacatgattgattatgaaaaggggggtattttaaaagttgaagattttgaaagaaaagccagggaagtgtgtgataacttggaaaacttcacctcaggcagtcctttcctgtgcatggatctcagctacatcacagccctgttaaaggatggctttggctttgcagacagcacagtcttacagctcacaaagaaagtgaacaacatagagacgggctgggccttgggggccacctttcacctgttgcagtctctgggcatctcccattgaggccacgtacttccttggagacctgcatttgccaacacctttttaaggggaggagagagcacttagtttctgaactagtctggggacatcctggacttgagcctagagatttaggtttaattaattttacacatctaatgtgaactgctgcctaaccactcaagagtacacagctggcaccagagcatcacagagagccctgtgagccaaaaagtatagttttggaacttaaccttggagtgagagcccagggacaggtccctggaaaccaaagaaaaatcgcatttcaaccctttgagtgcctcattccactgaatatttaaattttcctcttaaatggtaaactgacttattgcaatcccaagacccatcaatatcagtatttttttcctccctatacagtgccctgcccacccttatctgcacccacctcccctgaaaaagagagaaaaaaaaaaacctggttttgctttccatgtataattcaacaacgcaaaatgggaccatgtcagaatctgtatgatcctattctgtgttagctccaatcagccagctgagagccatcctaaatattaataggatgagagagtaactcctaactgtgcataaattacagccttaagaaagaaggccacccggtctctggggacatgttttgggagggtgtggctgcctcatatagcctacctttgctttaatcagcattttatcagtcaactctgggattaatgaacatatccgactttatgggtatgtgtatattcagtgccagtaccacctcccaggctaatgtgttaacagtgttttctatgattctaaacttgttttctttgtatttctaagaaatacaactaggccctaacttttggtctgtggtcagaggtcagtgtctgtgctattccaggatctattatttcagtttgcccttttattctctccgtttgtaacagtaccttcctgtcctggtccctgatcactttagctaatatcctttgaattatttatctagttcagagtttccaataccgttcctgacaaaaccccacttggatttggttggctctctcagcccacatcagtacagtggaccaacatttccagggagaaccatatttaatgtccctcatgctctctttttgaatccaagtgctcagagctcttgactgtgaattatttaccccaaattcattatcttgcacttttttttgagatggagtcttgctctgttgctcaggctagagtggagtggcgcaatctcagctcactgcaacctccgcccccaggttcaagcgattcttgttctcagcctcctgaagagctgggattacaggtgcccaccaccattcctggctaatttttgtatttgtagtagagatggggtttcaccatgttggccaggctggtttccaactcctgatctcaattgatccacccgcttcccaaagtgctgggattacaggcatgagacaccgcgcctggccttatcttgcactttcaacataatcatccctgcttctcatctgccctgcagtgctcttggacctggaagatctccctgtggtctggcccctttgccttggttgttaacctccagcttctttgcaggagtgtatttccccaaaacttgtggctttcacagtagactccgtttccatcctctctctcacaaaggatgttaagtatgcctggccctcacacagtccatgggaaaccttatttttaacattactccattgagtcaataaatatttaccatctgctgtgtgcaagttactaggcaaatttctgtatccttgtccctaaaattcttgtctttaaattcattgtggaatttctttagacttcacactgacttttattactaaggtcacctttataccaactgccttcctcaaaatgcttataatgaaataacagaatcttgagttggaaacagcccaaagaaataatccaatgttgtactcagtgcagaattccctagaatttctaacaggttgtcattcagcttctgctaagccatgttcaaacagcttattccatttggaactgcactgatattaaaaaaaattccttatattgagctgaaatctacctatcttctaagtggtcttagttctgctctaatctctccttccaaaatctttggatcttttgaaaaaagttcctcccaagttcttttataagtgacatgacttttagaccccttcccatctttgtcaacaaaagtagggtgccagaccagtcacagaacactaaatgtcatccatgtttccttcagtagaaaccagcagttttaaaagaggtaagctgtgttcactaaagactgttccagcttgacaaatgcagagatataagtctctggtctttaatcactgtgggggccattttgtaaaacacacatactgtccagcagactcctttggtcatcccaaatacctctgaactccagggaagatgcattctaactccacgaacttacctattttgttaaccttgattagaccttctggagaagtaaccaatttgtccatcttaggagcaatttggaatgagagtttttatttttttctgtaacgcccatcctgcctgcagtagaccctttgggcttaagaggtcctacagattctaatagtttcctctttgtagatgtgttaacatatttaaaatacttaggacatggcctggtacgtgacagatggtgtttaacatcattgtcatatgaagaacactctctgtgggccaatggaggtgtgccttaaaattcttcatcttgcctgattttgtttgcataacttctggagagtctgtgtcctcctcatctaggccacctttccattttttgtgaaagatgaccttgtccctgcagtctccgccaggagtcacacagcttttcacagcagctgccatctttaattctttttcctgagattccagcaaggttgtgacattgtcacttttttgttctagactcttttaaattttctgcatttgcctgaaaagcacccctgtaagaatagatttctcatggctctaaaaattattcccaagaataccttacttggttcaaaagcagactgtttctcttcatttcatctcaaatcagacttctgggcaagatgttctttagagtaagcaaacctacaacctaaaaatctcttcaagaggcatctctggtcttgtgacgagacctcttcaaaaacccacagtaaaactcccctccctccagttggccaccagtctgccaccaaacatgaacaaattctgctgctaatcggtttcccttgtgatctggttcctgaggtcttcggatctgtgcaatgaattatttattgttttattaaaccgacagtggtgtcccagagaggaaccataaataaaatggaaatctggtgctgtgataaagtaataactagcattaatgagacctggttttcctttcagaaagtccagtatacctgtaacaaaggttaaagcaatttatatttaatttgcattctgatgttaacatttaaacagcaattctaacaaaaatgcatcgagtctaattcttacctctatcaaaaaacaactgtataaatttatgaccaacattaaaacaaaaacaaaatgtaaattttctctttagaaatgattaactggaaatgagtgagacagcaccttgtgggttttttagtaataaaaagctcttttcaaccaaattgtaagtcttccttcgaagttttttcctttggtctggctaatatacgctcctcacagcaaattatcattcattatttgggtgccacaggcccattaagcaaagaagaaaaagagaattttaatgtaaagtaagtttattaaattaaataagatcttgaaaatatgtatgatgggtcctgggcaggatgttctttttcatcaacgtaatctttctttaggagaggagtactcatttgcttgcaaaggccataatctgttcctggagaaaaaataaaagtgaatgaaactcttaacacagtaaggtgaagaaaataattattgtagataataatcacgtaggtattcttcccaagtgtccttgttttatttcagctaaaaaaagaaaaatatacatacatatacacacgttttagagacagggtctcactctgttgactgggctggagtgcagtggtgtgatcatagctcactgcagcctcaaactcctaggctcaagcaatcctccctccccagcctcctataaagtgctgggatta

SEQ ID NO: 129073 - DNA, 1437 bp, Homo sapiens
  Payload ID: 5246
  Gene Symbol: ENTPD5
  Gene Name: ectonucleoside triphosphate diphosphohydrolase 5
  ENST ID: ENST00000556242
  CDS Start-End: 299-574
ggggtggggcggaggtcgcgccgagggcggcgggctgccgcgcaagggtggcgcgcgcgcgttttccttgttcctggtcaacaaagaaatgtggagtgtcttggctgaatcctcatacagacaagatcattatggtgctgttaggtaggacttgtatccagatgtaaggttgaaaaagtgatataataaaggaaccaaggagaaaattcagaaggaaagaaaaaattgcctctgcaggtgtgcgagcaggattgcttctgcaacaaaagcctccacccagccacatcttgggaaaagaatggccacttcttggggcacagtctttttcatgctggtggtatcctgtgtttgcagcgctgtctcccacaggaaccagcagacttggtttgagggtatcttcctgtcttccatgtgccccatcaatgtcagcgccagcaccttgtatggaattatgtttgatgcagggagcactggaactcgaattcatgtttacacctttgtgcagaaaatgccaggtcacttatggagcctggggaaaggtggaggagttaggtgtccaccagagaaatggtagcagaaatggaccctcagaggttgctctagtccttctttccagtactcctgcaagacattcctcacaactaggatcatttgggataacttcagggaagtcataggaaaacttacagagacagagcccagcatctgaagcagcctaacttttggtaaccagctctctcttctgttttgttccatggacaaaataggacagcttccaattctagaaggggaagtttttgattctgtgaagccaggactttctgcttttgtagatcaacctaagcaggtgagtttcttatgatttgatgtttagattctcaatgccttgataacttgaccacaccactgctgttaaatatttcatgctattcactaatgagattgagatcatgtgtgagatcagctttctctcctcagctaatctcctggataaaattaattacatttcccacgctcatgagggctgggtggaagaaggctagaaaattggttgtggtaatgcaaggatgacactagcttttaagagattactccctatgtacttactgtttaaaattttgagttgaagccatcagttgtatttgttcatgtaagcgcagaagataaacatgaagttctgtagggtatgatgtataaacatggcagttgaaggcatggtgagcagtgaattccatttcagagtgccttgatgcaggatggaaccatatctatacttgagaaattaggcaacaacccatgatgacaaaaatctttggtggtagaagatgaatagagagtttgtggcgactatatttcacatttgagcatctacaacatactacatcctatgtgtctgaggccatgttgaaataaaatagaataatgcagaatgttaaa

SEQ ID NO: 129074 - DNA, 691 bp, Homo sapiens
  Payload ID: 5246
  Gene Symbol: ENTPD5
  Gene Name: ectonucleoside triphosphate diphosphohydrolase 5
  ENST ID: ENST00000555829
  CDS Start-End: 1-242
tctatgctttctcttactattatgaccgagctgttgacacagacatgattgattatgaaaaggggggtattttaaaagttgaagattttgaaagaaaagccagggaagtgtgtgataacttggaaaacttcacctcaggcagtcctttcctgtgcatggatctcagctacatcacagccctgttaaaggatggctttggctttgcagacagcacagtcttacaggctgccgtactgaggtgatgggccaagctggagatatccccaaagcccatgttgacaccctgtcctgcaagcggatggactctgtgggctgcatccctaagaataaagcagagttcaggtgtgacctctggcagcaaagtgagaagggagtggccctgctctgttatcgtcttacccaatgagcgccacccgaggcctgacgtactcagcagcatgtcccaacccaagaggaaacagaactcggcttttggcatccaccctggctacgcttgggggcagctggcgagccgagaccttagtgggcttcagaaggctgacagcatactgcagcatggcaccagctgtgtcgatgaagtccgtgtggtcagcatcactccactgagcagcatcagccacaagacaaacaaggtgaaatgtgagtagcagggaattaaaaattcaataaagaaaccttgtttgtaaccaaa

SEQ ID NO: 129075 - DNA, 904 bp, Homo sapiens
  Payload ID: 5246
  Gene Symbol: ENTPD5
  Gene Name: ectonucleoside triphosphate diphosphohydrolase 5
  ENST ID: ENST00000553284
  CDS Start-End: 272-904
agagaaaaagagagtaagggaggagggaaggatagagaagggagtgagttagcaaaatgccacactgttagttgcaaactggcacaaaggtgaatgcggttcatgaggctcgcttgattaagaagagctgaaacaggagcaaagagcaaaaggcaacctgcagcgaaagcaaggactcagggaaccggcagacacaagcagcctctgcaggtgtgcgagcaggattgcttctgcaacaaaagcctccacccagccacatcttgggaaaagaatggccacttcttggggcacagtctttttcatgctggtggtatcctgtgtttgcagcgctgtctcccacaggaaccagcagacttggtttgagggtatcttcctgtcttccatgtgccccatcaatgtcagcgccagcaccttgtatggaattatgtttgatgcagggagcactggaactcgaattcatgtttacacctttgtgcagaaaatgccaggacagcttccaattctagaaggggaagtttttgattctgtgaagccaggactttctgcttttgtagatcaacctaagcagggtgctgagaccgttcaagggctcttagaggtggccaaagactcaatcccccgaagtcactggaaaaagaccccagtggtcctaaaggcaacagcaggactacgcttactgccagaacacaaagccaaggctctgctctttgaggtaaaggagatcttcaggaagtcacctttcctggtaccaaagggcagtgttagcatcatggatggatccgacgaaggcatattagcttgggttactgtgaattttctgacaggtcagctgcatggccacagacaggagactgtggggaccttggacctagggggagcctccacccaaatcacgttcctgccc

SEQ ID NO: 129076 - DNA, 3096 bp, Homo sapiens
  Payload ID: 5246
  Gene Symbol: ENTPD5
  Gene Name: ectonucleoside triphosphate diphosphohydrolase 5
  ENST ID: ENST00000557325
  CDS Start-End: 353-1576
ttccttgttcctggtcaacaaagaaatgtggagtgtcttggctgaatcctcatacagacaagatcattatggtgctgttaggtaggacttgtatccagatgtaaggttgaaaaagtgatataataaaggaaccaaggagaaaattcagaaggaaagaaaaaattggtctcactctgtcaccgaggctggagtacagtggtgcaatcacagctcacggcagcttcaaactcctgggctcaagcgatcctcctgcctcaccctcccgagtagctgagactacagcctctgcaggtgtgcgagcaggattgcttctgcaacaaaagcctccacccagccacatcttgggaaaagaatggccacttcttggggcacagtctttttcatgctggtggtatcctgtgtttgcagcgctgtctcccacaggaaccagcagacttggtttgagggtatcttcctgtcttccatgtgccccatcaatgtcagcgccagcaccttgtatggaattatgtttgatgcagggagcactggaactcgaattcatgtttacacctttgtgcagaaaatgccaggacagcttccaattctagaaggggaagtttttgattctgtgaagccaggactttctgcttttgtagatcaacctaagcagggtgctgagaccgttcaagggctcttagaggtggccaaagactcaatcccccgaagtcactggaaaaagaccccagtggtcctaaaggcaacagcaggactacgcttactgccagaacacaaagccaaggctctgctctttgaggtaaaggagatcttcaggaagtcacctttcctggtaccaaagggcagtgttagcatcatggatggatccgacgaaggcatattagcttgggttactgtgaattttctgacaggtcagctgcatggccacagacaggagactgtggggaccttggacctagggggagcctccacccaaatcacgttcctgccccagtttgagaaaactctggaacaaactcctaggggctacctcacttcctttgagatgtttaacagcacttataagctctatacacatagttacctgggatttggattgaaagctgcaagactagcaaccctgggagccctggagacagaagggactgatgggcacactttccggagtgcctgtttaccgagatggttggaagcagagtggatctttgggggtgtgaaataccagtatggtggcaaccaagaaggggaggtgggctttgagccctgctatgccgaagtgctgagggtggtacgaggaaaacttcaccagccagaggaggtccagagaggttccttctatgctttctcttactattatgaccgagctgttgacacagacatgattgattatgaaaaggggggtattttaaaagttgaagattttgaaagaaaagccagggaagtgtgtgataacttggaaaacttcacctcaggcagtcctttcctgtgcatggatctcagctacatcacagccctgttaaaggatggctttggctttgcagacagcacagtcttacagcacatcatcagctgggtaaattgatactcacaaaggcagagttaacggcatccacaaatttttcctcatccatgctaactagctctgctgcatgttcatgggacgtggaccaaaccaaggaactcaaggtgtctgagagctgtgtcaaaagaacaccaataccaacggctaagactctgctgcacttggaaactctcaagcataaaaagacaaaaagggaacttacaaacagcctgggcagattcccttgaaaccagaaaaaggctgagagaaagtgaagaggaaaggcttgcatgcatgtgggcggactggtcagaaggacctcttaccgggagcagagcaataggcccagagggaagaaatctctgccaggctacgttgttttctgtggcctgcaacagagaggagaaaagtttctctgtgaagtacctagtgcctatgaataaagtccccagatggcagctcaggatcttacctctgataaatgcagagtagccacaacagcagactggtcatagttccagctcacattctggattccaacagcctgccgtactccggagttgtgaccatctgcacctatctgcatggacacatgagcctgctaagtcttccagcctcttcataaactgcttcagaagtttttctctgctccctaaagtttcctccagctctgattgttgtgtggcaggataattccatcaggcctgcttcactcacagcccctagaggtggagcccctgcactgtcacatcagcctcagccaacagagccaaagctggacatgactgaacaggtgccagccatgagttaaactcagccaggccctcctgatatttgaactagagagcaataaggaaagtttcagtatggggcacacactggagctgaatagttctgatgtagggttaggaatggctaccatgcaaaaagggaagcttgtgagcagaaaggagaaaaatgagaggcaagagatcaatgaccacagactcctcagagggaaagaacagcctccattcccaacactctggtgcctgtcctgtgaggcccagctatctgttatttcacaacctaagacggcccatgagattgctccctgtacaggatttacgatgagaccatctccacttgagctggcctgaataggtactggtcctcataaccaaaagttttgcctaaaattaaactatagcttaaatcgaaaaccagagtccctagaatctaggataagatgtagatatacaagacccctagcaaaataagaatcttcaactaccaacaatttggtctggaaggtgctgccatcacctagggtaatatgaacccaagggctggagtcggccataggaaatggacaaggccaggtatagcgaatggctttgctcctgtagagaaccgtcactcggtctggggaggtcaaaagagaggaaaaaaaattagaaaggtgggccacataggctgaggaaaaagccataactaaacctaaagcaaggtcccaggacagcagtgtcttgtcatttaagattaaaaaaatcagtaattaa

SEQ ID NO: 129077 - DNA, 2708 bp, Homo sapiens
  Payload ID: 5247
  Gene Symbol: ENTPD6
  Gene Name: ectonucleoside triphosphate diphosphohydrolase 6 (putative)
  Uniprot ID: O75354
  ENST ID: ENST00000354989
  CDS Start-End: 173-1576
gtgacgccacgtgcatggggcggagcccaggccctagggaatcgtggggtcgtatcccgcgggtggaggccggggtggcgccggccggggcgggggagcccaaaagaccggctgccgcctgctccccggaaaagggcactcgtctccgtgggtgtggcggagcgcgcggtgcatgcagccgcagcacggtccttggcaaacaaggatgagaaaaatatccaaccacgggagcctgcgggtggcgaaggtggcataccccctggggctgtgtgtgggcgtgttcatctatgttgcctacatcaagtggcaccgggccaccgccacccaggccttcttcagcatcaccagggcagccccgggggcccggtggggtcagcaggcccacagccccctggggacagctgcagacgggcacgaggtcttctacgggatcatgtttgatgcaggaagcactggcacccgagtacacgtcttccagttcacccggccccccagagaaactcccacgttaacccacgaaaccttcaaagcactgaagccaggtctttctgcctatgctgatgatgttgaaaagagcgctcagggaatccgggaactactggatgttgctaaacaggacattccgttcgacttctggaaggccacccctctggtcctcaaggccacagctggcttacgcctgttacctggagaaaaggcccagaagttactgcagaaggtgaaaaaagtatttaaagcatcgcctttccttgtaggggatgactgtgtttccatcatgaacggaacagatgaaggcgtttcggcgtggatcaccatcaacttcctgacaggcagcttgaaaactccaggagggagcagcgtgggcatgctggacttgggcggaggatccactcagatcgccttcctgccacgcgtggagggcaccctgcaggcctccccacccggctacctgacggcactgcggatgtttaacaggacctacaagctctattcctacagctacctcgggctcgggctgatgtcggcacgcctggcgatcctgggcggcgtggaggggcagcctgctaaggatggaaaggagttggtcagcccttgcttgtctcccagtttcaaaggagagtgggaacacgcagaagtcacgtacagggtttcagggcagaaagcagcggcaagcctgcacgagctgtgtgctgccagagtgtcagaggtccttcaaaacagagtgcacaggacggaggaagtgaagcatgtggacttctatgctttctcctactattacgaccttgcagctggtgtgggcctcatagatgcggagaagggaggcagcctggtggtgggggacttcgagatcgcagccaagtacgtgtgtcggaccctggagacacagccgcagagcagccccttctcatgcatggacctcacctacgtcagcctgctactccaggagttcggctttcccaggagcaaagtgctgaagctcactcggaaaattgacaatgttgagaccagctgggctctgggggccatttttcattacatcgactccctgaacagacagaagagtccagcctcatagtggccgagccatccctgtccccgtcagcagtgtctgtgtgtctgcataaaccctcctgtcctggacgtgacttcatcctgaggagccacagcacaggccgtgctggcactttctgcacactggctctgggacttgcagaaggcctggtgctgccctggcatcagcctcttccagtcacatctggccagagggctgtctggacctgggccctgctcaatgccacctgtctgcctgggctccaagtgggcaggaccaggacagaaccacaggcacacactgagggggcagtgtggctccctgcctgtcccatccccatgccccgtccgcggggctgtggctgctgctgtgcatgtccctgcgatgggagtcttgtctcccagcctgtcagtttcctccccagggcagagctccccttcctgcaagagtctgggaggcggtgcaggctgtcctggctgctctggggaagccgagggacagccataacacccccgggacagtaggtctgggcggcaccactgggaactctggacttgagtgtgtttgcctcttccttgggtatgaatgtgtgagttcacccagaggcctgctctcctcacacattgtgtggtttggggttaatgatggagggagacacctcctcatagacggcaggtgcccacctttcagggagtctcccagcatgggcggatgccgggcatgagctgctgtaaactatttgtggctgtgctgcttgagtgacgtctctgtcgtgtgggtgccaagtgcttgtgtagaaactgtgttctgagcccccttttctggacaccaactgtgtcctgtgaatgtatcgctactgtgagctgttcccgcctagccagggccatgtcttaggtgcagctgtgccacgggtcagctgagccacagtcccagaaccaagctctcggtgtctcgggccaccatccgcccacctcgggctgaccccacctcctccatggacagtgtgagccccgggccgtgcatcctgctcagtgtggcgtcagtgtcggggctgagccccttgagctgcttcagtgaatgtacagtgcccggcacgagctgaacctcatgtgttccactcccaataaaaggttgacaggggcttctccttctctgg

SEQ ID NO: 129078 - DNA, 2766 bp, Homo sapiens
  Payload ID: 5247
  Gene Symbol: ENTPD6
  Gene Name: ectonucleoside triphosphate diphosphohydrolase 6 (putative)
  Uniprot ID: O75354
  ENST ID: ENST00000360031
  CDS Start-End: 183-1634
acgtgcatggggcggagcccaggccctagggaatcgtggggtcgtatcccgcgggtggaggccggggtggcgccggccggggcgggggagcccaaaagaccggctgccgcctgctccccggaaaagggcactcgtctccgtgggtgtggcggagcgcgcggtgcatggaatgggctatgtgaatgaaaaaaggtatccgttatgaaacttccagaaaaacgagctacatttttcagccgcagcacggtccttggcaaacaaggatgagaaaaatatccaaccacgggagcctgcgggtggcgaaggtggcataccccctggggctgtgtgtgggcgtgttcatctatgttgcctacatcaagtggcaccgggccaccgccacccaggccttcttcagcatcaccagggcagccccgggggcccggtggggtcagcaggcccacagccccctggggacagctgcagacgggcacgaggtcttctacgggatcatgtttgatgcaggaagcactggcacccgagtacacgtcttccagttcacccggccccccagagaaactcccacgttaacccacgaaaccttcaaagcactgaagccaggtctttctgcctatgctgatgatgttgaaaagagcgctcagggaatccgggaactactggatgttgctaaacaggacattccgttcgacttctggaaggccacccctctggtcctcaaggccacagctggcttacgcctgttacctggagaaaaggcccagaagttactgcagaaggtgaaaaaagtatttaaagcatcgcctttccttgtaggggatgactgtgtttccatcatgaacggaacagatgaaggcgtttcggcgtggatcaccatcaacttcctgacaggcagcttgaaaactccaggagggagcagcgtgggcatgctggacttgggcggaggatccactcagatcgccttcctgccacgcgtggagggcaccctgcaggcctccccacccggctacctgacggcactgcggatgtttaacaggacctacaagctctattcctacagctacctcgggctcgggctgatgtcggcacgcctggcgatcctgggcggcgtggaggggcagcctgctaaggatggaaaggagttggtcagcccttgcttgtctcccagtttcaaaggagagtgggaacacgcagaagtcacgtacagggtttcagggcagaaagcagcggcaagcctgcacgagctgtgtgctgccagagtgtcagaggtccttcaaaacagagtgcacaggacggaggaagtgaagcatgtggacttctatgctttctcctactattacgaccttgcagctggtgtgggcctcatagatgcggagaagggaggcagcctggtggtgggggacttcgagatcgcagccaagtacgtgtgtcggaccctggagacacagccgcagagcagccccttctcatgcatggacctcacctacgtcagcctgctactccaggagttcggctttcccaggagcaaagtgctgaagctcactcggaaaattgacaatgttgagaccagctgggctctgggggccatttttcattacatcgactccctgaacagacagaagagtccagcctcatagtggccgagccatccctgtccccgtcagcagtgtctgtgtgtctgcataaaccctcctgtcctggacgtgacttcatcctgaggagccacagcacaggccgtgctggcactttctgcacactggctctgggacttgcagaaggcctggtgctgccctggcatcagcctcttccagtcacatctggccagagggctgtctggacctgggccctgctcaatgccacctgtctgcctgggctccaagtgggcaggaccaggacagaaccacaggcacacactgagggggcagtgtggctccctgcctgtcccatccccatgccccgtccgcggggctgtggctgctgctgtgcatgtccctgcgatgggagtcttgtctcccagcctgtcagtttcctccccagggcagagctccccttcctgcaagagtctgggaggcggtgcaggctgtcctggctgctctggggaagccgagggacagccataacacccccgggacagtaggtctgggcggcaccactgggaactctggacttgagtgtgtttgcctcttccttgggtatgaatgtgtgagttcacccagaggcctgctctcctcacacattgtgtggtttggggttaatgatggagggagacacctcctcatagacggcaggtgcccacctttcagggagtctcccagcatgggcggatgccgggcatgagctgctgtaaactatttgtggctgtgctgcttgagtgacgtctctgtcgtgtgggtgccaagtgcttgtgtagaaactgtgttctgagcccccttttctggacaccaactgtgtcctgtgaatgtatcgctactgtgagctgttcccgcctagccagggccatgtcttaggtgcagctgtgccacgggtcagctgagccacagtcccagaaccaagctctcggtgtctcgggccaccatccgcccacctcgggctgaccccacctcctccatggacagtgtgagccccgggccgtgcatcctgctcagtgtggcgtcagtgtcggggctgagccccttgagctgcttcagtgaatgtacagtgcccggcacgagctgaacctcatgtgttccactcccaataaaaggttgacaggggcttctccttctctgg

SEQ ID NO: 129079 - DNA, 2750 bp, Homo sapiens
  Payload ID: 5247
  Gene Symbol: ENTPD6
  Gene Name: ectonucleoside triphosphate diphosphohydrolase 6 (putative)
  Uniprot ID: O75354
  ENST ID: ENST00000376652
  CDS Start-End: 164-1618
caggccctagggaatcgtggggtcgtatcccgcgggtggaggccggggtggcgccggccggggcgggggagcccaaaagaccggctgccgcctgctccccggaaaagggcactcgtctccgtgggtgtggcggagcgcgcggtgcatggaatgggctatgtgaatgaaaaaaggtatccgttatgaaacttccagaaaaacgagctacatttttcagcagccgcagcacggtccttggcaaacaaggatgagaaaaatatccaaccacgggagcctgcgggtggcgaaggtggcataccccctggggctgtgtgtgggcgtgttcatctatgttgcctacatcaagtggcaccgggccaccgccacccaggccttcttcagcatcaccagggcagccccgggggcccggtggggtcagcaggcccacagccccctggggacagctgcagacgggcacgaggtcttctacgggatcatgtttgatgcaggaagcactggcacccgagtacacgtcttccagttcacccggccccccagagaaactcccacgttaacccacgaaaccttcaaagcactgaagccaggtctttctgcctatgctgatgatgttgaaaagagcgctcagggaatccgggaactactggatgttgctaaacaggacattccgttcgacttctggaaggccacccctctggtcctcaaggccacagctggcttacgcctgttacctggagaaaaggcccagaagttactgcagaaggtgaaaaaagtatttaaagcatcgcctttccttgtaggggatgactgtgtttccatcatgaacggaacagatgaaggcgtttcggcgtggatcaccatcaacttcctgacaggcagcttgaaaactccaggagggagcagcgtgggcatgctggacttgggcggaggatccactcagatcgccttcctgccacgcgtggagggcaccctgcaggcctccccacccggctacctgacggcactgcggatgtttaacaggacctacaagctctattcctacagctacctcgggctcgggctgatgtcggcacgcctggcgatcctgggcggcgtggaggggcagcctgctaaggatggaaaggagttggtcagcccttgcttgtctcccagtttcaaaggagagtgggaacacgcagaagtcacgtacagggtttcagggcagaaagcagcggcaagcctgcacgagctgtgtgctgccagagtgtcagaggtccttcaaaacagagtgcacaggacggaggaagtgaagcatgtggacttctatgctttctcctactattacgaccttgcagctggtgtgggcctcatagatgcggagaagggaggcagcctggtggtgggggacttcgagatcgcagccaagtacgtgtgtcggaccctggagacacagccgcagagcagccccttctcatgcatggacctcacctacgtcagcctgctactccaggagttcggctttcccaggagcaaagtgctgaagctcactcggaaaattgacaatgttgagaccagctgggctctgggggccatttttcattacatcgactccctgaacagacagaagagtccagcctcatagtggccgagccatccctgtccccgtcagcagtgtctgtgtgtctgcataaaccctcctgtcctggacgtgacttcatcctgaggagccacagcacaggccgtgctggcactttctgcacactggctctgggacttgcagaaggcctggtgctgccctggcatcagcctcttccagtcacatctggccagagggctgtctggacctgggccctgctcaatgccacctgtctgcctgggctccaagtgggcaggaccaggacagaaccacaggcacacactgagggggcagtgtggctccctgcctgtcccatccccatgccccgtccgcggggctgtggctgctgctgtgcatgtccctgcgatgggagtcttgtctcccagcctgtcagtttcctccccagggcagagctccccttcctgcaagagtctgggaggcggtgcaggctgtcctggctgctctggggaagccgagggacagccataacacccccgggacagtaggtctgggcggcaccactgggaactctggacttgagtgtgtttgcctcttccttgggtatgaatgtgtgagttcacccagaggcctgctctcctcacacattgtgtggtttggggttaatgatggagggagacacctcctcatagacggcaggtgcccacctttcagggagtctcccagcatgggcggatgccgggcatgagctgctgtaaactatttgtggctgtgctgcttgagtgacgtctctgtcgtgtgggtgccaagtgcttgtgtagaaactgtgttctgagcccccttttctggacaccaactgtgtcctgtgaatgtatcgctactgtgagctgttcccgcctagccagggccatgtcttaggtgcagctgtgccacgggtcagctgagccacagtcccagaaccaagctctcggtgtctcgggccaccatccgcccacctcgggctgaccccacctcctccatggacagtgtgagccccgggccgtgcatcctgctcagtgtggcgtcagtgtcggggctgagccccttgagctgcttcagtgaatgtacagtgcccggcacgagctgaacctcatgtgttccactcccaataaaaggttgacaggggcttctccttctctgg

SEQ ID NO: 129080 - DNA, 2100 bp, Homo sapiens
  Payload ID: 5247
  Gene Symbol: ENTPD6
  Gene Name: ectonucleoside triphosphate diphosphohydrolase 6 (putative)
  ENST ID: ENST00000376666
  CDS Start-End: 1-886
ggtcctcaaggccacagctggcttacgcctgttacctggagaaaaggcccagaagttactgcagaaggtgaaaaaagtatttaaagcatcgcctttccttgtaggggatgactgtgtttccatcatgaacggaacagatgaaggcgtttcggcgtggatcaccatcaacttcctgacaggcagcttgaaaactccaggagggagcagcgtgggcatgctggacttgggcggaggatccactcagatcgccttcctgccacgcgtggagggcaccctgcaggcctccccacccggctacctgacggcactgcggatgtttaacaggacctacaagctctattcctacagctacctcgggctcgggctgatgtcggcacgcctggcgatcctgggcggcgtggaggggcagcctgctaaggatggaaaggagttggtcagcccttgcttgtctcccagtttcaaaggagagtgggaacacgcagaagtcacgtacagggtttcagggcagaaagcagcggcaagcctgcacgagctgtgtgctgccagagtgtcagaggtccttcaaaacagagtgcacaggacggaggaagtgaagcatgtggacttctatgctttctcctactattacgaccttgcagctggtgtgggcctcatagatgcggagaagggaggcagcctggtggtgggggacttcgagatcgcagccaagtacggtgggagtcacctggagcgtgaagggacgtgtctcatccccagtgtgtcggaccctggagacacagccgcagagcagccccttctcatgcatggacctcacctacgtcagcctgctactccaggagttcggctttcccaggagcaaagtgctgaagctcactcggaaaattgacaatgttgagaccagctgggctctgggggccatttttcattacatcgactccctgaacagacagaagagtccagcctcatagtggccgagccatccctgtccccgtcagcagtgtctgtgtgtctgcataaaccctcctgtcctggacgtgacttcatcctgaggagccacagcacaggccgtgctggcactttctgcacactggctctgggacttgcagaaggcctggtgctgccctggcatcagcctcttccagtcacatctggccagagggctgtctggacctgggccctgctcaatgccacctgtctgcctgggctccaagtgggcaggaccaggacagaaccacaggcacacactgagggggcagtgtggctccctgcctgtcccatccccatgccccgtccgcggggctgtggctgctgctgtgcatgtccctgcgatgggagtcttgtctcccagcctgtcagtttcctccccagggcagagctccccttcctgcaagagtctgggaggcggtgcaggctgtcctggctgctctggggaagccgagggacagccataacacccccgggacagtaggtctgggcggcaccactgggaactctggacttgagtgtgtttgcctcttccttgggtatgaatgtgtgagttcacccagaggcctgctctcctcacacattgtgtggtttggggttaatgatggagggagacacctcctcatagacggcaggtgcccacctttcagggagtctcccagcatgggcggatgccgggcatgagctgctgtaaactatttgtggctgtgctgcttgagtgacgtctctgtcgtgtgggtgccaagtgcttgtgtagaaactgtgttctgagcccccttttctggacaccaactgtgtcctgtgaatgtatcgctactgtgagctgttcccgcctagccagggccatgtcttaggtgcagctgtgccacgggtcagctgagccacagtcccagaaccaagctctcggtgtctcgggccaccatccgcccacctcgggctgaccccacctcctccatggacagtgtgagccccgggccgtgcatcctgctcagtgtggcgtcagtgtcggggctgagccccttgagctgcttcagtgaatgtacagtgcccggcacgagctgaacctcatgtgttccactcccaataaaaggttgacaggggcttctccttctctgg

SEQ ID NO: 129081 - DNA, 940 bp, Homo sapiens
  Payload ID: 5247
  Gene Symbol: ENTPD6
  Gene Name: ectonucleoside triphosphate diphosphohydrolase 6 (putative)
  ENST ID: ENST00000433417
  CDS Start-End: 1-940
ggaatcgtggggtcgtatcccgcgggtggaggccggggtggcgccggccggggcgggggagcccaaaagaccggctgccgcctgctccccggaaaagggcactcgtctccgtgggtgtggcggagcgcgcggtgcatgaaactcccacgttaacccacgaaaccttcaaagcactgaagccaggtctttctgcctatgctgatgatgttgaaaagagcgctcagggaatccgggaactactggatgttgctaaacaggacattccgttcgacttctggaaggccacccctctggtcctcaaggccacagctggcttacgcctgttacctggagaaaaggcccagaagttactgcagaaggtgaaaaaagtatttaaagcatcgcctttccttgtaggggatgactgtgtttccatcatgaacggaacagatgaaggcgtttcggcgtggatcaccatcaacttcctgacaggcagcttgaaaactccaggagggagcagcgtgggcatgctggacttgggcggaggatccactcagatcgccttcctgccacgcgtggagggcaccctgcaggcctccccacccggctacctgacggcactgcggatgtttaacaggacctacaagctctattcctacagctacctcgggctcgggctgatgtcggcacgcctggcgatcctgggcggcgtggaggggcagcctgctaaggatggaaaggagttggtcagcccttgcttgtctcccagtttcaaaggagagtgggaacacgcagaagtcacgtacagggtttcagggcagaaagcagcggcaagcctgcacgagctgtgtgctgccagagtgtcagaggtccttcaaaacagagtgcacaggacggaggaagtgaagcatgtggacttctatgctttctcctactattacgaccttgcagctggtgtggg

SEQ ID NO: 129082 - DNA, 656 bp, Homo sapiens
  Payload ID: 5247
  Gene Symbol: ENTPD6
  Gene Name: ectonucleoside triphosphate diphosphohydrolase 6 (putative)
  ENST ID: ENST00000418890
  CDS Start-End: 73-656
caaaagaccggctgccgcctgctccccggaaaagggcactcgtctccgtgggtgtggcggagcgcgcggtgcatgcagccgcagcacggtccttggcaaacaaggatgagaaaaatatccaaccacgggagcctgcgggtggcgaaggtggcataccccctggggctgtgtgtgggcgtgttcatctatgttgcctacatcaagtggcaccgggccaccgccacccaggccttcttcagcatcaccagggcagccccgggggcccggtggggtcagcaggcccacagccccctggggacagctgcagacgggcacgaggtcttctacgggatcatgtttgatgcaggaagcactggcacccgagtacacgtcttccagttcacccggccccccagagaaactcccacgttaacccacgaaaccttcaaagcactgaagccaggtctttctgcctatgctgatgatgttgaaaaggtgaaaaaagtatttaaagcatcgcctttccttgtaggggatgactgtgtttccatcatgaacggaacagatgaaggcgtttcggcgtggatcaccatcaacttcctgacaggcagcttgaaaactccaggagggagcagcgtgggcatgctggacttgggcggaggatccactcagatcgc

SEQ ID NO: 129083 - DNA, 945 bp, Homo sapiens
  Payload ID: 5247
  Gene Symbol: ENTPD6
  Gene Name: ectonucleoside triphosphate diphosphohydrolase 6 (putative)
  ENST ID: ENST00000425813
  CDS Start-End: 45-945
cgtgggtgtggcggagcgcgcggtgcatggaatgggctatgtgaatgaaaaaaggtatccgttatgaaacttccagaaaaacgagctacatttttcagcagccgcagcacggtccttggcaaacaaggatgagaaaaatatccaaccacgggagcctgcgggtggcgaaggtggcataccccctggggctgtgtgtgggcgtgttcatctatgttgcctacatcaagtggcaccgggccaccgccacccaggccttcttcagcatcaccagggcagccccgggggcccggtggggtcagcaggcccacagccccctggggacagctgcagacgggcacgaggtcttctacgggatcatgtttgatgcaggaagcactggcacccgagtacacgtcttccagttcacccggccccccagagaaactcccacgttaacccacgaaaccttcaaagcactgaagccaggtctttctgcctatgctgatgatgttgaaaaggtgaaaaaagtatttaaagcatcgcctttccttgtaggggatgactgtgtttccatcatgaacggaacagatgaaggcgtttcggcgtggatcaccatcaacttcctgacaggcagcttgaaaactccaggagggagcagcgtgggcatgctggacttgggcggaggatccactcagatcgccttcctgccacgcgtggagggcaccctgcaggcctccccacccggctacctgacggcactgcggatgtttaacaggacctacaagctctattcctacagctacctcgggctcgggctgatgtcggcacgcctggcgatcctgggcggcgtggaggggcagcctgctaaggatggaaaggagttggtcagcccttgcttgtctcccagtttcaaaggagagtgggaacacgcagaagtcacgtacagggtttcagggcagaaagcag

SEQ ID NO: 129084 - DNA, 809 bp, Homo sapiens
  Payload ID: 5247
  Gene Symbol: ENTPD6
  Gene Name: ectonucleoside triphosphate diphosphohydrolase 6 (putative)
  ENST ID: ENST00000417467
  CDS Start-End: 130-809
gtggggtcgtatcccgcgggtggaggccggggtggcgccggccggggcgggggagcccaaaagaccggctgccgcctgctccccggaaaagggcactcgtctccgtgggtgtggcggagcgcgcggtgcatgccgcagcacggtccttggcaaacaaggatgagaaaaatatccaaccacgggagcctgcgggtggcgaaggtggcataccccctggggctgtgtgtgggcgtgttcatctatgttgcctacatcaagtggcaccgggccaccgccacccaggccttcttcagcatcaccagggcagccccgggggcccggtggggtcagcaggcccacagccccctggggacagctgcagacgggcacgaggtcttctacgggatcatgtttgatgcaggaagcactggcacccgagtacacgtcttccagttcacccggccccccagagaaactcccacgttaacccacgaaaccttcaaagcactgaagccaggtctttctgcctatgctgatgatgttgaaaaggtgaaaaaagtatttaaagcatcgcctttccttgtaggggatgactgtgtttccatcatgaacggaacagatgaaggcgtttcggcgtggatcaccatcaacttcctgacaggcagcttgaaaactccaggagggagcagcgtgggcatgctggacttgggcggaggatccactcagatcgccttcctgccacgcgtggagggcaccctgcaggcctccccacccggctacctgacggcactgcggatgtttaacaggacctacaagctctattcctacag

SEQ ID NO: 129085 - DNA, 878 bp, Homo sapiens
  Payload ID: 5247
  Gene Symbol: ENTPD6
  Gene Name: ectonucleoside triphosphate diphosphohydrolase 6 (putative)
  ENST ID: ENST00000435520
  CDS Start-End: 315-878
ccaaaagaccggctgccgcctgctccccggaaaagggcactcgtctccgtgggtgtggcggagcgcgcggtgcatgcccgcttttgcggacccgcccccagtctgcgtcagggacagacccctccgccctggatgagcccggcggggaagcttcgcgtagcagtttctgggaaacagcgtgcatggcaggcatttgcattcatgacccttccgtgtacttgaactgaaaacctgaagaaactggccaacagattaggcagccatcaatccacatcagatggcccctgtatttccaagaggaatgggctatgtgaatgaaaaaaggtatccgttatgaaacttccagaaaaacgagctacatttttcagccgcagcacggtccttggcaaacaaggatgagaaaaatatccaaccacgggagcctgcgggtggcgaaggtggcataccccctggggctgtgtgtgggcgtgttcatctatgttgcctacatcaagtggcaccgggccaccgccacccaggccttcttcagcatcaccagggcagccccgggggcccggtggggtcagcaggcccacagccccctggggacagctgcagacgggcacgaggtcttctacgggatcatgtttgatgcaggaagcactggcacccgagtacacgtcttccagttcacccggccccccagagaaactcccacgttaacccacgaaaccttcaaagcactgaagccaggtctttctgcctatgctgatgatgttgaaaagagcgctcagggaatccgggaactactggatgttgctaaacaggacattccgttcgacttctggaaggccacccctctggtcctcaaggccacagctggcttacgcctgttacct

SEQ ID NO: 129086 - DNA, 451 bp, Homo sapiens
  Payload ID: 5247
  Gene Symbol: ENTPD6
  Gene Name: ectonucleoside triphosphate diphosphohydrolase 6 (putative)
  ENST ID: ENST00000427553
  CDS Start-End: 1-451
ggccggggcgggggagcccaaaagaccggctgccgcctgctccccggaaaagggcactcgtctccgtgggtgtggcggagcgcgcggtgcatgaaactcccacgttaacccacgaaaccttcaaagcactgaagccaggtctttctgcctatgctgatgatgttgaaaaggtgaaaaaagtatttaaagcatcgcctttccttgtaggggatgactgtgtttccatcatgaacggaacagatgaaggcgtttcggcgtggatcaccatcaacttcctgacaggcagcttgaaaactccaggagggagcagcgtgggcatgctggacttgggcggaggatccactcagatcgccttcctgccacgcgtggagggcaccctgcaggcctccccacccggctacctgacggcactgcggatgtttaacaggacctacaagctctattcctacag

SEQ ID NO: 129087 - DNA, 2654 bp, Homo sapiens
  Payload ID: 5247
  Gene Symbol: ENTPD6
  Gene Name: ectonucleoside triphosphate diphosphohydrolase 6 (putative)
  ENST ID: ENST00000433259
  CDS Start-End: 127-1440
ggaggccggggtggcgccggccggggcgggggagcccaaaagaccggctgccgcctgctccccggaaaagggcactcgtctccgtgggtgtggcggagcgcgcggtgcatggaatgggctatgtgaatgaaaaaaggtatccgttatgaaacttccagaaaaacgagctacatttttcagcagccgcagcacggtccttggcaaacaaggatgagaaaaatatccaaccacgggagcctgcgggtggcgaaggtggcataccccctggggctgtgtgtgggcgtgttcatctatgttgcctacatcaagtggcaccgggccaccgccacccaggccttcttcagcatcaccagggcagccccgggggcccggtggggtcagcaggcccacagccccctggggacagctgcagacgggcacgaggtcttctacgggatcatgtttgatgcaggaagcactggcacccgagtacacgtcttccagttcacccggccccccagagaaactcccacgttaacccacgaaaccttcaaagcactgaagccaggtctttctgcctatgctgatgatgttgaaaagagcgctcagggaatccgggaactactggatgttgctaaacaggacattccgttcgacttctggaaggccacccctctggtcctcaaggccacagctggcttacgcctgttacctggagaaaaggcccagaagttactgcagaaggtgaaaaaagtatttaaagcatcgcctttccttgtaggggatgactgtgtttccatcatgaacggaacagatgaaggcgtttcggcgtggatcaccatcaacttcctgacaggcagcttgaaaactccaggagggagcagcgtgggcatgctggacttgggcggaggatccactcagatcgccttcctgccacgcgtggagggcaccctgcaggcctccccacccggctacctgacggcactgcggatgtttaacaggacctacaagctctattcctacagctacctcgggctcgggctgatgtcggcacgcctggcgatcctgggcggcgtggaggggcagcctgcggcaagcctgcacgagctgtgtgctgccagagtgtcagaggtccttcaaaacagagtgcacaggacggaggaagtgaagcatgtggacttctatgctttctcctactattacgaccttgcagctggtgtgggcctcatagatgcggagaagggaggcagcctggtggtgggggacttcgagatcgcagccaagtacggtgggagtcacctggagcgtgaagggacgtgtctcatccccagtgtgtcggaccctggagacacagccgcagagcagccccttctcatgcatggacctcacctacgtcagcctgctactccaggagttcggctttcccaggagcaaagtgctgaagctcactcggaaaattgacaatgttgagaccagctgggctctgggggccatttttcattacatcgactccctgaacagacagaagagtccagcctcatagtggccgagccatccctgtccccgtcagcagtgtctgtgtgtctgcataaaccctcctgtcctggacgtgacttcatcctgaggagccacagcacaggccgtgctggcactttctgcacactggctctgggacttgcagaaggcctggtgctgccctggcatcagcctcttccagtcacatctggccagagggctgtctggacctgggccctgctcaatgccacctgtctgcctgggctccaagtgggcaggaccaggacagaaccacaggcacacactgagggggcagtgtggctccctgcctgtcccatccccatgccccgtccgcggggctgtggctgctgctgtgcatgtccctgcgatgggagtcttgtctcccagcctgtcagtttcctccccagggcagagctccccttcctgcaagagtctgggaggcggtgcaggctgtcctggctgctctggggaagccgagggacagccataacacccccgggacagtaggtctgggcggcaccactgggaactctggacttgagtgtgtttgcctcttccttgggtatgaatgtgtgagttcacccagaggcctgctctcctcacacattgtgtggtttggggttaatgatggagggagacacctcctcatagacggcaggtgcccacctttcagggagtctcccagcatgggcggatgccgggcatgagctgctgtaaactatttgtggctgtgctgcttgagtgacgtctctgtcgtgtgggtgccaagtgcttgtgtagaaactgtgttctgagcccccttttctggacaccaactgtgtcctgtgaatgtatcgctactgtgagctgttcccgcctagccagggccatgtcttaggtgcagctgtgccacgggtcagctgagccacagtcccagaaccaagctctcggtgtctcgggccaccatccgcccacctcgggctgaccccacctcctccatggacagtgtgagccccgggccgtgcatcctgctcagtgtggcgtcagtgtcggggctgagccccttgagctgcttcagtgaatgtacagtgcccggcacgagctgaacctcatgtgttccactcccaataaaaggttgacaggggcttctccttctctgg

SEQ ID NO: 129088 - DNA, 932 bp, Homo sapiens
  Payload ID: 5247
  Gene Symbol: ENTPD6
  Gene Name: ectonucleoside triphosphate diphosphohydrolase 6 (putative)
  ENST ID: ENST00000447877
  CDS Start-End: 1-932
caggaagcactggcacccgagtacacgtcttccagttcacccggccccccagagaaactcccacgttaacccacgaaaccttcaaagcactgaagccaggtctttctgcctatgctgatgatgttgaaaagagcgctcagggaatccgggaactactggatgttgctaaacaggacattccgttcgacttctggaaggccacccctctggtcctcaaggccacagctggcttacgcctgttacctggagaaaaggcccagaagttactgcagaaggtgaaaaaagtatttaaagcatcgcctttccttgtaggggatgactgtgtttccatcatgaacggaacagatgaaggcgtttcggcgtggatcaccatcaacttcctgacaggcagcttgaaaactccaggagggagcagcgtgggcatgctggacttgggcggaggatccactcagatcgccttcctgccacgcgtggagggcaccctgcaggcctccccacccggctacctgacggcactgcggatgtttaacaggacctacaagctctattcctacagctacctcgggctcgggctgatgtcggcacgcctggcgatcctgggcggcgtggaggggcagcctgcggcaagcctgcacgagctgtgtgctgccagagtgtcagaggtccttcaaaacagagtgcacaggacggaggaagtgaagcatgtggacttctatgctttctcctactattacgaccttgcagctggtgtgggcctcatagatgcggagaagggaggcagcctggtggtgggggacttcgagatcgcagccaagtacgtgtgtcggaccctggagacacagccgcagagcagccccttctcatgcatggacctcacctacgtcagcctgctactccaggagttcggctttcccaggagcaaagtgctgaag

SEQ ID NO: 129089 - DNA, 1028 bp, Homo sapiens
  Payload ID: 5247
  Gene Symbol: ENTPD6
  Gene Name: ectonucleoside triphosphate diphosphohydrolase 6 (putative)
  ENST ID: ENST00000439162
  CDS Start-End: 140-1028
ctagggaatcgtggggtcgtatcccgcgggtggaggccggggtggcgccggccggggcgggggagcccaaaagaccggctgccgcctgctccccggaaaagggcactcgtctccgtgggtgtggcggagcgcgcggtgcatgccgcagcacggtccttggcaaacaaggatgagaaaaatatccaaccacgggagcctgcgggtggcgaaggtggcataccccctggggctgtgtgtgggcgtgttcatctatgttgcctacatcaagtggcaccgggccaccgccacccaggccttcttcagcatcaccagggcagccccgggggcccggtggggtcagcaggcccacagccccctggggacagctgcagacgggcacgaggtcttctacgggatcatgtttgatgcaggaagcactggcacccgagtacacgtcttccagttcacccggccccccagagaaactcccacgttaacccacgaaaccttcaaagcactgaagccaggtctttctgcctatgctgatgatgttgaaaagagcgctcagggaatccgggaactactggatgttgctaaacaggacattccgttcgacttctggaaggccacccctctggtcctcaaggccacagctggcttacgcctgttacctggagaaaaggcccagaagttactgcagaaggtgaaaaaagtatttaaagcatcgcctttccttgtaggggatgactgtgtttccatcatgaacggaacagatgaaggcgtttcggcgtggatcaccatcaacttcctgacaggcagcttgaaaactccaggagggagcagcgtgggcatgctggacttgggcggaggatccactcagatcgccttcctgccacgcgtggagggcaccctgcaggcctccccacccggctacctgacggcactgcggatgtttaacaggacctacaagctctattcctacagctacctcgggctcgggctgatgtcggcacgcctggcgatcctgggcggcgtggaggggcagcctg

SEQ ID NO: 129090 - DNA, 3550 bp, Homo sapiens
  Payload ID: 5248
  Gene Symbol: ENTPD7
  Gene Name: ectonucleoside triphosphate diphosphohydrolase 7
  Uniprot ID: Q9NQZ7
  ENST ID: ENST00000370489
  CDS Start-End: 179-1993
cttccggctgggcaaggggccgcggggagcagctcgggactgaaccgagaggtgccgaaggaaccggcgggccgcttgatcccgctgcagacgtaggagatgcctgggacaaggaggccaccttctcagggcaaaagaaaaagaaggtgacaggcgttgagaccaccgaagggaacccatggctaggatcagtttttcctacctctgcccagcctcctggtacttcactgtgcccacagtgagtccatttctccgtcagcgggtggcattcctgggactcttcttcatatcctgtctccttttacttatgttaatcatagactttcgacattggagtgcttcattaccacgagataggcaatacgaaaggtatttggctcgagtaggggagcttgaagctactgacactgaagacccaaatctgaattatggacttgttgttgactgtggcagcagtggttcccggatttttgtttatttctggccaagacataatgggaacccccatgacttgctggacatcaaacagatgagagaccgcaacagccaaccagtggttaaaaaaatcaagccaggaatctctgcaatggcagacactccagaacatgccagtgattaccttcgtcctctgctgagctttgctgctgctcatgtgcctgtgaagaagcacaaggagacccctctttacatcctctgcacagcaggcatgaggcttctccctgagaggaagcagttggctatcttggctgacctagtgaaagatttaccactggagtttgacttcctcttttcacagtctcaagcagaagtgatctctgggaagcaggaaggggtttatgcatggattggaatcaactttgttttgggaagattcgaccacgaggatgaatcagatgctgaggctacccaggaattggcagcaggacggagaaggacagtagggatactggatatgggaggagcctctctccaaattgcttatgaagttcctacctcaacctctgtccttcctgcaaagcaggaagaagctgccaagatcctgctggctgagttcaacctgggctgtgatgtgcaacacactgaacacgtgtacagggtttatgtcacaacttttctgggtttcggaggcaactttgcccggcagcgctacgaagaccttgttctgaatgaaactcttaacaaaaacagattgcttggtcagaagacaggtctgagtcccgacaatccatttctggatccctgcctgccagtgggactcacagatgtggtggagaggaacagccaagtcttacatgtccgaggaagaggagactgggtgtcttgtggggcaatgctgagccccctgctggctcgctccaacaccagccaggcctcactcaatggcatatatcaatcgcctattgacttcaacaacagcgagttctacggcttctctgagtttttttattgtacagaggatgtgttgcgcattggtggccgctaccatgggccaacatttgccaaggctgctcaggattactgtggcatggcttggtcggtactaactcagagattcaagaatggcctcttttcatcacatgcagatgagcatcgactcaaatatcagtgttttaaatcggcttggatgtaccaagtcttacatgaaggattccactttccctatgactacccaaacctgcggacagcccagctggtgtatgaccgagaggttcagtggacgctgggagccattctatataaaacacgattcttaccactcagggatcttcggcaggaaggtgtccgacaagcccatggtagctggttccgtctctcctttgtatacaaccactatctcttctttgcctgtatcctggtggtgctactggccatcttcctataccttctgcggctacgccgaattcaccaccgacaaacacgagcctcagctccattggacttgctgtggcttgaagaggtggtgcccatgatgggagtacaggtggggccgtgaggctggaccaggactagagaagcttgagcacccccgagttgctgctcattgaattcctccactttcttatatagcctcagatgctgtgatgtctgaccttgtggatatttgcccttggaatttctactttactttctaccgtaattccttctccgtacccaggtcttctctgagagaagctataatttaatctgtgaggaactaaatgacaggagattggtgctaatacgggggaccaagctttgtccaagtgaagcaggcttcgactccttctgagaggtctggtgtgttcctagaatctcaccttttcttcccttgctaaagcatgaagtttggcatttggcacactggaagcctggttgaaatgaaatttgtagcatctgatacaaagccagagacattctagcaagtgcagcagccccttctttctctgtaacagagatatcatttatgtggagatccacaacctttaacagggatccaagatctttgcagttcaatcgaccacataggaatttccaggcaccaaaatgatataacttccttgcttccttgacaaagaagccatcatgggtgtgatccaagatccctgtcgtagtgttgatgatgttagtacatgattttaaaggttagaaccccttctaaatgaatggtctgtggaagattttagtatcttatctgatgcctggtatgatgaggatagaaaatttttccatttttatgtgcctcacaggctgtttgggcattaattttgctttttgagccttaagtgtgttagtaggatggagaaactgtgatggggactgggaacctggatttgtctgattttaggtcactgttccctgggcctgtttttgtgagcccttacacaggaagatataaagagagttctttcatttcactgctaaaatcagtatgtagtatggggaatgtatttgggttgtttttaaagaaaaggggaacagaatcaggagagtgggcaaaggcaataaaatcaaagttcttattaattatttctgagaaatagaagtttctcaatttatgactcttggaatgtctgaaagggagcaaatttggaatagatcaatctgttaataagccatctggcaactttcagaacctctattaagagactgctgagtcacaaacagcacttccattaatgaagcgagaggaaaagccataataattacatcttcacccactacccttccagagctttgcttctcctccacatttagccattaaattgcatgaggatttctcttcatcagggtccgcatggaatctttcttatattttaccctttcctacatgtagccttgaatgtcctttccacgaatatgctcccacggctgggagcattttcttttcttttcgtcacctttgatttttgggattagattaataggggaaaaagtccctggctttaaagaaaacaaaagtagaattcttcaaaaataaatttcatactgggaacagaaaggaactaaatgcttcataaaacagggaaaaagaaattaagatcatcctagaaataaactaagataaaaataa

SEQ ID NO: 129091 - DNA, 548 bp, Homo sapiens
  Payload ID: 5248
  Gene Symbol: ENTPD7
  Gene Name: ectonucleoside triphosphate diphosphohydrolase 7
  ENST ID: ENST00000472998
  CDS Start-End: 1-211
ttgtggggcaatgctgagccccctgctggctcgctccaacaccagccaggcctcactcaatggcatatatcaatcgcctattgacttcaacaacagcgagttctacggcttctctgagtttttttattgtacagaggatgtgttgcgcattggtggccgctaccatgggccaacatttgccaaggctgctcagctggtagcccacaagtaactttagaaatggaacagctgtgactgtggggaaggtagagagtttgcctccaaattcatgttgcactatttctctgtggttgatccaggattactgtggcatggcttggtcggtactaactcagagattcaagaatggcctcttttcatcacatgcagatgagcatcgactcaaatatcagtgttttaaatcggcttggatgtaccaagtcttacatgaaggattccactttccctatgactacccaaacctgcggacagcccagctggtgtatgaccgagaggttcagtggacgctgggagccattctatataaaacacgattcttaccactcagg

SEQ ID NO: 129092 - DNA, 2111 bp, Homo sapiens
  Payload ID: 5249
  Gene Symbol: ENTPD8
  Gene Name: ectonucleoside triphosphate diphosphohydrolase 8
  Uniprot ID: Q5MY95
  ENST ID: ENST00000344119
  CDS Start-End: 185-1561
ccaggtgcacagcgcatcgcccgaggctgtcaccgccctgccccgcccaccccagctgtcctggacccaggggcagggagaggctggacgccaggtgcgcggacacagaagcgtctaagcacagcttcctccttgccgctccgggaagtgggcagccagcccaggaaccagtaccacctgcaccatggggctgtcccggaaggagcaggtcttcttggccctgctgggggcctcgggggtctcaggcctcacggcactcattctcctcctggtggaggccaccagcgtgctcctgcccacagacatcaagtttgggatcgtgtttgatgcgggctcctcccacacgtccctcttcctgtatcagtggctggcgaacaaggagaatggcacgggtgtggtcagccaggccctggcctgccaggtggaagggcctggaatctcctcctacacttctaatgctgcacaggctggtgagagcctgcagggctgcttggaggaggcgctggtgctgatcccagaggcccagcatcggaaaacacccacgttcctgggggccacggctggcatgaggttgctcagccggaagaacagctctcaggccagggacatctttgcagcagtcacccaggtcctgggccggtctcccgtggacttttggggtgccgagctcctggccgggcaggccgaaggtgcctttggttggatcactgtcaactacggcttggggacgctggtcaagtactccttcactggagaatggatccagcctccggaggagatgctggtgggtgccctggacatgggaggggcctccacccagatcacgttcgtgcctgggggccccatcttggacaagagcacccaggccgattttcgcctctacggctccgactacagcgtctacactcacagctacctgtgctttggacgggaccagatgctgagcaggctcctcgtggggctggtacagagccgcccggctgccctgctccgtcacccgtgctacctcagcggctaccagaccacactggccctgggcccgctgtatgagtcaccctgtgtccacgccacgcccccgctgagcctcccccagaacctcacagttgaagggacaggcaaccctggagcctgcgtctcagccatccgggaacttttcaacttctccagctgccagggccaggaggactgcgcctttgacggggtctaccagcccccgctgcggggccagttctatgtggaggccagctaccctgggcaggaccgctggctgcgggactactgtgcctcaggcctgtacatcctcaccctcctgcacgagggctacgggttcagcgaggagacctggcccagcctcgagttccgaaagcaggcgggcggtgtggacattggctggacactgggctacatgctgaacctgaccgggatgatcccggccgatgcgccggctcagtggcgggcagagagctacggcgtctgggtggccaaagtggtgttcatggtgctggccctggtggcggtggtgggggctgccttggtccagctcttctggttgcaggactagtgggaaggcggaggtgggcccccacagagcccacaggcagctgcgtcccggatgctggaggcttcctgagccctgagcgccgtggggccttgctctgtggctctgcccacggtcaggtgacagccacctccagggcaccgtcagggtggtgctggccacagaggctgcatgacctcccctcccggcgtccctcccccaacctccttccgcaactgggcttccagggccgtaggtgcctttctgcacacaggccgccaggactcgtggtgtctccaggctgtgtgactgcagggccacatgctgcctgcaaacagggcaagaccacggaggcacaggggtcctgctcctgatggggcctcaggaggggcggagaggggtggaagggagggagctgccccacctggacccccgctctccctgctgttgtctgagcagatggatggagtccaggcctgggggcttctgctgggccagcccggcctcccacacccacttggagggtgagactgcagtgggggttgtttttattaaaagcatcatggacacagca

SEQ ID NO: 129093 - DNA, 2222 bp, Homo sapiens
  Payload ID: 5249
  Gene Symbol: ENTPD8
  Gene Name: ectonucleoside triphosphate diphosphohydrolase 8
  Uniprot ID: Q5MY95
  ENST ID: ENST00000371506
  CDS Start-End: 185-1672
ccaggtgcacagcgcatcgcccgaggctgtcaccgccctgccccgcccaccccagctgtcctggacccaggggcagggagaggctggacgccaggtgcgcggacacagaagcgtctaagcacagcttcctccttgccgctccgggaagtgggcagccagcccaggaaccagtaccacctgcaccatggggctgtcccggaaggagcaggtcttcttggccctgctgggggcctcgggggtctcaggcctcacggcactcattctcctcctggtggaggccaccagcgtgctcctgcccacagacatcaagtttgggatcgtgtttgatgcgggctcctcccacacgtccctcttcctgtatcagtggctggcgaacaaggagaatggcacgggtgtggtcagccaggccctggcctgccaggtggaagggcctggaatctcctcctacacttctaatgctgcacaggctggtgagagcctgcagggctgcttggaggaggcgctggtgctgatcccagaggcccagcatcggaaaacacccacgttcctgggggccacggctggcatgaggttgctcagccggaagaacagctctcaggccagggacatctttgcagcagtcacccaggtcctgggccggtctcccgtggacttttggggtgccgagctcctggccgggcaggccgaaggtgcctttggttggatcactgtcaactacggcttggggacgctggtcaagtactccttcactggagaatggatccagcctccggaggagatgctggtgggtgccctggacatgggaggggcctccacccagatcacgttcgtgcctgggggccccatcttggacaagagcacccaggccgattttcgcctctacggctccgactacagcgtctacactcacagctacctgtgctttggacgggaccagatgctgagcaggctcctcgtggggctggtacagagccgcccggctgccctgctccgtcacccgtgctacctcagcggctaccagaccacactggccctgggcccgctgtatgagtcaccctgtgtccacgccacgcccccgctgagcctcccccagaacctcacagttgaagggacaggcaaccctggagcctgcgtctcagccatccgggaacttttcaacttctccagctgccagggccaggaggactgcgcctttgacggggtctaccagcccccgctgcggggccagttctatgccttctccaacttctactacaccttccacttcctgaacctcacctccaggcagcccctgagcacggtcaacgccaccatctgggagttttgccagaggccctggaaactggtggaggccagctaccctgggcaggaccgctggctgcgggactactgtgcctcaggcctgtacatcctcaccctcctgcacgagggctacgggttcagcgaggagacctggcccagcctcgagttccgaaagcaggcgggcggtgtggacattggctggacactgggctacatgctgaacctgaccgggatgatcccggccgatgcgccggctcagtggcgggcagagagctacggcgtctgggtggccaaagtggtgttcatggtgctggccctggtggcggtggtgggggctgccttggtccagctcttctggttgcaggactagtgggaaggcggaggtgggcccccacagagcccacaggcagctgcgtcccggatgctggaggcttcctgagccctgagcgccgtggggccttgctctgtggctctgcccacggtcaggtgacagccacctccagggcaccgtcagggtggtgctggccacagaggctgcatgacctcccctcccggcgtccctcccccaacctccttccgcaactgggcttccagggccgtaggtgcctttctgcacacaggccgccaggactcgtggtgtctccaggctgtgtgactgcagggccacatgctgcctgcaaacagggcaagaccacggaggcacaggggtcctgctcctgatggggcctcaggaggggcggagaggggtggaagggagggagctgccccacctggacccccgctctccctgctgttgtctgagcagatggatggagtccaggcctgggggcttctgctgggccagcccggcctcccacacccacttggagggtgagactgcagtgggggttgtttttattaaaagcatcatggacacagca

SEQ ID NO: 129094 - DNA, 668 bp, Homo sapiens
  Payload ID: 5249
  Gene Symbol: ENTPD8
  Gene Name: ectonucleoside triphosphate diphosphohydrolase 8
  ENST ID: ENST00000493135
  CDS Start-End: 1-668
ctgggggcctcgggggtctcaggcctcacggcactcattctcctcctggtggaggccaccagcgtgctcctgcccacagacatcaagtttgggatcgtgtttgatgcgggctcctcccacacgtccctcttcctgtatcagtggctggcgaacaaggagaatggcacgggtgtggtcagccaggccctggcctgccaggtggaagggcctggaatctcctcctacacttctaatgctgcacaggctggtgagagcctgcagggctgcttggaggaggcgctggtgctgatcccagaggcccagcatcggaaaacacccacgttcctgggggccacggctggcatgaggttgctcagcagtcacccaggtcctgggccggtctcccgtggacttttggggtgccgagctcctggccgggcaggccgaaggtgcctttggttggatcactgtcaactacggcttggggacgctggtcaagtactccttcactggagaatggatccagcctccggaggagatgctggtgggtgccctggacatgggaggggcctccacccagatcacgttcgtgcctgggggccccatcttggacaagagcacccaggccgattttcgcctctacggctccgactacagcgtctacactcacagctacctgtgctttggac

SEQ ID NO: 129095 - DNA, 1749 bp, Homo sapiens
  Payload ID: 5249
  Gene Symbol: ENTPD8
  Gene Name: ectonucleoside triphosphate diphosphohydrolase 8
  Uniprot ID: Q5MY95
  ENST ID: ENST00000472938
  CDS Start-End: 18-1505
ccagtaccacctgcaccatggggctgtcccggaaggagcaggtcttcttggccctgctgggggcctcgggggtctcaggcctcacggcactcattctcctcctggtggaggccaccagcgtgctcctgcccacagacatcaagtttgggatcgtgtttgatgcgggctcctcccacacgtccctcttcctgtatcagtggctggcgaacaaggagaatggcacgggtgtggtcagccaggccctggcctgccaggtggaagggcctggaatctcctcctacacttctaatgctgcacaggctggtgagagcctgcagggctgcttggaggaggcgctggtgctgatcccagaggcccagcatcggaaaacacccacgttcctgggggccacggctggcatgaggttgctcagccggaagaacagctctcaggccagggacatctttgcagcagtcacccaggtcctgggccggtctcccgtggacttttggggtgccgagctcctggccgggcaggccgaaggtgcctttggttggatcactgtcaactacggcttggggacgctggtcaagtactccttcactggagaatggatccagcctccggaggagatgctggtgggtgccctggacatgggaggggcctccacccagatcacgttcgtgcctgggggccccatcttggacaagagcacccaggccgattttcgcctctacggctccgactacagcgtctacactcacagctacctgtgctttggacgggaccagatgctgagcaggctcctcgtggggctggtacagagccgcccggctgccctgctccgtcacccgtgctacctcagcggctaccagaccacactggccctgggcccgctgtatgagtcaccctgtgtccacgccacgcccccgctgagcctcccccagaacctcacagttgaagggacaggcaaccctggagcctgcgtctcagccatccgggaacttttcaacttctccagctgccagggccaggaggactgcgcctttgacggggtctaccagcccccgctgcggggccagttctatgccttctccaacttctactacaccttccacttcctgaacctcacctccaggcagcccctgagcacggtcaacgccaccatctgggagttttgccagaggccctggaaactggtggaggccagctaccctgggcaggaccgctggctgcgggactactgtgcctcaggcctgtacatcctcaccctcctgcacgagggctacgggttcagcgaggagacctggcccagcctcgagttccgaaagcaggcgggcggtgtggacattggctggacactgggctacatgctgaacctgaccgggatgatcccggccgatgcgccggctcagtggcgggcagagagctacggcgtctgggtggccaaagtggtgttcatggtgctggccctggtggcggtggtgggggctgccttggtccagctcttctggttgcaggactagtgggaaggcggaggtgggcccccacagagcccacaggcagctgcgtcccggatgctggaggcttcctgagccctgagcgccgtggggccttgctctgtggctctgcccacggtcaggtgacagccacctccagggcaccgtcagggtggtgctggccacagaggctgcatgacctcccctcccggcgtccctcccccaacctccttccgcaactgggcttccagggccgtaggtgcctttctgc

SEQ ID NO: 129096 - DNA, 7442 bp, Homo sapiens
  Payload ID: 5250
  Gene Symbol: ENPP1
  Gene Name: ectonucleotide pyrophosphatase/phosphodiesterase 1
  Uniprot ID: P22413
  ENST ID: ENST00000360971
  CDS Start-End: 21-2798
ccggagcggccggggccacgatggagcgcgacggctgcgcggggggcgggagccgcggcggcgagggcgggcgcgctccccgggagggcccggcggggaacggccgcgatcggggccgcagccacgctgccgaggcgcccggggacccgcaggcggccgcgtccttgctggcccctatggacgtgggggaggagccgctggagaaggcggcgcgcgcccgcactgccaaggaccccaacacctataaagtactctcgctggtattgtcagtatgtgtgttaacaacaatacttggttgtatatttgggttgaaaccaagctgtgccaaagaagttaaaagttgcaaaggtcgctgtttcgagagaacatttgggaactgtcgctgtgatgctgcctgtgttgagcttggaaactgctgtttagattaccaggagacgtgcatagaaccagaacatatatggacttgcaacaaattcaggtgtggtgagaaaaggttgaccagaagcctctgtgcctgttcagatgactgcaaggacaagggcgactgctgcatcaactacagttctgtgtgtcaaggtgagaaaagttgggtagaagaaccatgtgagagcattaatgagccacagtgcccagcagggtttgaaacgcctcctaccctcttattttctttggatggattcagggcagaatatttacacacttggggtggacttcttcctgttattagcaaactaaaaaaatgtggaacatatactaaaaacatgagaccggtatatccaacaaaaactttccccaatcactacagcattgtcaccggattgtatccagaatctcatggcataatcgacaataaaatgtatgatcccaaaatgaatgcttccttttcacttaaaagtaaagagaaatttaatcctgagtggtacaaaggagaaccaatttgggtcacagctaagtatcaaggcctcaagtctggcacatttttctggccaggatcagatgtggaaattaacggaattttcccagacatctataaaatgtataatggttcagtaccatttgaagaaaggattttagctgttcttcagtggctacagcttcctaaagatgaaagaccacacttttacactctgtatttagaagaaccagattcttcaggtcattcatatggaccagtcagcagtgaagtcatcaaagccttgcagagggttgatggtatggttggtatgctgatggatggtctgaaagagctgaacttgcacagatgcctgaacctcatccttatttcagatcatggcatggaacaaggcagttgtaagaaatacatatatctgaataaatatttgggggatgttaaaaatattaaagttatctatggacctgcagctcgattgagaccctctgatgtcccagataaatactattcatttaactatgaaggcattgcccgaaatctttcttgccgggaaccaaaccagcacttcaaaccttacctgaaacatttcttacctaagcgtttgcactttgctaagagtgatagaattgagcccttgacattctatttggaccctcagtggcaacttgcattgaatccctcagaaaggaaatattgtggaagtggatttcatggctctgacaatgtattttcaaatatgcaagccctctttgttggctatggacctggattcaagcatggcattgaggctgacacctttgaaaacattgaagtctataacttaatgtgtgatttactgaatttgacaccggctcctaataacggaactcatggaagtcttaaccaccttctaaagaatcctgtttatacgccaaagcatcccaaagaagtgcaccccctggtacagtgccccttcacaagaaaccccagagataaccttggctgctcatgtaacccttcgattttgccgattgaggattttcaaacacagttcaatctgactgtggcagaagagaagattattaagcatgaaactttaccctatggaagacctagagttctccagaaggaaaacaccatctgtcttctttcccagcaccagtttatgagtggatacagccaagacatcttaatgcccctttggacatcctataccgtggacagaaatgacagtttctctacggaagacttctccaactgtctgtaccaggactttagaattcctcttagtcctgtccataaatgttcattttataaaaataacaccaaagtgagttacgggttcctctccccaccacaactaaataaaaattcaagtggaatatattctgaagctttgcttactacaaatatagtgccaatgtaccagagttttcaagttatatggcgctactttcatgacaccctactgcgaaagtatgctgaagaaagaaatggtgtcaatgtcgtcagtggtcctgtgtttgactttgattatgatggacgttgtgattccttagagaatctgaggcaaaaaagaagagtcatccgtaaccaagaaattttgattccaactcacttctttattgtgctaacaagctgtaaagatacatctcagacgcctttgcactgtgaaaacctagacaccttagctttcattttgcctcacaggactgataacagcgagagctgtgtgcatgggaagcatgactcctcatgggttgaagaattgttaatgttacacagagcacggatcacagatgttgagcacatcactggactcagcttctatcaacaaagaaaagagccagtttcagacattttaaagttgaaaacacatttgccaacctttagccaagaagactgatatgttttttatccccaaacaccatgaatctttttgagagaaccttatattttatatagtcctctagctacactattgcattgttcagaaactgtcgaccagagttagaacggagccctcggtgatgcggacatctcagggaaacttgcgtactcagcacagcagtggagagtgttcctgttgaatcttgcacatatttgaatgtgtaagcattgtatacattgatcaagttcgggggaataaagacagaccacacctaaaactgcctttctgcttctcttaaaggagaagtagctgtgaacattgtctggataccagatatttgaatctttcttactattggtaataaaccttgatggcattgggcaaacagtagacttatagtagggttggggtagcccatgttatgtgactatctttatgagaattttaaagtggttctggatatcttttaacttggagtttcatttcttttcattgtaatcaaaaaaaaaattaacagaagccaaaatacttctgagaccttgtttcaatctttgctgtatatcccctcaaaatccaagttattaatcttatgtgttttctttttaattttttgattggatttctttagatttaatggttcaaatgagttcaactttgagggacgatctttgaatatacttacctattataaaatcttactttgtatttgtatttaaaaaagaaaaatattcctatcctgctcactggtaattaacataggtttaaaatggcttcaaatgtggccctatagacggttaaaattgtaccttatcttggcaaaacttcagagcaccagtcagtgcatgcaaggtgccattttttattgagatgcttagaatgtttctttctgtgcacaagacttaccctaccagcagcagagccattctctgttgagtggttcattttgaagttccacagattgaagagaacatgccaccaatcacctcacatcttcttggtggacatgataaatgacacaatgaacttgatttctttactaccttgactgtagctttttatccctacctgtgaaccttcaaagactgcattaacttttaggctacataggtccaattgaggtataatatcagtacaccaaagatttttatatgtccttcgtgtgaccattcttcaacggcctaagggccagctgcaaagacttttggaaaatacaatttacaactcaaaattatttaataatttaggaagttgctttttttttttttttttttcagtcctgcagtttcctgaagctctgtatatgatatttttttcagcctgcttctctctgttgttcagattaggtaattttattcttctgtctcgaagctcactgattctttattctgtctaatctgttctgctgttgagcccatttattcctgatttttatattttagttattgtatgttttatttctaaaatttccattcagtttttctttatatcttctatttgctgagaatttctgtctctttgctgagactttctacgttttcatttgtttcaagtgcatttatacttgcttgttgaagaatttttatgatggctgctgtaaaatccttatcagataattccaacatctgtcacctcattgtttgcatctactgatggtcttttttccattcggaaacattttcctgtttcttggtgtgtggaatgattttttattgaaacctggatatttttaggtattatgttatgagactatgggtcttatttaaaccttctgctttagccaactttctcagataccaccacagcaggggaattgggagcactgcttcattattaccaggtgtggctaggagtccaggttccccagtcagcctccctttatactgagtaacagggtcccctcattactactgggcaaggtgagaattcagtttcccattaggtctttattgattcttccctggctggaatgtgcagcggcaccttttggtgcaccctgggaatctccactaatgctatgggacagagtgaccaggaagagcttcattacaccaggtgggaatgaaattcccagtagcctacacagccttctccgacaccactctggagttgtattcttccagcacacaaacatacacaatttaactcaaagcatcttagcagagcttaattaaatggatagatgcctgttccctttgctggataccaagaatacaaaagtcagggagttggggcacctctttacagcttggtgagagtgtaagtctggactccccactcagcatttgctggtatgggtggggccatggtgtttttccatggtgtttggttggagtacagccttttttacccttgcttggctacccttttctggtcctttggcaggagagagcaggactctcttagggcttttttttcccctgcatttattgacatttccaggttgctgactttttcagctccaagttggaaatatatgagctgaaaagaaaatgtagggaactcatcacagtgttgttacttgggccccaatgttcctagcctattttctgtctactattcagagtcttgctgtgttttaatataatatccaggatttttatatgcatttagcagaaggatgtctactctgcctttgtagaagtgtctcactgatttttacatatttttccagcacacaaacatacacaatttaactcaaagcatcttagcagagcttaattaaatggatagatgtctgttccctttgctggacgccaagaatacaaaaaagaacaagtgacaattttctctgtcttagggagaagagacagcagaagtgtaaatgatccctaaagagtgatagatgttatcatgaagccacaggaggggtgccaggctgcacaaaagagacactggatgcttcttggtagtagaggcagtggcttcccagccttggggctaaggcttgtagggtgaattggaacttttcagatgagcaaggcaaagaagggaccttctaacattccttggatggaacatttttgacattttcccatttacagctacttatattttctacaagtgtcactgtgaccaacttatgtacacatactttttcttgcttagttataataatctgttcttaaagaaaatgtcagtctctacattctatgctgactgttaaggaaagagcacccacatctgctcctacttagctttttttctgtggttcttacacagtattcctttttttcttttcttgaaagagactcctcctttcttttcttttcttgaaagagttttaaacagataagatggcaaaagtgactgatctctactcccccagtttgaatggtaaatttgaatggtaaattcccatgaacatatatggaaatgtctttatcctactttctccaataaaggctgttcttagcttttcaaatgcaaagtgaaacctttatttatcttgatttcttttttttttttttttttttttttttttttgagatgctctgtcacccaggctggagtgcagtggcaagatcttggctcactgcaagctccgcctcccaggttcacgccattctcctggctcagcctcccgagtaactgggactacaggcacctgccgtcacgcctggctaattttttgtatttttagtagagaatggagtttcaccgtgttagccaggatggtctcgatctcctgaccttgtgatctgcccgcctcggcctcccaaagtgctgggattacaggctcgagccactgcctccagcctatcctgatttctactgtcatgcctcacatcagtccttttttttttttttgagacagagtctcgctctgtggcccaggctagactgcagtggcatgatctcggctcactgcaacctccacctccggggttctagcaattctcctgcctcagcctcctgagtagctgggattataggcgcatgccacacctggctttttgtattttagtggagatggggtttcactgtgttgctcaggctggtcttgatctcctgagctcagacaatccccccgccttggcctcccaaagtgctaggattataggcgagagctgctgtgtgcttcttaagtgaggtaagtaacttccatagaaaatttccatcagttcattcatgaaagaacaaagaacctggcaaaacttaaaaaaacgtttccaagaatcagataaaagaggacaaaccttagggagaagaaggcagctgctcatttccagcaggggaagtagctgcatagagtacaaggactggtaggcctgttggctgttcctgtttaaggagacaagatgggcatggaacagggaccaccccctcctctgggagaagctgttacccccttcacttttcctcctctgtcattacccacaatcactctccttctttgcgctatggtaggtgtttacccatcataggaatgggcatttgaactttgaaactgaatgtggtgattacacttcatgctgaagcttttcacatgagtgctttcataagcattaagtaaaattttataatgactgcagtccaaggacattttccctggtttttggccagtctaaatattgtaagagagagagaagaaaagtgtacggaatataattgtctctaagctaagaaatgtggatgttcaaataaaacatacgtacagaa

SEQ ID NO: 129097 - DNA, 3107 bp, Homo sapiens
  Payload ID: 5250
  Gene Symbol: ENPP1
  Gene Name: ectonucleotide pyrophosphatase/phosphodiesterase 1
  ENST ID: ENST00000513998
  CDS Start-End: 3-1139
cgatggagcgcgacggctgcgcggggggcgggagccgcggcggcgagggcgggcgcgctccccgggagggcccggcggggaacggccgcgatcggggccgcagccacgctgccgaggcgcccggggacccgcaggcggccgcgtccttgctggcccctatggacgtgggggaggagccgctggagaaggcggcgcgcgcccgcactgccaaggaccccaacacctataaagtactctcgctggtattgtcagtatgtgtgttaacaacaatacttggttgtatatttgggttgaaaccaagctgtgccaaagaagttaaaagttgcaaaggtcgctgtttcgagagaacatttgggaactgtcgctgtgatgctgcctgtgttgagcttggaaactgctgtttagattaccaggagacgtgcatagaaccagaacatatatggacttgcaacaaattcaggtgtggtgagaaaaggttgaccagaagcctctgtgcctgttcagatgactgcaaggacaagggcgactgctgcatcaactacagttctgtgtgtcaaggtgagaaaagttgggtagaagaaccatgtgagagcattaatgagccacagtgcccagcagggtttgaaacgcctcctaccctcttattttctttggatggattcagggcagaatatttacacacttggggtggacttcttcctgttattagcaaactaaaaaaatgtggaacatatactaaaaacatgagaccggtatatccaacaaaaactttccccaatcactacagcattgtcaccggattgtatccagaatctcatggcataatcgacaataaaatgtatgatcccaaaatgaatgcttccttttcacttaaaagtaaagagaaatttaatcctgagtggtacaaaggagaaccaatttgggtcacagctaagtatcaaggcctcaagtctggcacatttttctggccaggatcagatgtggaaattaacggaattttcccagacatctataaaatgtataatggttcagtaccatttgaagaaaggattttagctgttcttcagtggctacagcttcctaaagatgaaagaagaaccagattcttcaggtcattcatatggaccagtcagcagtgaagtcatcaaagccttgcagagggttgatggtatggttggtatgctgatggatggtctgaaagagctgaacttgcacagatgcctgaacctcatccttatttcagatcatggcatggaacaaggcagttgtaagaaatacatatatctgaataaatatttgggggatgttaaaaatattaaagttatctatggacctgcagctcgattgagaccctctgatgtcccagataaatactattcatttaactatgaaggcattgcccgaaatctttcttgccgggaaccaaaccagcacttcaaaccttacctgaaacatttcttacctaagcgtttgcactttgctaagagtgatagaattgagcccttgacattctatttggaccctcagtggcaacttgcattgaatccctcagaaaggaaatattgtggaagtggatttcatggctctgacaatgtattttcaaatatgcaagccctctttgttggctatggacctggattcaagcatggcattgaggctgacacctttgaaaacattgaagtctataacttaatgtgtgatttactgaatttgacaccggctcctaataacggaactcatggaagtcttaaccaccttctaaagaatcctgtttatacgccaaagcatcccaaagaagtgcaccccctggtacagtgccccttcacaagaaaccccagagataaccttggctgctcatgtaacccttcgattttgccgattgaggattttcaaacacagttcaatctgactgtggcagaagagaagattattaagcatgaaactttaccctatggaagacctagagttctccagaaggaaaacaccatctgtcttctttcccagcaccagtttatgagtggatacagccaagacatcttaatgcccctttggacatcctataccgtggacagaaatgacagtttctctacggaagacttctccaactgtctgtaccaggactttagaattcctcttagtcctgtccataaatgttcattttataaaaataacaccaaagtgagttacgggttcctctccccaccacaactaaataaaaattcaagtggaatatattctgaagctttgcttactacaaatatagtgccaatgtaccagagttttcaagttatatggcgctactttcatgacaccctactgcgaaagtatgctgaagaaagaaatggtgtcaatgtcgtcagtggtcctgtgtttgactttgattatgatggacgttgtgattccttagagaatctgaggcaaaaaagaagagtcatccgtaaccaagaaattttgattccaactcacttctttattgtgctaacaagctgtaaagatacatctcagacgcctttgcactgtgaaaacctagacaccttagctttcattttgcctcacaggactgataacagcgagagctgtgtgcatgggaagcatgactcctcatgggttgaagaattgttaatgttacacagagcacggatcacagatgttgagcacatcactggactcagcttctatcaacaaagaaaagagccagtttcagacattttaaagttgaaaacacatttgccaacctttagccaagaagactgatatgttttttatccccaaacaccatgaatctttttgagagaaccttatattttatatagtcctctagctacactattgcattgttcagaaactgtcgaccagagttagaacggagccctcggtgatgcggacatctcagggaaacttgcgtactcagcacagcagtggagagtgttcctgttgaatcttgcacatatttgaatgtgtaagcattgtatacattgatcaagttcgggggaataaagacagaccacacctaaaactgcctttctgcttctcttaaaggagaagtagctgtgaacattgtctggataccagatatttgaatctttcttactattggtaataaacct

SEQ ID NO: 129098 - DNA, 2651 bp, Homo sapiens
  Payload ID: 5251
  Gene Symbol: ENPP2
  Gene Name: ectonucleotide pyrophosphatase/phosphodiesterase 2
  Uniprot ID: Q13822
  ENST ID: ENST00000075322
  CDS Start-End: 60-2651
agtgcactccgtgaaggcaaagagaacacgctgcaaaaggctttccaagaatcctcgacatggcaaggaggagctcgttccagtcgtgtcagataatatccctgttcacttttgccgttggagtcaatatctgcttaggattcactgcacatcgaattaagagagcagaaggatgggaggaaggtcctcctacagtgctatcagactccccctggaccaacatctccggatcttgcaagggcaggtgctttgaacttcaagaggctggacctcctgattgtcgctgtgacaacttgtgtaagagctataccagttgctgccatgactttgatgagctgtgtttgaagacagcccgtggctgggagtgtactaaggacagatgtggagaagtcagaaatgaagaaaatgcctgtcactgctcagaggactgcttggccaggggagactgctgtaccaattaccaagtggtttgcaaaggagagtcgcattgggttgatgatgactgtgaggaaataaaggccgcagaatgccctgcagggtttgttcgccctccattaatcatcttctccgtggatggcttccgtgcatcatacatgaagaaaggcagcaaagtcatgcctaatattgaaaaactaaggtcttgtggcacacactctccctacatgaggccggtgtacccaactaaaacctttcctaacttatacactttggccactgggctatatccagaatcacatggaattgttggcaattcaatgtatgatcctgtatttgatgccacttttcatctgcgagggcgagagaaatttaatcatagatggtggggaggtcaaccgctatggattacagccaccaagcaaggggtgaaagctggaacattcttttggtctgttgtcatccctcacgagcggagaatattaaccatattgcagtggctcaccctgccagatcatgagaggccttcggtctatgccttctattctgagcaacctgatttctctggacacaaatatggccctttcggccctgagatgacaaatcctctgagggaaatcgacaaaattgtggggcaattaatggatggactgaaacaactaaaactgcatcggtgtgtcaacgtcatctttgtcggagaccatggaatggaagatgtcacatgtgatagaactgagttcttgagtaattacctaactaatgtggatgatattactttagtgcctggaactctaggaagaattcgatccaaatttagcaacaatgctaaatatgaccccaaagccattattgccaatctcacgtgtaaaaaaccagatcagcactttaagccttacttgaaacagcaccttcccaaacgtttgcactatgccaacaacagaagaattgaggatatccatttattggtggaacgcagatggcatgttgcaaggaaacctttggatgtttataagaaaccatcaggaaaatgctttttccagggagaccacggatttgataacaaggtcaacagcatgcagactgtttttgtaggttatggctcaacatttaagtacaagactaaagtgcctccatttgaaaacattgaactttacaatgttatgtgtgatctcctgggattgaagccagctcctaataatgggacccatggaagtttgaatcatctcctgcgcactaataccttcaggccaaccatgccagaggaagttaccagacccaattatccagggattatgtaccttcagtctgattttgacctgggctgcacttgtgatgataaggtagagccaaagaacaagttggatgaactcaacaaacggcttcatacaaaagggtctacagaagagagacacctcctctatgggcgacctgcagtgctttatcggactagatatgatatcttatatcacactgactttgaaagtggttatagtgaaatattcctaatgccactctggacatcatatactgtttccaaacaggctgaggtttccagcgttcctgaccatctgaccagttgcgtccggcctgatgtccgtgtttctccgagtttcagtcagaactgtttggcctacaaaaatgataagcagatgtcctacggattcctctttcctccttatctgagctcttcaccagaggctaaatatgatgcattccttgtaaccaatatggttccaatgtatcctgctttcaaacgggtctggaattatttccaaagggtattggtgaagaaatatgcttcggaaagaaatggagttaacgtgataagtggaccaatcttcgactatgactatgatggcttacatgacacagaagacaaaataaaacagtacgtggaaggcagttccattcctgttccaactcactactacagcatcatcaccagctgtctggatttcactcagcctgccgacaagtgtgacggccctctctctgtgtcctccttcatcctgcctcaccggcctgacaacgaggagagctgcaatagctcagaggacgaatcaaaatgggtagaagaactcatgaagatgcacacagctagggtgcgtgacattgaacatctcaccagcctggacttcttccgaaagaccagccgcagctacccagaaatcctgacactcaagacatacctgcatacatatgagagcgagatttaa

SEQ ID NO: 129099 - DNA, 3233 bp, Homo sapiens
  Payload ID: 5251
  Gene Symbol: ENPP2
  Gene Name: ectonucleotide pyrophosphatase/phosphodiesterase 2
  Uniprot ID: Q13822
  ENST ID: ENST00000259486
  CDS Start-End: 51-2798
cgtgaaggcaaagagaacacgctgcaaaaggctttccaagaatcctcgacatggcaaggaggagctcgttccagtcgtgtcagataatatccctgttcacttttgccgttggagtcaatatctgcttaggattcactgcacatcgaattaagagagcagaaggatgggaggaaggtcctcctacagtgctatcagactccccctggaccaacatctccggatcttgcaagggcaggtgctttgaacttcaagaggctggacctcctgattgtcgctgtgacaacttgtgtaagagctataccagttgctgccatgactttgatgagctgtgtttgaagacagcccgtggctgggagtgtactaaggacagatgtggagaagtcagaaatgaagaaaatgcctgtcactgctcagaggactgcttggccaggggagactgctgtaccaattaccaagtggtttgcaaaggagagtcgcattgggttgatgatgactgtgaggaaataaaggccgcagaatgccctgcagggtttgttcgccctccattaatcatcttctccgtggatggcttccgtgcatcatacatgaagaaaggcagcaaagtcatgcctaatattgaaaaactaaggtcttgtggcacacactctccctacatgaggccggtgtacccaactaaaacctttcctaacttatacactttggccactgggctatatccagaatcacatggaattgttggcaattcaatgtatgatcctgtatttgatgccacttttcatctgcgagggcgagagaaatttaatcatagatggtggggaggtcaaccgctatggattacagccaccaagcaaggggtgaaagctggaacattcttttggtctgttgtcatccctcacgagcggagaatattaaccatattgcagtggctcaccctgccagatcatgagaggccttcggtctatgccttctattctgagcaacctgatttctctggacacaaatatggccctttcggccctgaggagagtagttatggctcaccttttactccggctaagagacctaagaggaaagttgcccctaagaggagacaggaaagaccagttgctcctccaaagaaaagaagaagaaaaatacataggatggatcattatgctgcggaaactcgtcaggacaaaatgacaaatcctctgagggaaatcgacaaaattgtggggcaattaatggatggactgaaacaactaaaactgcatcggtgtgtcaacgtcatctttgtcggagaccatggaatggaagatgtcacatgtgatagaactgagttcttgagtaattacctaactaatgtggatgatattactttagtgcctggaactctaggaagaattcgatccaaatttagcaacaatgctaaatatgaccccaaagccattattgccaatctcacgtgtaaaaaaccagatcagcactttaagccttacttgaaacagcaccttcccaaacgtttgcactatgccaacaacagaagaattgaggatatccatttattggtggaacgcagatggcatgttgcaaggaaacctttggatgtttataagaaaccatcaggaaaatgctttttccagggagaccacggatttgataacaaggtcaacagcatgcagactgtttttgtaggttatggctcaacatttaagtacaagactaaagtgcctccatttgaaaacattgaactttacaatgttatgtgtgatctcctgggattgaagccagctcctaataatgggacccatggaagtttgaatcatctcctgcgcactaataccttcaggccaaccatgccagaggaagttaccagacccaattatccagggattatgtaccttcagtctgattttgacctgggctgcacttgtgatgataaggtagagccaaagaacaagttggatgaactcaacaaacggcttcatacaaaagggtctacagaagagagacacctcctctatgggcgacctgcagtgctttatcggactagatatgatatcttatatcacactgactttgaaagtggttatagtgaaatattcctaatgccactctggacatcatatactgtttccaaacaggctgaggtttccagcgttcctgaccatctgaccagttgcgtccggcctgatgtccgtgtttctccgagtttcagtcagaactgtttggcctacaaaaatgataagcagatgtcctacggattcctctttcctccttatctgagctcttcaccagaggctaaatatgatgcattccttgtaaccaatatggttccaatgtatcctgctttcaaacgggtctggaattatttccaaagggtattggtgaagaaatatgcttcggaaagaaatggagttaacgtgataagtggaccaatcttcgactatgactatgatggcttacatgacacagaagacaaaataaaacagtacgtggaaggcagttccattcctgttccaactcactactacagcatcatcaccagctgtctggatttcactcagcctgccgacaagtgtgacggccctctctctgtgtcctccttcatcctgcctcaccggcctgacaacgaggagagctgcaatagctcagaggacgaatcaaaatgggtagaagaactcatgaagatgcacacagctagggtgcgtgacattgaacatctcaccagcctggacttcttccgaaagaccagccgcagctacccagaaatcctgacactcaagacatacctgcatacatatgagagcgagatttaactttctgagcatctgcagtacagtcttatcaactggttgtatatttttatattgtttttgtatttattaatttgaaaccaggacattaaaaatgttagtattttaatcctgtaccaaatctgacatattatgcctgaatgactccactgtttttctctaatgcttgatttaggtagccttgtgttctgagtagagcttgtaataaatactgcagcttgagtttttagtggaagcttctaaatggtgctgcagatttgatatttgcattgaggaaatattaattttccaatgcacagttgccacatttagtcctgtactgtatggaaacactgattttgtaaagttgcctttatttgctgttaactgttaactatgacagatatatttaagccttataaaccaatcttaaacataataaatcacacattcagtttt

SEQ ID NO: 129100 - DNA, 3271 bp, Homo sapiens
  Payload ID: 5251
  Gene Symbol: ENPP2
  Gene Name: ectonucleotide pyrophosphatase/phosphodiesterase 2
  ENST ID: ENST00000427067
  CDS Start-End: 182-2836
gtcccccgggacagcggccccctgactacatctgcactggagaaatcccaaaagcaaacggccagtgcaaacaagagcagtccgcagcagccgtcccgagcacagctcccaggtcgcggggctgcagcccaggccgcgtccgcagcgcccgggcaggaacagacgccgagactcccgcagcatgacccgccacgccgatcggataatatccctgttcacttttgccgttggagtcaatatctgcttaggattcactgcacatcgaattaagagagcagaaggatgggaggaaggtcctcctacagtgctatcagactccccctggaccaacatctccggatcttgcaagggcaggtgctttgaacttcaagaggctggacctcctgattgtcgctgtgacaacttgtgtaagagctataccagttgctgccatgactttgatgagctgtgtttgaagacagcccgtggctgggagtgtactaaggacagatgtggagaagtcagaaatgaagaaaatgcctgtcactgctcagaggactgcttggccaggggagactgctgtaccaattaccaagtggtttgcaaaggagagtcgcattgggttgatgatgactgtgaggaaataaaggccgcagaatgccctgcagggtttgttcgccctccattaatcatcttctccgtggatggcttccgtgcatcatacatgaagaaaggcagcaaagtcatgcctaatattgaaaaactaaggtcttgtggcacacactctccctacatgaggccggtgtacccaactaaaacctttcctaacttatacactttggccactgggctatatccagaatcacatggaattgttggcaattcaatgtatgatcctgtatttgatgccacttttcatctgcgagggcgagagaaatttaatcatagatggtggggaggtcaaccgctatggattacagccaccaagcaaggggtgaaagctggaacattcttttggtctgttgtcatccctcacgagcggagaatattaaccatattgcagtggctcaccctgccagatcatgagaggccttcggtctatgccttctattctgagcaacctgatttctctggacacaaatatggccctttcggccctgagatgacaaatcctctgagggaaatcgacaaaattgtggggcaattaatggatggactgaaacaactaaaactgcatcggtgtgtcaacgtcatctttgtcggagaccatggaatggaagatgtcacatgtgatagaactgagttcttgagtaattacctaactaatgtggatgatattactttagtgcctggaactctaggaagaattcgatccaaatttagcaacaatgctaaatatgaccccaaagccattattgccaatctcacgtgtaaaaaaccagatcagcactttaagccttacttgaaacagcaccttcccaaacgtttgcactatgccaacaacagaagaattgaggatatccatttattggtggaacgcagatggcatgttgcaaggaaacctttggatgtttataagaaaccatcaggaaaatgctttttccagggagaccacggatttgataacaaggtcaacagcatgcagactgtttttgtaggttatggctcaacatttaagtacaagactaaagtgcctccatttgaaaacattgaactttacaatgttatgtgtgatctcctgggattgaagccagctcctaataatgggacccatggaagtttgaatcatctcctgcgcactaataccttcaggccaaccatgccagaggaagttaccagacccaattatccagggattatgtaccttcagtctgattttgacctgggctgcacttgtgatgataaggtagagccaaagaacaagttggatgaactcaacaaacggcttcatacaaaagggtctacagaagctgaaaccaggaaattcagaggcagcagaaatgaaaacaaggaaaacattaatggaaattttgaacctagaaaagagagacacctcctctatgggcgacctgcagtgctttatcggactagatatgatatcttatatcacactgactttgaaagtggttatagtgaaatattcctaatgccactctggacatcatatactgtttccaaacaggctgaggtttccagcgttcctgaccatctgaccagttgcgtccggcctgatgtccgtgtttctccgagtttcagtcagaactgtttggcctacaaaaatgataagcagatgtcctacggattcctctttcctccttatctgagctcttcaccagaggctaaatatgatgcattccttgtaaccaatatggttccaatgtatcctgctttcaaacgggtctggaattatttccaaagggtattggtgaagaaatatgcttcggaaagaaatggagttaacgtgataagtggaccaatcttcgactatgactatgatggcttacatgacacagaagacaaaataaaacagtacgtggaaggcagttccattcctgttccaactcactactacagcatcatcaccagctgtctggatttcactcagcctgccgacaagtgtgacggccctctctctgtgtcctccttcatcctgcctcaccggcctgacaacgaggagagctgcaatagctcagaggacgaatcaaaatgggtagaagaactcatgaagatgcacacagctagggtgcgtgacattgaacatctcaccagcctggacttcttccgaaagaccagccgcagctacccagaaatcctgacactcaagacatacctgcatacatatgagagcgagatttaactttctgagcatctgcagtacagtcttatcaactggttgtatatttttatattgtttttgtatttattaatttgaaaccaggacattaaaaatgttagtattttaatcctgtaccaaatctgacatattatgcctgaatgactccactgtttttctctaatgcttgatttaggtagccttgtgttctgagtagagcttgtaataaatactgcagcttgagtttttagtggaagcttctaaatggtgctgcagatttgatatttgcattgaggaaatattaattttccaatgcacagttgccacatttagtcctgtactgtatggaaacactgattttgtaaagttgcctttatttgctgttaactgttaactatgacagatatatttaagccttataaaccaatcttaaacataataaatcacacattcagtttt

SEQ ID NO: 129101 - DNA, 2667 bp, Homo sapiens
  Payload ID: 5251
  Gene Symbol: ENPP2
  Gene Name: ectonucleotide pyrophosphatase/phosphodiesterase 2
  Uniprot ID: Q13822
  ENST ID: ENST00000522826
  CDS Start-End: 1-2667
atggcaaggaggagctcgttccagtcgtgtcagataatatccctgttcacttttgccgttggagtcaatatctgcttaggattcactgcacatcgaattaagagagcagaaggatgggaggaaggtcctcctacagtgctatcagactccccctggaccaacatctccggatcttgcaagggcaggtgctttgaacttcaagaggctggacctcctgattgtcgctgtgacaacttgtgtaagagctataccagttgctgccatgactttgatgagctgtgtttgaagacagcccgtggctgggagtgtactaaggacagatgtggagaagtcagaaatgaagaaaatgcctgtcactgctcagaggactgcttggccaggggagactgctgtaccaattaccaagtggtttgcaaaggagagtcgcattgggttgatgatgactgtgaggaaataaaggccgcagaatgccctgcagggtttgttcgccctccattaatcatcttctccgtggatggcttccgtgcatcatacatgaagaaaggcagcaaagtcatgcctaatattgaaaaactaaggtcttgtggcacacactctccctacatgaggccggtgtacccaactaaaacctttcctaacttatacactttggccactgggctatatccagaatcacatggaattgttggcaattcaatgtatgatcctgtatttgatgccacttttcatctgcgagggcgagagaaatttaatcatagatggtggggaggtcaaccgctatggattacagccaccaagcaaggggtgaaagctggaacattcttttggtctgttgtcatccctcacgagcggagaatattaaccatattgcagtggctcaccctgccagatcatgagaggccttcggtctatgccttctattctgagcaacctgatttctctggacacaaatatggccctttcggccctgagatgacaaatcctctgagggaaatcgacaaaattgtggggcaattaatggatggactgaaacaactaaaactgcatcggtgtgtcaacgtcatctttgtcggagaccatggaatggaagatgtcacatgtgatagaactgagttcttgagtaattacctaactaatgtggatgatattactttagtgcctggaactctaggaagaattcgatccaaatttagcaacaatgctaaatatgaccccaaagccattattgccaatctcacgtgtaaaaaaccagatcagcactttaagccttacttgaaacagcaccttcccaaacgtttgcactatgccaacaacagaagaattgaggatatccatttattggtggaacgcagatggcatgttgcaaggaaacctttggatgtttataagaaaccatcaggaaaatgctttttccagggagaccacggatttgataacaaggtcaacagcatgcagactgtttttgtaggttatggctcaacatttaagtacaagactaaagtgcctccatttgaaaacattgaactttacaatgttatgtgtgatctcctgggattgaagccagctcctaataatgggacccatggaagtttgaatcatctcctgcgcactaataccttcaggccaaccatgccagaggaagttaccagacccaattatccagggattatgtaccttcagtctgattttgacctgggctgcacttgtgatgataaggtagagccaaagaacaagttggatgaactcaacaaacggcttcatacaaaagggtctacagaagctgaaaccaggaaattcagaggcagcagaaatgaaaacaaggaaaacattaatggaaattttgaacctagaaaagagagacacctcctctatgggcgacctgcagtgctttatcggactagatatgatatcttatatcacactgactttgaaagtggttatagtgaaatattcctaatgccactctggacatcatatactgtttccaaacaggctgaggtttccagcgttcctgaccatctgaccagttgcgtccggcctgatgtccgtgtttctccgagtttcagtcagaactgtttggcctacaaaaatgataagcagatgtcctacggattcctctttcctccttatctgagctcttcaccagaggctaaatatgatgcattccttgtaaccaatatggttccaatgtatcctgctttcaaacgggtctggaattatttccaaagggtattggtgaagaaatatgcttcggaaagaaatggagttaacgtgataagtggaccaatcttcgactatgactatgatggcttacatgacacagaagacaaaataaaacagtacgtggaaggcagttccattcctgttccaactcactactacagcatcatcaccagctgtctggatttcactcagcctgccgacaagtgtgacggccctctctctgtgtcctccttcatcctgcctcaccggcctgacaacgaggagagctgcaatagctcagaggacgaatcaaaatgggtagaagaactcatgaagatgcacacagctagggtgcgtgacattgaacatctcaccagcctggacttcttccgaaagaccagccgcagctacccagaaatcctgacactcaagacatacctgcatacatatgagagcgagatttaa

SEQ ID NO: 129102 - DNA, 769 bp, Homo sapiens
  Payload ID: 5251
  Gene Symbol: ENPP2
  Gene Name: ectonucleotide pyrophosphatase/phosphodiesterase 2
  ENST ID: ENST00000520066
  CDS Start-End: 35-769
acacgctgcaaaaggctttccaagaatcctcgacatggcaaggaggagctcgttccagtcgtgtcagataatatccctgttcacttttgccgttggagtcaatatctgcttaggattcactgcacatcgaattaagagagcagaaggatgggaggaaggtcctcctacagtgctatcagactccccctggaccaacatctccggatcttgcaagggcaggtgctttgaacttcaagaggctggacctcctgattgtcgctgtgacaacttgtcccgtggctgggagtgtactaaggacagatgtggagaagtcagaaatgaagaaaatgcctgtcactgctcagaggactgcttggccaggggagactgctgtaccaattaccaagtggtttgcaaaggagagtcgcattgggttgatgatgactgtgaggaaataaaggccgcagaatgccctgcagggtttgttcgccctccattaatcatcttctccgtggatggcttccgtgcatcatacatgaagaaaggcagcaaagtcatgcctaatattgaaaaactaaggtcttgtggcacacactctccctacatgaggccggtgtacccaactaaaacctttcctaacttatacactttggccactgggctatatccagaatcacatggaattgttggcaattcaatgtatgatcctgtatttgatgccacttttcatctgcgagggcgagagaaatttaatcatagatggtggggaggtcaaccggtaagttttgca

SEQ ID NO: 129103 - DNA, 991 bp, Homo sapiens
  Payload ID: 5251
  Gene Symbol: ENPP2
  Gene Name: ectonucleotide pyrophosphatase/phosphodiesterase 2
  ENST ID: ENST00000518958
  CDS Start-End: 45-533
ggcaaagagaacacgctgcaaaaggctttccaagaatcctcgacatggcaaggaggagctcgttccagtcgtgtcagataatatccctgttcacttttgccgttggagtcaatatctgcttaggattcactgcacatcgaattaagagagcagaaggatgggaggaaggtcctcctacagtgctatcagactccccctggaccaacatctccggatcttgcaagggcaggtgctttgaacttcaagaggctggacctcctgattgtcgctgtgacaacttgtgtaagagctataccagttgctgccatgactttgatgagctgtgtttgaagacagcccgtggctgggagtgtactaaggacagatgtggagaagtcagaaatgaagaaaatgcctgtcactgctcagaggactgcttggccaggggagactgctgtaccaattaccaagtggtttgcaaaggagagtcgcattgggttgatgatgactgtgaggaaataaaggccgcagaatgccctgcaggaggcccataagaacaaaagcatctcctggggagaggatacactcatggagtatttggagaatcccaagaagcacatccccggaacaaaaatgatcttcgcaggcatgaagaacaaggcagaaagggcagccttgatagctcatctcaaaaaaagctaccaatgaataataacaggtttgttcgccctccattaatcatcttctccgtggatggcttccgtgcatcatacatgaagaaaggcagcaaagtcatgcctaatattgaaaaactaaggtcttgtggcacacactctccctacatgaggccggtgtacccaactaaaacctttcctaacttatacactttggccactgggctatatccagaatcacatggaattgttggcaattcaatgtatgatcctgtatttgatgccacttttcatctgcgagggcgagagaaatttaatcatagatggtggggaggtca

SEQ ID NO: 129104 - DNA, 1695 bp, Homo sapiens
  Payload ID: 5251
  Gene Symbol: ENPP2
  Gene Name: ectonucleotide pyrophosphatase/phosphodiesterase 2
  ENST ID: ENST00000522167
  CDS Start-End: 87-1583
agcattggaatttggggcttctcccttctagtggagttcggaggatgaaaattggctgactctttggcagttctgttaagaatggaatggaagatgtcacatgtgatagaactgagttcttgagtaattacctaactaatgtggatgatattactttagtgcctggaactctaggaagaattcgatccaaatttagcaacaatgctaaatatgaccccaaagccattattgccaatctcacgtgtaaaaaaccagatcagcactttaagccttacttgaaacagcaccttcccaaacgtttgcactatgccaacaacagaagaattgaggatatccatttattggtggaacgcagatggcatgttgcaaggaaacctttggatgtttataagaaaccatcaggaaaatgctttttccagggagaccacggatttgataacaaggtcaacagcatgcagactgtttttgtaggttatggctcaacatttaagtacaagactaaagtgcctccatttgaaaacattgaactttacaatgttatgtgtgatctcctgggattgaagccagctcctaataatgggacccatggaagtttgaatcatctcctgcgcactaataccttcaggccaaccatgccagaggaagttaccagacccaattatccagggattatgtaccttcagtctgattttgacctgggctgcacttgtgatgataagaacaagttggatgaactcaacaaacggcttcatacaaaagggtctacagaagagagacacctcctctatgggcgacctgcagtgctttatcggactagatatgatatcttatatcacactgactttgaaagtggttatagtgaaatattcctaatgccactctggacatcatatactgtttccaaacaggctgaggtttccagcgttcctgaccatctgaccagttgcgtccggcctgatgtccgtgtttctccgagtttcagtcagaactgtttggcctacaaaaatgataagcagatgtcctacggattcctctttcctccttatctgagctcttcaccagaggctaaatatgatgcattccttgtaaccaatatggttccaatgtatcctgctttcaaacgggtctggaattatttccaaagggtattggtgaagaaatatgcttcggaaagaaatggagttaacgtgataagtggaccaatcttcgactatgactatgatggcttacatgacacagaagacaaaataaaacagtacgtggaaggcagttccattcctgttccaactcactactacagcatcatcaccagctgtctggatttcactcagcctgccgacaagtgtgacggccctctctctgtgtcctccttcatcctgcctcaccggcctgacaacgaggagagctgcaatagctcagaggacgaatcaaaatgggtagaagaactcatgaagatgcacacagctagggtgcgtgacattgaacatctcaccagcctggacttcttccgaaagaccagccgcagctacccagaaatcctgacactcaagacatacctgcatacatatgagagcgagatttaactttctgagcatctgcagtacagtcttatcaactggttgtatatttttatattgtttttgtatttattaatttgaaaccaggacattaaaaatgttagtattttaatcctgt

SEQ ID NO: 129105 - DNA, 3162 bp, Homo sapiens
  Payload ID: 5252
  Gene Symbol: ENPP3
  Gene Name: ectonucleotide pyrophosphatase/phosphodiesterase 3
  Uniprot ID: O14638
  ENST ID: ENST00000357639
  CDS Start-End: 84-2711
atacagtttctctttgccagactagactaaagaaggagcactaatttattctgataaaacaggtctatgcagctaccaggacaatggaatctacgttgactttagcaacggaacaacctgttaagaagaacactcttaagaaatataaaatagcttgcattgttcttcttgctttgctggtgatcatgtcacttggattaggcctggggcttggactcaggaaactggaaaagcaaggcagctgcaggaagaagtgctttgatgcatcatttagaggactggagaactgccggtgtgatgtggcatgtaaagaccgaggtgattgctgctgggattttgaagacacctgtgtggaatcaactcgaatatggatgtgcaataaatttcgttgtggagagaccagattagaggccagcctttgctcttgttcagatgactgtttgcagaggaaagattgctgtgctgactataagagtgtttgccaaggagaaacctcatggctggaagaaaactgtgacacagcccagcagtctcagtgcccagaagggtttgacctgccaccagttatcttgttttctatggatggatttagagctgaatatttatacacatgggatactttaatgccaaatatcaataaactgaaaacatgtggaattcattcaaaatacatgagagctatgtatcctaccaaaaccttcccaaatcattacaccattgtcacgggcttgtatccagagtcacatggcatcattgacaataatatgtatgatgtaaatctcaacaagaatttttcactttcttcaaaggaacaaaataatccagcctggtggcatgggcaaccaatgtggctgacagcaatgtatcaaggtttaaaagccgctacctacttttggcccggatcagaagtggctataaatggctcctttccttccatatacatgccttacaacggaagtgtcccatttgaagagaggatttctacactgttaaaatggctggacctgcccaaagctgaaagacccaggttttataccatgtattttgaagaacctgattcctctggacatgcaggtggaccagtcagtgccagagtaattaaagccttacaggtagtagatcatgcttttgggatgttgatggaaggcctgaagcagcggaatttgcacaactgtgtcaatatcatccttctggctgaccatggaatggaccagacttattgtaacaagatggaatacatgactgattattttcccagaataaacttcttctacatgtacgaagggcctgccccccgcatccgagctcataatatacctcatgacttttttagttttaattctgaggaaattgttagaaacctcagttgccgaaaacctgatcagcatttcaagccctatttgactcctgatttgccaaagcgactgcactatgccaagaacgtcagaatcgacaaagttcatctctttgtggatcaacagtggctggctgttaggagtaaatcaaatacaaattgtggaggaggcaaccatggttataacaatgagtttaggagcatggaggctatctttctggcacatggacccagttttaaagagaagactgaagttgaaccatttgaaaatattgaagtctataacctaatgtgtgatcttctacgcattcaaccagcaccaaacaatggaacccatggtagtttaaaccatcttctgaaggtgcctttttatgagccatcccatgcagaggaggtgtcaaagttttctgtttgtggctttgctaatccattgcccacagagtctcttgactgtttctgccctcacctacaaaatagtactcagctggaacaagtgaatcagatgctaaatctcacccaagaagaaataacagcaacagtgaaagtaaatttgccatttgggaggcctagggtactgcagaagaacgtggaccactgtctcctttaccacagggaatatgtcagtggatttggaaaagctatgaggatgcccatgtggagttcatacacagtcccccagttgggagacacatcgcctctgcctcccactgtcccagactgtctgcgggctgatgtcagggttcctccttctgagagccaaaaatgttccttctatttagcagacaagaatatcacccacggcttcctctatcctcctgccagcaatagaacatcagatagccaatatgatgctttaattactagcaatttggtacctatgtatgaagaattcagaaaaatgtgggactacttccacagtgttcttcttataaaacatgccacagaaagaaatggagtaaatgtggttagtggaccaatatttgattataattatgatggccattttgatgctccagatgaaattaccaaacatttagccaacactgatgttcccatcccaacacactactttgtggtgctgaccagttgtaaaaacaagagccacacaccggaaaactgccctgggtggctggatgtcctaccctttatcatccctcaccgacctaccaacgtggagagctgtcctgaaggtaaaccagaagctctttgggttgaagaaagatttacagctcacattgcccgggtccgtgatgtagaacttctcactgggcttgacttctatcaggataaagtgcagcctgtctctgaaattttgcaactaaagacatatttaccaacatttgaaaccactatttaacttaataatgtctacttaatatataatttactgtataaagtaattttggcaaaatataagtgatttttttctggagaattgtaaaataaagttttctatttttccttaagtcccctaaaagccataatttttattattcctttttctcttttttcaattctatgaatatgtattattttaaagttatatttttcacacagagatgatgctatattacaccttcccttttttgttggtttcttaaactctaatctcatgacagattataccttccttattacttgttttatcttactcagaatctttgaatatatttttctgcccagaattatctaaacaaaagggagaacaaaagaagtatgtctcacttgggaactgaatcaactctaaatcagttttgtcacaaaactttttgtatttgactggcaatgctgattaaaattaaaaatgc

SEQ ID NO: 129106 - DNA, 3026 bp, Homo sapiens
  Payload ID: 5252
  Gene Symbol: ENPP3
  Gene Name: ectonucleotide pyrophosphatase/phosphodiesterase 3
  ENST ID: ENST00000358229
  CDS Start-End: 84-2075
atacagtttctctttgccagactagactaaagaaggagcactaatttattctgataaaacaggtctatgcagctaccaggacaatggaatctacgttgactttagcaacggaacaacctgttaagaagaacactcttaagaaatataaaatagcttgcattgttcttcttgctttgctggtgatcatgtcacttggattaggcctggggcttggactcaggaaactggaaaagcaaggcagctgcaggaagaagtgctttgatgcatcatttagaggactggagaactgccggtgtgatgtggcatgtaaagaccgaggtgattgctgctgggattttgaagacacctgtgtggaatcaactcgaatatggatgtgcaataaatttcgttgtggagagaccagattagaggccagcctttgctcttgttcagatgactgtttgcagaggaaagattgctgtgctgactataagagtgtttgccaaggagaaacctcatggctggaagaaaactgtgacacagcccagcagtctcagtgcccagaagggtttgacctgccaccagttatcttgttttctatggatggatttagagctgaatatttatacacatgggatactttaatgccaaatatcaataaactgaaaacatgtggaattcattcaaaatacatgagagctatgtatcctaccaaaaccttcccaaatcattacaccattgtcacgggcttgtatccagagtcacatggcatcattgacaataatatgtatgatgtaaatctcaacaagaatttttcactttcttcaaaggaacaaaataatccagcctggtggcatgggcaaccaatgtggctgacagcaatgtatcaaggtttaaaagccgctacctacttttggcccggatcagaagtggctataaatggctcctttccttccatatacatgccttacaacggaagtgtcccatttgaagagaggatttctacactgttaaaatggctggacctgcccaaagctgaaagacccaggttttataccatgtattttgaagaacctgattcctctggacatgcaggtggaccagtcagtgccagagtaattaaagccttacaggtagtagatcatgcttttgggatgttgatggaaggcctgaagcagcggaatttgcacaactgtgtcaatatcatccttctggctgaccatggaatggaccagacttattgtaacaagatggaatacatgactgattattttcccagaataaacttcttctacatgtacgaagggcctgccccccgcatccgagctcataatatacctcatgacttttttagttttaattctgaggaaattgttagaaacctcagttgccgaaaacctgatcagcatttcaagccctatttgactcctgatttgccaaagcgactgcactatgccaagaacgtcagaatcgacaaagttcatctctttgtggatcaacagtggctggctgttaggagtaaatcaaatacaaattgtggaggaggcaaccatggttataacaatgagtttaggagcatggaggctatctttctggcacatggacccagttttaaagagaagactgaagttgaaccatttgaaaatattgaagtctataacctaatgtgtgatcttctacgcattcaaccagcaccaaacaatggaacccatggtagtttaaaccatcttctgaaggtgcctttttatgagccatcccatgcagaggaggtgtcaaagttttctgtttgtggctttgctaatccattgcccacagagtctcttgactgtttctgccctcacctacaaaatagtactcagctggaacaagtgaatcagatgctaaatctcacccaagaagaaataacagcaacagtgaaagtaaatttgccatttgggaggcctagggtactgcagaagaacgtggaccactgtctcctttaccacagggaatatgtcagtggatttggaaaagctatgaggatgcccatgtggagttcatacacagtcccccagttgccagcaatagaacatcagatagccaatatgatgctttaattactagcaatttggtacctatgtatgaagaattcagaaaaatgtgggactacttccacagtgttcttcttataaaacatgccacagaaagaaatggagtaaatgtggttagtggaccaatatttgattataattatgatggccattttgatgctccagatgaaattaccaaacatttagccaacactgatgttcccatcccaacacactactttgtggtgctgaccagttgtaaaaacaagagccacacaccggaaaactgccctgggtggctggatgtcctaccctttatcatccctcaccgacctaccaacgtggagagctgtcctgaaggtaaaccagaagctctttgggttgaagaaagatttacagctcacattgcccgggtccgtgatgtagaacttctcactgggcttgacttctatcaggataaagtgcagcctgtctctgaaattttgcaactaaagacatatttaccaacatttgaaaccactatttaacttaataatgtctacttaatatataatttactgtataaagtaattttggcaaaatataagtgatttttttctggagaattgtaaaataaagttttctatttttccttaagtcccctaaaagccataatttttattattcctttttctcttttttcaattctatgaatatgtattattttaaagttatatttttcacacagagatgatgctatattacaccttcccttttttgttggtttcttaaactctaatctcatgacagattataccttccttattacttgttttatcttactcagaatctttgaatatatttttctgcccagaattatctaaacaaaagggagaacaaaagaagtatgtctcacttgggaactgaatcaactctaaatcagttttgtcacaaaactttttgtatttgactggcaatgctgattaaaattaaaaatgc

SEQ ID NO: 129107 - DNA, 3418 bp, Homo sapiens
  Payload ID: 5252
  Gene Symbol: ENPP3
  Gene Name: ectonucleotide pyrophosphatase/phosphodiesterase 3
  Uniprot ID: O14638
  ENST ID: ENST00000414305
  CDS Start-End: 329-2956
gagaaatgaaaagtttggaacccagaagctgcagcctgcggaaaatgctggagccgcagccgacaccaagttgatgtctgtgagcagctgaccttctggacctccatcagcggcctgcagccaggagctgaagccacagagacggtgtcttctcagctatgataacctcagtgcaaatattgcccaatcactgaagagctgtgatcttcctaaacagttaaaagtcaggcacagctatgtaactcatacagtttctctttgccagactagactaaagaaggagcactaatttattctgataaaacaggtctatgcagctaccaggacaatggaatctacgttgactttagcaacggaacaacctgttaagaagaacactcttaagaaatataaaatagcttgcattgttcttcttgctttgctggtgatcatgtcacttggattaggcctggggcttggactcaggaaactggaaaagcaaggcagctgcaggaagaagtgctttgatgcatcatttagaggactggagaactgccggtgtgatgtggcatgtaaagaccgaggtgattgctgctgggattttgaagacacctgtgtggaatcaactcgaatatggatgtgcaataaatttcgttgtggagagaccagattagaggccagcctttgctcttgttcagatgactgtttgcagaggaaagattgctgtgctgactataagagtgtttgccaaggagaaacctcatggctggaagaaaactgtgacacagcccagcagtctcagtgcccagaagggtttgacctgccaccagttatcttgttttctatggatggatttagagctgaatatttatacacatgggatactttaatgccaaatatcaataaactgaaaacatgtggaattcattcaaaatacatgagagctatgtatcctaccaaaaccttcccaaatcattacaccattgtcacgggcttgtatccagagtcacatggcatcattgacaataatatgtatgatgtaaatctcaacaagaatttttcactttcttcaaaggaacaaaataatccagcctggtggcatgggcaaccaatgtggctgacagcaatgtatcaaggtttaaaagccgctacctacttttggcccggatcagaagtggctataaatggctcctttccttccatatacatgccttacaacggaagtgtcccatttgaagagaggatttctacactgttaaaatggctggacctgcccaaagctgaaagacccaggttttataccatgtattttgaagaacctgattcctctggacatgcaggtggaccagtcagtgccagagtaattaaagccttacaggtagtagatcatgcttttgggatgttgatggaaggcctgaagcagcggaatttgcacaactgtgtcaatatcatccttctggctgaccatggaatggaccagacttattgtaacaagatggaatacatgactgattattttcccagaataaacttcttctacatgtacgaagggcctgccccccgcatccgagctcataatatacctcatgacttttttagttttaattctgaggaaattgttagaaacctcagttgccgaaaacctgatcagcatttcaagccctatttgactcctgatttgccaaagcgactgcactatgccaagaacgtcagaatcgacaaagttcatctctttgtggatcaacagtggctggctgttaggagtaaatcaaatacaaattgtggaggaggcaaccatggttataacaatgagtttaggagcatggaggctatctttctggcacatggacccagttttaaagagaagactgaagttgaaccatttgaaaatattgaagtctataacctaatgtgtgatcttctacgcattcaaccagcaccaaacaatggaacccatggtagtttaaaccatcttctgaaggtgcctttttatgagccatcccatgcagaggaggtgtcaaagttttctgtttgtggctttgctaatccattgcccacagagtctcttgactgtttctgccctcacctacaaaatagtactcagctggaacaagtgaatcagatgctaaatctcacccaagaagaaataacagcaacagtgaaagtaaatttgccatttgggaggcctagggtactgcagaagaacgtggaccactgtctcctttaccacagggaatatgtcagtggatttggaaaagctatgaggatgcccatgtggagttcatacacagtcccccagttgggagacacatcgcctctgcctcccactgtcccagactgtctgcgggctgatgtcagggttcctccttctgagagccaaaaatgttccttctatttagcagacaagaatatcacccacggcttcctctatcctcctgccagcaatagaacatcagatagccaatatgatgctttaattactagcaatttggtacctatgtatgaagaattcagaaaaatgtgggactacttccacagtgttcttcttataaaacatgccacagaaagaaatggagtaaatgtggttagtggaccaatatttgattataattatgatggccattttgatgctccagatgaaattaccaaacatttagccaacactgatgttcccatcccaacacactactttgtggtgctgaccagttgtaaaaacaagagccacacaccggaaaactgccctgggtggctggatgtcctaccctttatcatccctcaccgacctaccaacgtggagagctgtcctgaaggtaaaccagaagctctttgggttgaagaaagatttacagctcacattgcccgggtccgtgatgtagaacttctcactgggcttgacttctatcaggataaagtgcagcctgtctctgaaattttgcaactaaagacatatttaccaacatttgaaaccactatttaacttaataatgtctacttaatatataatttactgtataaagtaattttggcaaaatataagtgatttttttctggagaattgtaaaataaagttttctatttttccttaagtcccctaaaagccataatttttattattcctttttctcttttttcaattctatgaatatgtattattttaaagttatatttttcacacagagatgatgctatattacaccttcccttttttgttggtttcttaaactctaatctcatgacagattataccttccttattacttgttttatcttactcagaatctttgaatatatttttctgcccagaattatctaaacaaaagggagaacaaaagaagtatgtctcacttgggaactgaatcaactctaaatcagttttgtcacaaaactttttgtatttgactggcaatgctgattaaaattaaaaatgcacagaactttt

SEQ ID NO: 129108 - DNA, 598 bp, Homo sapiens
  Payload ID: 5252
  Gene Symbol: ENPP3
  Gene Name: ectonucleotide pyrophosphatase/phosphodiesterase 3
  ENST ID: ENST00000423831
  CDS Start-End: 82-243
acagtttctctttgccagactagactaaagaaggagcactaatttattctgataaaacaggtctatgcagctaccaggacaatggaatctacgttgactttagcaacggaacaacctgttaagaagaacactcttaagaaatataaaatagcttgcattacagggtctctctcctttgggatctcacctcaccacaacctctgtttcccaggctcaagtgatcctcctgcctcagcctcctgagtagcttggaccacaggcacatgccacaaggctcagctaagtttttgttcttcttgctttgctggtgatcatgtcacttggattaggcctggggcttggactcaggaaactggaaaagcaaggcagctgcaggaagaagtgctttgatgcatcatttagaggactggagaactgccggtgtgatgtggcatgtaaagaccgaggtgattgctgctgggattttgaagacacctgtgtggaatcaactcgaatatggatgtgcaataaatttcgttgtggagagaccagattagaggccagcctttgctcttgttcagatgactgtttgcagaggaaagattgctgtgctgactat

SEQ ID NO: 129109 - DNA, 1536 bp, Homo sapiens
  Payload ID: 5252
  Gene Symbol: ENPP3
  Gene Name: ectonucleotide pyrophosphatase/phosphodiesterase 3
  ENST ID: ENST00000427707
  CDS Start-End: 348-509
gctaacccgcttgcagactgagaaatgaaaagtttggaacccagaagctgcagcctgcggaaaatgctggagccgcagccgacaccaagttgatgtctgtgagcagctgaccttctggacctccatcagcggcctgcagccaggagctgaagccacagagacggtgtcttctcagctatgataacctcagtgcaaatattgcccaatcactgaagagctgtgatcttcctaaacagttaaaagtcaggcacagctatgtaactcatacagtttctctttgccagactagactaaagaaggagcactaatttattctgataaaacaggtctatgcagctaccaggacaatggaatctacgttgactttagcaacggaacaacctgttaagaagaacactcttaagaaatataaaatagcttgcattggtctctctcctttgggatctcacctcaccacaacctctgtttcccaggctcaagtgatcctcctgcctcagcctcctgagtagcttggaccacaggcacatgccacaaggctcagctaagtttttgttcttcttgctttgctggtgatcatgtcacttggattaggcctggggcttggactcaggaaactggaaaagcaaggcagctgcaggaagaagtgctttgatgcatcatttagaggactggagaactgccggtgtgatgtggcatgtaaagaccgaggtgattgctgctgggattttgaagacacctgtgtggaatcaactcgaatatggatgtgcaataaatttcgttgtggagagaccagattagaggccagcctttgctcttgttcagatgactgtttgcagaggaaagattgctgtgctgactataagagtgtttgccaaggagaaacctcatggctggaagaaaactgtgacacagcccagcagtctcagtgcccagaagggtttgacctgccaccagttatcttgttttctatggatggatttagagctgaatatttatacacatgggatactttaatgccaaatatcaataaactgaaaacatgtggaattcattcaaaatacatgagagctatgtatcctaccaaaaccttcccaaatcattacaccattgtcacgggcttgtatccagagtcacatggcatcattgacaataatatgtatgatgtaaatctcaacaagaatttttcactttcttcaaaggaacaaaataatccagcctggtggcatgggcaaccagtatgtagcattctacacgtcgcaactgaagtaacctccatttctcagtgtgacaggaggacactcttctcactcagtggagcaagttctatgtcacccatctagtttctaagggctgagggtgcaaagatgtggctgacagcaatgtatcaaggtttaaaagccgctacctacttttggcccggatcagaagtggctataaatggctcctttccttccatatacatgccttacaacggaagtgtcccatttgaagagaggatttctacactgttaaaatggctggacctgcccaaagctg

SEQ ID NO: 129110 - DNA, 4651 bp, Homo sapiens
  Payload ID: 5253
  Gene Symbol: ENPP4
  Gene Name: ectonucleotide pyrophosphatase/phosphodiesterase 4 (putative)
  Uniprot ID: Q9Y6X5
  ENST ID: ENST00000321037
  CDS Start-End: 231-1592
ggagcgccccgagcggcgcagatagggacgttggggctgtgccccgcggcgcggcgcctgccactgcgcaggcgcctcaggaagagctcggcatcgcccctcttcctccaggtcccccttccccgcaacttcccacgagtgccaggtgccgcgagcgccgagttccgcgcattggaaagaagcgaccgcggcggctggaaccctgattgctgtccttcaacgtgttcattatgaagttattagtaatacttttgttttctggacttataactggttttagaagtgactcttcctctagtttgccacctaagttactactagtatcctttgatggcttcagagctgattatctgaagaactatgaatttcctcatctccagaattttatcaaagaaggtgttttggtagagcatgttaaaaatgtttttatcacaaaaacatttccaaaccactacagtattgtgacaggcttgtatgaagaaagccatggcattgtggctaattccatgtatgatgcagtcacaaagaaacacttttctgactctaatgacaaggatcctttttggtggaatgaggcagtacctatttgggtgaccaatcagcttcaggaaaacagatcaagtgctgctgctatgtggcctggtactgatgtacccattcacgataccatctcttcctattttatgaattacaactcctcagtgtcatttgaggaaagactaaataatattactatgtggctaaacaattcgaacccaccagtcacctttgcaacactatattgggaagaaccagatgcaagtggccacaaatacggacctgaagataaagaaaacatgagcagagtgttgaaaaaaatagatgatcttatcggtgacttagtccaaagactcaagatgttagggctatgggaaaatcttaatgtgatcattacaagtgatcatgggatgacccagtgttctcaggacagactgataaacctggattcctgcatcgatcattcatactacactcttatagatttgagcccagttgctgcaatacttcccaaaataaatagaacagaggtttataacaaactgaaaaactgtagccctcatatgaatgtttatctcaaagaagacattcctaacagattttattaccaacataatgatcgaattcagcccattattttggttgccgatgaaggctggacaattgtgctaaatgaatcatcacaaaaattaggtgaccatggttatgataattctttgcctagtatgcatccatttctagctgcccacggacctgcatttcacaaaggctacaagcatagcacaattaacattgtggatatttatccaatgatgtgccacatcctgggattaaaaccacatcccaataatgggacctttggtcatactaagtgcttgttagttgaccagtggtgcattaatctcccagaagccatcgcgattgttatcggttcactcttggtgttaaccatgctaacatgcctcataataatcatgcagaatagactttctgtacctcgtccattttctcgacttcagctacaagaagatgatgatgatcctttaattgggtgacatgtgctagggcttatacaaagtgtctttgattaatcacaaaactaagaatacatccaaagaatagtgttgtaactatgaaaaagaatactttgaaagacaaagaacttagactaagcatgttaaaattattactttgttttccttgtgttttgtttcggtgcatttgctaataagataacgctgaccatagtaaaattgttagtaaatcattaggtaacatcttgtggtaggaaatcattaggtaacatcaatcctaactagaaatactaaaaatggcttttgagaaaaatacttcctctgcttgtattttgcgatgaagatgtgatacatctttaaatgaaaatataccaaaatttagtaggcatgtttttctaataaatttatatatttgtaaagaaaacaacagaaatctttatgcaatttgtgaattttgtatattagggaggaaaagcttcctatatttttatatttacctttaattagtttgtatctcaagtaccctcttgaggtaggaaatgctctgtgatggtaaataaaattggagcagacagaaaagatatagcaaatgaagaaatattttaaggaaacctatttgaaaaaaaaagcaaagaccatttgataaaagcctgagttgtcaccattatgtcttaagctgttagtcttaaagattattgttaaaaaattcagaagaaaagagagacaagtgctcttctctctatctatgcttaatgcctttatgtaagttacttagttgtttgcgtgtgcctgtgcaagtgtgtttgtgtgtggttgtgtggacattatgtgatttactatataaggaggtcagagatggactgtggccaggcttccacattcctgaagcacacagatctcaggaaaggttatttttgcacttcatatttgtttactttctcctaactcacaagttaaaatcataacttaatttcattaacttttatcatttaactctctcatgtttgttgtaacctgaggtatccaaatgctacagaaaaatttatgacccaaatacaaatctcaatttgactgggacagaatgaggaatggagatttttgtatttatctttgggactttatgccttactttttaggctatagaatagttaagaaattttaaacaaaatttagtatcttttggtctttcacaccattcatatgttaagtggcagaatagccttagtgctacctccacttttttctccagtatttgcatcacagaaataatccctctgtttaacatgtttgttcagagccaagggtttattgtgaagaactgtcatcctgcctttgctagctggtaccttctagtaatcaaaattaatatgaagaaactaggttgtgacagactagattatatttagtaggggaaaaattgggctcaagaaccattcatcagtacgtgagacaagcagttaatagtatgatctttaaagttttgacaatataaaataaacttggtaactgttttacaaatataaaagtataataaatatgcagcccagttaaatattgattatctgtgatggtaaagaacaacagtggtgccagtcatcaaacatacagtgcgtcctattgagtcactgctaatttcttgagcctggtatttgctgcctattgtatttgtggttgttgagaggcattttcaaaccctgtataaataatccatgctgttggtcataagttaactgtattaagaacagtaaaataaataaaaaccaatagtactaattttgctttaaaaaaatttctaatttttttcacataaaacaattatcctaaaggttaatagttgatcgaaacagaataatagaaaaattctactttaatttccattaaaaagcaaatagcattgacacatttaaagcttttcatttaaagtagtggatgtttttgaagtatctaaaatagtagcagaatattttatacttggtccttgcaatggtgtgagttttaatgattgcattatcgtgattggtggttatgagtttcagaaatctatacttggcatccaactcatgagtggattttatataggatggaacaggaaggtatgtcctgtcagtatcttaaccctttcaacaagacatttacctatttgtctttccttacgttctcaaaatattaactcgaattgtaaattaagcaaaaatttaaaaagtatatgttgatgggacaagaagaatagtatttatttaataaaacatatattatattgaactatgtgttaattcatttgtatcttttaaaaaattatcactgttaaagccattgactcctttagtacactgagaaaaatcttatagtaaaactagcctttcacattaaggttttggtgtgtattttgttaaataactaacatgctgctctattttctgggtgtagaaagtatttggctctaggaaacatttacttgtttgtgaaaacaataccccaaggtaataggaaaagtttgagttaagtgtttttaattcagtcagtgaattcagaataagtacattcatgtataacatagggacagttctgctgctgttatttatatgcaattcttctggtaaatagcaatagaataaaacatatttcaatgtttgtgtataggttttatattattattccactaggaatggcataagaatttatagataaattcttgtaacattaaaggattaaaatgtttttacattgtttttgggtgtctccttcttgtgcccatatctgataagctttatggattattgcatttaattccttttatttggagggttttacttccttgttaacatataaagttataaatgaaggacaaggaggagatggaaaatgtgtatttattgttaattcttaaaatagtgtgtaaataaaataacatcagtgtgctttaaagaaatgtgtatgtagtgccttaatttaaattaaaatatttttgactgttacttgagttcagaattaatgactttgttcatgatttttaaaatgtgtgtgaataaaatctaccaaaaaattcttactgtaattattaaatataaagttcagtgtca

SEQ ID NO: 129111 - DNA, 2544 bp, Homo sapiens
  Payload ID: 5254
  Gene Symbol: ENPP5
  Gene Name: ectonucleotide pyrophosphatase/phosphodiesterase 5 (putative)
  Uniprot ID: Q9UJA9
  ENST ID: ENST00000230565
  CDS Start-End: 200-1633
aggtgctccgctccagagttgagcgcaggtgagctcctgcgcgttccgggggcgttcctccagtcaccctcccgccgttacccgcggcgcgcccgagggagtctcctccagaccctccctcccgttgctccaaactaatacggactgaacggatcgctgcgaggattatcttacactgaactgatcaagtactttgaaaatgacttcgaaatttctcttggtgtccttcatacttgctgcactgagtctttcaaccaccttttctctccaaccagaccagcaaaaggttctactagtttcttttgatggattccgttgggattacttatataaagttccaacgccccattttcattatattatgaaatatggtgttcacgtgaagcaagttactaatgtttttattacaaaaacctaccctaaccattatactttggtaactggcctctttgcagagaatcatgggattgttgcaaatgatatgtttgatcctattcggaacaaatctttctccttggatcacatgaatatttatgattccaagttttgggaagaagcgacaccaatatggatcacaaaccagagggcaggacatactagtggtgcagccatgtggcccggaacagatgtaaaaatacataagcgctttcctactcattacatgccttacaatgagtcagtttcatttgaagatagagttgccaaaattattgaatggtttacgtcaaaagagcccataaatcttggtcttctctattgggaagaccctgatgacatgggccaccatttgggacctgacagtccgctcatggggcctgtcatttcagatattgacaagaagttaggatatctcatacaaatgctgaaaaaggcaaagttgtggaacactctgaacctaatcatcacaagtgatcatggaatgacgcagtgctctgaggaaaggttaatagaacttgaccagtacctggataaagaccactataccctgattgatcaatctccagtagcagccatcttgccaaaagaaggtaaatttgatgaagtctatgaagcactaactcacgctcatcctaatcttactgtttacaaaaaagaagacgttccagaaaggtggcattacaaatacaacagtcgaattcaaccaatcatagcagtggctgatgaagggtggcacattttacagaataagtcagatgactttctgttaggcaaccacggttacgataatgcgttagcagatatgcatccaatatttttagcccatggtcctgccttcagaaagaatttctcaaaagaagccatgaactccacagatttgtacccactactatgccacctcctcaatatcaccgccatgccacacaatggatcattctggaatgtccaggatctgctcaattcagcaatgccaagggtggtcccttatacacagagtactatactcctccctggtagtgttaaaccagcagaatatgaccaagaggggtcatacccttatttcataggggtctctcttggcagcattatagtgattgtattttttgtaattttcattaagcatttaattcacagtcaaatacctgccttacaagatatgcatgctgaaatagctcaaccattattacaagcctaatgttactttgaagtggatttgcatattgaagtggagattccataattatgtcagtgtttaaaggtttcaaattctgggaaaccagttccaaacatttgcagaaaccattaagcagttacatatttaggtatacacacacacacacacacacatacacacacacggaccaaaatacttacacctgcaaaggaataaagatgtgagagtatgtctccattgttcactgtagcatagggatagataagatcctgctttatttggacttggcgcagataatgtatatatttagcaactttgcactatgtaaagtaccttatgtattgcactttaaatttctctcctgatgggtactttaatttgaaatgcactttatgcacagttatgtcttataacttgattgaaaatgacaactttttgcacccatgtcacagaatacttgttacgcattgttcaaactgaaggaaatttctaataatcccgaataatgaacgtagaaatctatctccataaattgagagaagaagaaggtgataagtgttgaaaattaaatgtgataacctttgaaccttgaattttggagatgtattcccaacagcagaatgcaactgtgggcatttcttgtcttatttctttccagagaacgtggttttcatttatttttccctcaaaagagagtcaaatactgacagattcgttctaaatatattgtttctgtcataaaattattgtgatttcctgatgagtcatattactgtgattttcataataatgaagacaccatgaatatactttttttctatatagttcagcaatggcctgaatagaagcaaccaggcaccatctcagcaatgttttctcttgtttgtaattatttgctcctttgaaaattaaatcactattaattacattaa

SEQ ID NO: 129112 - DNA, 3834 bp, Homo sapiens
  Payload ID: 5254
  Gene Symbol: ENPP5
  Gene Name: ectonucleotide pyrophosphatase/phosphodiesterase 5 (putative)
  Uniprot ID: Q9UJA9
  ENST ID: ENST00000371383
  CDS Start-End: 262-1695
aggtgctccgctccagagttgagcgcaggtgagctcctgcgcgttccgggggcgttcctccagtcaccctcccgccgttacccgcggcgcgcccgagggagtctcctccagaccctccctcccgttgctccaaactaatacggactgaacggatcgctgcgagggtgggagagaaaattagggggagaaaggacagagagagcaactaccatccatagccagatagattatcttacactgaactgatcaagtactttgaaaatgacttcgaaatttctcttggtgtccttcatacttgctgcactgagtctttcaaccaccttttctctccaaccagaccagcaaaaggttctactagtttcttttgatggattccgttgggattacttatataaagttccaacgccccattttcattatattatgaaatatggtgttcacgtgaagcaagttactaatgtttttattacaaaaacctaccctaaccattatactttggtaactggcctctttgcagagaatcatgggattgttgcaaatgatatgtttgatcctattcggaacaaatctttctccttggatcacatgaatatttatgattccaagttttgggaagaagcgacaccaatatggatcacaaaccagagggcaggacatactagtggtgcagccatgtggcccggaacagatgtaaaaatacataagcgctttcctactcattacatgccttacaatgagtcagtttcatttgaagatagagttgccaaaattattgaatggtttacgtcaaaagagcccataaatcttggtcttctctattgggaagaccctgatgacatgggccaccatttgggacctgacagtccgctcatggggcctgtcatttcagatattgacaagaagttaggatatctcatacaaatgctgaaaaaggcaaagttgtggaacactctgaacctaatcatcacaagtgatcatggaatgacgcagtgctctgaggaaaggttaatagaacttgaccagtacctggataaagaccactataccctgattgatcaatctccagtagcagccatcttgccaaaagaaggtaaatttgatgaagtctatgaagcactaactcacgctcatcctaatcttactgtttacaaaaaagaagacgttccagaaaggtggcattacaaatacaacagtcgaattcaaccaatcatagcagtggctgatgaagggtggcacattttacagaataagtcagatgactttctgttaggcaaccacggttacgataatgcgttagcagatatgcatccaatatttttagcccatggtcctgccttcagaaagaatttctcaaaagaagccatgaactccacagatttgtacccactactatgccacctcctcaatatcaccgccatgccacacaatggatcattctggaatgtccaggatctgctcaattcagcaatgccaagggtggtcccttatacacagagtactatactcctccctggtagtgttaaaccagcagaatatgaccaagaggggtcatacccttatttcataggggtctctcttggcagcattatagtgattgtattttttgtaattttcattaagcatttaattcacagtcaaatacctgccttacaagatatgcatgctgaaatagctcaaccattattacaagcctaatgttactttgaagtggatttgcatattgaagtggagattccataattatgtcagtgtttaaaggtttcaaattctgggaaaccagttccaaacatttgcagaaaccattaagcagttacatatttaggtatacacacacacacacacacacatacacacacacggaccaaaatacttacacctgcaaaggaataaagatgtgagagtatgtctccattgttcactgtagcatagggatagataagatcctgctttatttggacttggcgcagataatgtatatatttagcaactttgcactatgtaaagtaccttatgtattgcactttaaatttctctcctgatgggtactttaatttgaaatgcactttatgcacagttatgtcttataacttgattgaaaatgacaactttttgcacccatgtcacagaatacttgttacgcattgttcaaactgaaggaaatttctaataatcccgaataatgaacgtagaaatctatctccataaattgagagaagaagaaggtgataagtgttgaaaattaaatgtgataacctttgaaccttgaattttggagatgtattcccaacagcagaatgcaactgtgggcatttcttgtcttatttctttccagagaacgtggttttcatttatttttccctcaaaagagagtcaaatactgacagattcgttctaaatatattgtttctgtcataaaattattgtgatttcctgatgagtcatattactgtgattttcataataatgaagacaccatgaatatactttttttctatatagttcagcaatggcctgaatagaagcaaccaggcaccatctcagcaatgttttctcttgtttgtaattatttgctcctttgaaaattaaatcactattaattacattaaaaatcaaattggataaaacaatgttttctttctggtagcgcataataacagagcacaagcatcttttagatttgagcatttgaagattcaaagttgcgaaagagcacaaaccatattaggtaaaatattggccactcgatccttgaaaagaactgtgtggagcctggaaaaaaaaattaggaccacatgtgagatgtttacaagacacccagaacagtggtaaagtgtgcatactagaaaaagcagcaaaataactctttgtggtaacaggtatcaaaacacgggagccgagatgatatagctctgtttcaagaaatatgtgaatacccacctaccaggtgctcagtggaatcaaagatgaatccaagttcacaaatagacttctacttccaaggtagtacttttgacctgcctggtcatctcagtcttttccattccaacaacctaaggctgtgctttagatttctaagtaatcaagaagtttgggagaggcatagtattacatgtggcttcttagaggaaagaggaagccctgaaaagaaagactttccttgaagaaaatagcattttacagacacatggatagtactgtgatttcatgtatatatatgtaccaattggctaatgagtaggtaaaattgtattactattccagaaagaaaggacaaatgggatgtgaagaactaaagtgacatagttaaaaatttaaccaaatttaagtgcttcctaaaatttggtgaatgtcttattttttaaaatgataataccaataaggaatgttggcacataattcccatttcattataaaacctcttaatagaatagaatcaaataattggaaatggcctatagattaaaaagctgagaaagtatatggtaggtagcaaactccccagaagtatgaactctggattagacatctcagaatacatgagcactcatgttggcttgctttgtagctatgaacttaccctgtattattgaaatgtcagcataatgactggaaggtgaaattggtccattttagagcattactattatgctatctgtccatttaaattaataattgcattaaattcattttagaaggtgctattacattagtagtaagaaagtaaattcatatataaatatttgattatcagatggtttacttacagatacttattttcctgtaaaataggagagtttacctgaagaaaaataaaacttttaacttttctgggaa

SEQ ID NO: 129113 - DNA, 3936 bp, Homo sapiens
  Payload ID: 5255
  Gene Symbol: ENPP6
  Gene Name: ectonucleotide pyrophosphatase/phosphodiesterase 6
  Uniprot ID: Q6UWR7
  ENST ID: ENST00000296741
  CDS Start-End: 143-1465
aaattctgcaagtgaacttgactcaggaaggccagcggctcaaggtccagcccctggaagagagaatagctacagattctccatcctcagtctttgcaaggcgacagctgtgccagccgggctctggcaggctcctggcagcatggcagtgaagcttgggaccctcctgctggcccttgccctgggcctggcccagccagcctctgcccgccggaagctgctggtgtttctgctggatggttttcgctcagactacatcagtgatgaggcgctggagtcattgcctggtttcaaagagattgtgagcaggggagtaaaagtggattacttgactccagacttccctagtctctcgtatcccaattattataccctaatgactggccgccattgtgaagtccatcagatgatcgggaactacatgtgggaccccaccaccaacaagtcctttgacattggcgtcaacaaagacagcctaatgcctctctggtggaatggatcagaacctctgtgggtcactctgaccaaggccaaaaggaaggtctacatgtactactggccaggctgtgaggttgagattctgggtgtcagacccacctactgcctagaatataaaaatgtcccaacggatatcaattttgccaatgcagtcagcgatgctcttgactccttcaagagtggccgggccgacctggcagccatataccatgagcgcattgacgtggaaggccaccactacgggcctgcatctccgcagaggaaagatgccctcaaggctgtagacactgtcctgaagtacatgaccaagtggatccaggagcggggcctgcaggaccgcctgaacgtcattattttctcggatcacggaatgaccgacattttctggatggacaaagtgattgagctgaataagtacatcagcctgaatgacctgcagcaagtgaaggaccgcgggcctgttgtgagcctttggccggcccctgggaaacactctgagatatataacaaactgagcacagtggaacacatgactgtctacgagaaagaagccatcccaagcaggttctattacaagaaaggaaagtttgtctctcctttgactttagtggctgatgaaggctggttcataactgagaatcgagagatgcttccgttttggatgaacagcaccggcaggcgggaaggttggcagcgtggatggcacggctacgacaacgagctcatggacatgcggggcatcttcctggccttcggacctgatttcaaatccaacttcagagctgctcctatcaggtcggtggacgtctacaatgtcatgtgcaatgtggtgggcatcaccccgctgcccaacaacggatcctggtccagggtgatgtgcatgctgaagggccgcgccagcactgccccgcctgtctggcccagccactgtgccctggcactgattcttctcttcctgcttgcataactgatcatattgcttgtctcagaaaaaaacaccatcagcaaagtgggcctccaaagccagatgattttcattttatgtgtgaataatagcttcattaacacaatcaagaccatgcacattgtaaatacattattcttggataattctatacataaaagttcctacttgttaaaaaagatacaaaccttgtttttccagaaggtaggaaaatcctagctttccatttgtgcagttatatgtcattttctcctttcttttcacgttactcaggatgaactctctgagcagggacctgctcctgcagcaaccaaacttggagtggttattgcagacagacgtggctctgggcccctctctgtcccaccttgcacaaaggaccccctcagaccaggcccttgtctgtgccctgtccacacccaggagccatcctcagtgtctgtggccacaatcctgtactgttccttccatccctgataaaaggaggtctacatgaaagcaaaagctactgtctatttctgacccagctcatggaattttttcatcttatactgagctccagaaaggacgtaacttagcatggatcaccaatcaatcaaaaaataaataaatcactaaggattggagaactcatagaacaaggtgaaagacatgagtgccctcccaaagtctgagtgcacgaaaatttctctcttgccttgaggagcagaaaagcttctgatggacatgggcttctgtgagacttatcacacatagtgtatcgtggcatgaagcccggcacatagcaggccctgcatattgatggacaaatggatggcctgcctgccttccctgtccgttcacctgtgcaaaggcttcctcagacatgccactctgtggctcccaatatagggtgcagacaagagcaatccctgacatgacattatagcctgggaaagggctggctcactgatgagaatgtggaggcatcagcaaggatctcggtgggttgctcagagaggtgatgcactaagccttaatcctggacaccagtacccctgcagcatggcttgctcaacaacagtctttgagtggcatagaattccaaagaaaatggtgctgggtggagaatggagagagcatgatggagcagagtcccagtcactgaccaactaactggtcgtttgattaggaaacagtttggccaaagtaccacctttgagacctaagttcttttgatacctttgagaagagccactgagcctgagttgaaatatttttagcttagtcatctgtgtttgctataggagaaattgtaacacaagaaataactcctttttacatgatcatttatatctatatacatatatatacttgcatacactatcactgcattaaaaaatgagtttgggctgggcatggtggctcacacctataatcccaacactttcggaggccaaggagggacaaacgaacccttgaggccaggagttccagactaacttgggcaacacagggcgacccccatctctacaaaacataaaagatttttaaaaaattagccaggcatggtggcacatgcctgtggtctcagctacttgggaggctgaggcaggagaatcatttgagcccaggaggtcaaggctgcagtgagctttgatcacaccactgcactccagcctgggcaacagagcaagaccccatcctccaccccccccaaaaaatagaaagaaaaaaaaagtttgcactaattgaggtacatctgcaagtgagactttttgtcaggaaaaggcaatatatcaggtctcctcaggacgatggaggccttatatggtgtgttaccttgaaaactgaatatcaacgttcaccttgattcaggaaagctgggtgctgtctccatgccatgaatcatgagagcaaaggatcactgcttaaaaatactgaatttaccttcacaaaagatttctaaagatttatgtaatgtgttttaaaagcgccagtaaaccatcggatcaattggaaagaaggcaactcttcagcctttgttatctagctgaaaacaaatgacaactttcaaaacattggcagtagttgttgaaaaagacgtctattgttcaaagtttctttctccttaaaggacggtgttccaatgaattcagtagagcccactttcctccactgtggaggaagaatccctaagagatactcaaatgattaaattaaaattggatcatcaaactcaagagaggcataaacttagacacagtcttgcatttttgtctttcctgaactcttctgccattttcctccttcactcgtcctgaaaatctgcaagttacataataaaactttagatatttgtctgacaaagtgtaattactcaactgaataaatgactgagaacaagttacaaaaggaatcatgaatcctggtaaacaataaagaagattcagacactgagggaaaaaaataaagctttttacttaaataatgca

SEQ ID NO: 129114 - DNA, 852 bp, Homo sapiens
  Payload ID: 5255
  Gene Symbol: ENPP6
  Gene Name: ectonucleotide pyrophosphatase/phosphodiesterase 6
  ENST ID: ENST00000512353
  CDS Start-End: 269-852
ctaggttagacggttcaagacctggagactggctttgagcaaccctaggattaccttggcttgaattccatccaatacgtctctttcttcatatattggagaggagattaggacccagacgggcacagagggaagaccacatatagacacagggggaaggcggctgcctgcagaccaaggagagaggcctcagaagaaatcaaccctgatgacatcttgatctcaaactcccagcctccagaactgccgccattgtgaagtccatcagatgatcgggaactacatgtgggaccccaccaccaacaagtcctttgacattggcgtcaacaaagacagcctaatgcctctctggtggaatggatcagaacctctgtgggtcactctgaccaaggccaaaaggaaggtctacatgtactactggccaggctgtgaggttgagattctgggtgtcagacccacctactgcctagaatataaaaatgtcccaacggatatcaattttgccaatgcagtcagcgatgctcttgactccttcaagagtggccgggccgacctggcagccatataccatgagcgcattgacgtggaaggccaccactacgggcctgcatctccgcagaggaaagatgccctcaaggctgtagacactgtcctgaagtacatgaccaagtggatccaggagcggggcctgcaggaccgcctgaacgtcattattttctcggatcacggaatgaccgacattttctggatggacaaagtgattgagctgaataagtacatcagcctgaatgacctgcagcaagtgaaggaccgcgggcctgttgtgagcctttggccggcccctgggaaaca

SEQ ID NO: 129115 - DNA, 2043 bp, Homo sapiens
  Payload ID: 5256
  Gene Symbol: ENPP7
  Gene Name: ectonucleotide pyrophosphatase/phosphodiesterase 7
  Uniprot ID: Q6UWV6
  ENST ID: ENST00000328313
  CDS Start-End: 222-1598
agatgctcaagttgatgccaccccacgcacgtgaggctgggaccaggggtggcactgacacggctggggagcccactcccgaggttcgacccggggatgtgcacagccacattccaaaggcgcacgggatgagatcagcccgggtgaccctgggactttgtcctcctcggcaggagccagccctgtgcaccctgtgtgcctgtccatctggaaggcccagcatgagaggcccggccgtcctcctcactgtggctctggccacgctcctggctcccggggccggagcaccggtacaaagtcagggctcccagaacaagctgctcctggtgtccttcgacggcttccgctggaactacgaccaggacgtggacacccccaacctggacgccatggcccgagacggggtgaaggcacgctacatgacccccgcctttgtcaccatgaccagcccctgccacttcaccctggtcaccggcaaatatatcgagaaccacggggtggttcacaacatgtactacaacaccaccagcaaggtgaagctgccctaccacgccacgctgggcatccagaggtggtgggacaacggcagcgtgcccatctggatcacagcccagaggcagggcctgagggctggctccttcttctacccgggcgggaacgtcacctaccaaggggtggctgtgacgcggagccggaaagaaggcatcgcacacaactacaaaaatgagacggagtggagagcgaacatcgacacagtgatggcgtggttcacagaggaggacctggatctggtcacactctacttcggggagccggactccacgggccacaggtacggccccgagtccccggagaggagggagatggtgcggcaggtggaccggaccgtgggctacctccgggagagcatcgcgcgcaaccacctcacagaccgcctcaacctgatcatcacatccgaccacggcatgacgaccgtggacaaacgggctggcgacctggttgaattccacaagttccccaacttcaccttccgggacatcgagtttgagctcctggactacggaccaaacgggatgctgctccctaaagaagggaggctggagaaggtgtacgatgccctcaaggacgcccaccccaagctccacgtctacaagaaggaggcgttccccgaggccttccactacgccaacaaccccagggtcacacccctgctgatgtacagcgaccttggctacgtcatccatgggagaattaacgtccagttcaacaatggggagcacggctttgacaacaaggacatggacatgaagaccatcttccgcgctgtgggccctagcttcagggcgggcctggaggtggagccctttgagagcgtccacgtgtacgagctcatgtgccggctgctgggcatcgtgcccgaggccaacgatgggcacctagctactctgctgcccatgctgcacacagaatctgctcttccgcctgatggaaggcctactctcctgcccaagggaagatctgctctcccgcccagcagcaggcccctcctcgtgatgggactgctggggaccgtgattcttctgtctgaggtcgcataacgccccatggctcaaggaagccgccgggagctgcccgcaggccctgggccggctgtctcgctgcgatgctctgctggtcgcggacggaccctgcctccccagcttatcccaggccagaggctgcatgccactgtccccggcagcgccaacccctgcttggctgttatggtgctggtaataagcctcgcagcccaggtccagagcccccggcgagccggtcccataaccggccccctgcccctgcccctgctcctgctcctccccttcgggccccctcctcctgcaaaacccgctcccgaagcggcgctgccgtctgcagccacgcgggggcgcgcgggagctctgcgggcgctggaacctgcagacccggcctcggtcagctgggaggggcccgccccggcacaaagcacccatgggaataaaggccaagccgcgacagtcagca

SEQ ID NO: 129116 - DNA, 2002 bp, Homo sapiens
  Payload ID: 5256
  Gene Symbol: ENPP7
  Gene Name: ectonucleotide pyrophosphatase/phosphodiesterase 7
  ENST ID: ENST00000576512
  CDS Start-End: 1-480
ctcaaggacgcccaccccaagctccacgtctacaagaaggaggcgttccccgaggccttccactacgccaacaaccccagggtcacacccctgctgatgtacagcgaccttggctacgtcatccatgggagaattaacgtccagttcaacaatggggagcacggctttgacaacaaggacatggacatgaagaccatcttccgcgctgtgggccctagcttcagggcgggcctggaggtggagccctttgagagcgtccacgtgtacgagctcatgtgccggctgctgggcatcgtgcccgaggccaacgatgggcacctagctactctgctgcccatgctgcacacagaatctgctcttccgcctgatggaaggcctactctcctgcccaagggaagatctgctctcccgcccagcagcaggcccctcctcgtgatgggactgctggggaccgtgattcttctgtctgaggtcgcataacgccccatggctcaaggtcagagacccagaaggcagaggcgggagggtggccccacgctccctgaccctccaccctgatgtcccagctacagtcctaggcaaccagaacagagctgccaggccccgccaagcaggtgactcccactgacctggctgccccagagaggccatcacccctgagatcccgaggctgacccttccagcctctctgctctgggcttggaggaggtctttccagagcagaccacccggaccagtggccagaattcccaccctcccccaaaagccagaactccctcagcctctggccagagctgctgcctcccctccttcctgccatctctgtgctccactgggatagctcggaaaccgtcacctgcggtgcatttgggaggagagctctggggctgtgttcctggaactctccaggagcctcctaggacacgcatgaggtgtgtttggtaggagagcaccagggctatattcctggaactctctggaagcccacctctgaggacacgcgtggggtgcatttaggaggagagctctggggctgcgttcctggaactctctggaagcccacctccaaggacacgcgtggggtgcatttgggaggagagctccggggctgcgttcctggaactctctggaagcccacctccaaggacacgcatggggtgcgtttgggaggagagctccggggctgtgttcctggaactccccgggagcctccgaggacagtgctcccttgtctgtctgtgcagccacagcctcctaggccaagcagaagaaagtcattcattcatcccgaaaatatgtaacgggagccagctccatgccacgctctggtctgggctcaggatatgcagcgaacaagacagtccaggacctgtcatttaaaggtgcaagaaagcagagaacacaaaagcaaatgaatccacgcacagagtgctcagatgcttgtgatggcaaagaagagacggccacaggcagggacgaggcaggcgcgaccttgtcatttgcccggcctggaatggcctctctgagaaggtggatttagggagaaaaccagaatgacagacacaccagaagaagccagacacaccaggcaggggaaagagccagggacaggcccgcggtgggacaggttcggcgtgtttgggatgagacagaaggccagtgtgcctgcaggttggcacagagcgaggctctaacaggagctgaccacagccccaaggcaggaggttgtgggatgcacagcggggagccccaagctgaggttacacagggtctgaggttgatgattaaatgagtggctcccactgctgggccggggacagaaacgggagcaggaagtggccagtttggaggtggctgcaggacccagccggacattccagtggcggggtggagaagctgcaatgtgcacagattccaaatacctttaagaggcacgacattcgaggtttgtggacagattatgtgggagggtgaagaaaatgcaaaaatgaaagatgggtcc

SEQ ID NO: 129117 - DNA, 12633 bp, Homo sapiens
  Payload ID: 5257
  Gene Symbol: EPG5
  Gene Name: ectopic P-granules autophagy protein 5 homolog (C. elegans)
  Uniprot ID: Q9HCE0
  ENST ID: ENST00000282041
  CDS Start-End: 36-7775
caaaaacaaacggtgacggcgccgcggaagggtctatggccgaggcggtgaagccccagcgccgggccaaggccaaggccagccggactaaaacaaaggaaaagaagaagtatgaaactcctcagagggaagagtccagtgaagtctcccttccaaaaacctccagagagcaggaaatcccttctctagcctgtgaattcaaaggagaccatctgaaggtggtaactgattcccagctccaggatgatgccagtggacaaaatgagagtgaaatgtttgatgtaccactcacctccttaactataagcaatgaagagtccctgacgtgtaacacagagcccccaaaggaagggggagaggccagaccctgtgtgggggacagtgcagtcactccaaaggtccaccctggagacaatgttggaactaaagtagaaacccccaagaacttcacagaggtagaggaaaatatgtcggtacaaggtggactttcagaaagtgcaccccaatctaatttttcttatactcagccagcaatggaaaatatacaagtcagagaaactcagaatagtaaagaagacaaacaaggcctggtttgttcttcagaggtgccacagaatgttggcttgcagagttcttgcccagccaaacatggttttcagacacctagagtgaagaaactgtatccccagttgccagctgaaattgctggagaagcaccagctttggtggcagtgaaacccttgcttcgcagtgagcgactctacccagaactcccgtctcaactggaactagtaccatttactaaagaacagctaaaaatcttggagcctggttcatggctggaaaatgttgagtcatatttagaagaatttgacagcatggctcatcaagacaggcatgaattttatgagttgcttttgaactactcacgatgtaggaagcaactgctgctggctgaagctgagctgcttactctgacatctgattgccaaaatgctaaaagtcggctgtggcagtttaaggaggaacaaatgtctgtacagggtatctgtgcagatcaagtgaaagttttcagctatcatcgctaccaaagagtagaaatgaatgaaaatgcactggtggagctaaagaagctattcgatgccaaatctgagcacctccaccagaccctggcccttcattcttatacttctgtgctctcaagattgcaagtggagtcttacatctatgcattgctcagtagttcagctgttctgagatcttcagcaattcaccagcaaggccgagcgtctaagcagacagaaagcattccctctgatctgtgtcaactaaaggaatgcattagtgtcttattcatgttcaccaggagagttaatgaagatactcagtttcatgatgatattcttctctggctgcagaaattggtatccgtgctacaaagagttggctgtcctggagatcacctcttccttctaaaccatattcttcgatgccccgctggtgttagtaaatgggctgttccttttatccagatcaaagtgttgcataacccatcaggggtctttcattttatgcaatcccttgccctgctgatgtctcctgtcaaaaatcgagctgagtttatgtgccacatgaagcccagcgagcggaagccatcctcctcagggcctgggtctgggacttggacgctagtagacgaaggaggagaagaggatgaagaccctgagaccagttggattctccttaatgaagatgatttggttaccattttagcacagttcccctttcatgaactctttcagcatcttcttgggtttaaagcaaaaggtgattatttacctgaaacaacaagacctcaagagatgatgaaaatttttgcctttgccaactcactagtggaacttctggctgtggggttagaaacctttaatagagcacgctataggcagtttgtgaagcgaattggttatatgatcaggatgactcttggttatgtaagtgaccattgggcacagtatgtgagccataaccaaggctcaggattggcccaacagccctactctatggagaaactacaggttgaatttgatgaactgtttttgagggctgtcctacatgtgctgaaggccaaaagacttggcatttggctgtttatgtccgagatgccctttgggactctgtctgtgcaaatgctgtggaagctcttctacctcatgcaccaggtggagagcgagaacctgcagcagctctcctcctccctgcagcccgcccagtgcaagcagcagctccaagacccagaacattttaccaactttgagaagtgtctttcttctatgaatagctcagaagagatttgccttctgactacctttgctcagatggctcaggccagaagaaccaatgtggacgaagacttcataaaaattattgttctggagatatatgaggtatcttatgtcaccttgtctaccagagagactttttcaaaggttggtcgagagcttttagggactatcacagctgttcaccctgagataatttccgtccttctggatagagttcaagagaccattgaccaggttggaatggtttctctatacttgtttaaagaactgcctttgtatctttggcaaccttctgcatctgagatagcggtgattcgggattggttattgaattacaacctgacagtggtgaagaataaactggcctgtgttattcttgaaggactgaattggggatttgctaaacaggctacccttcatctggatcaagcagtccatgctgaagtggctttaatggttcttgaagcttatcagaagtaccttgcacagaagccatatgctgggattctctctgaaagtatgaagcaggtttcatatttggccagtattgttcgatatggagagacacccgagacctcatttaaccaatgggcctggaatttaatcttgaggctaaaactgcacaaaaacgattatggaatacagccgaattgtccagctgttcccttctccgtcactgtgcctgacatgacagagtcacccacgtttcatcctctcttgaaggctgtgaaagcgggcatgcccattggctgttatctagccttatctatgacagctgtgggccacagcattgagaagttctgtgcagaaggcatcccactattgggaattctggtccagtcaagacatttgagaacagtggttcatgtcctggataagattctgcctttattttacccttgccagtattaccttctgaagaatgagcagtttttatcgcatctcctcttgttcctacacttggacagcggtgtccctcagggtgtcacacaacaggtcacccacaaggtggcacagcacctgacaggagccagccatggggacaacgtgaagcttctcaacagcatgatccaggcacacatatctgtaagcactcagcccaatgaagtgggccccgttgctgtgttggagttctgggttcaggctctcataagccagcatctctggtaccgagaacaacctatcctcttcctcatggaccacttgtgtaaagcagcttttcagctgatgcaggaagactgcatacagaaattactctaccaacaacataagaatgccttgggttaccactgtgaccggagtctgctctcatctttggtaagctggattgtggcaggcaacatcactccttcctttgtggagggcttggccacgcccactcaggtctggtttgcctggacagtgctcaacatggaatccatctttgaagaggactcccagctccggagagttattgaaggggaattggtgataaactctgctttcacccctgaccaagctctgaagaaagcccagacccagctgaagctccccatcgtgccatccctccagaggctgctgatttatcgctgggcccaccaggctctggtcacaccttctgatcaccccctcctgccactcatttggcagaagttcttccttctgtatcttcaccgtccgggaccacagtatgggttacccatagatggttgtattggaagaaggttttttcaaagtcctgctcatatcaatttgttgaaagaaatgaagagacgtttgaccgaggtggctgacttccaccatgctgcaagcaaggccctccgtgttccagcagagggcagtgaagggctgccagagagccactctggcacccctggttacctgacttcaccagaactgcacaaggagctggtgaggctcttcaatgtatatatattatggctagaagatgagaattttcaaaaaggagatacctatatcccttctctaccaaagcattatgatattcacaggctagcaaaagtgatgcagaatcagcaggatctgtggatggagtatttgaacatggagcgcatctatcatgagtttcaggagactgttggtctgtggacacaggccaagcttgagtcccattccacaccctgcagtttgtccgtgcagctggacttcactgatcctttgctggctaaagaaagggttttaagtaacttgcggaagcatgaggctccccagcctccccttgctctgcacccgacgaagcctcctgtgccagttatttcctctgctgtgctattgagtcagaaggacgccacccagctggtgtgcacagacctgaatctgttgcaacagcaggccagaaccgcagctcttcgggaatctcagcaggttgctctggatggtgagctgttagacacaatgccaaagcagtatgtgaatcgtgaagaacagaccacactacatttggagtgcagaggcagcagcggtaagaaatgccaaggagccgcagttgtcacggttcagtttgaaggcatgcataagaatgaagccataagccaacagcttcatgttttacggaaggaagtgaagcagttgcaagcagaagctgctaaaccaccatcacttaatattgtggaagctgctgtacatgcagaaaacttgatcacggccttagtgaatgcctacaagttgcagcctacacctgggattcagaaagttggcattagccttttctttactattgtggattacgtcagcgatgagacgcagcgtcatcccccaacaaggcagttctttacttcatgtattgagatcttgggacaggtatttatcagtggcattaaatcagagtgcagaaaagtacttgaaaccattctgaagaacagcaggctctgctccctgctgtctcctttcttcactcccaatgctgcacctgcagagttcatacagctgtatgagcaagtggtgaagtttctaagtgaggacaacagtgatatgattttcatgctgctaaccaagttcgatcttaaacaatggttaagcgccactaaacctcctctgtctgatcgtaccaggcttctggagtccattcacttggcacttactgcctggggccttgaaccagatgaggatattttgatgccatttaatcttttctgtaagcactggacttatcttcttctctaccagtttcctgaccagtacagtgacattctcaggctgcttatgcaaagctccgcggagcagcttctgagccccgagtgttggaaggccactctgagagccctgggctgctgcgcccccagctgccagcagggggcagcgtccaccgagggcgccgtgcttcccagctcttctgatgctctcttgtcagacaagcaggtaatggagactatacagtggctttcagactttttttataagcttcggttatccaagatggactttaaaagctttggtttattctcaaaatggagtccttatatggctgatgtgaagacattcttgggctaccttgtgaaaaggctgattgacttagaaatgacctgtttggcccaagacccaactgccagcaggaaaacagtgctgaaatccctacattcagtaatcattcagctctttaagccatggatcctggttttagaggacaacgaaagcagccaacagcggcattacccctggctagagagtgatactgtggtggcctcaagcattgtgcagctgttcactgactgtattgactcactgcatgagagttttaaagataagctgttgccaggtgatgcaggagccctttggttgcacctgatgcattattgtgaagcatgtacagcacccaaaatgccagagttcattctgtacgctttccatagcacgtaccggaaactgccatggaaggacctgcaccctgaccagatgctcatggaggccttcttcaaagtggaacgaggaagccccaagagctgtttcttatttttggggtctgtactctgtgaagtcaactgggttagtgtgctctctgatgcctggaattccagtccccacccagaaacccgcagcatgattgtctgcctccttttcatgatgattttattggcaaaggaagttcaactggtagaccaaacagattcacctttacttagtctccttggacagacaagctcactttcatggcatcttgtggatattgtgtcgtaccagagtgtgctaagttatttcagcagccattacccgccgtccatcatcctggcaaaagaatcttatgctgaattaatcatgaagctcctaaaagtgtctgcgggcctttctattcctactgacagccagaagcatcttgatgcagttccaaaatgccaagcttttactcatcagatggttcaattcctcagcaccctggaacaaaatggaaaaatcaccttagcagtcctagaacaggaaatgtctaagctcttagacgatatcattgtctttaacccgcccgacatggacagccagacccgccacatggccctcagcagcctctttatggaagtcctgatgatgatgaacaacgcgactattccaacagcagagttccttcggggcagtatccggacctggattggccaaaaaatgcatgggctggtggtgctgccccttttaacagcagcctgccagagcctggcgtccgtccgccacatggctgagactacagaagcctgcatcactgcctacttcaaagaaagccctctcaatcagaattcaggatggggacccattctggtatcccttcaggttcccgagctcaccatggaagagttcctgcaggagtgcctcaccttgggcagttacttgactctttacgtctacttgcttcagtgtttaaacagcgaacagactttaaggaatgaaatgaaagtgctgctcatcttaagcaagtggctggaacaggtgtacccaagctccgtggaggaagaggcaaagctgtttttgtggtggcaccaagtccttcagctctccctcattcagacagagcagaatgactccgtcctgacagaatctgtcattcgaattctgctcttggttcagagcaggcagaacctcgtggctgaggagagactcagctctgggatcctgggggcaattgggtttggccggaagtcgcctttgtctaacaggttccgagtggttgcccgaagcatggctgccttcctttcagttcaggttcctatggaagatcagatccgtttgaggcctggctctgaattacatctgacccccaaagctcagcaggctctgaatgctcttgaatccatggcatcaagtaagcagtatgttgaataccaggatcaaatattgcaagccacccaatttataaggcatcctggccattgccttcaagatgggaaaagcttcttggctcttctcgttaactgtctgtatccagaagtgcattatttggaccacatacgatagttaacactgaggctcttgaaaaacccattgctgtttatgtttacatttaactttgctgttgcacaagtaactttgctcaattgcactgtagagctcagtttggccaatgtgtagttgactgagatgcaagttgggaggcgttagatattagataattttggggtgtgtgtgtgtgtgtgtgtgtgttttcttagctcttaagaccttctggggactctttaagtttttatatttatccacaagagaaacttactaagttccacttgggtgcagagccactcacagttgccgaatgtcccagtcatctcacaagacctccagatggagttctttgtatgtttccacttctgtctctgttttatgtaaatgttccagatctgacaaccttggaagtcactcagtacccttacttttaaaccccatttgtgttcctccaaagtaaagaagtcaattttgaaaaatttctgcatttctcaaatgtggacaaatacaatagttttaaagtattgtttttctcagaagggagataaaaatgccgagttagttaaagtgggtcatgtgtaaaatacgaccacttgatcgtgattatagtgggcagtagagatgatgacaagtcaatttccatccagccgtgtatcctcatggagaagctgcctgtctgaatcaggatggcaagctggcagtctgggaggagcatgttttgcacagatgttttgtttggtccacttggtgaggagtgcagacagggctgcctctctctagtcgggagagtctgtgcattccctcgggccctgaccctagcctcattcacatcacttgcccctgtcgacacctaagtttgcaccctttgatagacaccatgttcgatatctgaaaggctcagtgtcaggagacagagactgagggagactgaagacctgattctctgttccctgcttgttttttaacttcaaactcagatgaagccaatggacctgctgaaacacttgtctgtggaaactgggtcaggtcgggagatctactgaaatttggctttttttccatagccacgtgccttctgttgttgacagttcattcattaccaaagcctgtgtgtaactttgccttgttctgtggccatcttcttgctcatgttatttctcctgggaatgagcagtttgacttctgttcccacgttcctcattctatcagctctagatggattttgcctgcatagctggcttaatatgtctttgtgtatgggtagtctgtagcctgagaatatttacctaaaaatgtctaaacagccaccaagaatgtttataggggtataggaatatagttaacagagtgctaatctctcctcaaatgtccttttggaatgcttcccccaaaattgggaagttggtaggagcttttctttactttgaatttctttacttggacagaacgattctgccttaaagacacgctttgcagctctgataaagaacatccctgtttagtctcttgagttttacaggccacaaaatgtccgtctcagagggatctgtctcagcttttcttatttttgcttctctccgttttcaaaattaatcatcttgttctctgtataagaaaatttgagaagctgtggacaatttaatagtctgatctggcaacagcgatttttgtttggaaatattttgtgttttctttgaggaggatataattactgatatcctaggatgtgaaatttttgagtgacagtatgcacattttaaagaaaattatgattaatctgtataatgttttttggtctgtaaaaattataaaaaataaaatcatttatctttggttgtaactgtttaaaaaccaaattatagggatatcacactatcttgtaaagtgtttcagctgttaaagttgctgtaggtttttatgcctgatgtcatttaatttatttgacattgaacttcattaataatcagagatggtcagtgaaagcgcttcctctttaactctttcttgcttaaccttggaaggttgactcaactcctaggtgtctatgggaaactctgggctaggaacgtgctataaagacactgagctagttcagacatggccatgctgctgtagcctcctgggaaagaagggcggcagagagaccagcccgcctgttggcttgcaggggtaatgagccttggcttgaaaaaattgttggcctccagagagcacggggctgtggtttcagaatcagtgatgggtgccgcacatcaagacgggaatcaagcaagaccaaggccctgtggactgagcagcgtggagggcgaacggctgcaggctccagacttcaccacagggtggccaacagtggcatcgggaccaaataaagatgtctaacagcttcctgggagcaggaggaggcaggattctggttgccatgaaaaacatctctctccctctccatcactccccatgctgcagtgcacaggtgggttgcagaggcaggctgcatcccggaatcatgttgtcccactgcctattaatagaacaagtgaagggcagaatgctggaacacaccagacatagagggagggaggtcctgccagatgtgtctacacaactgtctacatagcatgacagtagcagtggattcgggacccacctgtacatgtttccaaagctccttcctgcacactcgggacctcagctccaaggcgtgactcatttctcagtctcaccatcctttgttggctcagacatcgcatgcctctgccccactggggttgtgtgcctgcgtctctcacttctttgaggttggggaaagcctagtccagaaaatgaaaacccatagaccagcctaacttcctttcaaccaagtgacggcctcctggttcctctcagttcatcatcaaaatcagtgtgtacatgtcatacaagccaagagtgttcatgtcctcgttcctttcaaatgaaggtgatatatactttttcactgagtttttattcctgaaattctttcttctggagcaggaagcaaatgtcctggaatcgtagacttttacagtcagaagggtcattcacgttcatctagtgcccctctcactctgcagggatcctcctgcctctcctctgcccctgtccagtgcctggtggtccagcctgtgatgggcaggcctaggctgccatccgcaggctctgtagttctgctttctattgaaccaagatgtttctacgttgcctattggtcgtggttctgtccagagcagttcaggctggggctgttcacttgcccctccttgaggcagacctttagatattttcagttttcatcacatgtctaacaccacttccaccccacccctcacctcttaggctaaatccaagctaaatcccccaatgtcttttttttttttttttttttgagacgagtctcatctgtcacccaggctggagtgcaatggcatggtctcggctcactgcaacctccgcctcctgggttcaagctattctgcctcagcctcccaaggagccaggactacaggtgcatgccaccacgcccggctaatttttgtattttttagtagagacagggtttcacccagccattgagacaagctggtttcaaactcctgaccttgtggtccgcccgccccggcctcccagagtgctgggattacaggcgtgagccaccgcgcccatctcccctgcaatgtctttagttagaccttttccaccatcatgtctaactgggctacggtttggggaaagtgtccaaattagtccgtgttatcctaaaaggggtgtgccccggattagcagggccagggctagggtgagacaaatgaggcacctggggcatacatttaagttggtgcttgcttgcaggtgccaagagagtgcttccttgggtttacccccgtggtgcctcctttacctcattctggccccagccctggggttagagtcgcaccagtgtggtccaagtggcataattatctccctaaatgcttgggcagcatcagctttcagtagctgtgccccatgggaggcacattaagctagtggcaagttgagactgcagacctcagcttaatatcagttgttgcccaagacagatctcaccccacatcttcatgacaggcctaacaacaaggcactttgcccttaatcctctactactgcctgctcttcattttgggccaactgtacagctcattttgagatagtagctgatcatttttctgatcagttaactttgtcttattaagcaaaatggagaatataatgttgggaaataagtgtgttgattaaaagaaagtatccccttctaccatcttccatttgtgtctgggttgtgctgggtaaagttctagacttactaacgcagacttcattttggtccggtttccacagcatgcctcgggcatcagtgtccaggagtagctgtatttgaggtttccttcactctggtaggttcctgattcctgatgaaaataacttgaaaaaaaaataattatactactgatcctcttttgggataatgaaattgcgaaggaatgttgttgattataacttttattttttaatgtacagatgtactgtctctcattgagcactgatagaatttatttttctttcaatagtttaaaatcacttatgtggagacacatacttaagtgtgttcaactcgttttcttcccacatatctagtgtgacctttaaaaaccacaactttattttggacattaaatgtgcaatattcactacttattcattgttccacatttttcatacttgtacaaagggtaagtttttatataatggtgagaaacaggaagaaatgacaactggttaagtaaaattctgcaaataaactagattcgaatttaattta

SEQ ID NO: 129118 - DNA, 3767 bp, Homo sapiens
  Payload ID: 5257
  Gene Symbol: EPG5
  Gene Name: ectopic P-granules autophagy protein 5 homolog (C. elegans)
  ENST ID: ENST00000590884
  CDS Start-End: 9-1982
tcaacagcatgatccaggcacacatatctgtaagcactcagcccaatgaagtgggccccgttgctgtgttggagttctgggttcaggctctcataagccagcatctctggtaccgagaacaacctatcctcttcctcatggaccacttgtgtaaagcagcttttcagctgatgcaggaagactgcatacagaaattactctaccaacaacataagaatgccttgggttaccactgtgaccggagtctgctctcatctttggtaagctggattgtggcaggcaacatcactccttcctttgtggagggcttggccacgcccactcaggtctggtttgcctggacagtgctcaacatggaatccatctttgaagaggactcccagctccggagagttattgaaggggaattggtgataaactctgctttcacccctgaccaagctctgaagaaagcccagacccagctgaagctccccatcgtgccatccctccagaggctgctgatttatcgctgggcccaccaggctctggtcacaccttctgatcaccccctcctgccactcatttggcagaagttcttccttctgtatcttcaccgtccgggaccacagtatgggttacccatagatggttgtattggaagaaggttttttcaaagtcctgctcatatcaatttgttgaaagaaatgaagagacgtttgaccgaggtggctgacttccaccatgctgcaagcaaggccctccgtgttccagcagagggcagtgaagggctgccagagagccactctggcacccctggttacctgacttcaccagaactgcacaaggagctggtgaggctcttcaatgtatatatattatggctagaagatgagaattttcaaaaaggagatacctatatcccttctctaccaaagcattatgatattcacaggctagcaaaagtgatgcagaatcagcaggatctgtggatggagtatttgaacatggagcgcatctatcatgagtttcaggagactgttggtctgtggacacaggccaagcttgagtcccattccacaccctgcagtttgtccgtgcagctggacttcactgatcctttgctggctaaagaaagggttttaagtaacttgcggaagcatgaggctccccagcctccccttgctctgcacccgacgaagcctcctgtgccagttatttcctctgctgtgctattgagtcagaaggacgccacccagctggtgtgcacagacctgaatctgttgcaacagcaggccagaaccgcagctcttcgggaatctcagcaggttgctctggatggtgagctgttagacacaatgccaaagcagtatgtgaatcgtgaagaacagaccacactacatttggagtgcagaggcagcagcggtaagaaatgccaaggagccgcagttgtcacggttcagtttgaaggcatgcataagaatgaagccataagccaacagcttcatgttttacggaaggaagtgaagcagttgcaagcagaagctgctaaaccaccatcacttaatattgtggaagctgctgtacatgcagaaaacttgatcacggccttagtgaatgcctacaagttgcagcctacacctgggattcagaaagttggcattagccttttctttactattgtggattacgtcagcgatgagacgcagcgtcatcccccaacaaggcagttctttacttcatgtattgagatcttgggacaggtatttatcagtggcattaaatcagagtgcagaaaagtacttgaaaccattctgaagaacagcaggctctgctccctgctgtctcctttcttcactcccaatgctgcacctgcagagttcatacagctgtatgagcaagtggtgaagtttctaagtgaggacaacagtgatatgattttcatgctgctaaccaaggcttctggagtccattcacttggcacttactgcctggggccttgaaccagatgaggatattttgatgccatttaatcttttctgtaagcactggacttatcttcttctctaccagtttcctgaccagtacagtgacattctcaggctgcttatgcaaagctccgcggagcagcttctgagccccgagtgttggaaggccactctgagagccctgggctgctgcgcccccagctgccagcagggggcagcgtccaccgagggcgccgtgcttcccagctcttctgatgctctcttgtcagacaagcaggtaatggagactatacagtggctttcagactttttttataagcttcggttatccaagatggactttaaaagctttggtttattctcaaaatggagtccttatatggctgatgtgaagacattcttgggctaccttgtgaaaaggctgattgacttagaaatgacctgtttggcccaagacccaactgccagcaggaaaacagtgctgaaatccctacattcagtaatcattcagctctttaagccatggatcctggttttagaggacaacgaaaggtggaacgaggaagccccaagagctgtttcttatttttggggtctgtactctgtgaagtcaactgggttagtgtgctctctgatgcctggaattccagtccccacccagaaacccgcagcatgattgtctgcctccttttcatgatgattttattggcaaaggaagttcaactggtagaccaaacagattcacctttacttagtctccttggacagacaagctcactttcatggcatcttgtggatattgtgtcgtaccagagtgtgctaagttatttcagcagccattacccgccgtccatcatcctggcaaaagaatcttatgctgaattaatcatgaagctcctaaaagtgtctgcgggcctttctattcctactgacagccagaagcatcttgatgcagttccaaaatgccaagcttttactcatcagatggttcaattcctcagcaccctggaacaaaatggaaaaatcaccttagcagtcctagaacaggaaatgtctaagctcttagacgatatcattgtctttaacccgcccgacatggacagccagacccgccacatggccctcagcagcctctttatggaagtcctgatgatgatgaacaacgcgactattccaacagcagagttccttcggggcagtatccggacctggattggccaaaaaatgcatgggctggtggtgctgccccttttaacagcagcctgccagagcctggcgtccgtccgccacatggctgagactacagaagcctgcatcactgcctacttcaaagaaagccctctcaatcagaattcaggatggggacccattctggtatcccttcaggttcccgagctcaccatggaagagttcctgcaggagtgcctcaccttgggcagttacttgactctttacgtctacttgcttcagtgtttaaacagcgaacagactttaaggaatgaaatgaaagtgctgctcatcttaagcaagtggctggaacaggtgtacccaagctccgtggaggaagaggcaaagctgtttttgtggtggcaccaagtccttcagctctccctcattcagacagagcagaatgactccgtcctgacagaatctgtcattcgaattctgctcttggttcagagcaggcagaacctcgtggctgaggagagactcagctctgggatcctgggggcaattgggtttggccggaagtcgcctttgtctaacaggtaaggaagcgcctttctaacactgttgttc

SEQ ID NO: 129119 - DNA, 4232 bp, Homo sapiens
  Payload ID: 5257
  Gene Symbol: EPG5
  Gene Name: ectopic P-granules autophagy protein 5 homolog (C. elegans)
  ENST ID: ENST00000587884
  CDS Start-End: 9-1019
tcaacagcatgatccaggcacacatatctgtaagcactcagcccaatgaagtgggccccgttgctgtgttggagttctgggttcaggctctcataagccagcatctctggtaccgagaacaacctatcctcttcctcatggaccacttgtgtaaagcagcttttcagctgatgcaggaagactgcatacagaaattactctaccaacaacataagaatgccttgggttaccactgtgaccggagtctgctctcatctttggtaagctggattgtggcaggcaacatcactccttcctttgtggagggcttggccacgcccactcaggtctggtttgcctggacagtgctcaacatggaatccatctttgaagaggactcccagctccggagagttattgaaggggaattggtgataaactctgctttcacccctgaccaagctctgaagaaagcccagacccagctgaagctccccatcgtgccatccctccagaggctgctgatttatcgctgggcccaccaggctctggtcacaccttctgatcaccccctcctgccactcatttggcagaagttcttccttctgtatcttcaccgtccgggaccacagtatgggttacccatagatggttgtattggaagaaggttttttcaaagtcctgctcatatcaatttgttgaaagaaatgaagagacgtttgaccgaggtggctgacttccaccatgctgcaagcaaggccctccgtgttccagcagagggcagtgaagggctgccagagagccactctggcacccctggttacctgacttcaccagaactgcacaaggagctggtgaggctcttcaatgtatatatattatggctagaagatgagaattttcaaaaaggagatacctatatcccttctctaccaaagcattatgatattcacaggctagcaaaagtgatgcagaatcagcagggctgcagtcttttgagtattgaccccagcaccaggatgggatttaggaaactctaagagttgaaacactttcatttggatccttaaaccctcctactttcacatcatgtgtatattttatctccagatctgtggatggagtatttgaacatggagcgcatctatcatgagtttcaggagactgttggtctgtggacacaggccaagcttgagtcccattccacaccctgcagtttgtccgtgcagctggacttcactgatcctttgctggctaaagaaagggttttaagtaacttgcggaagcatgaggctccccagcctccccttgctctgcacccgacgaagcctcctgtgccagttatttcctctgctgtgctattgagtcagaaggacgccacccagctggtgtgcacagacctgaatctgttgcaacagcaggccagaaccgcagctcttcgggaatctcagcaggttgctctggatggtgagctgttagacacaatgccaaagcagtatgtgaatcgtgaagaacagaccacactacatttggagtgcagaggcagcagcggtaagaaatgccaaggagccgcagttgtcacggttcagtttgaaggcatgcataagaatgaagccataagccaacagcttcatgttttacggaaggaagtgaagcagttgcaagcagaagctgctaaaccaccatcacttaatattgtggaagctgctgtacatgcagaaaacttgatcacggccttagtgaatgcctacaagttgcagcctacacctgggattcagaaagttggcattagccttttctttactattgtggattacgtcagcgatgagacgcagcgtcatcccccaacaaggcagttctttacttcatgtattgagatcttgggacaggtatttatcagtggcattaaatcagagtgcagaaaagtacttgaaaccattctgaagaacagcaggctctgctccctgctgtctcctttcttcactcccaatgctgcacctgcagagttcatacagctgtatgagcaagtggtgaagtttctaagtgaggacaacagtgatatgattttcatgctgctaaccaagttcgatcttaaacaatggttaagcgccactaaacctcctctgtctgatcgtaccaggcttctggagtccattcacttggcacttactgcctggggccttgaaccagatgaggatattttgatgccatttaatcttttctgtaagcactggacttatcttcttctctaccagtttcctgaccagtacagtgacattctcaggctgcttatgcaaagctccgcggagcagcttctgagccccgagtgttggaaggccactctgagagccctgggctgctgcgcccccagctgccagcagggggcagcgtccaccgagggcgccgtgcttcccagctcttctgatgctctcttgtcagacaagcaggtaatggagactatacagtggctttcagactttttttataagcttcggttatccaagatggactttaaaagctttggtttattctcaaaatggagtccttatatggctgatgtgaagacattcttgggctaccttgtgaaaaggctgattgacttagaaatgacctgtttggcccaagacccaactgccagcaggaaaacagtgctgaaatccctacattcagtaatcattcagctctttaagccatggatcctggttttagaggacaacgaaagcagccaacagcggcattacccctggctagagagtgatactgtggtggcctcaagcattgtgcagctgttcactgactgtattgactcactgcatgagagttttaaagataagctgttgccaggtgatgcaggagccctttggttgcacctgatgcattattgtgaagcatgtacagcacccaaaatgccagagttcattctgtacgctttccatagcacgtaccggaaactgccatggaaggacctgcaccctgaccagatgctcatggaggccttcttcaaagtggaacgaggaagccccaagagctgtttcttatttttggggtctgtactctgtgaagtcaactgggttagtgtgctctctgatgcctggaattccagtccccacccagaaacccgcagcatgattgtctgcctccttttcatgatgattttattggcaaaggaagttcaactggtagaccaaacagattcacctttacttagtctccttggacagacaagctcactttcatggcatcttgtggatattgtgtcgtaccagagtgtgctaagttatttcagcagccattacccgccgtccatcatcctggcaaaagaatcttatgctgaattaatcatgaagctcctaaaagtgtctgcgggcctttctattcctactgacagccagaagcatcttgatgcagttccaaaatgccaagcttttactcatcagatggttcaattcctcagcaccctggaacaaaatggaaaaatcaccttagcagtcctagaacaggaaatgtctaagctcttagacgatatcattgtctttaacccgcccgacatggacagccagacccgccacatggccctcagcagcctctttatggaagtcctgatgatgatgaacaacgcgactattccaacagcagagttccttcggggcagtatccggacctggattggccaaaaaatgcatgggctggtggtgctgccccttttaacagcagcctgccagagcctggcgtccgtccgccacatggctgagactacagaagcctgcatcactgcctacttcaaagaaagccctctcaatcagaattcaggatggggacccattctggtatcccttcaggttcccgagctcaccatggaagagttcctgcaggagtgcctcaccttgggcagttacttgactctttacgtctacttgcttcagtgtttaaacagcgaacagactttaaggaatgaaatgaaagtgctgctcatcttaagcaagtggctggaacaggtgtacccaagctccgtggaggaagaggcaaagctgtttttgtggtggcaccaagtccttcagctctccctcattcagacagagcagaatgactccgtcctgacagaatctgtcattcgaattctgctcttggttcagagcaggcagaacctcgtggctgaggagagactcagctctgggatcctgggggcaattgggtttggccggaagtcgcctttgtctaacaggtaaggaagcgcctttctaacactgttgttc

SEQ ID NO: 129120 - DNA, 6375 bp, Homo sapiens
  Payload ID: 5257
  Gene Symbol: EPG5
  Gene Name: ectopic P-granules autophagy protein 5 homolog (C. elegans)
  ENST ID: ENST00000590854
  CDS Start-End: 1-1517
aggtggaacgaggaagccccaagagctgtttcttatttttggggtctgtactctgtgaagtcaactgggttagtgtgctctctgatgcctggaattccagtccccacccagaaacccgcagcatgattgtctgcctccttttcatgatgattttattggcaaaggaagttcaactggtagaccaaacagattcacctttacttagtctccttggacagacaagctcactttcatggcatcttgtggatattgtgtcgtaccagagtgtgctaagttatttcagcagccattacccgccgtccatcatcctggcaaaagaatcttatgctgaattaatcatgaagctcctaaaagtgtctgcgggcctttctattcctactgacagccagaagcatcttgatgcagttccaaaatgccaagcttttactcatcagatggttcaattcctcagcaccctggaacaaaatggaaaaatcaccttagcagtcctagaacaggaaatgtctaagctcttagacgatatcattgtctttaacccgcccgacatggacagccagacccgccacatggccctcagcagcctctttatggaagtcctgatgatgatgaacaacgcgactattccaacagcagagttccttcggggcagtatccggacctggattggccaaaaaatgcatgggctggtggtgctgccccttttaacagcagcctgccagagcctggcgtccgtccgccacatggctgagactacagaagcctgcatcactgcctacttcaaagaaagccctctcaatcagaattcaggatggggacccattctggtatcccttcaggttcccgagctcaccatggaagagttcctgcaggagtgcctcaccttgggcagttacttgactctttacgtctacttgcttcagtgtttaaacagcgaacagactttaaggaatgaaatgaaagtgctgctcatcttaagcaagtggctggaacaggtgtacccaagctccgtggaggaagaggcaaagctgtttttgtggtggcaccaagtccttcagctctccctcattcagacagagcagaatgactccgtcctgacagaatctgtcattcgaattctgctcttggttcagagcaggcagaacctcgtggctgaggagagactcagctctgggatcctgggggcaattgggtttggccggaagtcgcctttgtctaacaggttccgagtggttgcccgaagcatggctgccttcctttcagttcaggttcctatggaagatcagatccgtttgaggcctggctctgaattacatctgacccccaaagctcagcaggctctgaatgctcttgaatccatggcatcaagtaagcagtatgttgaataccaggatcaaatattgcaagccacccaatttataaggcatcctggccattgccttcaagatgggaaaagcttcttggctcttctcgttaactgtctgtatccagaagtgcattatttggaccacatacgatagttaacactgaggctcttgaaaaacccattgctgtttatgtttacatttaactttgctgttgcacaagtaactttgctcaattgcactgtagagctcagtttggccaatgtgtagttgactgagatgcaagttgggaggcgttagatattagataattttggggtgtgtgtgtgtgtgtgtgtgtgttttcttagctcttaagaccttctggggactctttaagtttttatatttatccacaagagaaacttactaagttccacttgggtgcagagccactcacagttgccgaatgtcccagtcatctcacaagacctccagatggagttctttgtatgtttccacttctgtctctgttttatgtaaatgttccagatctgacaaccttggaagtcactcagtacccttacttttaaaccccatttgtgttcctccaaagtaaagaagtcaattttgaaaaatttctgcatttctcaaatgtggacaaatacaatagttttaaagtattgtttttctcagaagggagataaaaatgccgagttagttaaagtgggtcatgtgtaaaatacgaccacttgatcgtgattatagtgggcagtagagatgatgacaagtcaatttccatccagccgtgtatcctcatggagaagctgcctgtctgaatcaggatggcaagctggcagtctgggaggagcatgttttgcacagatgttttgtttggtccacttggtgaggagtgcagacagggctgcctctctctagtcgggagagtctgtgcattccctcgggccctgaccctagcctcattcacatcacttgcccctgtcgacacctaagtttgcaccctttgatagacaccatgttcgatatctgaaaggctcagtgtcaggagacagagactgagggagactgaagacctgattctctgttccctgcttgttttttaacttcaaactcagatgaagccaatggacctgctgaaacacttgtctgtggaaactgggtcaggtcgggagatctactgaaatttggctttttttccatagccacgtgccttctgttgttgacagttcattcattaccaaagcctgtgtgtaactttgccttgttctgtggccatcttcttgctcatgttatttctcctgggaatgagcagtttgacttctgttcccacgttcctcattctatcagctctagatggattttgcctgcatagctggcttaatatgtctttgtgtatgggtagtctgtagcctgagaatatttacctaaaaatgtctaaacagccaccaagaatgtttataggggtataggaatatagttaacagagtgctaatctctcctcaaatgtccttttggaatgcttcccccaaaattgggaagttggtaggagcttttctttactttgaatttctttacttggacagaacgattctgccttaaagacacgctttgcagctctgataaagaacatccctgtttagtctcttgagttttacaggccacaaaatgtccgtctcagagggatctgtctcagcttttcttatttttgcttctctccgttttcaaaattaatcatcttgttctctgtataagaaaatttgagaagctgtggacaatttaatagtctgatctggcaacagcgatttttgtttggaaatattttgtgttttctttgaggaggatataattactgatatcctaggatgtgaaatttttgagtgacagtatgcacattttaaagaaaattatgattaatctgtataatgttttttggtctgtaaaaattataaaaaataaaatcatttatctttggttgtaactgtttaaaaaccaaattatagggatatcacactatcttgtaaagtgtttcagctgttaaagttgctgtaggtttttatgcctgatgtcatttaatttatttgacattgaacttcattaataatcagagatggtcagtgaaagcgcttcctctttaactctttcttgcttaaccttggaaggttgactcaactcctaggtgtctatgggaaactctgggctaggaacgtgctataaagacactgagctagttcagacatggccatgctgctgtagcctcctgggaaagaagggcggcagagagaccagcccgcctgttggcttgcaggggtaatgagccttggcttgaaaaaattgttggcctccagagagcacggggctgtggtttcagaatcagtgatgggtgccgcacatcaagacgggaatcaagcaagaccaaggccctgtggactgagcagcgtggagggcgaacggctgcaggctccagacttcaccacagggtggccaacagtggcatcgggaccaaataaagatgtctaacagcttcctgggagcaggaggaggcaggattctggttgccatgaaaaacatctctctccctctccatcactccccatgctgcagtgcacaggtgggttgcagaggcaggctgcatcccggaatcatgttgtcccactgcctattaatagaacaagtgaagggcagaatgctggaacacaccagacatagagggagggaggtcctgccagatgtgtctacacaactgtctacatagcatgacagtagcagtggattcgggacccacctgtacatgtttccaaagctccttcctgcacactcgggacctcagctccaaggcgtgactcatttctcagtctcaccatcctttgttggctcagacatcgcatgcctctgccccactggggttgtgtgcctgcgtctctcacttctttgaggttggggaaagcctagtccagaaaatgaaaacccatagaccagcctaacttcctttcaaccaagtgacggcctcctggttcctctcagttcatcatcaaaatcagtgtgtacatgtcatacaagccaagagtgttcatgtcctcgttcctttcaaatgaaggtgatatatactttttcactgagtttttattcctgaaattctttcttctggagcaggaagcaaatgtcctggaatcgtagacttttacagtcagaagggtcattcacgttcatctagtgcccctctcactctgcagggatcctcctgcctctcctctgcccctgtccagtgcctggtggtccagcctgtgatgggcaggcctaggctgccatccgcaggctctgtagttctgctttctattgaaccaagatgtttctacgttgcctattggtcgtggttctgtccagagcagttcaggctggggctgttcacttgcccctccttgaggcagacctttagatattttcagttttcatcacatgtctaacaccacttccaccccacccctcacctcttaggctaaatccaagctaaatcccccaatgtcttttttttttttttttttttgagacgagtctcatctgtcacccaggctggagtgcaatggcatggtctcggctcactgcaacctccgcctcctgggttcaagctattctgcctcagcctcccaaggagccaggactacaggtgcatgccaccacgcccggctaatttttgtattttttagtagagacagggtttcacccagccattgagacaagctggtttcaaactcctgaccttgtggtccgcccgccccggcctcccagagtgctgggattacaggcgtgagccaccgcgcccatctcccctgcaatgtctttagttagaccttttccaccatcatgtctaactgggctacggtttggggaaagtgtccaaattagtccgtgttatcctaaaaggggtgtgccccggattagcagggccagggctagggtgagacaaatgaggcacctggggcatacatttaagttggtgcttgcttgcaggtgccaagagagtgcttccttgggtttacccccgtggtgcctcctttacctcattctggccccagccctggggttagagtcgcaccagtgtggtccaagtggcataattatctccctaaatgcttgggcagcatcagctttcagtagctgtgccccatgggaggcacattaagctagtggcaagttgagactgcagacctcagcttaatatcagttgttgcccaagacagatctcaccccacatcttcatgacaggcctaacaacaaggcactttgcccttaatcctctactactgcctgctcttcattttgggccaactgtacagctcattttgagatagtagctgatcatttttctgatcagttaactttgtcttattaagcaaaatggagaatataatgttgggaaataagtgtgttgattaaaagaaagtatccccttctaccatcttccatttgtgtctgggttgtgctgggtaaagttctagacttactaacgcagacttcattttggtccggtttccacagcatgcctcgggcatcagtgtccaggagtagctgtatttgaggtttccttcactctggtaggttcctgattcctgatgaaaataacttgaaaaaaaaataattatactactgatcctcttttgggataatgaaattgcgaaggaatgttgttgattataacttttattttttaatgtacagatgtactgtctctcattgagcactgatagaatttatttttctttcaatagtttaaaatcacttatgtggagacacatacttaagtgtgttcaactcgttttcttcccacatatctagtgtgacctttaaaaaccacaactttattttggacattaaatgtgcaatattcactacttattcattgttccacatttttcatacttgtacaaagggtaagtttttatataatggtgagaaacaggaagaaatgacaactggttaagtaaaattctgcaaataaactagattcgaatttaattta

SEQ ID NO: 129121 - DNA, 3999 bp, Homo sapiens
  Payload ID: 5257
  Gene Symbol: EPG5
  Gene Name: ectopic P-granules autophagy protein 5 homolog (C. elegans)
  ENST ID: ENST00000592272
  CDS Start-End: 9-2579
tcaacagcatgatccaggcacacatatctgtaagcactcagcccaatgaagtgggccccgttgctgtgttggagttctgggttcaggctctcataagccagcatctctggtaccgagaacaacctatcctcttcctcatggaccacttgtgtaaagcagcttttcagctgatgcaggaagactgcatacagaaattactctaccaacaacataagaatgccttgggttaccactgtgaccggagtctgctctcatctttggtaagctggattgtggcaggcaacatcactccttcctttgtggagggcttggccacgcccactcaggtctggtttgcctggacagtgctcaacatggaatccatctttgaagaggactcccagctccggagagttattgaaggggaattggtgataaactctgctttcacccctgaccaagctctgaagaaagcccagacccagctgaagctccccatcgtgccatccctccagaggctgctgatttatcgctgggcccaccaggctctggtcacaccttctgatcaccccctcctgccactcatttggcagaagttcttccttctgtatcttcaccgtccgggaccacagtatgggttacccatagatggttgtattggaagaaggttttttcaaagtcctgctcatatcaatttgttgaaagaaatgaagagacgtttgaccgaggtggctgacttccaccatgctgcaagcaaggccctccgtgttccagcagagggcagtgaagggctgccagagagccactctggcacccctggttacctgacttcaccagaactgcacaaggagctggtgaggctcttcaatgtatatatattatggctagaagatgagaattttcaaaaaggagatacctatatcccttctctaccaaagcattatgatattcacaggctagcaaaagtgatgcagaatcagcaggatctgtggatggagtatttgaacatggagcgcatctatcatgagtttcaggagactgttggtctgtggacacaggccaagcttgagtcccattccacaccctgcagtttgtccgtgcagctggacttcactgatcctttgctggctaaagaaagggttttaagtaacttgcggaagcatgaggctccccagcctccccttgctctgcacccgacgaagcctcctgtgccagttatttcctctgctgtgctattgagtcagaaggacgccacccagctggtgtgcacagacctgaatctgttgcaacagcaggccagaaccgcagctcttcgggaatctcagcaggttgctctggatggtgagctgttagacacaatgccaaagcagtatgtgaatcgtgaagaacagaccacactacatttggagtgcagaggcagcagcggtaagaaatgccaaggagccgcagttgtcacggttcagtttgaaggcatgcataagaatgaagccataagccaacagcttcatgttttacggaaggaagtgaagcagttgcaagcagaagctgctaaaccaccatcacttaatattgtggaagctgctgtacatgcagaaaacttgatcacggccttagtgaatgcctacaagttgcagcctacacctgggattcagaaagttggcattagccttttctttactattgtggattacgtcagcgatgagacgcagcgtcatcccccaacaaggcagttctttacttcatgtattgagatcttgggacaggtatttatcagtggcattaaatcagagtgcagaaaagtacttgaaaccattctgaagaacagcaggctctgctccctgctgtctcctttcttcactcccaatgctgcacctgcagagttcatacagctgtatgagcaagtggtgaagtttctaagtgaggacaacagtgatatgattttcatgctgctaaccaagttcgatcttaaacaatggttaagcgccactaaacctcctctgtctgatcgtaccaggcttctggagtccattcacttggcacttactgcctggggccttgaaccagatgaggatattttgatgccatttaatcttttctgtaagcactggacttatcttcttctctaccagtttcctgaccagtacagtgacattctcaggctgcttatgcaaagctccgcggagcagcttctgagccccgagtgttggaaggccactctgagagccctgggctgctgcgcccccagctgccagcagggggcagcgtccaccgagggcgccgtgcttcccagctcttctgatgctctcttgtcagacaagcaggtaatggagactatacagtggctttcagactttttttataagcttcggttatccaagatggactttaaaagctttggtttattctcaaaatggagtccttatatggctgatgtgaagacattcttgggctaccttgtgaaaaggctgattgacttagaaatgacctgtttggcccaagacccaactgccagcaggaaaacagtgctgaaatccctacattcagtaatcattcagctctttaagccatggatcctggttttagaggacaacgaaagataagctgttgccaggtgatgcaggagccctttggttgcacctgatgcattattgtgaagcatgtacagcacccaaaatgccagagttcattctgtacgctttccatagcacgtaccggaaactgccatggaaggacctgcaccctgaccagatgctcatggaggccttcttcaaagtggaacgaggaagccccaagagctgtttcttatttttggggtctgtactctgtgaagtcaactgggttagtgtgctctctgatgcctggaattccagtccccacccagaaacccgcagcatgattgtctgcctccttttcatgatgattttattggcaaaggaagttcaactggtagaccaaacagattcacctttacttagtctccttggacagacaagctcactttcatggcatcttgtggatattgtgtcgtaccagagtgtgctaagttatttcagcagccattacccgccgtccatcatcctggcaaaagaatcttatgctgaattaatcatgaagctcctaaaagtgtctgcgggcctttctattcctactgacagccagaagcatcttgatgcagttccaaaatgccaagcttttactcatcagatggttcaattcctcagcaccctggaacaaaatggaaaaatcaccttagcagtcctagaacaggaaatgtctaagctcttagacgatatcattgtctttaacccgcccgacatggacagccagacccgccacatggccctcagcagcctctttatggaagtcctgatgatgatgaacaacgcgactattccaacagcagagttccttcggggcagtatccggacctggattggccaaaaaatgcatgggctggtggtgctgccccttttaacagcagcctgccagagcctggcgtccgtccgccacatggctgagactacagaagcctgcatcactgcctacttcaaagaaagccctctcaatcagaattcaggatggggacccattctggtatcccttcaggttcccgagctcaccatggaagagttcctgcaggagtgcctcaccttgggcagttacttgactctttacgtctacttgcttcagtgtttaaacagcgaacagactttaaggaatgaaatgaaagtgctgctcatcttaagcaagtggctggaacaggtgtacccaagctccgtggaggaagaggcaaagctgtttttgtggtggcaccaagtccttcagctctccctcattcagacagagcagaatgactccgtcctgacagaatctgtcattcgaattctgctcttggttcagagcaggcagaacctcgtggctgaggagagactcagctctgggatcctgggggcaattgggtttggccggaagtcgcctttgtctaacaggtaaggaagcgcctttctaacactgttgttc

SEQ ID NO: 129122 - DNA, 858 bp, Homo sapiens
  Payload ID: 5258
  Gene Symbol: EDARADD
  Gene Name: EDAR-associated death domain
  Uniprot ID: Q8WWZ3
  ENST ID: ENST00000334232
  CDS Start-End: 168-815
ccgaaggcagaccaagaggaagtttatcctcccacctacaaattccccagagagctttcatctagaaggtttgactctggccagacaaccagcgagcatcttctcgcaatctgttgcttcttccatggcaaactccagagaattaagaagccaaactcaacatcgccatgggcctcaggacgactaaacagatggggagaggcactaaagctcctggtcaccaagaggatcatatggtaaaggaaccagtggaagacacagaccctagcactttatcctttaatatgtcagacaaatatcccattcaagatacggaactccctaaagctgaagaatgtgatacaattactttgaactgcccacgaaattcagatatgaaaaatcagggagaagaaaatggctttccagatagcactggagatcctcttccagagatcagcaaggacaactcctgcaaagaaaactgtacttgttcctcctgcttgctccgggcccccaccataagtgacttgctcaatgatcaggacttactagacgtgatcaggataaagctggatccgtgtcacccaacggtgaaaaactggaggaattttgcaagcaaatgggggatgtcctatgacgaattgtgcttcctggagcagaggccacagagccccaccttggagttcttgctccggaacagtcagaggacggtgggccagctgatggagctctgcaggctctaccacagggccgacgtggagaaggttctgcgcaggtgggtggacgaggagtggcccaagcgggagcgtggagacccctccaggcacttctagagctcttcttcttccttcattggcctctccggatgttgaaaca

SEQ ID NO: 129123 - DNA, 3097 bp, Homo sapiens
  Payload ID: 5258
  Gene Symbol: EDARADD
  Gene Name: EDAR-associated death domain
  Uniprot ID: Q8WWZ3
  ENST ID: ENST00000359362
  CDS Start-End: 215-832
aattgccaaagcaggaagtgagctcgtggaagaagcgaaggaggagaagaagaagggaggggaaggcggaggagggcaggggcgcgcagagccacggtttgctccaggcgcgtcggaaccgcaggacttttcatccccgtggtcccacggtcctcccgcgccccggaggcctgccagccccgctcggacgctcgtttgcccctaacccgccgccatggcttcaccggacgaccctctgcgcgcagatcatatggtaaaggaaccagtggaagacacagaccctagcactttatcctttaatatgtcagacaaatatcccattcaagatacggaactccctaaagctgaagaatgtgatacaattactttgaactgcccacgaaattcagatatgaaaaatcagggagaagaaaatggctttccagatagcactggagatcctcttccagagatcagcaaggacaactcctgcaaagaaaactgtacttgttcctcctgcttgctccgggcccccaccataagtgacttgctcaatgatcaggacttactagacgtgatcaggataaagctggatccgtgtcacccaacggtgaaaaactggaggaattttgcaagcaaatgggggatgtcctatgacgaattgtgcttcctggagcagaggccacagagccccaccttggagttcttgctccggaacagtcagaggacggtgggccagctgatggagctctgcaggctctaccacagggccgacgtggagaaggttctgcgcaggtgggtggacgaggagtggcccaagcgggagcgtggagacccctccaggcacttctagagctcttcttcttccttcattggcctctccggatgttgaaacaaccacaggtcaagaaggaatgtgaatctgttgttttataagagtttaggacaaggacgtggaacagtggacactggttttccccaaagctggcagttttgtggaggggtagcttgtttcggtggtggatctctgtttatttttgcacatctgttataatttaatattcaaatctggaattaagaaaacatattttctagtatcctctaagggccaaagtcctacaatcggaatggattcatgccacgttgaagataaaattatcctctctctgaaatacggtaaagatttaaataggtcctgagactgttgatagccccagacatacccacagcattatatgtaacatctctcctgatcagtgccattcccacggtttcaaagaaaacagctacaaggaatgcttacctgagtgtctgcagcaccctccacttctctcctaggcaatgagacccagtggctagaaattcaccatgtctattctcaagatccatgccagggagctctttgactctcgtgggaatcccactgttgaggttgatctcttcacctcagaaggtctcttcagagctgctgtgcccagtggtgcttcaactggtatctatgaggtcctagagctccaggacaatgataagactcgctatatggggaagggtgtctcaaagcctgttgagcccatcaataaaactattgcacctgtcctggttagcaagaaactgaacgtcacagaacaagagaagattgacaaacttatgatagagatggatggaacagaaaataaatctaaatttggtgcaaatgccattctgggagtgtccctcgctgcctgcaaagctagtgctgttgagaagggggttcccctgtaccaccacatcgccgacttgtctggcaactccaaagtcatcttgccagtcccggtgttcaatgtcatcaatggcagttctcatgctgtcaccaagctggccatgcaggagttcatggtcctcccagtcggtgcagcaaacttcagggaagccatgcccattggagcggaggtttaccacagcctgaagaatgtcatcaaggagaaatatgggaaagatgccaccggtgtgggggatggaggcgcgtttgctcccaacatcctggagaataaagaaggcctggagctgctgaagactgcgattgggaaagctggctacactgataaggtgatcgtcagcatggacgtagaggcctccgagttcttcaggtctggaaagtatgacctggaattcaagtttctcgacgaccccaccaggtacatctcacctgactgtctggctgacctgtacaagtccttcatcaaaaactacccagtggtgtctactgaagatccctttgaccaggatgactggggagcttggcagaagttcacggccagtgcaggaatccaggtagtggaggatgatctcagagtgaccaacccaaagaggacagcctcggccgtgaatgagaagaagtgcaactgcctcctgctcaaagtgaaccagattcgctctgtgactgagtcccttcaggcgtgcaagctggcccaggccaatggttggtgtgtcatggtgcctcatcattctggggagactgaaaataccttcatcactgacctggtggtggggctgtgacctgggcagctcaagactggtgccccttgctgatctgagcgcttggccaagtacaaccagctcctcagaattgaagaggagctgggcagcaaggctaagtttgccggcaggaacttcagaaaccccccagccaagtaagctgtgggcaggcaagcccttcagtcacctggtggctaattagacccctccccttgtgtcaactccggcagctcaagacccccgagcaacatttgtaggggccgctgctagttagctacccttgcccaccgccgtggagttcgcacctcttccttagaacttctacagaagcaggttgcagtgagccgagattgcgccactgcacaccagtctggagacagagtgagagtccgtcccagaaaaaaaaaaaaaaaaaaagaacttctacagaagccaagctccctggagccctgttggcagctctagccttgcagtcatgtaattggcccaaatcaccggagccacgtgaccctccagtgtcatctccggggtggccacaggcaagatccccagtgattttgtgctcaaaataaaaagcctcattgacccatgagaaaaaagaaaa

SEQ ID NO: 129124 - DNA, 658 bp, Homo sapiens
  Payload ID: 5258
  Gene Symbol: EDARADD
  Gene Name: EDAR-associated death domain
  ENST ID: ENST00000439430
  CDS Start-End: 407-658
ttctgatcccggacgaccgtaaggtgcaaactcaaagacctacttccaagctgccgtccatgtgctgcccaatgaagctgcaacacgtgaacctctgtggaaggcgcccaccttttctccagtccttctctcactgagtgccctatcaaaatggaagaatccctgaatgaacccatttcaagtttgaattgtggtaaaatattgcaatcccaagtgttggttgcctacagcttcctactgattttggctggtgtctaaaaagaagctttgagagaagaaaaatagctccaagcattctgagctctgtaaagtactcgggaccagagagacaggagtgtgagacttcagtcatgcctgcctccagccctcccctgccccatacctggggtcaattgtttaagatcatatggtaaaggaaccagtggaagacacagaccctagcactttatcctttaatatgtcagacaaatatcccattcaagatacggaactccctaaagctgaagaatgtgatacaattactttgaactgcccacgaaattcagatatgaaaaatcagggagaagaaaatggctttccagatagcactggagatcctcttccagagatcagcaaggacaactcctgcaaagaaaactgtacttgttcctcctgcttg

SEQ ID NO: 129125 - DNA, 768 bp, Homo sapiens
  Payload ID: 5259
  Gene Symbol: EEF1E1-BLOC1S5
  Gene Name: EEF1E1-BLOC1S5 readthrough (NMD candidate)
  ENST ID: ENST00000397456
  CDS Start-End: 10-465
ggccggaagatggcggcggccgcagagttgtcgctactggagaagtccctgggactgagtaaggggaataaatacagtgctcagggcgagcgacagattccagttcttcagacaaacaatggtccaagtctaacaggattgactactatagcagctcatctagtcaagcaagccaacaaagaatatttgctggggagtactgcagaagaaaaagcaatcgttcagcagtggttagaatacagggtcactcaagtagatgggcactccagtaaaaatgacatccacacactgttgaaggatcttaattcatatcttgaagataaagtctaccttacagggtataactttacattagcagatatactattgtactatggacttcatcgctttataatcttggagaaattcattcaaggcttttggatcacagaccagttattcaaggtgaaactcgttattttgtaaaagaatttgaagaaaaacgtggtcttcgagaaatgcgagttcttgaaaatttgaagaacatgatccatgaaacaaatgaacatactcttcccaaatgtagagacacaatgcgggacagcctcagccaggttctccagagattgcaagcagctaatgactcagtctgtagactccaacagagggaacaggaacgaaaaaagattcatagtgaccacttagtagctagtgagaaacagcatatgctccagtgggacaacttcatgaaggagcaacccaacaaaagggctgaagtggatgaagagc

SEQ ID NO: 129126 - DNA, 2691 bp, Homo sapiens
  Payload ID: 5260
  Gene Symbol: EFCC1
  Gene Name: EF-hand and coiled-coil domain containing 1
  Uniprot ID: Q9HA90
  ENST ID: ENST00000436022
  CDS Start-End: 1-1797
atggagccggtcagcacgggcgcggaggccggcatggagggcgcgggaggtgacccgtaccggcgacctgcgcggcgcacgcagtggctgctgagcgccctggcgcaccactacgggctggaccgcggcgtggagaacgagatcgtggtgctggccaccggcctggaccagtacctgcaggaggtcttccaccacctggactgccgcggcgccggccgtctgccccgcgccgacttccgagcgctctgcgctgtgctggggctgcgcgcggagggggccaccacggccgggcaggcagcaggtgacgggaactccagagatgtgacccccggggatgcggccgctgagttggccacggacggggactcagataccgatgaagaggcgcgcctggcgctgcgcgccgagccgccggagctcaccttccgccagttccacgcgcgcctctgtggctacttcggcacccgtgcggggccccggctgccccgcggcgctctcagcgagcacatcgagacgcagatccgcctgcgccgtccgcgccgccgccgccgcccgccctgcgcgcctggccccgacagcggtcctgactgtgagcgcgttgcgcggctggaggaggagaatagcagcttgcgcgagttggtggaggacctgcgcgccgcgctgcagagcagtgatgcgcgctgcctagcactgcaggtcggactctggaagagccaggcgagcacccacgagatggggcacggcgggccggaggctgcggtgcgggagctgcgtcaggcgcagggcgccctggctgcggcggaggcccgcgctgggcggctgcgccgtggccaggccgaggtgcggcggcgcgcggaggaggcccggcaggtggtgctgcgcagcctgcaccgcgtgcgagagctggaggcgctggcgcaacaggtgcccggcttgcagcgctgggtgcggcggctggaggcggagctgcaacgctacaggtcagaggattcccagctcccaaccccgcagctagccaacccagagccaggagacaagagtaatgaacctgaagatgctgggaccagagacccagaccccactccagagggagcctggcagtcagacagcagctctggaagcagagccctggatgaagtggacgagcagctgttccgctccgtggagggccaggccgcctctgacgaggaggaggtggaggaggagaggtggcaggaggagaagaagacgccggcagccgaggccaagacactgctggcccggctctccagctgcagaggcaggtgtgatgaccagacggcggagaagctcatgacttactttggtcacttcggcggtgccaaccatgcccataccctgggggagctggaggcctgcattgccatgctggtggagcagctgaggactcagggctgcggtgggaggaccctggggacctctgaggaggaggcagagttgcagcagaaggtggaagagaatgagcacctgaggctggagctgcagatggtagagaccgagagggtgcggctgtccctgctggaggagaagctggtggacgtgctgcagctcctgcagaggctccgggacctgaacatatcgaaaagagccctggggaagattttgctgagcacgctggacgctttcagggaccccacccacgagggaaggcccagccctgcagccatcctggatgccctgcaccaagccttggctgcctgccagctgttgcggagacagccctcggcaccagcctctgcagcagctgcgctcaccaaccccctcctcgtctcctgctgaggttactggcccaccctgtgggcaccctgctcagcctgactgcctttggaccagcctccatgatcagcccaaccactgacagctggtctgaccaccgtcacatcatcagaacttgagtctctgctggctccttccaaggttaagcccgagcccagagcctcccattgcagcacctggcagccaccccttcctcgggctcctccacattacctcgcagcccctgcattcctgccaccagagtccacattaaagccctgcagttgctggatcagcctgcacctgatgctgtatctttcccctgccctcagggcagagatgcccactttctgactgagtctgaccccaaatctcttccccagagtttcaggatctcctcccctcccagcactgtctccttcctcccactggcatgcctgctgcaacggagactgggcccaacctttgggatacctggtctgtaggaaagcactccacaccccaggaaatgttgatgactaggaaaggctgagggaattccaaggaaggaacaatcactgtaggctccctggtagaagctggccttgaaccagctctagaggacaggtaggatttagacaggtaaagaaaggagggaagggcatagaatctaaggtaatggcaagagcaaaggtgtggaaccagaggggggccccaggaatgcagtgcttggagcccctgctcctgaacacgcattaactcctgaactgcgagcccctcctcctgaactgcgtcatggggttgcaggaaggagtaggccaagatacccagtctcacctaacttagactgtcattagagagaaagatccattgccaaacagtgccatgggggtgaaaccagtgctaaatggaggtaaaataaagtttgtaagagcccaa

SEQ ID NO: 129127 - DNA, 2051 bp, Homo sapiens
  Payload ID: 5261
  Gene Symbol: EFCAB1
  Gene Name: EF-hand calcium binding domain 1
  Uniprot ID: Q9HAE3
  ENST ID: ENST00000262103
  CDS Start-End: 82-717
ggctcgcgggggtcccgcgagggtctcggtagccgcgcgcccagagacccccgccgcggcccgattctctgagcgccagacatgaaccgcaagaaactgcagaagctgacggacaccttaaccaaaaattgcaagcattttaataaatttgaagtgaactgtcttataaagcttttttatgacttggtgggaggagtagagaggcaaggtctggttgttggactggatcgtaatgcatttcgaaacatcctgcatgtgacatttggaatgacagatgacatgattatggacagagtattccgaggttttgataaagataatgatggctgtgtaaatgtattggagtggattcatggattatcactgtttcttcgaggatctttggaagaaaaaatgaaatattgctttgaagtgtttgatttgaatggtgacggattcatttcaaaggaggaaatgtttcacatgttgaagaacagccttctcaaacagccatctgaggaagaccctgatgaaggaattaaagatttggttgaaataacactgaagaaaatggatcatgaccatgatgggaagctgtcttttgcagactatgaactggctgtgagagaagagactcttctactggaggcctttgggccatgtcttcctgatccaaagagccagatggaatttgaagctcaagtattcaaagatccaaatgaattcaatgatatgtgaataactaaatgtctatattgtctcaagtgagtaaaaaaggaggcacacacatattgcttattttttctacttagttcagaaaaatgatgttgaattgtgtgtttcagggtgaagatgaggttcacttacatatatcatttaacatcagtgtaagatgcaattaaaatagatggaagacaagaagtcccttattagatgatgggtttggcaagacagttaacttttctacagatgttttatcacatagactatctgtcgaagcacataactggcataaaacctttgggttcattaaatgaatagagagattacataattatgaattgttaatacaaatattctgcatgtcaaaaagaagctgggtgtacactgaaaaatcattgaaactactggatttcctttgaaacaaataatgaagatggcatcaaaagaataagagtattctattgagcattgaaacgcctttctggtaggcattgagggagatctagagagatgaaagatacatggaaatcatattatattgaaatataatatgatttgcattattgtttgaggctttggctaaataacgttactgattgtaagcacctgaaggcaagggttttatccaccacatctttgtctgccatagcatttagtcctctgcatacaatgggctgtccataattactgtagattggactgaaaatcaaaaagtaccacaagataaatgcaaactcttggtgagcagagggagaacatgtactgagtttcttaggtttcatggctaatgcattggcacagctttcagtgtatccctgcagtccttccagatagtccctgccccatgcattgcagatggttgccaaagcccccctctgtcctggcacccagtgttcctccatcctgactccacgtattgcccccttgccactgcctgagtgcaccatagtgtccccatccccccactgcctggagttccccttgtgtacccccttatcagggcacgacctaactgtgccctgctggctgtgacctcctgaagacagacctggcttctccctgcatccagttccccagtatgtgctgtgggcatcctgagaagcctgaaaaagacagggccaggttaggcttgggtgagctgctttctgccttcttggtacacacagtaagcagtggagaggcgtgttacaccgtatctgttctatcctcatctaaatactgagaggctagttgggatagtaaatctttcttactacatatgcattaagtttaagtaaaatagaatattgtgtgaaaaaatgcactgttactaataaatggaataaacagatccatgaaataaaagaaaa

SEQ ID NO: 129128 - DNA, 2286 bp, Homo sapiens
  Payload ID: 5261
  Gene Symbol: EFCAB1
  Gene Name: EF-hand calcium binding domain 1
  Uniprot ID: Q9HAE3
  ENST ID: ENST00000433756
  CDS Start-End: 161-640
cgttgccttggctacaccgtctgttagggccgcgcacgagatcagtaactgagacctcaccgcgttgacccagcaccagggctcgcgggggtcccgcgagggtctcggtagccgcgcgcccagagacccccgccgcggcccgattctctgagcgccagacatgaaccgcaagaaactgcagaagctgacggacaccttaaccaaaaattgcaagcatttattccgaggttttgataaagataatgatggctgtgtaaatgtattggagtggattcatggattatcactgtttcttcgaggatctttggaagaaaaaatgaaatattgctttgaagtgtttgatttgaatggtgacggattcatttcaaaggaggaaatgtttcacatgttgaagaacagccttctcaaacagccatctgaggaagaccctgatgaaggaattaaagatttggttgaaataacactgaagaaaatggatcatgaccatgatgggaagctgtcttttgcagactatgaactggctgtgagagaagagactcttctactggaggcctttgggccatgtcttcctgatccaaagagccagatggaatttgaagctcaagtattcaaagatccaaatgaattcaatgatatgtgaataactaaatgtctatattgtctcaagtgacaatgtgctatcagccctcactcggtcccggcacctcctcggcctcgaagtccactctgtccgcgcttgaggagcccttcagcctgccactgcactgtgggatcccctctctgggcaggcctaggccagagccggctccctctgcttgtggggaggtgtggatggagaggcgcaggctggaaccggggctgcacgtggtgcttatgggccagcacgagttctgggtgggcgccggctcggcaggccccgcacttggagcggccggctggcctgcgggtgccgccggccccaggcagtgaggggcttagcacccgggccaacagctgcgtagggtgcgctgggtcccccagcactgccggcccgcccaagcagtgctagaattctcactgggcctcagctgcctccccacggggcagggctcgggacttgcatcccgccatgcccaagccccacccgacctgtctgggtgggctcccgctctgcccgaacctccccgacaggcctgccccctgctccacagtgcctggtcccatcaactgcccaagggctgaggagtgcaagtgtgcagcttacagcttactaagcttctctaaaccaatcattttgaattctttgtcaggaaattcaaggatttccatttctttggggttggttactggaaaatcagtcatgtttcattggttttatatgtttcttgtagctttgcatttatatctacacacgaaggagcagtcacctcttccacacttttatgggctgcctttggtggggaaagaccttcacctattggtgggtgtgaaggcaccagctggggtgtgacagctctggctccaggtggatacatcttggactctgggcagcttaatcagctggggtcagcatcagtgaagactgtgggcaccatcagtcataaaaactgtgggtgtccatgatggtgacaaaagctgctggggtcctcagtggcaaaggctactggacttctgctctcctttttccccacagagagaggtcacagccaaaacgatcccctttgttgccaagctgtgccagggtagaagatgaggtgatgcagataaaacgcttccaacacttttatatacagctgtccttggtttgggggtgctttaatgggttcctgcagcttcttcactgtactctggagtattctcagagctatttttgttggcaagtagctgttaaattcttgcttttgttggggagacaagagctgggatctcctagtgtatcatcttgttgatattacttgcctgcttttaatattttaactaatttttctgattacaaaggaattgaggttctctgaagaatatttcagatatttaggaaattttaaaataagatgaaaatattgattaatattctggtataaatccttccagacttttacaatgcatttgtaagtacatctacatttttgcaaagagaatactgtatttttcagatgatcatattgaaaatgcacttttgtcttggtgtactactattttgtgaacattttttgaggtcattatttgtctgtagcttgacttgtaatggctgcctggtattccatcatgactgactttattaaaccactttcatgccattgacatgtc

SEQ ID NO: 129129 - DNA, 613 bp, Homo sapiens
  Payload ID: 5261
  Gene Symbol: EFCAB1
  Gene Name: EF-hand calcium binding domain 1
  ENST ID: ENST00000523008
  CDS Start-End: 1-235
caaacagccatctgaggaagaccctgatgaaggaattaaagatttggttgaaataacactgaagaaaatggatcatgaccatgatgggaagctgtcttttgcagactatgaactggctgtgagagaagagactcttctactggaggcctttgggccatgtcttcctgatccaaagagccagatggaatttgaagctcaagtattcaaagatccaaatgaattcaatgatatgtgaataactaaatgtctatattgtctcaacactctatgtggagtaccagaaagccaggctaggcctgtttaggagaggtagacatcacctcgcaagcagcatgaagaaattctatttgggaaacaattaagtgtttttttttaactacaggatttaaaaaccaccactgaaaactggtagtcctgcattcttaacctgcaaatatctctgtgtacaagactgcacttgtaagaaaccaggcctgcaattgcttgcaccataaaatcatccaaaacattcactaagttcctactttgtgcaacaccatgagggttaatgtattctaagctggttgtccctgccctaaccccattcaccatgtaaagtgataatttcatgggc

SEQ ID NO: 129130 - DNA, 920 bp, Homo sapiens
  Payload ID: 5261
  Gene Symbol: EFCAB1
  Gene Name: EF-hand calcium binding domain 1
  ENST ID: ENST00000521701
  CDS Start-End: 151-315
gctacaccgtctgttagggccgcgcacgagatcagtaactgagacctcaccgcgttgacccagcaccagggctcgcgggggtcccgcgagggtctcggtagccgcgcgcccagagacccccgccgcggcccgattctctgagcgccagacatgaaccgcaagaaactgcagaagctgacggacaccttaaccaaaaattgcaagcatttattccgaggttttgataaagataatgatggctgtgtaaatgtattggagtggattcatggattatcactgtttcttcgaggatctttggaagaaaaaatgaaatgaggaaatgtttcacatgttgaagaacagccttctcaaacagccatctgaggaagaccctgatgaaggaattaaagatttggttgaaataacactgaagaaaatggatcatgaccatgatgggaagctgtcttttgcagactatgaactggctgtgagagaagagactcttctactggaggcctttgggccatgtcttcctgatccaaagagccagatggaatttgaagctcaagtattcaaagatccaaatgaattcaatgatatgtgaataactaaatgtctatattgtctcaagtgacaatgtgctatcagccctcactcggtcccggcacctcctcggcctcgaagtccactctgtccgcgcttgaggagcccttcagcctgccactgcactgtgggatcccctctctgggcaggcctaggccagagccggctccctctgcttgtggggaggtgtggatggagaggcgcaggctggaaccggggctgcacgtggtgcttatgggccagcacgagttctgggtgggcgccggctcggcaggccccgcacttggagcggccggctggcctgcgggtgccgccggccccaggcagtgaggggctta

SEQ ID NO: 129131 - DNA, 648 bp, Homo sapiens
  Payload ID: 5261
  Gene Symbol: EFCAB1
  Gene Name: EF-hand calcium binding domain 1
  Uniprot ID: Q9HAE3
  ENST ID: ENST00000523092
  CDS Start-End: 118-597
agtaactgagacctcaccgcgttgacccagcaccagggctcgcgggggtcccgcgagggtctcggtagccgcgcgcccagagacccccgccgcggcccgattctctgagcgccagacatgaaccgcaagaaactgcagaagctgacggacaccttaaccaaaaattgcaagcatttattccgaggttttgataaagataatgatggctgtgtaaatgtattggagtggattcatggattatcactgtttcttcgaggatctttggaagaaaaaatgaaatattgctttgaagtgtttgatttgaatggtgacggattcatttcaaaggaggaaatgtttcacatgttgaagaacagccttctcaaacagccatctgaggaagaccctgatgaaggaattaaagatttggttgaaataacactgaagaaaatggatcatgaccatgatgggaagctgtcttttgcagactatgaactggctgtgagagaagagactcttctactggaggcctttgggccatgtcttcctgatccaaagagccagatggaatttgaagctcaagtattcaaagatccaaatgaattcaatgatatgtgaataactaaatgtctatattgtctcaagtgagtaaaaaaggaggcacacaca

SEQ ID NO: 129132 - DNA, 639 bp, Homo sapiens
  Payload ID: 5261
  Gene Symbol: EFCAB1
  Gene Name: EF-hand calcium binding domain 1
  ENST ID: ENST00000522254
  CDS Start-End: 1-388
tgtaaatgtattggagtggattcatggattatcactgtttcttcgaggatctttggaagaaaaaatgaaatattgctttgaagtgtttgatttgaatggtgacggattcatttcaaaggaggaaatgtttcacatgttgaagaacagccttctcaaacagccatctgaggaagaccctgatgaaggaattaaagatttggttgaaataacactgaagaaaatggatcatgaccatgatgggaagctgtcttttgcagactatgaactggctgtgagagaagagactcttctactggaggcctttgggccatgtcttcctgatccaaagagccagatggaatttgaagctcaagtattcaaagatccaaatgaattcaatgatatgtgaataactaaatgtctatattgtctcaaggtgaagatgaggttcacttacatatatcatttaacatcagtgtaagatgcaattaaaatagatggaagacaagaagtcccttattagatgatgggtttggcaagacagttaacttttctacagatgttttatcacatagactatctgtcgaagcacataactggcataaaacctttgggttcattaaatgaatagagagattacataattatgaattgttaata

SEQ ID NO: 129133 - DNA, 1550 bp, Homo sapiens
  Payload ID: 5262
  Gene Symbol: EFCAB10
  Gene Name: EF-hand calcium binding domain 10
  ENST ID: ENST00000486180
  CDS Start-End: 24-419
tagcaacagcgggacgcggagcgatggagaccagcagcagggagctccaagccgcggagtatttggaaaagcatcagatcaaggaggtggttagctacctcaccagcgccctccttttctttcggccggaaaaaccaaaagaatatttaatatctctattggaacgactgagaattgcaaaagtaacaggcgtggcgtttcctttctttatggataactctaacattgtggctatgtttgagatgatggactcctcaggcagaggcaccatatcatttgtgcagtataaagaagccctaaaaaccctgggtctatgcactgaagatgaagatttacaagatgatggacataaaataactttggataaattcaaggaggaagtgaacaagaggatgaaggaaatatggtcagcattttaataacaccataaatccaagataataagtaattctataaagttttccagtttcattaattcagaatttcatcatataacttgaaatccaattggcttcctctttcttagaaacaaaaaccaaagaaacctttttctgaaagacattattttccagtattaggccaatttgtcctcaaattaagtagaatctcaacatcttgttgagccagtttgtaaattccaacttcatttaatgctgctgtggcaggaagctgccctgaagctgactgcagtacatctttcagcagtagtgcagaaccgacgttcaaattcaaaacaatacaggcttcttttatactgtttagggaaaacaaaggagggaaatgagatctccattatctgcatcaattatattacaattttgagaatcctaaacagcttctctgcactgctggtccacatgttctctataaaaatatttatggatttattatttggttcttttaacatggtaagactacacaggtgcagagttgctatttctttagattactataaggtaatacgatccctatttcaatatgtatccgttatttccctaaatacaatacttaatattaacactatattaaatatagctataactttaggtagattagaacatgggaaaagacaaaaataagagataaatgaaagcagcagaaagaacattaaaataaattttaaaaacagtcctatgaaacgtgtaaacataagctttcattttataagtctaaaaggaatgctttataacctcacaaaacccaaacataatttaaattttactttttttttttgagacatggtcttgctctgtcacctaggctggagtgaaactgcacgatcatagctcactacagcctcagcctctcaagtagctaggactacaggtccacacccccacacctggcttttttttgtttgttcattttaatactttctgtagagatggagtcttgctatgttgcccaggctggtctcaaacagctggcctcaagcaattctcccacctctgcctcccaaagtactgggattacagatgtgggctactatgcctggcctataaattttagatcaacaaattctgaaactataattatatttagaaccaaaa

SEQ ID NO: 129134 - DNA, 799 bp, Homo sapiens
  Payload ID: 5262
  Gene Symbol: EFCAB10
  Gene Name: EF-hand calcium binding domain 10
  ENST ID: ENST00000485614
  CDS Start-End: 34-483
ggcagtcgcctagcaacagcgggacgcggagcgatggagaccagcagcagggagctccaagccgcggagtatttggaaaagcatcagatcaaggaggtggttagctacctcaccagcgccctccttttctttcggccggaaaaaccaaaagaatatttaatatctctattggaacgactgagaattgcaaaagtaacaggcgtggcgtttcctttctttatggataactctaacattgtggctatgtttgagatgatggactcctcaggcagaggcaccatatcatttgtgcagtataaagaagccctaaaaaccctgggtctatgcactgaagatgaagatttacaagatgatggacataaaataactttggataaattcaaggaggaagtgaacaagaggatgaaggaaatatgtgagaaaacaaagggaaaagattccgagtcatatcaaactgcagctgggctgctcctccttcattgaagtgattagcaagaattatctgaaacaaagaataattcatataacagttgtctttattatcacagcccaaaaacagtctattcttacttacttcttggtagatgtatacatccagcttctctacaagcatttgccagaaaattttaaataaggagaaacaaagctgctgctccaactgaagtaaatggtctcgtaacgtcagcagcaacgggcaagccgaactggacagggacatcactgcctgctctgactgagatggcaaggacaaccatctggaaaaaacacatttttaccaaaaaattttcatcagtttcta

SEQ ID NO: 129135 - DNA, 717 bp, Homo sapiens
  Payload ID: 5262
  Gene Symbol: EFCAB10
  Gene Name: EF-hand calcium binding domain 10
  ENST ID: ENST00000460135
  CDS Start-End: 228-458
gccctaagcctggatcgcggacagtgacgttggtccacacctcacctgccctctctgccctgctacatgccccaggcttgccctgaaccgtgagctctagaaattccaggtccgggtcgcagccacagggcagtcaggcgtgtcacgtgaccgcgccgggtagagggagacagagtcgcacggctgagacgccaggcagtcgcctagcaacagcgggacgcggagcgatggagaccagcagcagggagctccaagccgcggagtatttggaaaagcatcagatcaaggaggtggttagctacctcaccagcgccctccttttctttcggccggccctaaaaaccctgggtctatgcactgaagatgaagatttacaagatgatggacataaaataactttggataaattcaaggaggaagtgaacaagaggatgaaggaaatatggtcagcattttaataacaccataaatccaagataataagtaattctataaagttttccagtttcattaattcagaatttcatcatataacttgaaatccaattggcttcctctttcttagaaacaaaaaccaaagaaacctttttctgaaagacattattttccagtattaggccaatttgtcctcaaattaagtagaatctcaacatcttgttgagccagtttgtaaattccaacttcatttaatgctgctgtggcaggaagctgccctga

SEQ ID NO: 129136 - DNA, 740 bp, Homo sapiens
  Payload ID: 5262
  Gene Symbol: EFCAB10
  Gene Name: EF-hand calcium binding domain 10
  Uniprot ID: A6NFE3
  ENST ID: ENST00000480514
  CDS Start-End: 38-421
gccaggcagtcgcctagcaacagcgggacgcggagcgatggagaccagcagcagggagctccaagccgcggagtatttggaaaagcatcagatcaaggaggtggttagctacctcaccagcgccctccttttctttcggccggaaaaaccaaaagaatatttaatatctctattggaacgactgagaattgcaaaagtaacaggcgtggcgtttcctttctttatggataactctaacattgtggctatgtttgagatgatggactcctcaggcagaggcaccatatcatttgtgcagtataaagaagccctaaaaaccctgggtctatgcactgaagatgaagatttacaagatgatggacataaaataactttggataaattcaaggaggaagtgaacaagaggatgaaggaaatatgatgtatacatccagcttctctacaagcatttgccagaaaattttaaataaggagaaacaaagctgctgctccaactgaagtaaatggtctcgtaacgtcagcagcaacgggcaagccgaactggacagggacatcactgcctgctctgactgagatggcaaggacaaccatctggaaaaaacacatttttaccaaaaaattttcatcagtttctatttttcaagtttttaaatcattttaaatttgaggaagtgttctgtcctagggcattttggataagaaaaaatatacagcctaacattaaaagctctatcagaaaa

SEQ ID NO: 129137 - DNA, 3095 bp, Homo sapiens
  Payload ID: 5263
  Gene Symbol: EFCAB11
  Gene Name: EF-hand calcium binding domain 11
  Uniprot ID: Q9BUY7
  ENST ID: ENST00000316738
  CDS Start-End: 30-521
gttgctggggctcggttgttgtagtcgcgatgttcttctccgaggccagagccaggtcgcggacgtgggaagccagtccctcggaacacaggaagtgggtggaagtatttaaagcatgtgatgaagatcacaaaggatatctcagcagagaggactttaaaactgctgttgtaatgctgtttgggtacaagccctccaagatagaagtggattctgtgatgtcttcaataaatccaaatacttctggtatattactcgaggggtttttaaatattgtcaggaaaaagaaggaagctcaacgatatcggaacgaagtaagacacatcttcacagcctttgacacctactatcgtggatttttaactttggaagatttcaaaaaagcatttaggcaggtggctcccaaattaccggaaaggactgttcttgaggtattcagggaagtagatcgagattcagatggtcacgtcagctttagagactttgaatatgccctgaactatggacagaaggaagcctaactattgtgaactacttttggtaactctggggagatcaatagattgtaatgtcagcagactcgactctactaatgatgtcatgctacagacttgtgattaaacatttaaaaatttttaatttttgtgggtacatagtaggtgcatatgtatacatacacacacatatatgggttacgggagatattttggcacaggcatgcaataagtaattgactaaatttttaatcataatttttggatgctgatgatagacttgcatctcagaatcctagagatggttgctgccgggggtctccttctgtgtggccagcagccctgagtcaggccgccattgctagagctggggctagggatggcactggtggtcctcctcctcctcactcttcttgccccctaccctctccacactgcaggccacggtgctctactcactcacttcattgtcctcaccatcccaccctgaatctcatcatctcctaatatctgcagaggggcagacttttcctgccaatggtgccagtttccttcatttgctcaacattggttgaacaaataatagcacctacacatacagaatacttactatgttccaagcaatcagccaggccttgggaagcataggcttaagacttctctaagataggctcatgcctacaatcccagcactttgggaggccaaagcaggaggatcacttgagcctaggaattggagactagcctgggcaacataccgagaccccatccctaccaaaaaattaataataaaaaattatctggatttagtggtgtgtacctgtagtcccagctacttgggaggctgaggtggaaggatcatttgagcccaggggtttgaagcttcagtgagccatgattgcactgtcgcactccagcctggatgatagagcaagaccctgtctctaaaaaaacactttcaattaaaaaaaaacatataaagacttctctaagataatgtccctgagtccaaatcatcactgtaaagtggtcccagggcactgtctgtgcaagacaaagaaatcggcttgggctaacatgagcaagccctctcgggctatatacagaggaagaacagggtgatgagggtactgggggcaagagacatgtttgcagaaccctttaggatggtctaggcttgggagtctcactgtggagaagcaagccttgagctgctcagctgccctctgctccataccccctggtttctagcagtcacgtcctgcacccagacacttagccatgtgtgttcacgttccccatgccttgcctgtcctgctgggctccagtaactgctatactggagcaagaacagcaatgctggacactcagcatttagtgaaggtaattccaaaatactggtatcagtactcttatttataagtgtacggaatgcataacatgaacattagtcaaagaacttttaatataattcactttttaagtgttaaaatttaaaggtcaagtaaaattgtaaatttgtaatatggaaacattaagcgtcattatcatacaaattattagcagataaccttaataaaaataaacgtttgcgggttttttttgagacagagtctcactttgtcacctaagctggagtacagtgcgcgatctcggctcactgcaacttccgcctcctgggatcaagtgattctcctgccttagcctcctgagtatctgggtttacaggtgtgtaccgccacacccggctaatttttagtagagaaggggtttcaccatgttggccaggctggtcttgaactcctgacctcaagtgatccgtctgcctcggcctcccaaagtgctgggattacaggcgtgagccaccatgcctggccaataaaaataaagttttaaactgtcaaataagaggagcctaacaagatgtgacaactaaatgtcatttggtatcctggatgagatcacggaataaaaaataaacattggccggacacagtgactcagcctgtaatcccagcacttcgggaggccgaggcgggtggatcacgaggtcgggagatcgagaccatcctggctaacacggtgaaaccccgtctctactaaaaatacaaaaaacaaaaaaagattagctgggcgtggtggcaggtgcctgtagtcccagctgctcgggaggctgaggcaggagaatagcatgaacctgggaggcagagcttgcagtgagctgaaatggtgccactgcactccagtctgggcaacagagcgagactccctctcaaaaaaaaaaaaaaaaaaaaaaaaaaagacattaagtagaaacaaatcaagcatggactttagctaataataatgtatcactattggttcattaattgtaacaaatgtatcctactcatatataatgttaatagtaggggaaactgggtgaggtatatgggaaccctctactattttcacaatttttctataaatctaaaactattctaaaattaaaaattcatttaaaaaataaagtcttattcaaaacctgttaaactaaactttatctaaaatgaagaaaacattgaaaatcaagtaaaaataaaatcttatttcaaatacaaa

SEQ ID NO: 129138 - DNA, 1870 bp, Homo sapiens
  Payload ID: 5263
  Gene Symbol: EFCAB11
  Gene Name: EF-hand calcium binding domain 11
  Uniprot ID: Q9BUY7
  ENST ID: ENST00000538485
  CDS Start-End: 91-519
gcggtgggcgtggccgcggtaggctgccagccaggctgggaaagcggtggtagctggttgggttgctggggctcggttgttgtagtcgcgatgttcttctccgaggccagagccaggtcgcggacgtgggaagccagtccctcggaacacaggaagtgggtggaagtatttaaagcatgtgatgaagatcacaaaggatatctcagcagagaggactttaaaactgctgttgtaatgctgtttgggtacaagccctccaagatagaagtggattctgtgatgtcttcaataaatccaaatacttctggtatattactcgaggggtttttaaatattgtcaggaaaaagaaggaagctcaacgatatcggaacgaagtaagacacatcttcacagcctttgacacctactatcgtggatttttaactttggaagatttcaaaaaagcatttaggcaggtggctcccaaattaccggaaaggactgttcttgaggtattcagaggcattttcagtgcatgatttaacttcggctgtcatcaggaagctgacttaaagttctttcttgactttgcctgccatcaacaccctgtggtatttctggctggcatttttctctgcatggatatgtttacttctccatgcctaggaaccttctccatctcattgtaagcactgctatttgtacattcccaccacctgtcagttggcaaaaagctctgggaagctgcttttgcttcccagtcatgagatgaaatgtgaatgtgcataaggtccatgccctgacccagcgtccaagatcctgagtgcacaggcagattgccacatgatgatgtaaagtggcaatatcgaggcaccaaatgctcccatcatgactggagacgtttaaagttatatcctgatatttttggtgtaagaatccctttcttcatattacacaagggaaggtcaaaggacataggacatctaactctccttttttgaatattagaaattgggtgaaaatgagaatgtcattgcttgttgaataagatattttcaaaatcagagtattagtgggggctgggtcttaggaatgcaattgtaaaagggagtgatggatattcccttggcagaaaaattatatagatgttatatcacagccattataggggtaaggactgtcaccagcttgggtaaaacaaataggctcttctgttatgctgattggaagagtcttacagagctgagggcctaaaggaaagtgatttcagagaacatttactttttcaagtcatttgcgtctcttttgaaatgttatttctcactgtaatttttagcttcccataattcctttctgccagcagccaacttgtggagtatcattttcctggtccatctctaacaagagaaaatttccagtcattattttgtgcttcagaatgattctgtgtatgatcatgcaacttcagtaagatcacagttattaaaatgagtacctaatttagtgactatgactattggtctttgagtatctgcctgcttccaggtatagaaacatccataaaaacacctacaaatcatatttcattctttgtagccatacatagataacagtcatcagctataccttctgtgtgaatggcatgaccgaagaagtagacttcttgaggtcccaacttttatttcatgaaattttgtgtcttctctggaatggaaatgctttagtttttatttcaatggttttgtttcaaaattatattgtcagagattcccttttctgattgtcctgttgcacatgcttataagatggggagtatgaatgtgtgtaagcttttcaagctgacctcagaatttcctctctgagggacttctagggattttcacatgtgat

SEQ ID NO: 129139 - DNA, 1856 bp, Homo sapiens
  Payload ID: 5263
  Gene Symbol: EFCAB11
  Gene Name: EF-hand calcium binding domain 11
  Uniprot ID: Q9BUY7
  ENST ID: ENST00000556005
  CDS Start-End: 167-523
tcccgtgtctgggtctcactctgccgggtgtgcagataagacctgggctgcctgtccaaagggtcgtggttaatgactgatcctggagctgcagggctcctggctccccgtccaggactacggctacctccaagttccatctcctttctctctatatagtctattaatggtatttaaagcatgtgatgaagatcacaaaggatatctcagcagagaggactttaaaactgctgttgtaatgctgtttgggtacaagccctccaagatagaagtggattctgtgatgtcttcaataaatccaaatacttctggtatattactcgaggggtttttaaatattgtcaggaaaaagaaggaagctcaacgatatcggaacgaagtaagacacatcttcacagcctttgacacctactatcgtggatttttaactttggaagatttcaaaaaagcatttaggcaggtggctcccaaattaccggaaaggactgttcttgaggtattcagaggcattttcagtgcatgatttaacttcggctgtcatcaggaagctgacttaaagttctttcttgactttgcctgccatcaacaccctgtggtatttctggctggcatttttctctgcatggatatgtttacttctccatgcctaggaaccttctccatctcattgtaagcactgctatttgtacattcccaccacctgtcagttggcaaaaagctctgggaagctgcttttgcttcccagtcatgagatgaaatgtgaatgtgcataaggtccatgccctgacccagcgtccaagatcctgagtgcacaggcagattgccacatgatgatgtaaagtggcaatatcgaggcaccaaatgctcccatcatgactggagacgtttaaagttatatcctgatatttttggtgtaagaatccctttcttcatattacacaagggaaggtcaaaggacataggacatctaactctccttttttgaatattagaaattgggtgaaaatgagaatgtcattgcttgttgaataagatattttcaaaatcagagtattagtgggggctgggtcttaggaatgcaattgtaaaagggagtgatggatattcccttggcagaaaaattatatagatgttatatcacagccattataggggtaaggactgtcaccagcttgggtaaaacaaataggctcttctgttatgctgattggaagagtcttacagagctgagggcctaaaggaaagtgatttcagagaacatttactttttcaagtcatttgcgtctcttttgaaatgttatttctcactgtaatttttagcttcccataattcctttctgccagcagccaacttgtggagtatcattttcctggtccatctctaacaagagaaaatttccagtcattattttgtgcttcagaatgattctgtgtatgatcatgcaacttcagtaagatcacagttattaaaatgagtacctaatttagtgactatgactattggtctttgagtatctgcctgcttccaggtatagaaacatccataaaaacacctacaaatcatatttcattctttgtagccatacatagataacagtcatcagctataccttctgtgtgaatggcatgaccgaagaagtagacttcttgaggtcccaacttttatttcatgaaattttgtgtcttctctggaatggaaatgctttagtttttatttcaatggttttgtttcaaaattatattgtcagagattcccttttctgattgtcctgttgcacatgcttataagatggggagtatgaatgtgtgtaagcttttcaagctgacctcagaatttcctctctgagggacttcta

SEQ ID NO: 129140 - DNA, 2716 bp, Homo sapiens
  Payload ID: 5263
  Gene Symbol: EFCAB11
  Gene Name: EF-hand calcium binding domain 11
  Uniprot ID: Q9BUY7
  ENST ID: ENST00000555872
  CDS Start-End: 201-620
ggacttcagcttggcctgggcctctcgcttcctctcccgtgtctgggtctcactctgccgggtgtgcagataagacctgggctgcctgtccaaagggtcgtggttaatgactgatcctggagctgcagggctcctggctccccgtccaggactacggctacctccaagttccatctcctttctctctatatagtctattaatggtatttaaagcatgtgatgaagatcacaaaggatatctcagcagagaggactttaaaactgctgttgtaatgctgtttgggtacaagccctccaagatagaagtggattctgtgatgtcttcaataaatccaaatacttctggtatattactcgaggggtttttaaatattgtcaggaaaaagaaggaagctcaacgatatcggaacgaagtaagacacatcttcacagcctttgacacctactatcgtggatttttaactttggaagatttcaaaaaagcatttaggcaggtggctcccaaattaccggaaaggactgttcttgaggtattcagggaagtagatcgagattcagatggtcacgtcagctttagagactttgaatatgccctgaactatggacagaaggaagcctaactattgtgaactacttttggtaactctggggagatcaatagattgtaatgtcagcagactcgactctactaatgatgtcatgctacagacttgtgattaaacatttaaaaatttttaatttttgtgggtacatagtaggtgcatatgtatacatacacacacatatatgggttacgggagatattttggcacaggcatgcaataagtaattgactaaatttttaatcataatttttggatgctgatgatagacttgcatctcagaatcctagagatggttgctgccgggggtctccttctgtgtggccagcagccctgagtcaggccgccattgctagagctggggctagggatggcactggtggtcctcctcctcctcactcttcttgccccctaccctctccacactgcaggccacggtgctctactcactcacttcattgtcctcaccatcccaccctgaatctcatcatctcctaatatctgcagaggggcagacttttcctgccaatggtgccagtttccttcatttgctcaacattggttgaacaaataatagcacctacacatacagaatacttactatgttccaagcaatcagccaggccttgggaagcataggcttaagacttctctaagataggctcatgcctacaatcccagcactttgggaggccaaagcaggaggatcacttgagcctaggaattggagactagcctgggcaacataccgagaccccatccctaccaaaaaattaataataaaaaattatctggatttagtggtgtgtacctgtagtcccagctacttgggaggctgaggtggaaggatcatttgagcccaggggtttgaagcttcagtgagccatgattgcactgtcgcactccagcctggatgatagagcaagaccctgtctctaaaaaaacactttcaattaaaaaaaaacatataaagacttctctaagataatgtccctgagtccaaatcatcactgtaaagtggtcccagggcactgtctgtgcaagacaaagaaatcggcttgggctaacatgagcaagccctctcgggctatatacagaggaagaacagggtgatgagggtactgggggcaagagacatgtttgcagaaccctttaggatggtctaggcttgggagtctcactgtggagaagcaagccttgagctgctcagctgccctctgctccataccccctggtttctagcagtcacgtcctgcacccagacacttagccatgtgtgttcacgttccccatgccttgcctgtcctgctgggctccagtaactgctatactggagcaagaacagcaatgctggacactcagcatttagtgaaggtaattccaaaatactggtatcagtactcttatttataagtgtacggaatgcataacatgaacattagtcaaagaacttttaatataattcactttttaagtgttaaaatttaaaggtcaagtaaaattgtaaatttgtaatatggaaacattaagcgtcattatcatacaaattattagcagataaccttaataaaaataaacgtttgcgggttttttttgagacagagtctcactttgtcacctaagctggagtacagtgcgcgatctcggctcactgcaacttccgcctcctgggatcaagtgattctcctgccttagcctcctgagtatctgggtttacaggtgtgtaccgccacacccggctaatttttagtagagaaggggtttcaccatgttggccaggctggtcttgaactcctgacctcaagtgatccgtctgcctcggcctcccaaagtgctgggattacaggcgtgagccaccatgcctggccaataaaaataaagttttaaactgtcaaataagaggagcctaacaagatgtgacaactaaatgtcatttggtatcctggatgagatcacggaataaaaaataaacattggccggacacagtgactcagcctgtaatcccagcacttcgggaggccgaggcgggtggatcacgaggtcgggagatcgagaccatcctggctaacacggtgaaaccccgtctctactaaaaatacaaaaaacaaaaaaa

SEQ ID NO: 129141 - DNA, 568 bp, Homo sapiens
  Payload ID: 5263
  Gene Symbol: EFCAB11
  Gene Name: EF-hand calcium binding domain 11
  Uniprot ID: Q9BUY7
  ENST ID: ENST00000556609
  CDS Start-End: 115-462
gcgcggtgaagttcggcttcctgagccgcggtgggcgtggccgcggtatttaaagcatgtgatgaagatcacaaaggatatctcagcagagaggactttaaaactgctgttgtaatgctgtttgggtacaagccctccaagatagaagtggattctgtgatgtcttcaataaatccaaatacttctggtatattactcgaggggtttttaaatattgtcaggaaaaagaaggaagctcaacgatatcggaacgaagtaagacacatcttcacagcctttgacacctactatcgtggatttttaactttggaagatttcaaaaaagcatttaggcaggtggctcccaaattaccggaaaggactgttcttgaggtattcagggaagtagatcgagattcagatggtcacgtcagctttagagactttgaatatgccctgaactatggacagaaggaagcctaactattgtgaactacttttggtaactctggggagatcaatagattgtaatgtcagcagactcgactctactaatgatgtcatgctacagacttgtgattaaacattt

SEQ ID NO: 129142 - DNA, 2326 bp, Homo sapiens
  Payload ID: 5263
  Gene Symbol: EFCAB11
  Gene Name: EF-hand calcium binding domain 11
  Uniprot ID: Q9BUY7
  ENST ID: ENST00000556639
  CDS Start-End: 71-256
aggctgccagccaggctgggaaagcggtggtagctggttgggttgctggggctcggttgttgtagtcgcgatgttcttctccgaggccagagccaggtcgcggacgtgggaagccagtccctcggaacacaggaagtgggtggaagtatttaaagcatgtgatgaagatcacaaaggatatctcagcagagaggactttaaaactgctgttgtaatgctgtttgggtacaagccctccaagaagtggattctgtgatgtcttcaataaatccaaatacttctggtatattactcgaggggtttttaaatattgtcaggaaaaagaaggaagctcaacgatatcggaacgaagtaagacacatcttcacagcctttgacacctactatcgtggatttttaactttggaagatttcaaaaaagcatttaggcaggtggctcccaaattaccggaaaggactgttcttgaggtattcagaggcctaaggattttcagcaagtgtttactctgccatattgaccagaagtctaaaaacccctcctctggcctcttagcagctgactccatcattcaggcacacccctcacctgtgcagattctcagatgtacattaataatgagctagaagggagaggttttatttgggattcatcaatttcctggaggttcatgtggaacatctatggcacaggggagtactgacgtctggtccctagccctgctccccatggtgaagagccttacacactgtgtggacacaccgcccccaacatccatgcttaatccacatccccttcaaacaaccactctgggcagaccctcaggaagaggcctgcaaagggaaaactcttgtcggtccagagaagaaagaattgccaaaattaaataaaaagtcaagattccattacctgatgatttgtgtatttcacgttgtttgcaacaaacctggaagtcatcccaagttcctttctttttcttaccctccacatccaagctgtcaacaaatctcgactctgaccacctctcagcacctccactgtgtcacccagtgcaaacctccaccaccatctcagcctcttacccagctccaggattctgcctttgcccccatcaatctacttcaggtctcttctccacccaataaataagtccagcaatgatccttgtaaaatgtacatcaggaggggccttctcatctcacctatgataggtatggagttttttcttttttccatttcacctgtgatgtatgtttgtgacctccaatatgtaaccacttactatgttgcttttaaaatgatttttaaaggtttgtttacaaccatagccactatttgcaattatgagtgtatagcactaagcatgagaactagatctgtgaaattttttgccagtttcattaggtgacctctgtaagcatcaaaacctggcattgattgaggttgtttcaggctcaactagtactgttcaaaataaagtaactgaaagcaagtctggtggtagaaggtactttataagctaactaatgcttttcaaagggatatatattgaaggaaaggctcgttttatattacatcctataaggcagtgcttcttaaactctctgtggaaaagaaccactttttataaatttccagtctgttgcaaaccgatactttgtaaaaattaataaaagtgaattactagaaaaatgaaatttttgaaaaagacatataaaataaaagttgtaatttttagcaaacaggaagttatattgcaaaaattactggggtataggaaaaaagatacaaaaattgttcgtgtttgttcattgaaagtatgcgtgtaagcaattaataggctattgcacttgtaagttttcttcattttaagggaaaatggaattcccatattaaatgtctatttgtacactttgaacacaatgtggataaatatttaaagtttttaatgtgacaaatgggattgcttcctacttgatactttacctaatctaggtaaaattgccaataaggctacttgtagggaataaggtatatctaaataatttctacgctttattttaataatgatacaaaagaaaccagtctcacaatggaatggagggagagattttagagcaattttcagtgagctcagtttattcattttaaaattttatctaagatggagccagagccactatgctttcaaagtcttccaatccctcaacagacctgagtgccagcaatatatcctgtaaattataattaaatataattatcttttggtgaaataaatggatcctagatccatggattttttagacatagatcttcttttgatggaaa

SEQ ID NO: 129143 - DNA, 698 bp, Homo sapiens
  Payload ID: 5263
  Gene Symbol: EFCAB11
  Gene Name: EF-hand calcium binding domain 11
  ENST ID: ENST00000557685
  CDS Start-End: 1-354
gtatttaaagcatgtgatgaagatcacaaaggatatctcagcagagaggactttaaaactgctgttgtaatgctgtttgggtacaagccctccaagatagaagtggattctgtgatgtcttcaataaatccaaatacttctggtatattactcgaggggtttttaaatattgtcaggaaaaagaaggaagctcaacgatatcggaacgaagtaagacacatcttcacagcctttgacacctactatcgtggatttttaactttggaagatttcaaaaaagcatttaggcaggtggctcccaaattaccggaaaggactgttcttgaggtattcagaggcattttcagtgcatgatttaacttcggctgtcatcaggaagctgacttaaagttctttcttgactttgcctgccatcaacaccctgtggtatttctggctggcatttttctctgcatggatatgtttacttctccatgcctaggaaccttctccatctcattggaagtagatcgagattcagatggtcacgtcagctttagagactttgaatatgccctgaactatggacagaaggaagcctaactattgtgaactacttttggtaactctggggagatcaatagattgtaatgtcagcagactcgactctactaatgatgtcatgctacagacttgtgattaaacatttaaaaattttt

SEQ ID NO: 129144 - DNA, 2153 bp, Homo sapiens
  Payload ID: 5264
  Gene Symbol: EFCAB12
  Gene Name: EF-hand calcium binding domain 12
  Uniprot ID: Q6NXP0
  ENST ID: ENST00000326085
  CDS Start-End: 164-1882
gtccgtagccacggcaacaggttgcttctgcagtctgagctgagcgcctttcgcacgacttggagttacggtttatctgataccccggtacccctacgcaagcaagcccacatcgacacacattcacacacgcccttcagcaccccctcccagcaccacgaccatggacgacgactatgaagcgtaccacagtctgttcttgtcgctgctcggactctgcccgtctaagactcccatcaatgaaaatgctcccgtctttgatcctgaaccggtcattgcccactgcttcaagcagttccagcagaaggacttccgcctgcctcagacccgccggcgaatcatcatggtgcctcgcaaggaggatcagacaccccttaatcctgcatcccaacctcaggctcccccaaagcccatccccagcttcaaagttctggaagctagagatatccaagagcagccagaggacaggaagacctggctgagccagaggtcgaagctgcggcaggagctagagtcctttggtgatgtaaagaggtggctggagaacaagcccagcatcacgccttcagaggccaaggtcttacacatgatccacgaggagcagagtgcccagccaaatgcctcccaggcaactaccaggaccaccaggaagaaagcccccaggctctcccggctgtcccgccagatggtgccccagctccagctgcccgagccccctgccctgtcggtcatgtactcctacctgcatagccgcaagatcaagatcctggagatatttcacaaggtgggccagggtgagaaccagagaatcaccagggaggagttcatcgcggctgtaaaggcagtcggagtccctctgaagaaccaagaggtggaggatatagtgatctacctcagctctcttgggaagcacaacaccatcaccatggatatcctggccaatacctacaagcagtggtctatggctcagcaaaggagcagcctggccactgcaagggagcattatatcttggccaagcacagagattccctgaagggtccgctcaagaagcaggaggtggattcagccccacagcttcccaaagtggacctactgacggtgcctgcagtcgacacgcagatggagacgcggcccatgaccctggaggagatggaggaagtgggcaagcggtaccgcgagcggcagcgacagcacaagctcacgatcccctccatccagtacacggagcaatgtcacctggtgcgctgtgggaatcggcactttgatgagcactgcctcccgtccaccatccacggggatatgagggagctcattgactcggcccgcaggcacaactttctggtctacctgcaatgctggaagctctgtaagtcctatggcctcccgctgacagaggacatcctcatgaaagccttgctgtacccaggagacaagatcattttccagatggacaaagtgtgccccatccggcagccgggaggctactactctgactggaaggtcttttctccgaatctggctctgctccggtcccagggccctggcaagtctaagaggactgacaagaaaacgccaaagaaaagcaagaaaatgcgctttaaggagtttgaggaatttaccaggaagctgaaggtgaagaggtccagtggtctgcagcaaacacaccccaattccttctggccgggtcatcttctggataagctgcagctctacctgcccactgtggccacagaccggagcctggcgctcttcagttgtgttcaacaccagccccatgtctacccagccacctaccaccctgaccactggtggccccttaggaacaagaactacatgacccacgcccattatgatgccgccaaggtgtactacatcaactagagctagccaggtgttgccggacccagccttcctgggccaggggccagtgcagccagcggcccagagcccagacacaagaggagtgtcaaagagtcaaactaaagaaatcctttcaaagagggatggaccgggggccagttccctctggactcaaagtgtccagtgtctcagagggtagatgtgtccaaggaatgacgtgcagtttttgactatttccctcccctgacctctgccctttctacataaagcaggttggagtttttctcatttc

SEQ ID NO: 129145 - DNA, 2154 bp, Homo sapiens
  Payload ID: 5264
  Gene Symbol: EFCAB12
  Gene Name: EF-hand calcium binding domain 12
  Uniprot ID: Q6NXP0
  ENST ID: ENST00000505956
  CDS Start-End: 164-1882
gtccgtagccacggcaacaggttgcttctgcagtctgagctgagcgcctttcgcacgacttggagttacggtttatctgataccccggtacccctacgcaagcaagcccacatcgacacacattcacacacgcccttcagcaccccctcccagcaccacgaccatggacgacgactatgaagcgtaccacagtctgttcttgtcgctgctcggactctgcccgtctaagactcccatcaatgaaaatgctcccgtctttgatcctgaaccggtcattgcccactgcttcaagcagttccagcagaaggacttccgcctgcctcagacccgccggcgaatcatcatggtgcctcgcaaggaggatcagacaccccttaatcctgcatcccaacctcaggctcccccaaagcccatccccagcttcaaagttctggaagctagagatatccaagagcagccagaggacaggaagacctggctgagccagaggtcgaagctgcggcaggagctagagtcctttggtgatgtaaagaggtggctggagaacaagcccagcatcacgccttcagaggccaaggtcttacacatgatccacgaggagcagagtgcccagccaaatgcctcccaggcaactaccaggaccaccaggaagaaagcccccaggctctcccggctgtcccgccagatggtgccccagctccagctgcccgagccccctgccctgtcggtcatgtactcctacctgcatagccgcaagatcaagatcctggagatatttcacaaggtgggccagggtgagaaccagagaatcaccagggaggagttcatcgcggctgtaaaggcagtcggagtccctctgaagaaccaagaggtggaggatatagtgatctacctcagctctcttgggaagcacaacaccatcaccatggatatcctggccaatacctacaagcagtggtctatggctcagcaaaggagcagcctggccactgcaagggagcattatatcttggccaagcacagagattccctgaagggtccgctcaagaagcaggaggtggattcagccccacagcttcccaaagtggacctactgacggtgcctgcagtcgacacgcagatggagacgcggcccatgaccctggaggagatggaggaagtgggcaagcggtaccgcgagcggcagcgacagcacaagctcacgatcccctccatccagtacacggagcaatgtcacctggtgcgctgtgggaatcggcactttgatgagcactgcctcccgtccaccatccacggggatatgagggagctcattgactcggcccgcaggcacaactttctggtctacctgcaatgctggaagctctgtaagtcctatggcctcccgctgacagaggacatcctcatgaaagccttgctgtacccaggagacaagatcattttccagatggacaaagtgtgccccatccggcagccgggaggctactactctgactggaaggtcttttctccgaatctggctctgctccggtcccagggccctggcaagtctaagaggactgacaagaaaacgccaaagaaaagcaagaaaatgcgctttaaggagtttgaggaatttaccaggaagctgaaggtgaagaggtccagtggtctgcagcaaacacaccccaattccttctggccgggtcatcttctggataagctgcagctctacctgcccactgtggccacagaccggagcctggcgctcttcagttgtgttcaacaccagccccatgtctacccagccacctaccaccctgaccactggtggccccttaggaacaagaactacatgacccacgcccattatgatgccgccaaggtgtactacatcaactagagctagccaggtgttgccggacccagccttcctgggccaggggccagtgcagccagcggcccagagcccagacacaagaggagtgtcaaagagtcaaactaaagaaatcctttcaaagagggatggaccgggggccagttccctctggactcaaagtgtccagtgtctcagagggtagatgtgtccaaggaatgacgtgcagtttttgactatttccctcccctgacctctgccctttctacataaagcaggttggagtttttctcatttca

SEQ ID NO: 129146 - DNA, 618 bp, Homo sapiens
  Payload ID: 5264
  Gene Symbol: EFCAB12
  Gene Name: EF-hand calcium binding domain 12
  ENST ID: ENST00000503957
  CDS Start-End: 143-618
ctgagctgagcgcctttcgcacgacttggagttacggtttatctgataccccggtacccctacgcaagcaagcccacatcgacacacattcacacacgcccttcagcaccccctcccagcaccacgaccatggacgacgactatgaagcgtaccacagtctgttcttgtcgctgctcgaagaaagcccccaggctctcccggctgtcccgccagatggtgccccagctccagctgcccgagccccctgccctgtcggtcatgtactcctacctgcatagccgcaagatcaagatcctggagatatttcacaaggtgggccagggtgagaaccagagaatcaccagggaggagttcatcgcggctgtaaaggcagtcggagtccctctgaagaaccaagaggtggaggatatagtgatctacctcagctctcttgggaagcacaacaccatcaccatggatatcctggccaatacctacaagcagtggtctatggctcagcaaaggagcagcctggccactgcaagggagcattatatcttggccaagcacagagattccctgaagggtccgctcaagaagcaggaggtggattcagccccacagcttcccaaagtgga

SEQ ID NO: 129147 - DNA, 3931 bp, Homo sapiens
  Payload ID: 5265
  Gene Symbol: EFCAB13
  Gene Name: EF-hand calcium binding domain 13
  Uniprot ID: Q8IY85
  ENST ID: ENST00000331493
  CDS Start-End: 412-3333
agagctagagcagcgccgcccgaggggcggcaggggctgaccacagagagcgcgggggcctccagccgagaggaagggagggcagctcgggccgaagtcgttggcttcgtaagagcagggtctatgggaagcctcctcagcgtgggttcttggaagaggtggagtttggagaggcttatgcggtacctgattcatccagcaaattaagacctgccaactttttgataatctcgtcaataaattacagaacaattgttcctttcaagatttattcaaaacgtgtcaactctgcttaattaagcactttgatgatttaagaaatcttggaaatccttttgtactattgctcattcatacttgttcatcaaagcctggagtccttaaggacagaatttacctctaaacagaaagatggaaactaaagtacatttattctgccaggcagaggaaaatattgacttattagatgatggctctaattcttttgcaactgacttgtcatcaggaactattaaccacaagaaatacatcaagttttctaaaacaatagagaaggaaatttcaccggaaattaggagtttgagcccagaatataaaaaaatatttgaaacatcaataatcttttgtggagaagaaaagtcctctgatttttcaggagaaaaaaaagttgggagaaagagtttacaagtacaacagcacagtaaaagaactgagattatccctccttttctgaagctgtcaaaggagaaggtgacaaggaaagaaaactctttatgcaagttgccgaatcagtacagcgttcacaagacttcatcacctctttgtacatcttctgcaattactcgggaaaaggaaatgctgtctaacctctacatgacattatatgatgaagtaacccatggatatttacactcaaaagaattaagtgcacttcataaagcctgtaaaatttttagtaaaattcgaagtggtaagatttatgtgaatgatcttccagtgatcctttgcatcttgagaatttctataagtgatttagaaatgcgacaggcactaaagactgttgatattgatgcattccaggatgccttgaagattttctgtaggataaaaggtggtcgagtttcaactgatgacgtgtttgctgttttggatagcatgggtatccctataaaccgtgaaattttagaagaagtgacaaaacatacctatattgacagtaaccacatggtggatattggggatattatatttactttgaatgagctacaggaacagtatgaggatgtttcaattacagaaggatcacctttgaatgaaattacttcagacagaaagttatcaagtgtagcaggatgctatctaaaatataagaagaaaaatagtttgtcttccaaactccctgaaccttcaatatccaaaaagttaaataaaaaaagcaaccaatattatagcaaaattatggagaatgatgaccttgaatctaaaagaccaaaaaatacttggcaaataagaaaatttctgggtggggttggcagcagtaatgtaggagtccaagaaccatattcaaagaatggcataaactttaaaaaacattcagagaagggtgaaattcatgactcaaagtctaaaccacaaagcttgaagagtagtacaagcctcagtaagtctctggataaaagtgatatttctagtatcccaaaacttcagaagccagctgtaagaaagcattccagtctccaaaaacaggtttcgtctacggaaaaaactgcaattagtactctggaaaacttctgtgaagctatcagtaaacttcaagaaaattacattgcagcagaagaacttcagtctattttgccttcaacaggaattaatttattagatgaagaattccagaagattgtgacagacactagtagaaatgagaatggaatggtggagttagatgactttgtaaatgctctcgccaaggagcgaagttttcctgaatgcaatgcgttgcctggtgtcattaaagccattgataaaattaaagataaaaatgtggattatgaggatctaaatacttgtcttcaaaattttggtatttacctttctaagccagaatttaagaagatcacagaactgactgaagctggtgaaacaaaaaaagtgaattttaaagaattcattgatactatgatgagcaacacggaatgcttctctgaaaaattagtattgcctgatgctattgaaaccctcgacgatctcagaaaggagacgatgagtgtttctgacctgtggaatactctgtctagtttgaatagtaatttaaaaaaggatgaatttctagctgcattggaactagtgacagttgatgaaggtgacaaagtacaatttgaagaatttgcaaaagtagtaaggaatatgcgtgatgctgccaggttagaagagttacaggaagttgtcttagctgctgatttgctggaaggtgacatgatagctgggaagaacttggaagactttctaagaaatgttgggattaagtcacctaaagaagaggtagagaaaattcttcaatcagattttgtttctgaagataacatggtgaacattaaagactgtatgagggctttgagggacacccagaaattttccaattatattgatttcaggaaagaggcttcaaatctaaaattaccaaaggtaaacgagattaaagaagctgctaacatcttgtcacatgtcgataatggcaagattggtatacctgatttggagcatgccttgaaatgtttgaatgttaatttaactgaggaggacttcaatgaagcccttaactgttgtaacgtcagtgataatatggaggtggatttaaaagatttcttaatgaaaatgaaagaaagtccacatttccaaaagtccaaggctacacagatactcttagctactacccaaattctccagaatgatctagttgatgtctctgacctcaagacattattgatggacaaggaccttcatacagctaatgctatacttactgtaatgttaagacatgtacctgaacatgaaagtggcaaggttagcattcaagaatttatgactaaattatccgatatattgacaattcctaaagctgcaggtaagttttatttaatatgtacttattgcccagatctagaaaggcaagcagtggtttacatgttaaaaacaatacaggattcgatagttaaagcacaggtaagtaagaagcaatacaatatgaatataaaacaacacaagattagtttacataacttctgtttgaattctaaggcaaatattgctaagcttaacccaaactcaaaattttaggtagtcttacttgatagtgctagaaaattactagattatatattattcagtatgcatatttgacttctgaaattattagaaaataatttttaaaacttttgacaaatccagtagaatttttatcactatctgttatgttctcatgtatcttcagcgactctcttgatcacactttttaaacattcatgctttttgaggtataatgtacatatggcaaaattcactctttttaggtatacagttctttggattcttaaaaataatgtaatgtaacccttactatacacaacatatagactatattatcccccagaagtctcttatgcccttttggtaatccatttcttcctctaccctgagcccctggcaactactgattcattctttgtccctctagttttgccttttgtggaatatcatgtaaatgattaaatatgaagtggtttgagtttggcagtcattgcatgcatataccttgaatttactttgtttatactctcatttatactaccaaccctccctagaaaaaatggattctgattggttctggttgcagtattacaaattccaaataaagctttatttgaggacccccaaa

SEQ ID NO: 129148 - DNA, 573 bp, Homo sapiens
  Payload ID: 5265
  Gene Symbol: EFCAB13
  Gene Name: EF-hand calcium binding domain 13
  ENST ID: ENST00000523285
  CDS Start-End: 463-573
aggacggaccgaaggtaagattgaagtggggtcagaccatggcgggacagcgcaccggagaatgaacagcgattagggaagagtggcgagcgggtggcaaggacggagggcggaatcccggccggggctgcgggaggaaagcgcacggacaggagccccaccgctcgaatgcagcgcccggcggctggcctcgtgaggtcacaggcccttacgagtttggagaggcttatgcggtacctgattcatccagcaaattaagacctgccaactttttgataatctcgtcaataaattacagaacaattgttcctttcaagatttattcaaaacgtgtcaactctgcttaattaagcactttgatgatttaagaaatcttggaaatccttttgtactattgctcattcatacttgttcatcaaagcctggagtccttaaggacagaatttacctctaaacagaaagatggaaactaaagtacatttattctgccaggcagaggaaaatattgacttattagatgatggctctaattcttttgcaactgacttgtcatcaggaactattaaccacaag

SEQ ID NO: 129149 - DNA, 651 bp, Homo sapiens
  Payload ID: 5265
  Gene Symbol: EFCAB13
  Gene Name: EF-hand calcium binding domain 13
  ENST ID: ENST00000523842
  CDS Start-End: 1-603
gaagaacttcagtctattttgccttcaacaggaattaatttattagatgaagaattccagaagattgtgacagacactagtagaaatgagaatggaatggtggagttagatgactttgtaaatgctctcgccaaggagcgaagttttcctgaatgcaatgcgttgcctggtgtcattaaagccattgataaaattaaagataaaaatgtggattatgaggatctaaatacttgtcttcaaaattttggtatttacctttctaagccagaatttaagaagatcacagaactgactgaagctggtgaaacaaaaaaagtgaattttaaagaattcattgatactatgatgagcaacacggaatgcttctctgaaaaattagtattgcctgatgctattgaaaccctcgacgatctcagaaaggagacgatgagtgtttctgacctgtggaatactctgtctagtttgaatagtaatttaaaaaaggatgaatttctagctgcattggaactagtgacagttgatgataatatggaggtggatttaaaagatttcttaatgaaaatgaaagaaagtccacatttccaaaagtccaagggtaagtgaatacttcttgttcaagagaatggctagaaaataaatatttaaaaatga

SEQ ID NO: 129150 - DNA, 3466 bp, Homo sapiens
  Payload ID: 5265
  Gene Symbol: EFCAB13
  Gene Name: EF-hand calcium binding domain 13
  Uniprot ID: Q8IY85
  ENST ID: ENST00000517484
  CDS Start-End: 368-2722
agagagcgcgggggcctccagccgagaggaagggagggcagctcgggccgaagtcgttggcttcgtaagagcagggtctatgggaagcctcctcagcgtgggttcttggaagaggtggagtttggagaggcttatgcggtacctgattcatccagcaaattaagacctgccaactttttgataatctcgtcaataaattacagaacaattgttcctttcaagatttattcaaaacgtgtcaactctgcttaattaagcactttgatgatttaagaaatcttggaaatccttttgtactattgctcattcatacttgttcatcaaagcctggagtccttaaggacagaatttacctctaaacagaaagatggaaactaaagtacatttattctgccaggcagaggaaaatattgacttattagatgatggctctaattcttttgcaactgacttgtcatcaggaactattaaccacaagaaatacatcaagttttctaaaacaatagagaaggaaatttcaccggaaattaggagtttgagcccagaatataaaaaaatatttgaaacatcaataatcttttgtggagaagaaaagtcctctgatttttcaggagaaaaaaaagttgggagaaagagtttacaagtacaacagcacagtaaaagaactgagattatccctccttttctgaagctgtcaaaggagaaggtgacaaggaaagaaaactctttatgcaagttgccgaatcagtacagcgttcacaagacttcatcacctctttgtacatcttctgcaattactcgggaaaaggaaatgctgtctaacctctacatgacattatatgatgaagtaacccatggatatttacactcaaaagaattaagtggtaaccacatggtggatattggggatattatatttactttgaatgagctacaggaacagtatgaggatgtttcaattacagaaggatcacctttgaatgaaattacttcagacagaaagttatcaagtgtagcaggatgctatctaaaatataagaagaaaaatagtttgtcttccaaactccctgaaccttcaatatccaaaaagttaaataaaaaaagcaaccaatattatagcaaaattatggagaatgatgaccttgaatctaaaagaccaaaaaatacttggcaaataagaaaatttctgggtggggttggcagcagtaatgtaggagtccaagaaccatattcaaagaatggcataaactttaaaaaacattcagagaagggtgaaattcatgactcaaagtctaaaccacaaagcttgaagagtagtacaagcctcagtaagtctctggataaaagtgatatttctagtatcccaaaacttcagaagccagctgtaagaaagcattccagtctccaaaaacaggtttcgtctacggaaaaaactgcaattagtactctggaaaacttctgtgaagctatcagtaaacttcaagaaaattacattgcagcagaagaacttcagtctattttgccttcaacaggaattaatttattagatgaagaattccagaagattgtgacagacactagtagaaatgagaatggaatggtggagttagatgactttgtaaatgctctcgccaaggagcgaagttttcctgaatgcaatgcgttgcctggtgtcattaaagccattgataaaattaaagataaaaatgtggattatgaggatctaaatacttgtcttcaaaattttggtatttacctttctaagccagaatttaagaagatcacagaactgactgaagctggtgaaacaaaaaaagtgaattttaaagaattcattgatactatgatgagcaacacggaatgcttctctgaaaaattagtattgcctgatgctattgaaaccctcgacgatctcagaaaggagacgatgagtgtttctgacctgtggaatactctgtctagtttgaatagtaatttaaaaaaggatgaatttctagctgcattggaactagtgacagttgatgaaggtgacaaagtacaatttgaagaatttgcaaaagtagtaaggaatatgcgtgatgctgccaggttagaagagttacaggaagttgtcttagctgctgatttgctggaaggtgacatgatagctgggaagaacttggaagactttctaagaaatgttgggattaagtcacctaaagaagaggtagagaaaattcttcaatcagattttgtttctgaagataacatggtgaacattaaagactgtatgagggctttgagggacacccagaaattttccaattatattgatttcaggaaagaggcttcaaatctaaaattaccaaaggtaaacgagattaaagaagctgctaacatcttgtcacatgtcgataatggcaagattggtatacctgatttggagcatgccttgaaatgtttgaatgttaatttaactgaggaggacttcaatgaagcccttaactgttgtaacgtcagtgataatatggaggtggatttaaaagatttcttaatgaaaatgaaagaaagtccacatttccaaaagtccaaggctacacagatactcttagctactacccaaattctccagaatgatctagttgatgtctctgacctcaagacattattgatggacaaggaccttcatacagctaatgctatacttactgtaatgttaagacatgtacctgaacatggttagtagtttcaatgcgtctatcttataaggaccatcctctaccacaggggtggaaggtctatgggtaggacatgcagggatggagggtatcctgtggaagctgaggtgggatgactgctggacactggtactgcccctacaggtgtgccaaccctgagcttcatggggccaaacaaatggggaagtcagagctcatcttatccctgtgtgagtccactgacagtacctaggaggtgagattattttgtgaactgactgacatgcacagtggtcaatcagaatgccatccatagagtaaaacagggtcctggaggcccttttggtttttggaaggtaaattatgatgatatccagggataccagggggtgttgcacatagtggtggctcagggcagcagatatttataaatataaaaaataattttactattttaatgacaggtatagctgaatattatccatgatgggttcttaaaatgagttggggagtatttttttgttttgttttttaaaagagacttttttcttccttgaatgttgagtagaattcataggtgaagccatgtgggccaagagtttttttgtgaaaggctttggattatttatttaatgtctttaaatgaataggattaacaaggtattctattttcttgttagttttggcaagctatgtttttagaggaattcgttcattagatctgccttttcaaatgtattgaataaagttgttctctttttgacatctga

SEQ ID NO: 129151 - DNA, 553 bp, Homo sapiens
  Payload ID: 5265
  Gene Symbol: EFCAB13
  Gene Name: EF-hand calcium binding domain 13
  ENST ID: ENST00000519772
  CDS Start-End: 393-553
agagagcgcgggggcctccagccgagaggaagggagggcagctcgggccggtagtgggacccttgggggacagagaagtcgttggcttcgtaagagcagggtctatgggaagcctcctcagcgtgggttcttggaagaggtggagtttggagaggcttatgcggtacctgattcatccagcaaattaagacctgccaactttttgataatctcgtcaataaattacagaacaattgttcctttcaagatttattcaaaacgtgtcaactctgcttaattaagcactttgatgatttaagaaatcttggaaatccttttgtactattgctcattcatacttgttcatcaaagcctggagtccttaaggacagaatttacctctaaacagaaagatggaaactaaagtacatttattctgccaggcagaggaaaatattgacttattagatgatggctctaattcttttgcaactgacttgtcatcaggaactattaaccacaagaaatacatcaagttttctaaaacaatagagaaggaaatttcaccggaaat

SEQ ID NO: 129152 - DNA, 1477 bp, Homo sapiens
  Payload ID: 5265
  Gene Symbol: EFCAB13
  Gene Name: EF-hand calcium binding domain 13
  ENST ID: ENST00000517310
  CDS Start-End: 1165-1477
agtcagcgcggaggcggtattgagttcagccgctccccacagccccggagcccctgggcggtggcggtggccgcggcagcaccggctcgacagccgatagggtcctgggcccgctccgctcggggtggtcggtgggcggagcgtcgggctcggtcagaagtcgttggcttcgtaagagcagggtctatgggaagcctcctcagcgtgggttcttggaagaggtggagtttggagaggcttatgcggtacctgattcatccagcaaattaagacctgccaactttttgataatctcgtcaataaattacagaacaattgttcctttcaagatttattcaaaacgtgtcaactctgcttaattaagcactttgatgatttaagaaatcttggaaatccttttgtactattgctcattcatacttgttcatcaaagcctggagtccttaaggacagaatttacctctaaacagaaagatggaaactaaagtacatttattctgccagatgcctccacctttttttgctagtattgtgtcaaataagacaagttttttcaaataaaaacaaatctggacttagtaagcagagactttattcaaaataattattgcaagagaaaaaagggactattgaaattggaagaggaggaggactattgcaatggaaagaatgctgtgaccgtaagatctgtaggtgtctcaagggttgggcagaagttttcttttatagagagacgctggaaagaaccaggcagaggaaaatattgacttattagatgatggctctaattcttttgcaactgacttgtcatcaggaactattaaccacaagaaatacatcaagttttctaaaacaatagagaaggaaatttcaccggaaattaggagtttgagcccagaatataaaaaaatatttgaaacatcaataatcttttgtggagaagaaaagtcctctgatttttcaggagaaaaaaaagttgggagaaagagtttacaagtacaacagcacagtaaaagaactgagattatccctccttttctgaagctgtcaaaggagaaggtgacaaggaaagaaaactctttatgcaagttgccgaatcagtacagcgttcacaagacttcatcacctctttgtacatcttctgcaattactcgggaaaaggaaatgctgtctaacctctacatgacattatatgatgaagtaacccatggatatttacactcaaaagaattaagtggtaaccacatggtggatattggggatattatatttactttgaatgagctacaggaacagtatgaggatgtttcaattacagaaggatcacctttgaatgaaattacttcagacagaaagttatcaagtgtagcaggatgctatctaaaatataagaagaaaaatagtttgtcttccaaactccctgaaccttcaatatccaaaaagttaaataaaaaaagcaaccaatattatagcaaaa

SEQ ID NO: 129153 - DNA, 355 bp, Homo sapiens
  Payload ID: 5265
  Gene Symbol: EFCAB13
  Gene Name: EF-hand calcium binding domain 13
  ENST ID: ENST00000518170
  CDS Start-End: 338-355
gtattttgcccaactgcatacgataaatacataggaaaaacaaacacacagaagaaaaccaaaccaaccaaagtatctctttcaaaaggaaacgacagtctccttaaaggcaacccgagacaaatttcagcaaagccgtgggacacatggccttcgagctgctgtccattattgagtagcagaagccaagaaggatggaatgttttggaagaaaggggtcgggggtcggggtgttcaaaggacggaccgaaggaaatccttttgtactattgctcattcatacttgttcatcaaagcctggagtccttaaggacagaatttacctctaaacagaaagatggaaactaaagtacat

SEQ ID NO: 129154 - DNA, 5767 bp, Homo sapiens
  Payload ID: 5266
  Gene Symbol: EFCAB14
  Gene Name: EF-hand calcium binding domain 14
  Uniprot ID: O75071
  ENST ID: ENST00000371933
  CDS Start-End: 978-2465
cgccgccgcagccgccgccaccaacgccaacaacaacgtgtcgggagcagccgcggccgaagccggagcaggggccggagtcgcggctggagtggggcctgcgcgtgtgagtggccgagagttgcccgtgccggagacctcaaactccgggcgggagcgctttcggtcggccgagccgccgtcgcccgcggcaccgtgtccccaaggcccagacagcggggcgggggtctatcaggcgcgggactggcttctctcaggccgacccttctagccgggctccggatcttcctcggcctcgggcccccttcacgttcaggacggaggccggagaacggtgatcatcacacaccccagccggcttcctggccagggcattttctctgcggccaagcagtgttgggattgtagctgctgggagccccctcctgccgccacctctcctgcaaggaagggactgacgcgttcccactttcttactctgcacctccccactctcttcccattcaagaacgagtttctcttccctctccattggaaatcttgctccggaggtccgaaacacgtattttaagcgtgcccttcctcacctcctggagcacccttagaagtattgcctacttatccgggctgagaatccttcatttttgacctggcttttttttcgccctttgggagataaaggtccctctccaccctctactaacactctgcacccaaggccttatcctttggggtcaccagctccttggccatttctatgtgatttcccccacccatctgagttccagtttcctctgggctccaatctccagtccctggcggatctggtcagtcccacccctaggtgggagtgaccagggggctctggcccaggattcccaaccctggaaggcagctccaaggcaggaagagaattgggcatcgggtacgaacctggcagctcaggagtcggggctccactcaccccacacaaaaagatgaaaaagcgcaaagagctcaatgcattgattggtttggctggggacagccggagaaagaagcccaagaaaggcccaagcagtcaccgcctgcttcgcactgagcctcccgactcagactctgagtccagctccgaagaggaagaggaattcggtgtggttggaaatcgctctcgctttgccaagggagactatttacgatgctgcaagatctgttatccgctctgtggttttgtcatccttgctgcctgtgttgtggcctgtgttggcttggtgtggatgcaggttgctctcaaggaggatctggatgccctcaaggaaaaatttcgaacaatggaatctaatcagaaaagctcattccaagaaatccccaaacttaatgaagaactactcagcaagcaaaaacaacttgagaagattgaatctggagagatgggtttgaacaaagtctggataaacatcacagaaatgaataagcagatttctctgttgacttctgcagtgaaccacctcaaagccaatgttaagtcagctgcagacttgattagcctgcctaccactgtagagggacttcagaagagtgtagcttccattggcaatactttaaacagcgtccatcttgctgtggaagcactacagaaaactgtggatgaacacaagaaaacgatggaattactgcagagtgatatgaatcagcacttcttgaaggagactcctggaagcaaccagatcattccgtcaccttcagccacatcagaacttgacaataaaacccacagtgagaatttgaaacaggatatcctgtaccttcacaactctttagaggaggtaaacagtgccctagtggggtaccagagacagaatgatcttaaactcgagggaatgaacgagacagtcagtaatcttacccagagagtcaacctgatagaaagcgatgtggttgctatgagcaaggtagaaaagaaagcaaacctgtccttcagcatgatgggtgatagatctgccactctgaaaagacagtctttggatcaagtcaccaacagaacagatacagtaaaaatccaaagcataaagaaagaagatagttcaaattctcaggtatccaagctaagagagaaactccagctgatcagtgctcttacaaacaaacctgagagcaacaggcctccagagaccgccgatgaagagcaagtagagagtttcacatcaaagccatcagcattgccaaaattttcacagtttcttggagacccagttgagaaagctgcccaactaagacctatctccctaccaggagtttctagcactgaagatcttcaggatttattccgcaagactggccaggacgtggatgggaagctgacctaccaggaaatctggacctccctaggttctgctatgccagaaccagagagcttgagagcatttgattccgatggagatggaagatactcattcctggagctaagggtagctttaggtatctagcttcatcaggcatattttagaaatggactgcctaatatctatttacctaacaacaaaacaacccttacttacccatcagtcctctagtcctccaaactactgtagcagatactttgccaccttttaacttgtttgaagaagctatataaaagttatttttttaaagaagaagaccattttacttatgatgttcagaaatctatgatttcctacaaccagtaagatcttacattttaaaattgccagaaaaaaaattaaagccctctttttttctctttcctttttttgaggggaggagaccttatcttttaaagctgggaaatgtatatagagagagaataagccacttttatatttcacttaaatttgccttaaattagctgcactttatagagactcagaaaatgtcttttctttaaaagataggccttttctgtttgtaaatatttaaatgaaagaaagcattgtgcatattgtgtggaaagtaggaagaatggttttgaacaggatatgaacaaatgacttattaaaaattgctgatctggtgtaggtggcagctgaaactacatccatgtctccataaggtatccctcaaaggcccaggcgctgccagggggtttgtcctggtagctggaggaaccgatttcagggagtagacactggagacaatactgactccaggcatggctcatggaagtaggattctggttctttgttcctattccctcagctaatcccaacctgggaatcagagaagtcttggggatttttctcatttttagtactatttcagggtttatgagcataaaaagttatccattggggagctccattttccctgctgagtgagctagattgccttccccacccacccacttaagtctgtcttaaagccgtagctggctcccaccaccagtaccatctccatttgaatggcagggctaaattcccccagccattatctcacactgaccacccagagctttagaagagagctgtgcttctaattttgacccagaaaaccataccccttgagattttacctagaggctaaccaagagcctaatatgtttctctgggggatgactaaagccaaaaaggctgtgagatgaaacatgtgaaataatattcagtttccttaccattaccagctcagaagtagctagaggctttctacccaaaggatgccaaagtatagcagggcaggcctggagctagggccttcacatggtggtagcaagtttttcaaatctaatacaatcaagtacaatacttcctttaaatgcttctgtggacctggcatgaaagatccctagattgaaaggaataatacctccatgtctcctgtatgttgagtctagaattgctgtgttgttcttagaagcagtctttgggcaacaacttgaaaggggaaaaaaaaactacaaaaacttaactttggtataggccaagtcagggagaaagtagagaaagctgtcatgccacagacttctttagtggagatcatttcctttttaactttgttcaggttgcccttcaccatggatacagtccggtacccttaaacatttaagggctgttttttttttctttacatgatgttcagcttggtattaaccaaacttaaattttttttccagaagtattaaaatttagttaaagcaagatgaagtcttttcccatgaatgtgtccccttatctcattatagcttatgctcagtttcactttcttggaaaggttaaaacaaattagcctggcactttaggtaacttgaaaataactctcacccttctgactgccttccatccactctcaccccacacctttttttaatatatatacacccttacagattttctaacaaccaaataaaattctagcaataaattgaattatactgctatatttgtatatactgtaccataaatagtatgtctgtacctggaaggtatttttttgagaactgatttatatgaaatatacttgagggtaatgtagcttgtcctttttagtttcaaattcttattcataggcagatactttgaagacaccttaactctttgttgtgtgtattttcccttgcatcagataactatacatggagaaatccattttgttttttggtttatcttctgttcttcctaccttgtgcttgtctgactagtatcacccctgagccagtatacagtaccatcctctccccctaccaagtttggcagaggtgtttatactgcattctcagatctatgaatatttttgtcatcctgcctgagaaagtacatcttccaggcaaaagtagggtatcttgaactcctttcttctgagttgagcagactcactggcttaagcatcccataagcctattatttagtgtgaatttgggacttttatttgtatgttgtcttaacttactaagcctgtgacttgtatttagctgtagtcaagcctcaccagccatatctcatctctgagaggaagactggatagtgagtttggttttggttttggttttaaacccttttaccttttcagtctggcagctcctactgctgctttcctaagttactcaaagcactgcttcttggtccttgttttcttttgccttgtactatcttgtataatgtttactaaaagagcctccccataaatcagagaggcaaaaaggtagcatataaaaagaagaaccaaaagaagagaaaacctgacttctagatgactgtggtgtcatctaaaaggcagaggtgcctgaccctcaggaatgtgtatgatgcaacagagctgaagaatgggttcccttcacctactgctggccattgtcccttctgttggagattcctttctttatggttgctgttcataaccccttcaacacccccccttgctggtcctgccggtcacagttgaggattttggctgtgatgggctcatactcataatggcctgttgagttgtttttagtgacaggttttgtttgctgcacacctcattggcttgcttaccaacaccagctagaagtggtccctctttcatatccaaaccagaacacatttgggtattcctgagactttatagagcgtgtattgtttgttatacgaacctaacctaccttgttgttttctcatattaagaaatttaaatctactttgttttagtgaagctattttggtaatgtataagcaattttggttctgtttagggagaattcagggtttccatgacttgatttgagctttgcatatttcaaataagtaacacagccattttaatttagctaaataaaaaaatttcttttttctctcaa

SEQ ID NO: 129155 - DNA, 784 bp, Homo sapiens
  Payload ID: 5266
  Gene Symbol: EFCAB14
  Gene Name: EF-hand calcium binding domain 14
  ENST ID: ENST00000487741
  CDS Start-End: 1-200
cagccacatcagaacttgacaataaaacccacagtgagaatttgaaacagatgggtgatagatctgccactctgaaaagacagtctttggatcaagtcaccaacagaacagatacagtaaaaatccaaagcataaagttctgccaccagttgactcatcaccagggagaaacagaggaaagatcaggggaaaacttgtgaaagaagatagttcaaattctcaggtatccaagctaagagagaaactccagctgatcagtgctcttacaaacaaacctgagagcaacaggcctccagagaccgccgatgaagagcaagtagagagtttcacatcaaagccatcagcattgccaaaattttcacagtttcttggagacccagttgagaaagctgcccaactaagacctatctccctaccaggagtttctagcactgaagatcttcaggatttattccgcaagactggccaggacgtggatgggaagctgacctaccaggaaatctggacctccctaggttctgctatgccagaaccagagagcttgagagcatttgattccgatggagatggaagatactcattcctggagctaagggtagctttaggtatctagcttcatcaggcatattttagaaatggactgcctaatatctatttacctaacaacaaaacaacccttacttacccatcagtcctctagtcctccaaactactgtagcagatactttgccaccttttaacttgtttgaagaagctatataaaagttatttttttaaagaagaa

SEQ ID NO: 129156 - DNA, 860 bp, Homo sapiens
  Payload ID: 5267
  Gene Symbol: EFCAB2
  Gene Name: EF-hand calcium binding domain 2
  ENST ID: ENST00000366521
  CDS Start-End: 1-664
ggccgggacaccgcggccgaggttatcgttaggcatctcccaggcgaccggctccgcagcaagatggcggacgagaaggacagggaagggcctgggatacaacagtgatgagataaggcctcggactttactgatcgaacatctaatggaaggtggaagaagagaccatcacacaatgacggtgttatggggaacacaggagataatagtagcagaatttcacaaaaaaatcaaagaggcatttgaagtctttgaccatgagtcgaataatacagtggatgtgagagagattggaacaattatcaggtcattaggatgctgtcctacggaaggagagctgcatgatctgattgcagaggtagaggaagaagaacccactggatacattcgattcgaaaaatttcttccggtgatgacagaaatactactagaaagaaaatacagaccaattccagaagatgtccttcttcgagcttttgaggttttagattcagctaaacgtgggtttcttactaaggacgagctgatcaagtatatgactgaagaaggtgagcctttttctcaagaggaaatggaagaaatgttgtctgctgcaattgatccagaatcaaattcaattaattacaaggactatataacaatgatggtgatagatgaaaattaaatgttctaaagataatttctgattgaaagaacaattttagaaattgcttgttcttgttaatttcacatcttatcttaggattcctatatgtgatatttaataccttgtgacataactattttaagacactttgtttttaaagatgatcgtaacactttaaaccaaatttagtatgtctagccttacagaatgataa

SEQ ID NO: 129157 - DNA, 6167 bp, Homo sapiens
  Payload ID: 5267
  Gene Symbol: EFCAB2
  Gene Name: EF-hand calcium binding domain 2
  Uniprot ID: Q5VUJ9
  ENST ID: ENST00000366522
  CDS Start-End: 142-951
gcagttaacaacaaaaatcgagcaacgccacgtcgcacaaacaggacaggagggggcgaggggtgtgtgcgcgcgcgtgctgtccccaaatggatgagaaataagggaaaggaggggttggggaccgtgtgatgaagcaacatgctaggcccgggacaagtccggctccggcctcgggtctggagggacaaggccgggggccgggtggcagacggggcctctggtcttcccccagcgcgagggtcgtggcgcgaaacggggacagggcgcgcgctcggagcctcctccccgccccgccccgcccaagggtcttcctcccccgggattcagagcggcccctcctccaggccaggctcgccgcggggcgctgagcaggccgggacaccgcggccgaggttatcgttaggcatctcccaggcgaccggctccgcagcaagatggcggacgagaaggacagggaagggcctgggatacaacagtgatgagataaggcctcggactttactgatcgaacatctaatggaaggtggaagaagagaccatcacacaatgacggtgttatggggaacacaggagataatagtagcagaatttcacaaaaaaatcaaagaggcatttgaagtctttgaccatgagtcgaataatacagtggatgtgagagagattggaacaattatcaggtcattaggatgctgtcctacggaaggagagctgcatgatctgattgcagaggtagaggaagaagaacccactggatacattcgattcgaaaaatttcttccggtgatgacagaaatactactagaaagaaaatacagaccaattccagaagatgtccttcttcgagcttttgaggttttagattcagctaaacgtgggtttcttactaaggacgagctgatcaagtatatgactgaagaagatggagtttcgctccgtcgcccaggctgaagtgcagtggcgtgatcttggctcgttgcaacctccacctcccgggttcaagagattctcctgcctcagcctcctgagcagctgggatgacaggcacacaccaccacgcctggctaatttctgtatttttagtagagacggggtttcaccatggtctggtgacctcctggtctcgaactcctgacctcaagtgatcctcccgcctcagcctcccaaagttctgggattacaggcatgagccaccgcacccggctgcttccttaactcttgatctcctctctgtatcttgctttgtctagctgttctcttctctccatattcatccaaacatttgcttagaagtacccagaagcatggcgttgaatgtggtacaccttgaacgaagggtgaagaaacgaggcagagtgacttagtagcaagtgacagcacacagtttaaattttaatattagcccatttacaaacaacagcttatataatagtcattcacatacctcaacactcaccatcccctccccactttttttctggagacagggtttcactgtcaccccagctggaatgcaggtggcatgatcacagctcactgtagcatcgacctcctggactcaaggggtcctcgcgcctcagcctcctgagtagctgggaccacaggtgcatgccaccacgcccagctaatgtttttttttattttttgtagagacagggtctggctatgttgcttaggctggtctcaaactcctgggttcaagcgatcctgccacctcagcctcccaaagtgttaggattacagatgtgagccactgtgcccagccaacattcaccccattcaagtgtgcaattcaatggattctagtatcttcacagtgctgtgcaactatcactcctatctacttacaaagcatttccatcatcttaaaaagaatccccatgtccaatagcagttccccttcccccaccgtcatcctcgggcaaccgctaatcttcctgtgtgtctgtggatttgcctcttcagggcatttcacataaacacaatcatacaatatgtggccttctgtgtctggcttctttcatttagtgtaaggcttttgaggttcatccatgttgtaatgtatatccttagttcattcttttttgttaagctcacaaataaaaagcctcactttttatttgaggcaaggagactggctacagggattacagttccagcagtcaaaacgcaactccaagtggcactatttggaccgtaggttttgcttcattttggctggaaaagggtattcaggatgtacttctcccagccggacaagaaaaagggcaaagaaaactggaagagacgtctcgtctacacaaactgctctttggacacagcatcaacctgaccacacccgtgctggccagtctgcaggttgctgacccgccgttaagggacacaggccatactacacttgctagaaaaactgaggcaggaaaaagaggtgcaaggcactgggggaagagcaggtacctatagctttaaagctcagtgttgaaggggtaatccttgcaggaggcacagctcaccaagacacagaccctcccgttcctgttgtagctgactacagtggtcacatcaggctgctcagttgaaagtcgaagtcctccaagttttcagcagtgcgttccagcatcaccaccgaaatgatgataggaattaccaccaaattcctatgcatgggaaaccagatcagaacctgggctgcgtttttatttgtttattttttttactgtgcttggctgtgattgctttggtgctgggatcccccagacctgtcacgagagctgaggggactacaggcagtcaccaccttgcctttggattggcagccctggattaacttctcctgaggtgggtgcaggtggcactcactgtggttaaccactgtttttaagccaggtttctttttttctgtctgtcatatatatatatatatatttagagacagggtctcactctatcactcaggcctggagtgtagtggcatgatcataactcactgcagcctcgagttcctgggctcaagtgatcctcccgccttggcctcccaaagtgctgggattacaggctgagacaccacacctggtcttaagccaggtttctttaccatctcttggagatggctgcagttggagattccaaaagctttcagagcccttcatccaccagctcctccatgtggccacccatgtgacatgaagttggtgtcactaggtaccacgttgtctgtcccatccaacaggaaaaatagcctgttggccagtgaataaggtaggaatccaggtggtcccctgagggtcttctgacaggctcctttatcaggctcttctcatggtatgagcaccgcagcttgctgacagtggcaacgttctcaagcttcacagactccgtcacttggcctggaggggaattctaggtgtccagccccaggacaggcattttggcaccatgattgagcacgatatggtgagccatcctcacaggattaagaagaattctggacagaaatatagttgtaagtaagcatcagtcagcctgcactttgacccacttccttgtaaccaacagtgacgtagcactaggtaacatttgcatccccgttgttcctatagatacaatttctgaccttagaatcacaaggcttttgtttaaaatagatgggatctctgacattagaatcataagatttttgtttaagacttgcttaagatgtttttcagatcctgaattccagcaaaacagccgacaccaaccagtttgaagacccccacagaggaatgtgatcagcatgaaaatacagcttcgtctccctctcccatgactccaccctgcacacttcgaccaatcaaccatctccacactccagtctccactcccaaacccttaaaaaccccagccccaaactcctcagggagatggatttgacgtttcctcccatttcctccttcggtggccctacgatgaaacctctttctctgctacaaccctatgcctcggcgtattcactttctggtcccatccagcgatggacccatcgtggttaccgtggctggccaagcctgctgtgcttcacagaccccactcaggatcacaccacttcgttccactgtttggagatgccatgtttgcttatcccttcatcagctgatgagcatttgtgctgttttcactttttggctattacgaaaatgttgctacgagcatccatgatattcgcccatttaaaaaagtgtttttcaccattactgctgtgggaaatttctccctggctctgtcctttctttgtagcccagccttcccccaggttttggctctccctctctggctcaatgtcagctccttgtctcacctcctagagcaattccactctcccacctcctgctgcggcatttccaaagcctctgcttagcaagggaccacccattctgcacctctccccttagggctgcaagcacctgcacaaacttggtggttatcctatgcctcaactcaatcaaattctctcagttttccatcagcaatctttttaagccaaagggaaggcaaggacttgatcttcacatcacatgaatcatgacacctgccttagaaggcagaagcaactgtagttggaatagcaattgtttttcaacatatgggatgatatcaaggctctttcctccccatatgtcctgccctgttagtggctggggctgagggttttcccaggaagccagattgtcctcacaagttcctcaggaccctagggcttccacagatagtaggactgttatcagaaagaagtctcgatccagacgccgagagagggttcttggatatcgcccaagaaagaattcagggggagtccatagagtgaagtgaaagcaagtttgttaagaaaacaaaggagtaaagaatggctactccataggcagagcagctccgagggctgctggttgcccatttttttttttttttctttgagatggagtctggctctgtcgcccaggctggagtgcggtggcacaatctcggctcactgcaagctccgcctcccgggttcacgccattctcctgcctcagcctcccgagtagctgggactacaggcgcccgccaccatgcccggctaattttttgtatttttagtagagatgaggtttcacatgttagccaggatggtctcgatctcctgacctcgtgatccacccgcctcggcctcccaaagtgctgggatgacaggcgtgactcgtgatccacccgcctcggcctcccaaagtgctgggattacaggcgtgagtcaccacgccgggccggttgcccatttttatgattatttcttgattatatgctaaacaagggctggattattcatgagggaaaggggtgggcaattcctggaacggagggttcctcccccttttagaccgtgtaggataacttcttgacattgccctggcatttgtaaactgtcatggcgcaggtgggagtgtctcttagcatgctaatgcattataattagcatataatgagcagtgaggtcgaccagaggccactctcatcaccattttgggtttggtgggttttggccacttctctactgcaacctgttttatcagtaaggtctttatgacctgtatcttgtggtgacctcctgtctcatcctgtgacttagaatgcctaacaggctggggacgcagcccagcagatctcagcctcattttactcagcccctcatcactctgattcaaatgcctctgacatgaccacgcagatttgagaaacaggccctcagccaaccagactctggctctacgacacacttaatactgtgaaaagaagattacgggtcatagtcacaaataccaggggtgcaaaacttcagattagaagacacttgtcagactcagaggctcatccaactccacggagatcattatcaccacaagttcttcagacaggtgtggaggttttctaagggatatttttattttctggattgcaattttgtttaggaagagatgaaagtgaggatcaactactttgaggattgtacaactttgtaaattgcacaaatatgacggcatatttatatctgcctgcatttgtgaaaacaaacttgtcaaggagcttatttctggaaagggtcaatgattctagaaaaaaaaaaaagataaatatgagacccttcagtaaaaagaaa

SEQ ID NO: 129158 - DNA, 1233 bp, Homo sapiens
  Payload ID: 5267
  Gene Symbol: EFCAB2
  Gene Name: EF-hand calcium binding domain 2
  Uniprot ID: Q5VUJ9
  ENST ID: ENST00000366523
  CDS Start-End: 266-754
gggaggcgggctgcgaatgggaagcgggaggaggaggccgggccgcgggctggttctatcacccccttgggagcccagctcttcacctagctctccggcgcttttcaaaatctgcagttaacaacaaaaatcgagcaacgccacgtcgcacaaacaggacaggagggggcgaggggccaggctcgccgcggggcgctgagcaggccgggacaccgcggccgaggttatcgttaggcatctcccaggcgaccggctccgcagcaagatggcggacgagaaggacagggaagagataatagtagcagaatttcacaaaaaaatcaaagaggcatttgaagtctttgaccatgagtcgaataatacagtggatgtgagagagattggaacaattatcaggtcattaggatgctgtcctacggaaggagagctgcatgatctgattgcagaggtagaggaagaagaacccactggatacattcgattcgaaaaatttcttccggtgatgacagaaatactactagaaagaaaatacagaccaattccagaagatgtccttcttcgagcttttgaggttttagattcagctaaacgtgggtttcttactaaggacgagctgatcaagtatatgactgaagaaggtgagcctttttctcaagaggaaatggaagaaatgttgtctgctgcaattgatccagaatcaaattcaattaattacaaggactatataacaatgatggtgatagatgaaaattaaatgttctaaagataatttctgattgaaagaacaattttagaaattgcttgttcttgttaatttcacatcttatcttaggattcctatatgtgatatttaataccttgtgacataactattttaagacactttgtttttaaagatgatcgtaacactttaaaccaaatttagtatgtctagccttacagaatgataaattactatttatttaaaaactattcttaaaacattttaacattagaatggattgttgtttattttctacaataaaactcaggtcaccttcgaattaattaagctgacaaaatgaaaatgacttaattacccaaggtttggcatgtaaagatcttaagagggggcagaacgaaccactcgaaaacgagtagcagtgtaatgaaggcttcttttttaaacaataacaaatgcttcatcaatctgagtgtggaaggtgatttatcaaaataaatattactaattta

SEQ ID NO: 129159 - DNA, 325 bp, Homo sapiens
  Payload ID: 5267
  Gene Symbol: EFCAB2
  Gene Name: EF-hand calcium binding domain 2
  ENST ID: ENST00000427529
  CDS Start-End: 1-158
cagaagatgtccttcttcgagcttttgaggttttagattcagctaaacgtgggtttcttactaaggacgagctgatcaagtatatgactgaagaaggtggtgtcgttatcacccccattctagagacaggtaagctaaggtggggagctgtgaagtgacttgctcaagatctcagagctcgtgagaggcagccagcatgtggatccaaacttgtgctttaaccactcagttatcttccttccatctttcatcaaatactggggcttcaagttaatcctctggtaatttcaaaagttttaatctaaataaataaccttgttcatga

SEQ ID NO: 129160 - DNA, 550 bp, Homo sapiens
  Payload ID: 5267
  Gene Symbol: EFCAB2
  Gene Name: EF-hand calcium binding domain 2
  ENST ID: ENST00000425550
  CDS Start-End: 1-383
agataatagtagcagaatttcacaaaaaaatcaaagaggcatttgaagtctttgaccatgagtcgaataatacagtggatgtgagagagattggaacaattatcaggtcattaggatgctgtcctacggaaggagagctgcatgatctgattgcagaggtagaggaagaagaacccactggatacattcgattcgaaaaatttcttccggtgatgacagaaatactactagaaagaaaatacagaccaattccagaagatgtccttcttcgagcttttgaggttttagattcagctaaacgtgggtttcttactaaggacgagctgatcaagtatatgactgaagaagagacaggtaagctaaggtggggagctgtgaagtgacttgctcaagatctcagagctcgtgagaggcagccagcatgtggatccaaacttgtgctttaaccactcagttatcttccttccatctttcatcaaatactggggcttcaagttaatcctctggtaatttcaaaagttttaatctaaataaataaccttgttcatga

SEQ ID NO: 129161 - DNA, 527 bp, Homo sapiens
  Payload ID: 5267
  Gene Symbol: EFCAB2
  Gene Name: EF-hand calcium binding domain 2
  Uniprot ID: Q5VUJ9
  ENST ID: ENST00000447569
  CDS Start-End: 93-494
aggccaggctcgccgcggggcgctgagcaggccgggacaccgcggccgaggttatcgttaggcatctcccaggcgaccggctccgcagcaagatggcggacgagaaggacagggaagagataatagtagcagaatttcacaaaaaaatcaaagaggcatttgaagtctttgaccatgagtcgaataatacagtggatgtgagagagattggaacaattatcaggtcattaggatgctgtcctacggaaggagagctgcatgatctgattgcagaggtagaggaagaagaacccactggatacattcgattcgaaaaatttcttccggtgatgacagaaatactactagaaagaaaatacagaccaattccagaagatgtccttcttcgagcttttgaggttttagattcagctaaacgtgggtttcttactaaggacgagctgatcaagtatatgactgaagaagatggagtttcgctccgtcgcccaggctgaagtgcagtggcgtgatcttggctcgttgcaacc

SEQ ID NO: 129162 - DNA, 520 bp, Homo sapiens
  Payload ID: 5267
  Gene Symbol: EFCAB2
  Gene Name: EF-hand calcium binding domain 2
  ENST ID: ENST00000551317
  CDS Start-End: 1-395
agataatagtagcagaatttcacaaaaaaatcaaagaggcatttgaagtctttgaccatgagtcgaataatacagtggatgtgagagagattggaacaattatcaggtcattaggatgctgtcctacggaaggagagctgcatgatctgattgcagaggtagaggaagaagaacccactggatacattcgattcgaaaaatttcttccggtgatgacagaaatactactagaaagaaaatacagaccaattccagaagatgtccttcttcgagcttttgaggttttagattcagctaaacgtgggtttcttactaaggacgagctgatcaagtatatgactgaagaaggtaagtgtgatttattacttatcacaatgacttatgtgaggaattaataatttgttaacagttatgcgaaagttataggggatactttaaaatcagtcattctggtgaaagttatttactgttcctgctattttggcttggggatggtttctgttctgtgggggttaagagg

SEQ ID NO: 129163 - DNA, 1542 bp, Homo sapiens
  Payload ID: 5268
  Gene Symbol: EFCAB3
  Gene Name: EF-hand calcium binding domain 3
  Uniprot ID: Q8N7B9
  ENST ID: ENST00000305286
  CDS Start-End: 79-1395
tttattggattcctgatctgattgaagcccagaagtggtaggtagcacggcttaaaagtagacagagtcactggccacatggcagtttcagaaattaaaccaaaacttaagctgaatcctctaacaaaagtacccatctcccacaataaaagggatagagacttaccaggatctcttcaatgccaattacaacacaaagaaaagaagctaagtgcttcacaaatggcagctttccaagatgcctacaacttcttctacaaggacaaaactggctgtattgatttccatggactgatgtgcactgtagctaagctgggaatgaatctgaccaagcatgatgtctataatgaattgaaatgtgctgatattgatcgagatgggaaggtgaacttctcagactttatcaaggttctaacagataagaatctcttcctcaaggcagtggttccagaaaaggagacctgtttagatttggctggcaacccaggaatcctattgtttgaaatcctatcaaggcttctagagacttcagccctacccagaaagtctataatagaaatagtaagctatttccaaagaaaattccagcatactggcccaggaatgttgtggagtccctacactatgggctatggaaaaaggacacttaagccagacatatgcacacctccaagctcaagcatggctgcctttgctaatgctgcccggattgcaataatgaaagaaaaggatttatttaaatttcttgaagagctcaagagatgcaattccggttcagatagcccatattcaaaaatacccatctttccattgttccctaatgtggatggggtggtgatgggaaagccattcaaagacatgcagaaattagagatgctaagaataaaggagcctttgcatttctttgaggattattttttccataaaagagactggaaaacacaggcagcaaatataaagtctatggaccctgcctcaggttattcaaataacatcttcaccattgatcaaatgctcaagaaaaagcagacttgtacagtggccgatgcaactgctattaaacaacatgtgaagagagctactgatacctataatttaggaattgcccttgaacaccgaaaagagatgctaaacctctggcagaagatccgaggggatttgattgggatggactctagaaatgagtccttttatgacaccttttctacttatacatggtcctggaatgtttgccaagaattactttctcctaaggacttaaggttatatgatgcctatgtgaatagaaattcctcccataactccagatcctcttcctcatcagataccagtgaatgttacacagactcaggaagaaaaagaaaacggaaaggtttaaagggatttcaacaatgaaatttctacattttctaaacagctcatcacaaactactttttcatagttatcaaaattattgtttcttgcttttgtctaagtacattcttagaagctggaaattttgacatcttttggattctgaccagtaaaaaagtttaagtcat

SEQ ID NO: 129164 - DNA, 1691 bp, Homo sapiens
  Payload ID: 5268
  Gene Symbol: EFCAB3
  Gene Name: EF-hand calcium binding domain 3
  Uniprot ID: Q8N7B9
  ENST ID: ENST00000450662
  CDS Start-End: 72-1544
ggagaggtgattgatgtccagaacttagacaatttctagcaagcgaagggattgagctcacagaagaagaaatgaaggagttgatgcctcatttgacatttaacggaaatggaaagattaatgttaattcaataatggagggcctgaagaagtttaaaccaaaaggaatggtgactctgcataagttgaaaactgcaaatgatattaaagacagagtcactggccacatggcagtttcagaaattaaaccaaaacttaagctgaatcctctaacaaaagtacccatctcccacaataaaagggatagagacttaccaggatctcttcaatgccaattacaacacaaagaaaagaagctaagtgcttcacaaatggcagctttccaagatgcctacaacttcttctacaaggacaaaactggctgtattgatttccatggactgatgtgcactgtagctaagctgggaatgaatctgaccaagcatgatgtctataatgaattgaaatgtgctgatattgatcgagatgggaaggtgaacttctcagactttatcaaggttctaacagataagaatctcttcctcaaggcagtggttccagaaaaggagacctgtttagatttggctggcaacccaggaatcctattgtttgaaatcctatcaaggcttctagagacttcagccctacccagaaagtctataatagaaatagtaagctatttccaaagaaaattccagcatactggcccaggaatgttgtggagtccctacactatgggctatggaaaaaggacacttaagccagacatatgcacacctccaagctcaagcatggctgcctttgctaatgctgcccggattgcaataatgaaagaaaaggatttatttaaatttcttgaagagctcaagagatgcaattccggttcagatagcccatattcaaaaatacccatctttccattgttccctaatgtggatggggtggtgatgggaaagccattcaaagacatgcagaaattagagatgctaagaataaaggagcctttgcatttctttgaggattattttttccataaaagagactggaaaacacaggcagcaaatataaagtctatggaccctgcctcaggttattcaaataacatcttcaccattgatcaaatgctcaagaaaaagcagacttgtacagtggccgatgcaactgctattaaacaacatgtgaagagagctactgatacctataatttaggaattgcccttgaacaccgaaaagagatgctaaacctctggcagaagatccgaggggatttgattgggatggactctagaaatgagtccttttatgacaccttttctacttatacatggtcctggaatgtttgccaagaattactttctcctaaggacttaaggttatatgatgcctatgtgaatagaaattcctcccataactccagatcctcttcctcatcagataccagtgaatgttacacagactcaggaagaaaaagaaaacggaaaggtttaaagggatttcaacaatgaaatttctacattttctaaacagctcatcacaaactactttttcatagttatcaaaattattgtttcttgcttttgtctaagtacattcttagaagctggaaattttgacatcttttggattctgaccagtaaaaaagtttaagtcat

SEQ ID NO: 129165 - DNA, 710 bp, Homo sapiens
  Payload ID: 5268
  Gene Symbol: EFCAB3
  Gene Name: EF-hand calcium binding domain 3
  ENST ID: ENST00000518576
  CDS Start-End: 223-710
agaagtggtaggtagcacggcttaaaagtaggtaaatatcgtgattttgtaggattctatgctaagtcctttttaaaaaatctattatctatgagaattgaaggtatttttttaaagaaatgattattttgaggtatggggatgatttcacagcacctttcaaatgcctgaattgttgagccattctggtgttcccagctctgtggcagagtcactggccacatggcagtttcagaaattaaaccaaaacttaagctgaatcctctaacaaaagtacccatctcccacaataaaagggatagagacttaccaggatctcttcaatgccaattacaacacaaagaaaagaagctaagtgcttcacaaatggcagctttccaagatgcctacaacttcttctacaaggacaaaactggctgtattgatttccatggactgatgtgcactgtagctaagctgggaatgaatctgaccaagcatgatgtctataatgaattgaaatgtgctgatattgatcgagatgggaaggtgaacttctcagactttatcaaggttctaacagataagaatctcttcctcaaggcagtggttccagaaaaggagacctgtttagatttggctggcaacccaggaatcctattgtttgaaatcctatcaaggcttctagagacttcagccctacccagaaagtctataatagaaatagtaag

SEQ ID NO: 129166 - DNA, 574 bp, Homo sapiens
  Payload ID: 5268
  Gene Symbol: EFCAB3
  Gene Name: EF-hand calcium binding domain 3
  ENST ID: ENST00000520404
  CDS Start-End: 52-574
attggattcctgatctgattgaagcccagaagtgacagagtcactggccacatggcagtttcagaaattaaaccaaaacttaagctgaatcctctaacaaaagtacccatctcccacaataaaagggatagagacttaccaggatctcttcaatgccaattacaacacaaagaaaagaagctaagtgcttcacaaatggcagctttccaagatgcctacaacttcttctacaaggacaaaactggctgtattgatttccatggactgatgtgcactgtagctaagctgggaatgaatctgaccaagcatgatgtctataatgaattgaaatgtgctgatattgatcgagatgggaaggtgaacttctcagactttatcaaggttctaacagataagaatctcttcctcaaggcagtggttccagaaaaggagacctgtttagatttggctggcaacccaggaatcctattgtttgaaatcctatcaaggcttctagagacttcagccctacccagaaagtctataatagaaatagtaagctatttccaaagaaaattccagcatactggcccag

SEQ ID NO: 129167 - DNA, 5132 bp, Homo sapiens
  Payload ID: 5269
  Gene Symbol: EFCAB5
  Gene Name: EF-hand calcium binding domain 5
  Uniprot ID: A4FU69
  ENST ID: ENST00000394835
  CDS Start-End: 193-4704
agttggaaaagttcagcagttgagaatttatcattcaatagaattgtggggtgaggtgagggcaggagtgagggagcttttttaacttctggagtactttgtgatgtttattaatattttctttctttttgttattaatactggtctagtaatattcttctataccatttggtgataacttttggagtccaaatgaatgagtcagcatctcaagaggaactcagacctgctcaggaaaacagaaaagaagacaaagagaggaaatggaacttaactgaagtgaaagagcttcatgagaccttacagagtgtgccagacgttcctgtaaaagaggacaccaacagtgtggtggagaaagcaatggatgaaatcaaatcccaagaattaaacctggaggggcagcgaaaaatttcacctggttcaataaaggactctaaaactgaagcctcaggtaatattgcaattagaaaatctgcaaaagtgatttttgctttagatgaaactgaactgaaatcaaagccagagcacacatggaagaaaaacctttttgaaagaatggaggcaagagcccaagcaatgcagcagaaaataatagataaggaaaatctgaagaaggaactagaaaaaaaggctgaaaaaaaactccctagggataatttggccaaagagtggtttaatactgacagcatgacactgaataatactgcatatttgcttgacaaacttctacccaccttagttcctggagtagaaaacatgttaactcaagtagaaaagaagaaggttttgacagaagctgatactccaagcaagtttgacccaattaattatttgggggaatatttaataagaaacaatcctaattatatcaaagacccaggaatgtctggttaccagaggttgatgaaagaagtcacagaagacctgaagatatatgttcctgacactatctgcaacagagtatccaagatgaaggagaatgttaaacagaatagaaaacaaagagaaagcatagacaaaatcatagtcaaggtggccaacacacggaaacaggctctgcaggagcaattcgatgaatggattctagaccctaaaggaatgattcctaagtcagtgattcagaatgttcttcaagaattctttcaaaatccagatttcaagcttggatcacactgcaaacaactggatattactgactcaacagaaccaagattgaacaaaatggaatttacagaatacatctcttcacatattaaagacttgaagagtgaaatgtttgaggaacttcttaagcacctttgccactctgcagatgaatttcgggaggtcataaaagctgacatgcggaggcagatgttcgctgaactcttcctacattgtgaccacgggaaggtagggtttttggatcggcagaggacattggccctgctggaattgttctatgaccatagttcacaaatgcttaggagtttacttcgaaacccacgacaatggccattcattgaatttgaagagataaacttgactgagttgtggggagacatggataatcagaaacacatttatgaaggttttgacaaagtgctcttggagatgaatacattactttctgcaaatcatgctagcaaaacccaaagtaaattattagaaagtccagatcaacctaaacttaacgaacagagaacatcaacaccatcaccaaacccgccagaacagcagagaggagtaactgcagaacaaggaccacaaagaatttcaattgaagaacaacaacaaggcaaaaagccaactgcagagcaagaactgtacatagaatcagtaatagaaccaggaacacacacagagtcaactctagaacaagggtcaagtagaaggttactgacagaacaagaaacacacagagagtcaactacagaacaaggacagcacaaagggtcaatagaaggacaaggaccacgcagagtgtcagtttcagaacaaggatcaagcagagagtcagttgcagaacaagggtcacgcagagagtctattgcagaacaagatcgacacaaagggtcagtagcagaacaaggatcacgcagaatgtcagctgcagaacagggatcactcagagagtcagtaatagaagaaccataccaaaaatcagaacaaggaccttatggagagataatttcagaagagcaagaagacataggctcaacttcacaatcaagaaaagatagtatcttaaaaagtacaaaatatggggaacctataacctctgagtacattgaagtccctctacaggaaaagaggtcttgggaacaaacatatgaagaggaaatattcctgagttctgaactgcaagaggaagttccaaccttaagcagaaaagatcactttccagaaactacaaaaaaggaagttcagaaagacaagccctgtgaacccaagtcccaaaaaatagaaggaaagtcatggtcaggtgaattttttacttgtaactggaaaatgaagtatgtcacatttgaagatgaggaacaggcaaacttaatctatggtaactccaggttcacagatttacactcaattatcagaaatattcagtcttgcaaggaggtaaaaggcagaactgccttcaatggagtttcattcaatctgctccagtttgtgcaactcctggagacatttgttggtgaagacgctcccttgagtgtcagcgagactctcacctccttttttaaggagggctatgttgaaacagaacaagagaaaatgaatgccttagaacagtttagccaaaatgctttccaagtccgacagaggcttctcctagaagccatctttcagaagtgggacagtgatggctcaggcttcctggatctgaaggaagttgatgaactcttgtacacatacaaggagggaatggaaaaagaatctatgaagaaagctaaactacacatccaatttccaaagccacaccctggtcacgaagtgagattgtcttcaaaacaatttcagaattacatagaattggttgtgtctgaactcaggggcaatgaagaccaagttctggaaagtgttgtggaatttctgatgaatgctttagagaggagccacattgagagtctgaggaattctgccaggcggaaatggctgcaccaaatccaatgtgctgcagagacaagtggggtgtccctagagccggtgtatagtgagacctttaaggccctcatgcaggatgctgaagcccatggaaataaaaagatcagtgctcacatttccctcttagaagaaaacctactactgcctgagaaagggaatgttctattgaggaatgtggcttgtaccttagatgatgctcaatttgtactgaacagagtgctctacagggacatgaaaggaatcagctttacagtagtggatgaagggaagccaatccatgttccccaagttcagtaccatgggaacatcttcttctggaaccagtcccgtaataagcatgattataatggttcattcctggctctgcctcttcaagatgcatatatgaggatctttggggtcttggctgttgatacccttagagatccccacgaaataaacatctttctacctcatgagatcagattctatcagggtgttgctaatgtctttagcactgcctatcactacgtccacagccgggagcacattctgcatattgtgatcactggcataggctggctttatgacgtcacatccagcatcacctccatcactacgtactttgtagagcctagcccagcccaggattcagactatgttttacgcaacatgatggttacagggcagctgggtctaacagaaatccacaaaaatcctcctaccatccacaggaagtcatgcatcttcagagatttcctctttaaatgtactgacagttcagaagttgttctggcttctgcctgtggagaaacgcatatagtagttccacttcgtgagagaacaggagaggctctgggagtcctcgattttaacatcggccaaaataggatgttgttgtgtcaagaatataaagatctacagaaaatgatgaaagtggtccaagtggcctgctatgaaatacttggcgagttctctggagagataaagaaaaaatatatcttagagattgaaaatgtcagggaagtccagcgggcaggaattctcttcttccgaatcatgctgctcgagctacaggaaagcatccaactactcaattccatggaatttgtgtcactgttgctctatgaccatactcttgtaacagagccaaattctcctcaagacagcaaatctatggagttggaagccaacgtgaaactagtgcgtgacatcctgaaggcggttatcttgttctttcatccagagttggaattttcaagtgactttggaagttgggataagtgtaaattttatgttaacaaatatttagtcaacaatatttgtgcctttgatccaactgccaagcatgtggaagttaatgtacagcttattgatgaatatatcagagatcattcccgaactgaagtatggaaatttggtaatgttgtcattgaacatctataccactggatacacatctgttcagctctcatgaagataaccaaacaactaaatagtggtattacacctccgttgccctccaagactgacaattatatgtatgcaaaaatgccaggggaaggtttgcaagagaagtgataatggatgataatggaattgatactgtatttaggatcctttgtttgttatcagttttgtttgttaactataaaatattttccattggaaaggggtacctataaatgtcttctgctgctaatatttatctcagcactttctaaacccaaaagtgctacctaagaagaaatttagccaaaaaatacccagctaaggtagccatagccaagtgtatttaagtatgttatagaatatatttgaaagcttcctttcagtttgagctttgtatctgctgtggaactgttatggttgattgggtagttatttttcattcttataaggttcaaagtaacagctgaggatttagaaaacaagaataccaaatagaatacgaaataataaagataaaccaaaagaataccaaataataaagatttttaagaaatgga

SEQ ID NO: 129168 - DNA, 2454 bp, Homo sapiens
  Payload ID: 5269
  Gene Symbol: EFCAB5
  Gene Name: EF-hand calcium binding domain 5
  ENST ID: ENST00000423598
  CDS Start-End: 240-410
agtggcgttcggcgggacccgctgaggcaaagcggagccgcagtgacagaagcaagcggagcggccgccaggaaggactcaccgaggcgcaggggctggaggtggtgctgggggaaaacagaaaagaagacaaagagaggaaatggaacttaactgaagtgaaagagcttcatgagaccttacagagtgtgccagacgttcctgtaaaagaggacaccaacagtgtggtggagaaagcaatggatgaaatcaaatcccaagaattaaacctggaggggcagcgaaaaatttcacctggttcaataaaggactctaaaactgaagcctcagattcagaatgttcttcaagaattctttcaaaatccagatttcaagcttggatcacactgcaaacaactggatattactgactcaacagaaccaagattgaacaaaatggaatttacagaatacatctcttcacatattaaagacttgaagagtgaaatgtttgaggaacttcttaagcacctttgccactctgcagatgaatttcgggaggtcataaaagctgacatgcggaggcagatgttcgctgaactcttcctacattgtgaccacgggaaggtagggtttttggatcggcagaggacattggccctgctggaattgttctatgaccatagttcacaaatgcttaggagtttacttcgaaacccacgacaatggccattcattgaatttgaagagataaacttgactgagttgtggggagacatggataatcagaaacacatttatgaaggttttgacaaagtgctcttggagatgaatacattactttctgcaaatcatgctagcaaaacccaaagtaaattattagaaagtccagatcaacctaaacttaacgaacagagaacatcaacaccatcaccaaacccgccagaacagcagagaggagtaactgcagaacaaggaccacaaagaatttcaattgaagaacaacaacaaggcaaaaagccaactgcagagcaagaactgtacatagaatcagtaatagaaccaggaacacacacagagtcaactctagaacaagggtcaagtagaaggttactgacagaacaagaaacacacagagagtcaactacagaacaaggacagcacaaagggtcaatagaaggacaaggaccacgcagagtgtcagtttcagaacaaggatcaagcagagagtcagttgcagaacaagggtcacgcagagagtctattgcagaacaagatcgacacaaagggtcagtagcagaacaaggatcacgcagaatgtcagctgcagaacagggatcactcagagagtcagtaatagaagaaccataccaaaaatcagaacaaggaccttatggagagataatttcagaagagcaagaagacataggctcaacttcacaatcaagaaaagatagtatcttaaaaagtacaaaatatggggaacctataacctctgagtacattgaagtccctctacaggaaaagaggtcttgggaacaaacatatgaagaggaaatattcctgagttctgaactgcaagaggaagttccaaccttaagcagaaaagatcactttccagaaactacaaaaaaggaagttcagaaagacaagccctgtgaacccaagtcccaaaaaatagaaggaaagtcatggtcaggtgaattttttacttgtaactggaaaatgaagtatgtcacatttgaagatgaggaacaggcaaacttaatctatggtaactccaggttcacagatttacactcaattatcagaaatattcagtcttgcaaggaggtaaaaggcagaactgccttcaatggagtttcattcaatctgctccagtttgtgcaactcctggagacatttgttggtgaagacgctcccttgagtgtcagcgagactctcacctccttttttaaggagggctatgttgaaacagaacaagagaaaatgaatgccttagaacaggtctcactctgtcgccaggctggagtgcagtggcgcaactgtagctcactgcagcctccaactcccggactcaagcgatcatcccatcacagactcctgagcaactgggactacagggaaagaaggaagttttttcctcttgagaccaaatttccataaaatgagatgcaaaaattttaagtgtatatttgctgagttttgacaaatacatgccctatgcatcccatactcctatcaagatacagaacaaagagcactgtgacactcacctgtaatcccagctactcaagaggcagaggcaggaagattgcttgagcccaggagttcaagatcagcctgggtaacattgcaaaaaccatctcttaaaaaaaataaataaaagatatagaacaaaaaaagtccccacacctctttcccattcagtcgtccaccctccaatccccaaagcaaccacttttctattttcta

SEQ ID NO: 129169 - DNA, 3965 bp, Homo sapiens
  Payload ID: 5269
  Gene Symbol: EFCAB5
  Gene Name: EF-hand calcium binding domain 5
  Uniprot ID: A4FU69
  ENST ID: ENST00000440741
  CDS Start-End: 130-2910
aggagtgagggagcttttttaacttctggagtactttgtgatgtttattaatattttctttctttttgttattaatactggtctagtaatattcttctataccatttggtgataacttttggagtccaaatgaatgagtcagcatctcaagaggaactcagacctgctcaggaaaacagaaaagaagacaaagagaggaaatggaacttaactgaagtgaaagagcttcatgagaccttacagagtgtgccagacgttcctgtaaaagaggacaccaacagtgtggtggagaaagcaatggatgaaatcaaatcccaagaattaaacctggaggggcagcgaaaaatttcacctggttcaataaaggactctaaaactgaagcctcaggtaatattgcaattagaaaatctgcaaaagtgatttttgctttagatgaaactgaactgaaatcaaagccagagcacacatggaagaaaaacctttttgaaagaatggaggcaagagcccaagcaatgcagcagaaaataatagataaggaaaatctgaagaaggaactagaaaaaaaggctgaaaaaaaactccctagggataatttggccaaagagtggtttaatactgacagcatgacactgaataatactgcatatttgcttgacaaacttctacccaccttagttcctggagtagaaaacatgttaactcaagtagaaaagaagaaggttttgacagaagctgatactccaagcaagtttgacccaattaattatttgggggaatatttaataagaaacaatcctaattatatcaaagacccaggaatgtctggttaccagaggttgatgaaagaagtcacagaagacctgaagatatatgttcctgacactatctgcaacagagtatccaagatgaaggagaatgttaaacagaatagaaaacaaagagaaagcatagacaaaatcatagtcaaggtggccaacacacggaaacaggctctgcaggagcaattcgatgaatggattctagaccctaaaggaatgattcctaagtcagtgattcagaatgttcttcaagaattctttcaaaatccagatttcaagcttggatcacactgcaaacaactggatattactgactcaacagaaccaagattgaacaaaatggaatttacagaatacatctcttcacatattaaagacttgaagagtgaaatgtttgaggaacttcttaagcacctttgccactctgcagatgaatttcgggaggtcataaaagctgacatgcggaggcagatgttcgctgaactcttcctacattgtgaccacgggaaggtagggtttttggatcggcagaggacattggccctgctggaattgttctatgaccatagttcacaaatgcttaggagtttacttcgaaacccacgacaatggccattcattgaatttgaagagataaacttgactgagttgtggggagacatggataatcagaaacacatttatgaaggttttgacaaagtgctcttggagatgaatacattactttctgcaaatcatgctagcaaaacccaaagtaaattattagaaagtccagatcaacctaaacttaacgaacagagaacatcaacaccatcaccaaacccgccagaacagcagagaggagtaactgcagaacaaggaccacaaagaatttcaattgaagaacaacaacaaggcaaaaagccaactgcagagcaagaactgtacatagaatcagtaatagaaccaggaacacacacagagtcaactctagaacaagggtcaagtagaaggttactgacagaacaagaaacacacagagagtcaactacagaacaaggacagcacaaagggtcaatagaaggacaaggaccacgcagagtgtcagtttcagaacaaggatcaagcagagagtcagttgcagaacaagggtcacgcagagagtctattgcagaacaagatcgacacaaagggtcagtagcagaacaaggatcacgcagaatgtcagctgcagaacagggatcactcagagagtcagtaatagaagaaccataccaaaaatcagaacaaggaccttatggagagataatttcagaagagcaagaagacataggctcaacttcacaatcaagaaaagatagtatcttaaaaagtacaaaatatggggaacctataacctctgagtacattgaagtccctctacaggaaaagaggtcttgggaacaaacatatgaagaggaaatattcctgagttctgaactgcaagaggaagttccaaccttaagcagaaaagatcactttccagaaactacaaaaaaggaagttcagaaagacaagccctgtgaacccaagtcccaaaaaatagaaggaaagtcatggtcaggtgaattttttacttgtaactggaaaatgaagtatgtcacatttgaagatgaggaacaggcaaacttaatctatggtaactccaggttcacagatttacactcaattatcagaaatattcagtcttgcaaggaggtaaaaggcagaactgccttcaatggagtttcattcaatctgctccagtttgtgcaactcctggagacatttgttggtgaagacgctcccttgagtgtcagcgagactctcacctccttttttaaggagggctatgttgaaacagaacaagagaaaatgaatgccttagaacagtttagccaaaatgctttccaagtccgacagaggcttctcctagaagccatctttcagaagtgggacagtgatggctcaggcttcctggatctgaaggaagttgatgaactcttgtacacatacaaggagggaatggaaaaagaatctatgaagaaaggtctcactctgtcgccaggctggagtgcagtggcgcaactgtagctcactgcagcctccaactcccggactcaagcgatcatcccatcacagactcctgagcaactgggactacagggaaagaaggaagttttttcctcttgagaccaaatttccataaaatgagatgcaaaaattttaagtgtatatttgctgagttttgacaaatacatgccctatgcatcccatactcctatcaagatacagaacaaagagcactgtgacactcacctgtaatcccagctactcaagaggcagaggcaggaagattgcttgagcccaggagttcaagatcagcctgggtaacattgcaaaaaccatctcttaaaaaaaataaataaaagatatagaacaaaaaaagtccccacacctctttcccattcagtcgtccaccctccaatccccaaagcaaccacttttctattttctaccataaattagttttatctcttctggaatttcataaaaatgaaattatacagtatgcatctttttttacagagtttaaactctatgtactctttttgtaaggcttctttcactcagcataatttttacttttttaaaaattttttgggggagacagagtctcactctgttgcccaagctggagtgtagtggcatgtgatcataactcactgcagccttgaactcttgggctcaagcaatcctcccgcctcagcatcccgagtagctgggagactacaggtgcacaccaccatgcctggctagtttataaactttttgtagagacaaggtctcaccatgttgcccaggctggccactaactcctggcctcaagtgatcctccctccttagcctcccaaagctctgaattatattcataagccactgggcctggttgactcagcataatttttcttgagagtcttaatatgttgctacatgtatcagcaatttgcttctttttattgctgagtagtattccattgtatgaatacaccatggtttgtttatccgttttcctatgtatggacacctgggctgtttccagttcttagctattataaataaagctactctgcacaatcttaagtaaa

SEQ ID NO: 129170 - DNA, 566 bp, Homo sapiens
  Payload ID: 5269
  Gene Symbol: EFCAB5
  Gene Name: EF-hand calcium binding domain 5
  ENST ID: ENST00000448319
  CDS Start-End: 257-566
atacaaacacgaccttagaacaagaatgatcacgagcaatgagtgtaaggcataaatatctgtaagacggaaataatttgacactgatcactaagcagcaccagatgcttcgggacctcataaaggaaaggaaaacagaaaagaagacaaagagaggaaatggaacttaactgaagtgaaagagcttcatgagaccttacagagtgtgccagacgttcctgtaaaagaggacaccaacagtgtggtggagaaagcaatggatgaaatcaaatcccaagaattaaacctggaggggcagcgaaaaatttcacctggttcaataaaggactctaaaactgaagcctcaggtaatattgcaattagaaaatctgcaaaagtgatttttgctttagatgaaactgaactgaaatcaaagccagagcacacatggaagaaaaacctttttgaaagaatggaggcaagagcccaagcaatgcagcagaaaataatagataaggaaaatctgaagaaggaactagaaaaaaaggctgaaaaaaaactccctagggataatttggccaaagagt

SEQ ID NO: 129171 - DNA, 3986 bp, Homo sapiens
  Payload ID: 5269
  Gene Symbol: EFCAB5
  Gene Name: EF-hand calcium binding domain 5
  ENST ID: ENST00000419434
  CDS Start-End: 1-3558
aagaagaaggttttgacagaagctgatactccaagcaagtttgacccaattaattatttgggggaatatttaataagaaacaatcctaattatatcaaagacccaggaatgtctggttaccagaggttgatgaaagaagtcacagaagacctgaagatatatgttcctgacactatctgcaacagagtatccaagatgaaggagaatgttaaacagaatagaaaacaaagagaaagcatagacaaaatcatagtcaaggtggccaacacacggaaacaggctctgcaggagcaattcgatgaatggattctagaccctaaaggaatgattcctaagtcagtgattcagaatgttcttcaagaattctttcaaaatccagatttcaagcttggatcacactgcaaacaactggatattactgactcaacagaaccaagattgaacaaaatggaatttacagaatacatctcttcacatattaaagacttgaagagtgaaatgtttgaggaacttcttaagcacctttgccactctgcagatgaatttcgggaggtcataaaagctgacatgcggaggcagatgttcgctgaactcttcctacattgtgaccacgggaaggtagggtttttggatcggcagaggacattggccctgctggaattgttctatgaccatagttcacaaatgcttaggagtttacttcgaaacccacgacaatggccattcattgaatttgaagagataaacttgactgagttgtggggagacatggataatcagaaacacatttatgaaggttttgacaaagtgctcttggagatgaatacattactttctgcaaatcatgctagcaaaacccaaagtaaattattagaaagtccagatcaacctaaacttaacgaacagagaacatcaacaccatcaccaaacccgccagaacagcagagaggagtaactgcagaacaaggaccacaaagaatttcaattgaagaacaacaacaaggcaaaaagccaactgcagagcaagaactgtacatagaatcagtaatagaaccaggaacacacacagagtcaactctagaacaagggtcaagtagaaggttactgacagaacaagaaacacacagagagtcaactacagaacaaggacagcacaaagggtcaatagaaggacaaggaccacgcagagtgtcagtttcagaacaaggatcaagcagagagtcagttgcagaacaagggtcacgcagagagtctattgcagaacaagatcgacacaaagggtcagtagcagaacaaggatcacgcagaatgtcagctgcagaacagggatcactcagagagtcagtaatagaagaaccataccaaaaatcagaacaaggaccttatggagagataatttcagaagagcaagaagacataggctcaacttcacaatcaagaaaagatagtatcttaaaaagtacaaaatatggggaacctataacctctgagtacattgaagtccctctacaggaaaagaggtcttgggaacaaacatatgaagaggaaatattcctgagttctgaactgcaagaggaagttccaaccttaagcagaaaagatcactttccagaaactacaaaaaaggaagttcagaaagacaagccctgtgaacccaagtcccaaaaaatagaaggaaagtcatggtcaggtgaattttttacttgtaactggaaaatgaagtatgtcacatttgaagatgaggaacaggcaaacttaatctatggtaactccaggttcacagctaaactacacatccaatttccaaagccacaccctggtcacgaagtgagattgtcttcaaaacaatttcagaattacatagaattggttgtgtctgaactcaggggcaatgaagaccaagttctggaaagtgttgtggaatttctgatgaatgctttagagaggagccacattgagagtctgaggaattctgccaggcggaaatggctgcaccaaatccaatgtgctgcagagacaagtggggtgtccctagagccggtgtatagtgagacctttaaggccctcatgcaggatgctgaagcccatggaaataaaaagatcagtgctcacatttccctcttagaagaaaacctactactgcctgagaaagggaatgttctattgaggaatgtggcttgtaccttagatgatgctcaatttgtactgaacagagtgctctacagggacatgaaaggaatcagctttacagtagtggatgaagggaagccaatccatgttccccaagttcagtaccatgggaacatcttcttctggaaccagtcccgtaataagcatgattataatggttcattcctggctctgcctcttcaagatgcatatatgaggatctttggggtcttggctgttgatacccttagagatccccacgaaataaacatctttctacctcatgagatcagattctatcagggtgttgctaatgtctttagcactgcctatcactacgtccacagccgggagcacattctgcatattgtgatcactggcataggctggctttatgacgtcacatccagcatcacctccatcactacgtactttgtagagcctagcccagcccaggattcagactatgttttacgcaacatgatggttacagggcagctgggtctaacagaaatccacaaaaatcctcctaccatccacaggaagtcatgcatcttcagagatttcctctttaaatgtactgacagttcagaagttgttctggcttctgcctgtggagaaacgcatatagtagttccacttcgtgagagaacaggagaggctctgggagtcctcgattttaacatcggccaaaataggatgttgttgtgtcaagaatataaagatctacagaaaatgatgaaagtggtccaagtggcctgctatgaaatacttggcgagttctctggagagataaagaaaaaatatatcttagagattgaaaatgtcagggaagtccagcgggcaggaattctcttcttccgaatcatgctgctcgagctacaggaaagcatccaactactcaattccatggaatttgtgtcactgttgctctatgaccatactcttgtaacagagccaaattctcctcaagacagcaaatctatggagttggaagccaacgtgaaactagtgcgtgacatcctgaaggcggttatcttgttctttcatccagagttggaattttcaagtgactttggaagttgggataagtgtaaattttatgttaacaaatatttagtcaacaatatttgtgcctttgatccaactgccaagcatgtggaagttaatgtacagcttattgatgaatatatcagagatcattcccgaactgaagtatggaaatttggtaatgttgtcattgaacatctataccactggatacacatctgttcagctctcatgaagataaccaaacaactaaatagtggtattacacctccgttgccctccaagactgacaattatatgtatgcaaaaatgccaggggaaggtttgcaagagaagtgataatggatgataatggaattgatactgtatttaggatcctttgtttgttatcagttttgtttgttaactataaaatattttccattggaaaggggtacctataaatgtcttctgctgctaatatttatctcagcactttctaaacccaaaagtgctacctaagaagaaatttagccaaaaaatacccagctaaggtagccatagccaagtgtatttaagtatgttatagaatatatttgaaagcttcctttcagtttgagctttgtatctgctgtggaactgttatggttgattgggtagttatttttcattcttataaggttcaaagtaacagctgaggatttagaaaacaagaataccaaatagaatacgaaataataaagataaaccaaaagaataccaaataataaagatttttaagaaatgga

SEQ ID NO: 129172 - DNA, 2826 bp, Homo sapiens
  Payload ID: 5269
  Gene Symbol: EFCAB5
  Gene Name: EF-hand calcium binding domain 5
  Uniprot ID: A4FU69
  ENST ID: ENST00000536908
  CDS Start-End: 193-2763
agaagcaagcggagcggccgccaggaaggactcaccgaggcgcaggggctggaggtggtgctgggggaaaacagaaaagaagacaaagagaggaaatggaacttaactgaagtgaaagagcttcatgagaccttacagagtgtgccagacgttcctgtaaaagaggacaccaacagtgtggtggagaaagcaatggatgaaatcaaatcccaagaattaaacctggaggggcagcgaaaaatttcacctggttcaataaaggactctaaaactgaagcctcaggtaatattgcaattagaaaatctgcaaaagtgatttttgctttagatgaaactgaactgaaatcaaagccagagcacacatggaagaaaaacctttttgaaagaatggaggcaagagcccaagcaatgcagcagaaaataatagataaggaaaatctgaagaaggaactagaaaaaaaggctgaaaaaaaactccctagggataatttggccaaagagtggtttaatactgacagcatgacactgaataatactgcatatttgcttgacaaacttctacccaccttagttcctggagtagaaaacatgttaactcaagtagaaaagaagaaggttttgacagaagctgatactccaagcaagtttgacccaattaattatttgggggaatatttaataagaaacaatcctaattatatcaaagacccaggaatgtctggttaccagaggttgatgaaagaagtcacagaagacctgaagatatatgttcctgacactatctgcaacagagtatccaagatgaaggagaatgttaaacagaatagaaaacaaagagaaagcatagacaaaatcatagtcaaggtggccaacacacggaaacaggctctgcaggagcaattcgatgaatggattctagaccctaaaggaatgattcctaagtcagtgattcagaatgttcttcaagaattctttcaaaatccagatttcaagcttggatcacactgcaaacaactggatattactgactcaacagaaccaagattgaacaaaatggaatttacagaatacatctcttcacatattaaagacttgaagagtgaaatgtttgaggaacttcttaagcacctttgccactctgcagatgaatttcgggaggtcataaaagctgacatgcggaggcagatgttcgctgaactcttcctacattgtgaccacgggaaggtagggtttttggatcggcagaggacattggccctgctggaattgttctatgaccatagttcacaaatgcttaggagtttacttcgaaacccacgacaatggccattcattgaatttgaagagataaacttgactgagttgtggggagacatggataatcagaaacacatttatgaaggttttgacaaagtgctcttggagatgaatacattactttctgcaaatcatgctagcaaaacccaaagtaaattattagaaagtccagatcaacctaaacttaacgaacagagaacatcaacaccatcaccaaacccgccagaacagcagagaggagtaactgcagaacaaggaccacaaagaatttcaattgaagaacaacaacaaggcaaaaagccaactgcagagcaagaactgtacatagaatcagtaatagaaccaggaacacacacagagtcaactctagaacaagggtcaagtagaaggttactgacagaacaagaaacacacagagagtcaactacagaacaaggacagcacaaagggtcaatagaaggacaaggaccacgcagagtgtcagtttcagaacaaggatcaagcagagagtcagttgcagaacaagggtcacgcagagagtctattgcagaacaagatcgacacaaagggtcagtagcagaacaaggatcacgcagaatgtcagctgcagaacagggatcactcagagagtcagtaatagaagaaccataccaaaaatcagaacaaggaccttatggagagataatttcagaagagcaagaagacataggctcaacttcacaatcaagaaaagatagtatcttaaaaagtacaaaatatggggaacctataacctctgagtacattgaagtccctctacaggaaaagaggtcttgggaacaaacatatgaagaggaaatattcctgagttctgaactgcaagaggaagttccaaccttaagcagaaaagatcactttccagaaactacaaaaaaggaagttcagaaagacaagccctgtgaacccaagtcccaaaaaatagaaggaaagtcatggtcaggtgaattttttacttgtaactggaaaatgaagtatgtcacatttgaagatgaggaacaggcaaacttaatctatggtaactccaggttcacagatttacactcaattatcagaaatattcagtcttgcaaggaggtaaaaggcagaactgccttcaatggagtttcattcaatctgctccagtttgtgcaactcctggagacatttgttggtgaagacgctcccttgagtgtcagcgagactctcacctccttttttaaggagggctatgttgaaacagaacaagagaaaatgaatgccttagaacaggtctcactctgtcgccaggctggagtgcagtggcgcaactgtagctcactgcagcctccaactcccggactcaagcgatcatcccatcacagactcctgagcaactgggactacagggaaagaaggaagttttttcctcttgagaccaaatttccataaaatgagatgcaaaaattttaagtgtatatttgctgagttttgacaaatacatgccctatgcat

SEQ ID NO: 129173 - DNA, 2605 bp, Homo sapiens
  Payload ID: 5269
  Gene Symbol: EFCAB5
  Gene Name: EF-hand calcium binding domain 5
  ENST ID: ENST00000588978
  CDS Start-End: 1-2323
tgatactccaagcaagtttgacccaattaattatttgggggaatatttaataagaaacaatcctaattatatcaaagacccaggaatgtctggttaccagaggttgatgaaagaagtcacagaagacctgaagatatatgttcctgacactatctgcaacagagtatccaagatgaaggagaatgttaaacagaatagaaaacaaagagaaagcatagacaaaatcatagtcaaggtggccaacacacggaaacaggctctgcaggagcaattcgatgaatggattctagaccctaaaggaatgattcctaagtcagtgattcagaatgttcttcaagaattctttcaaaatccagatttcaagcttggatcacactgcaaacaactggatattactgactcaacagaaccaagattgaacaaaatggaatttacagaatacatctcttcacatattaaagacttgaagagtgaaatgtttgaggaacttcttaagcacctttgccactctgcagatgaatttcgggaggtcataaaagctgacatgcggaggcagatgttcgctgaactcttcctacattgtgaccacgggaaggtagggtttttggatcggcagaggacattggccctgctggaattgttctatgaccatagttcacaaatgcttaggagtttacttcgaaacccacgacaatggccattcattgaatttgaagagataaacttgactgagttgtggggagacatggataatcagaaacacatttatgaaggttttgacaaagtgctcttggagatgaatacattactttctgcaaatcatgctagcaaaacccaaagtaaattattagaaagtccagatcaacctaaacttaacgaacagagaacatcaacaccatcaccaaacccgccagaacagcagagaggagtaactgcagaacaaggaccacaaagaatttcaattgaagaacaacaacaaggcaaaaagccaactgcagagcaagaactgtacatagaatcagtaatagaaccaggaacacacacagagtcaactctagaacaagggtcaagtagaaggttactgacagaacaagaaacacacagagagtcaactacagaacaaggacagcacaaagggtcaatagaaggacaaggaccacgcagagtgtcagtttcagaacaaggatcaagcagagagtcagttgcagaacaagggtcacgcagagagtctattgcagaacaagatcgacacaaagggtcagtagcagaacaaggatcacgcagaatgtcagctgcagaacagggatcactcagagagtcagtaatagaagaaccataccaaaaatcagaacaaggaccttatggagagataatttcagaagagcaagaagacataggctcaacttcacaatcaagaaaagatagtatcttaaaaagtacaaaatatggggaacctataacctctgagtacattgaagtccctctacaggaaaagaggtcttgggaacaaacatatgaagaggaaatattcctgagttctgaactgcaagaggaagttccaaccttaagcagaaaagatcactttccagaaactacaaaaaaggaagttcagaaagacaagccctgtgaacccaagtcccaaaaaatagaaggaaagtcatggtcaggtgaattttttacttgtaactggaaaatgaagtatgtcacatttgaagatgaggaacaggcaaacttaatctatggtaactccaggttcacagatttacactcaattatcagaaatattcagtcttgcaaggaggtaaaaggcagaactgccttcaatggagtttcattcaatctgctccagtttgtgcaactcctggagacatttgttggtgaagacgctcccttgagtgtcagcgagactctcacctccttttttaaggagggctatgttgaaacagaacaagagaaaatgaatgccttagaacagtttagccaaaatgctttccaagtccgacagaggcttctcctagaagccatctttcagaagtgggacagtgatggctcaggcttcctggatctgaaggaagttgatgaactcttgtacacatacaaggagggaatggaaaaagaatctatgaagaaagatcattcccgaactgaagtatggaaatttggtaatgttgtcattgaacatctataccactggatacacatctgttcagctctcatgaagataaccaaacaactaaatagtggtattacacctccgttgccctccaagactgacaattatatgtatgcaaaaatgccaggggaaggtttgcaagagaagtgataatggatgataatggaattgatactgtatttaggatcctttgtttgttatcagttttgtttgttaactataaaatattttccattggaaaggggtacctataaatgtcttctgctgctaatatttatctcagcactttctaaacccaaaagtgctacctaagaagaaatttagccaaaaaatacccagctaaggtagccatagccaagtgtatttaagtatgttatagaatatatttgaaagcttcctttcagtttgagctttgtatctgctgtggaactg

SEQ ID NO: 129174 - DNA, 4869 bp, Homo sapiens
  Payload ID: 5270
  Gene Symbol: EFCAB6
  Gene Name: EF-hand calcium binding domain 6
  Uniprot ID: Q5THR3
  ENST ID: ENST00000262726
  CDS Start-End: 255-4760
aacagcgtcctagagacgccgaatgggcagcccctctgagaccccgcggcttggggtccgcgcacgcgggtgccggcccagctaggcggagaatcgaggaggggttcccgggctcatcgcagaggattggaagggcctagattactgcccaatgacaaaagtgtgggcttaatgtcctcactcttcagggagagaatgtggactttagcatttgaactgaatatttgagattgaagatttctgaataggatttaatgtgcaaaatggcgattataccagactggcttaggtcgcatcctcacacacgaaaatttacacattcaagaccccattcttcaccgtgtagagtatattcaaggaatggttccccaaataagttcagatcttcttcaaccacagctgttgcaaatccaacactgtcctccttagatgttaaacggattttatttcaaaaaattaccgacagaggggatgagttgcaaaaagcctttcagctgctggatactggtcagaacttgactgtgtcaaaaagtgaactgagaagaatcatcacagacttcctgatgccgctcacacgagaacagtttcaggacgtgttggctcagatcccccttagcacctctggtactgtaccgtaccttgcctttctgtccaggtttggtggaattgacctatatataaatggtataaagaggggaggtgggaatgaaatgaattgctgccgcacattaagagaacttgaaatccaagtgggagaaaaggttttcaaaaacattaagactgttatgaaagcctttgagctcattgatgttaacaagactggactggttcgaccgcaggagctaagaagggttctggagaccttctgtatgaagttaagagacgaggaatacgaaaagttttcgaaacactacaacatccacaaggatactgcagtagattacaacgtgtttttgaagaatctcagcataaataacgacttgaaccttagatattgtatgggaaatcaagaggtctcgttggagaatcaacaagccaaaaattccaaaaaggaacgtttgctaggttctgcatcatctgaagatatctggagaaactactccttggatgaaattgagaggaacttttgtctacaactttcgaagtcttatgaaaaggttgaaaaggccctcagtgcaggggacccctgtaaaggtggctacgtgtcttttaattatctaaagattgtcctcgacacttttgtataccaaataccaagaagaatttttatccagttaatgaaaagatttggacttaaagccaccactaaaatcaattggaagcaatttctaacatcatttcatgagcctcaggggttgcaagttagcagtaaaggtcccctgacaaaaagaaatagcatcaactctagaaatgaatctcacaaggaaaacatcatcacaaagttatttagacacactgaagatcactctgcgtcactgaagaaagcattactgataatcaacactaaacccgatggaccgataacaagagaagaatttcgatatattctaaattgcatggctgtaaaactaagcgattcagaattcaaagaactaatgcaaatgcttgaccctggggacactggagtggtcaacaccagcatgtttattgatctgattgaagagaactgtaggatgagaaagacatctccctgtacagatgctaagacacctttcctcctggcctgggattcagtggaagaaattgttcatgatacaattactaggaacctacaagctttttataacatgctacgctcatatgaccttggagacacagggcgcattggccgaaataatttcaagaaaatcatgcacgtcttctgtccatttttaacgaatgcacatttcataaaactctgcagtaagattcaggacattggttcaggaagaatcctttacaagaaacttttggcatgcataggaattgatggcccacccactgtctctccagttcttgttccaaaggatcagctgttaagtgaacatttacaaaaagatgaacagcagcagccagatctttctgagagaaccaagctcacggaggataaaaccaccctgaccaagaagatgaccacagaagaagtgattgaaaaattcaaaaagtgtatacagcagcaggacccggcattcaaaaaacgatttcttgacttcagcaaggagcctaatggaaaaattaacgtgcatgactttaagaaggtactggaagacactgggatgcccatggacgatgatcagtatgccctgctgaccactaaaataggcttcgagaaggaagggatgagctatcttgattttgcagcaggatttgaagatcctccaatgagagggccggaaaccactccgccgcagcctccaactccttcaaaaagttacgtgaacagccactttatcaccgcagaagaatgcctgaagcttttccctaggaggctgaaggagtcattccgggacccctactctgccttctttaaaacagatgctgacagggatggcataatcaacatgcatgaccttcacagactgctcctgcatctactgcttaatctcaaagacgacgagtttgagcgcttccttggccttcttggcttgagacttagtgtcactttaaattttcgggaatttcaaaatttgtgtgagaagagaccatggagaacagatgaagcgcctcaaagactcattagaccaaaacagaaggttgcggattcagaactagcttgtgagcaggctcatcagtatcttgttaccaaagcaaaaaacagatggtcagacttgtctaagaattttctagaaaccgataatgagggcaatggcattcttcgacgccgggacataaagaacgcactgtacggttttgatattcccctcacaccaagagagtttgaaaagctttgggcaagatacgacaccgagggaaaagggcacattacttaccaggaatttttacagaaattgggtattaactattcgcctgctgtccatcggccctgtgcagaggattatttcaacttcatgggtcattttacaaagccacagcagctacaggaagagatgaaggagctgcagcagagcacagagaaggctgtggcagccagggataagcttatggaccgccatcaagatatcagcaaagcattcaccaaaactgatcaatccaaaaccaactacatatccatatgcaagatgcaggaagtgctggaagaatgtggatgttctcttaccgaaggggagctgacccatctgctaaacagttggggagtcagccggcatgataatgctatcaattacctcgacttcctgagagcagtggagaacagcaagtcaacaggagctcagcccaaggaaaaagaagagagcatgccaatcaattttgcaacgctgaatccacaggaggctgtgaggaagatccaggaagtagttgagtcctcccagctggctttgtccacggcattttctgcattggataaagaggatacaggatttgtaaaggctacagaattcggacaagttcttaaggatttctgttacaaactaacggacaatcagtatcattattttttgaggaaactaagaattcatctaaccccctatataaattggaaatattttctccagaactttagctgtttccttgaggagacagctgatgagtgggctgagaaaatgcccaaaggcccgccgcctacctctcccaaggccacagccgacagagacatcctggctcgcctccacaaagcagtgacttcccattaccatgccatcacccaggagtttgagaattttgacaccatgaaaacgaacaccatctccagagaggagtttagggccatttgtaatcgccgcgtccaaatcctgacggacgaacagtttgacagactctggaacgagatgccagtcaatgccaaggggaggctgaaatacccggacttcctgagcaggttcagttccgagacagcagccacaccaatggccactggtgactcggccgtggcccagagagggagcagtgtccctgacgtctcggaaggcaccagatctgccctctcattgcccactcaggagctgagaccagggtcaaagtcgcagagccacccctgtactccagcgagcaccaccgtgatcccgggcactccacccttgcagaactgtgatcccatagagagcaggctccggaagagaatccagggctgctggcgccagctcctgaaagaatgcaaggagaaggacgtggccagacagggggacatcaacgcctccgatttcctggctcttgtggagaaattcaacctggacataagcaaagaggagtgtcagcagctcattataaaatacgacttaaagagcaacgggaaatttgcatactgtgacttcattcagagctgtgtcctcctgctaaaagcaaaggaaagctcactgatgcacaggatgaagatccagaatgcacacaagatgaaagaagccggcgcggagacgccatctttttactctgctctgctgcgtattcagcccaaaattgtgcactgctggaggccaatgcggcgcacgttcaaaagctatgatgaggctggaacagggctgctaagcgtcgcagatttcaggacggtcctgagacagtacagcatcaacctctctgaggaagagttcttccatattctggagtattacgataagacgctgtcttcaaaaatctcctacaacgacttcctccgggcattcctccagtagacacccctgctgtgtgcccagcgggacgacagccacagggcctgtttcaaggctaataaaatcctataatttgggggtttcatgaattttcaaaaaaaacaaaactcaa

SEQ ID NO: 129175 - DNA, 1129 bp, Homo sapiens
  Payload ID: 5270
  Gene Symbol: EFCAB6
  Gene Name: EF-hand calcium binding domain 6
  ENST ID: ENST00000356087
  CDS Start-End: 389-991
agtcagcgactgccgtcgtctctcgggcaacagcgtcctagagacgccgaatgggcagcccctctgagaccccgcggcttggggtccgcgcacgcgggtgccggcccagctaggcggagaatcgaggaggggttcccgggctcatcgcagaggattggaagggcctagattactgcccaatgacaaaagtgtgggcttaatgtcctcactcttcagggagagaatgtggactttagcatttgaactgaatatttgagattgaagatttctgaataggatttaatgtgcaaaatggcgattataccagactggcttaggtcgcatcctcacacacgaaaatttacacattcaagaccccattcttcaccgtgtagagtatattcaaggaatggttccccaaataagttcagatcttcttcaaatcccccttagcacctctggtactgtaccgtaccttgcctttctgtccaggtttggtggaattgacctatatataaatggtataaagaggggaggtgggaatgaaatgaattgctgccgcacattaagagaacttgaaatccaagtgggagaaaaggttttcaaaaacattaagactgttatgaaagcctttgagctcattgatgttaacaagactggactggttcgaccgcaggagctaagaagggttctggagaccttctgtatgaagttaagagacgaggaatacgaaaagttttcgaaacactacaacatccacaaggatactgcagtagattacaacgtgtttttgaagaatctcagcataaataacgacttgaaccttagatattgtatgggaaatcaagaggtctcgttggagaatcaacaagccaaaaattccaaaaaggaacgtttgctaggttctgcatcatctgaagatatctggagaaactactccttggatgaaattgagaggaacttttgtctacaagtaagatgttttcctaagccacaattacctacagagtaaacacagcaaagtagacaatatggaaaactattaggtttacacattatttctaaaatttgtttcgatcctacctatgtcttctccaatactgagaccccctctacctcccaataacagcaatacattgatcatggataa

SEQ ID NO: 129176 - DNA, 4424 bp, Homo sapiens
  Payload ID: 5270
  Gene Symbol: EFCAB6
  Gene Name: EF-hand calcium binding domain 6
  Uniprot ID: Q5THR3
  ENST ID: ENST00000396231
  CDS Start-End: 266-4315
ggagaatcgaggaggggttcccgggctcatcgcagaggattggaagggcctagattactgcccaatgacaaaagtgtgggcttaatgtcctcactcttcagggagagaatgtggactttagcatttgaactgaatatttgagattgaagatttctgaataatcccccttagcacctctggtactgtaccgtaccttgcctttctgtccaggtttggtggaattgacctatatataaatggtataaagaggggaggtgggaatgaaatgaattgctgccgcacattaagagaacttgaaatccaagtgggagaaaaggttttcaaaaacattaagactgttatgaaagcctttgagctcattgatgttaacaagactggactggttcgaccgcaggagctaagaagggttctggagaccttctgtatgaagttaagagacgaggaatacgaaaagttttcgaaacactacaacatccacaaggatactgcagtagattacaacgtgtttttgaagaatctcagcataaataacgacttgaaccttagatattgtatgggaaatcaagaggtctcgttggagaatcaacaagccaaaaattccaaaaaggaacgtttgctaggttctgcatcatctgaagatatctggagaaactactccttggatgaaattgagaggaacttttgtctacaactttcgaagtcttatgaaaaggttgaaaaggccctcagtgcaggggacccctgtaaaggtggctacgtgtcttttaattatctaaagattgtcctcgacacttttgtataccaaataccaagaagaatttttatccagttaatgaaaagatttggacttaaagccaccactaaaatcaattggaagcaatttctaacatcatttcatgagcctcaggggttgcaagttagcagtaaaggtcccctgacaaaaagaaatagcatcaactctagaaatgaatctcacaaggaaaacatcatcacaaagttatttagacacactgaagatcactctgcgtcactgaagaaagcattactgataatcaacactaaacccgatggaccgataacaagagaagaatttcgatatattctaaattgcatggctgtaaaactaagcgattcagaattcaaagaactaatgcaaatgcttgaccctggggacactggagtggtcaacaccagcatgtttattgatctgattgaagagaactgtaggatgagaaagacatctccctgtacagatgctaagacacctttcctcctggcctgggattcagtggaagaaattgttcatgatacaattactaggaacctacaagctttttataacatgctacgctcatatgaccttggagacacagggcgcattggccgaaataatttcaagaaaatcatgcacgtcttctgtccatttttaacgaatgcacatttcataaaactctgcagtaagattcaggacattggttcaggaagaatcctttacaagaaacttttggcatgcataggaattgatggcccacccactgtctctccagttcttgttccaaaggatcagctgttaagtgaacatttacaaaaagatgaacagcagcagccagatctttctgagagaaccaagctcacggaggataaaaccaccctgaccaagaagatgaccacagaagaagtgattgaaaaattcaaaaagtgtatacagcagcaggacccggcattcaaaaaacgatttcttgacttcagcaaggagcctaatggaaaaattaacgtgcatgactttaagaaggtactggaagacactgggatgcccatggacgatgatcagtatgccctgctgaccactaaaataggcttcgagaaggaagggatgagctatcttgattttgcagcaggatttgaagatcctccaatgagagggccggaaaccactccgccgcagcctccaactccttcaaaaagttacgtgaacagccactttatcaccgcagaagaatgcctgaagcttttccctaggaggctgaaggagtcattccgggacccctactctgccttctttaaaacagatgctgacagggatggcataatcaacatgcatgaccttcacagactgctcctgcatctactgcttaatctcaaagacgacgagtttgagcgcttccttggccttcttggcttgagacttagtgtcactttaaattttcgggaatttcaaaatttgtgtgagaagagaccatggagaacagatgaagcgcctcaaagactcattagaccaaaacagaaggttgcggattcagaactagcttgtgagcaggctcatcagtatcttgttaccaaagcaaaaaacagatggtcagacttgtctaagaattttctagaaaccgataatgagggcaatggcattcttcgacgccgggacataaagaacgcactgtacggttttgatattcccctcacaccaagagagtttgaaaagctttgggcaagatacgacaccgagggaaaagggcacattacttaccaggaatttttacagaaattgggtattaactattcgcctgctgtccatcggccctgtgcagaggattatttcaacttcatgggtcattttacaaagccacagcagctacaggaagagatgaaggagctgcagcagagcacagagaaggctgtggcagccagggataagcttatggaccgccatcaagatatcagcaaagcattcaccaaaactgatcaatccaaaaccaactacatatccatatgcaagatgcaggaagtgctggaagaatgtggatgttctcttaccgaaggggagctgacccatctgctaaacagttggggagtcagccggcatgataatgctatcaattacctcgacttcctgagagcagtggagaacagcaagtcaacaggagctcagcccaaggaaaaagaagagagcatgccaatcaattttgcaacgctgaatccacaggaggctgtgaggaagatccaggaagtagttgagtcctcccagctggctttgtccacggcattttctgcattggataaagaggatacaggatttgtaaaggctacagaattcggacaagttcttaaggatttctgttacaaactaacggacaatcagtatcattattttttgaggaaactaagaattcatctaaccccctatataaattggaaatattttctccagaactttagctgtttccttgaggagacagctgatgagtgggctgagaaaatgcccaaaggcccgccgcctacctctcccaaggccacagccgacagagacatcctggctcgcctccacaaagcagtgacttcccattaccatgccatcacccaggagtttgagaattttgacaccatgaaaacgaacaccatctccagagaggagtttagggccatttgtaatcgccgcgtccaaatcctgacggacgaacagtttgacagactctggaacgagatgccagtcaatgccaaggggaggctgaaatacccggacttcctgagcaggttcagttccgagacagcagccacaccaatggccactggtgactcggccgtggcccagagagggagcagtgtccctgacgtctcggaaggcaccagatctgccctctcattgcccactcaggagctgagaccagggtcaaagtcgcagagccacccctgtactccagcgagcaccaccgtgatcccgggcactccacccttgcagaactgtgatcccatagagagcaggctccggaagagaatccagggctgctggcgccagctcctgaaagaatgcaaggagaaggacgtggccagacagggggacatcaacgcctccgatttcctggctcttgtggagaaattcaacctggacataagcaaagaggagtgtcagcagctcattataaaatacgacttaaagagcaacgggaaatttgcatactgtgacttcattcagagctgtgtcctcctgctaaaagcaaaggaaagctcactgatgcacaggatgaagatccagaatgcacacaagatgaaagaagccggcgcggagacgccatctttttactctgctctgctgcgtattcagcccaaaattgtgcactgctggaggccaatgcggcgcacgttcaaaagctatgatgaggctggaacagggctgctaagcgtcgcagatttcaggacggtcctgagacagtacagcatcaacctctctgaggaagagttcttccatattctggagtattacgataagacgctgtcttcaaaaatctcctacaacgacttcctccgggcattcctccagtagacacccctgctgtgtgcccagcgggacgacagccacagggcctgtttcaaggctaataaaatcctataatttgggggtttcatgaattttcaaaaaaaacaaaactcaa

SEQ ID NO: 129177 - DNA, 2313 bp, Homo sapiens
  Payload ID: 5271
  Gene Symbol: EFCAB7
  Gene Name: EF-hand calcium binding domain 7
  Uniprot ID: A8K855
  ENST ID: ENST00000371088
  CDS Start-End: 247-2136
actctggccataccacccccgcgatagaggagcaacacagctgtctctgtgcgctccggatcagcgcttcctagatttctagccggatcgtttggagaagggctctgcatcttatttccggtggcggtgaggtgcagttgccatggtgattagagaaaggccgagatctgtccagctgcggtgagaggaacgctgaatcgccgaagagaattggctgcgcttccttgtttgtgagctagaattagaatggcgatcagtccacgaagcgatgcaactttctccagtcagaaatcaacaccttcagagagtcctcgaacaaagaaatttccactaactgaagaggaaatattttatatgaattgtagagctgcctacttaactgtcttcaaaagcagcttggaaaacattatttctaaagatcaactttacttagctcttcagcatgcaggaagaaatccatcccaaaagaccattaataagtattggactcctcaaactgccaaactgaattttgatgatttttgtataattttaaggaaggaaaaacctacttcaaaagcagaactactaaaatcatttaagcaattagatgtaaatgatgatggctgtattttacacactgacctttataaatttctaacaaagagaggtgagaagatgactcgagaagaagtaaatgccataataaatttggctgatgtaaatgctgatggcaaatttgactacatcaagttttgtaaattatatatgacaaccaacgagcaatgtctcaagactacactagaaaaactagaggttgacagtaaattgatgcgtcaccagtttggaaaccacatcgaagggtcccctgaaagggacccatcaccagtaccaaaaccatcacctaaaatcacaagaaaaactgatccagaaacattcttaaataaaggtgacaccaggagttctttactgtcagcaaccaggaagttcaaaacatctgtttccttcacagttaccatgggggctaatggtaaccgaaactcaaagttaatggagccaaatttaataaaggactggcaacacatgcaatcaaaaggttgcttcttcttagaagaagatggtgaaatcattagtcatcagtacaggatgcaaatagctcagaggtccatggtttatctaacaattaagccattaaacctgagtcaagttgaaggaaaaccatccccttggttatccgttgatactgccttgtatattctcaaggaaaatgagagtcaagcaaatctacagcttgtgtgttttaccgaactacgaaatagagaagtgtttggatggactggtgaactaggacctggaatttactggttaattccttccacaactggctgtaggctgaggaaaaaaataaaaccagtaacagatgaagcccaacttgtatatagagatgaaacaggggaattattccttacaaaggaatttaagtctactttatcagatatatttgaagtaattgatttagatggaaatggtcttcttagccttgaagaatataatttttttgaattgagaacaagtggtgagaaatgtgatgaagatgcttgggctgtctgcagagagaattttgatacaaagaggaatgaactaacaagacaaggatttatggatttgaatctaatggaagctaatgatcgagaaggagatccttgtgacctttgggtaactctacactctatgggctacaataaagctctggagttgacagaggcatgtccatttgtcattgatatctatgcagaaaaatgcaagccaaaaattaaagctgtccatatggaggcatgtagtggacaacttgagaaggccatttgtaaatctgttcttagcaacggtgatgccaaagtaatggatggctatgaaaatataatcgtgcatacttacagttgtgacacctggataacgtcagttattgaaaacaagtcagatgagaaagtgattattcacatcagcaatgagctaagtaaaaactgcataaacaacagaggactcaacatatttgcagtagaagtgggacccaaatctacaatggtttgtcaacatgtaatgcctttgaatgaacgacaagaatggatatattattgtatatattctcttatttcttaaataattatacttagaacttaccaaactaagaattatttcagatttagtctgttatttattaaacaactaaatgctacttaactgatgtacctaaataataatctattcaatttatatgcattttcattttatgtccatggtatgtactttattattaaaatataaataatgctttca

SEQ ID NO: 129178 - DNA, 3961 bp, Homo sapiens
  Payload ID: 5272
  Gene Symbol: EFCAB8
  Gene Name: EF-hand calcium binding domain 8
  ENST ID: ENST00000400522
  CDS Start-End: 95-3961
tttgttgagatgggagttggaaagtgttagcactttgccagactttgccagcaagattaactgaggagatcaaattgagtcagggtcaaggctaatgtcttctgaagacttagcagagatccctcaactccaaaagctgtccatcccacatggcttccagaacaaggaggctgctagctccccaacaccatccatcacccttagccaggtgcctgacctccagcctgggtcccagctgtttactgagatacacctggccaagatagagaaaatgtttgaggaggacatcaactcgactggagccctgggcatggacgccttcatcaaggccatgaagaaggttctgagcagtgtgtcggacgagatgctaaaggagctgtttttgaaggtggactcggactgtgaaggctttgtcacctggcaaaagtatgtggattacatgatgcgtgagttccagggaaaagaggacatgcgaaagagccagtaccgcctgcacttctaccttcccatgacggtcgtccccctgaaccatggctgtgaggtggtgaaggtggtgtttttaatccaccggttcaagaagatcgggtgtttcctgactgtcaccaaagacgggatcctgcagttctggtctgagtccttctcgctgatgagctcctttaggcttaaccagacccagcagctctacaaccagccgatgtgggtcattgacatggtatgtctgcacaatatgaacctcgttgcagttgcgtctaccaggcaaaagatagatttctttgatattagtgaccacaaatgtgtccgggccttcacctttgttgatctggacagctgtgctctggtcatggactactggtctgactatcacagaggtgtgttctgctatggagacgccaaaggcaacgtcattgtcttcacctccgaaaacatgaccagtgggctgttcaacccccgtatcctccccagggcctccaagtgggatcactggatcaaagtttccttgcagaaactcttaaatgagaagtctgctttgcatagaagctaccggctgaaggctctccatcccaactggtgtgagcaggtcaagttcatcccccagatgaatgtggtagtctcctgttcagccatcgagaagtcctctctggtgctgacaatattgccagccaaagcctctaagaaacccaggttgtcagtgctgcgtttaaggaaagggattctttgctttgattactgcccagacaggaacttcctggtgactggtggctacgatgccttcatccgcctgtggaacccctttgtctcaaagaggcccgtgtggctgatgaagggacaccagacctcagtgacgcacatccttgtggatagcaggaacaacagcatcctcatcagtgtctccaaggacaagaatattcgcgtgtgggacatgctggactacatatgcctccagtccttctgtgggaagttttttgctctgggaaactgccccatcaccagtgcctacttcttcgagaaggacaataccctcatctgcagcacctactcaatcgggatcctaaaagggtacttagaggcccaggggcttatcaaagcaaggaagaggaccactcattgctcacccctgtgtgctgtcctctacagcaagatctttaagcaggtggtgagtggctgcctgcgcggcacagtgagtgtgtgggaggtcgtgacgggcaggaagacgatggagtttgctgtgtctgggggccagcacgtggagatgaccgccatggccctggatgagtcagagcggtgcctgctcacaggtttgcgggatggcacaatgaagatgtggaactacaacattggcaaatgcctgttgacctttcccagtccggaacagctggagattagtgggattatccatatgaacaaagtgttctatgtgacaggatggagtaagagaatcactcatttcctgttccacaagaccaagccagtgctcttgtgctaccactggcagacctaccacacggaggacatcctgagcatggccaagtaccggaaccagttccttgggacctcctcctacagtggggacatcctcttctggaacaccggcacactcaagcccatcttcaacttcaatgcctctaggagcccctcgcccttgcagcccaagagggtgcaagatgtgaacaactgcctggctgagagccacaggcccagcagaccctatgtggagcgggagaagtggacatacaagacctccaggaagctctccagtctcagccccgagtctgtggccaataccaacctgaggcggagcctggtgtcggctcccccagtgatgcggtgcccgagagacaaggagccagacaggcctgtgccccagcagaaaccttccagtgcttctggcacatccaggcagtcaagcaagatccacagcaaacagtccatttacaaagaggatgaaacgagaaaaggagaatggcagaagaatatgttggttcaatccagtgcctcggtggagaagataatcttcctgcagaccaggcctcgcctgccgcacacggctgccctgctgagcagctgcatggacggctacatctacgcctggtccctccatgagaatggaggcctgctggggaagttccctgtggacctagacaatggggatgttgtcgtgggtgccatggccactgataaaaatgactggatcctcatcacgggggattgtaaaggatacatcaagatctgggacatcaaggattactgcgcattgattgataaacagccattccaatccagtggggccaaggttgtctctgaagcacacaacaagttccggttgttaattcctcagcaacttgggaccaacttcccacactacattcccttggaggataaagaggttgtggctggccataccatttccctggttccccccacgctcctgatgacctggaaaggccatttgaatagtgtggcagacatcctgtatgtggacaacttccagctggttatcagcgctggccaggaccgggacgtcaaggcttggaaactctccggtgatgccattggaacgtttggcctgagtgtgtggaaaagactacaggatgcctgtgatggtcctcgtgaaaacagagcaagcttagaggaagatggtgactccactggcaccacccagaaggtcttacatctggagctgcaggagcagcgggatctggctgaggccctgatataccagcggcgagagcaggcggcgctgatggctctcctgcatgggaaggcagataaggaggcagacacttgggccaagctgcagaagatggccctgatgtccccgtgggccggagagcgccccctggaagacattgaggacagctggaacaagtgggagtccagggacaagcaggtgagcaaagtcttgggagcggcgtataagcccaaggaacgcttgcagaataccaggttcctgtccaccagggtgccatatggctggatgaagcatcagatctcgcctcaggtctaccaaagcctgcacttcagtgatctgatgccgactcagcagcctgacttcctgaccagcaggggcccagaccagcaagaccagcacatccgcctggtggcccaccatgtccagaaggacctggtgcccagcagggagcaggctgtgctggataccacggacagcacgcctgcggccgcctcctccccatcttccttgttatctgtcactgcctcagcctccaggctgctggactccagcttgcccaccttcctgacgccccagttctccttcttgctgcggccccagtcagcctccacagcccattccaccccctcggtcccatccccggtgtccaagtccaccctgcaggggtcagtgacccccaagcacattgtctcctccttcgagcggcccccaaggcctctgaaggccaccttcatgtcctctgtgaaggggagctcccatgtcaggttctga

SEQ ID NO: 129179 - DNA, 435 bp, Homo sapiens
  Payload ID: 5272
  Gene Symbol: EFCAB8
  Gene Name: EF-hand calcium binding domain 8
  Uniprot ID: A8MWE9
  ENST ID: ENST00000618684
  CDS Start-End: 1-435
atgtcttctgaagacttagcagagatccctcaactccaaaagctgtccatcccacatggcttccagaacaaggaggctgctagctccccaacaccatccatcacccttagccaggtgcctgacctccagcctgggtcccagctgtttactgagatacacctggccaagatagagaaaatgtttgaggaggacatcaactcgactggagccctgggcatggacgccttcatcaaggccatgaagaaggttctgagcagtgtgtcggacgagatgctaaaggagctgtttttgaaggtggactcggactgtgaaggctttgtcacctggcaaaagtatgtggattacatgatgcgtgagttccagggaaaagaggacatgcgaaagagccagtaccgcctgcacttctaccttcccatgacggtcgtccccctgtaa

SEQ ID NO: 129180 - DNA, 702 bp, Homo sapiens
  Payload ID: 5273
  Gene Symbol: EFCAB9
  Gene Name: EF-hand calcium binding domain 9
  Uniprot ID: A8MZ26
  ENST ID: ENST00000398186
  CDS Start-End: 2-595
gatgagactgaagcaaggatcgtttctgtggtacctctatctggacaaaatatactgcttattatccgtgagaaacgtgaaggctttggcagaatattttcatattctggacgtgcacggcaagaacaccttgaatgatgtgctgttctatcacttccttcatcatgtgactgacttgaaaaaggcacagatcaacattgtgtttgacatgctggactggaacgctgtgggcgagatcgactttgagaagttctacatgctggtgtgcatgctgctggcccaccagaaccatttggaaggacagtttatgtatcgtcattcccggcctgtctttgacctgcttgacctgaaaggggatctgagaattggtgcaaaaaacttcgaaatgtacagatttctcttcaatattcaaaaacaggaactcaaagatctcttccgtgactttgacattacaggtgacaatcgtcttaattatcaggaatttaagctgtatacaatcatctacactgacaaattacagaagaggcagaaaacagaggagaaagaaaaaggagagagaaagagaagtctctactcaaaatgtcacatcaagtagatacaagctgaaagagtcttggaaaaaaatgggatctgaaagtacagaacatgaacattgatgaagactgttaacatgtctaaaaataaattcagagcatcaaagta

SEQ ID NO: 129181 - DNA, 5470 bp, Homo sapiens
  Payload ID: 5274
  Gene Symbol: EFHC1
  Gene Name: EF-hand domain (C-terminal) containing 1
  Uniprot ID: Q5JVL4
  ENST ID: ENST00000371068
  CDS Start-End: 104-2026
agcgttaccatggatcctggaggtgcccgcgaacactgcttgtcgcctgggcaaccggagaggacgaagcaggacctaggtggcggcggtggtaccggctgcaatggtgtccaatcccgtgcatggcttgccctttcttccgggcacgtcctttaaggactctacgaaaacagccttccacagaagtcagacgctgagctacaggaacggctatgcaattgttcgacgtccaacagttgggataggcggagaccggctccagttcaaccagctgtcccaggctgagctggatgagttggccagtaaggcaccagtcttaacttatggccaacctaaacaagccccacctgcggattttattcctgcgcatgtggcctttgacaaaaaggtactgaaatttgatgcctatttccaagaagatgttcctatgtcaactgaggaacagtataggatccgtcaggtgaacatttactattatctagaagatgacagcatgtctgtcatagagcctgttgtagaaaattctggaatccttcaaggcaagttaataaaacgccagcggctagccaagaatgaccggggtgaccattaccattggaaagacctaaatcgaggaataaacatcacaatttatggcaaaactttccgcgttgttgactgtgaccaattcacacaggtatttttagaaagccaaggaattgagttaaatccaccagagaagatggctcttgatccttacactgaactccgaaaacagcctcttcgtaagtatgtcaccccatcagactttgatcaactcaagcaatttctcacctttgacaaacaggtccttcgattctatgcaatctgggatgatacagacagcatgtatggtgaatgtcggacctacatcattcattactatcttatggatgatacggtggaaattcgagaggtccacgaacggaatgatgggagagatcctttcccactcctaatgaaccgccagcgtgtgcccaaagttttggtggaaaatgcaaagaacttccctcagtgtgtgctagaaatctctgaccaagaagtgttggaatggtatactgctaaagacttcattgttgggaagtcactcactatccttgggagaactttcttcatttatgattgtgatccatttactcgacggtattacaaagagaagtttggaatcactgatttaccacgtattgatgtgagcaagcgggaaccacctccagtaaaacaggagttgcctccttataacggttttggactagtggaagattctgctcagaattgttttgctctcattccaaaagctccaaaaaaagacgttattaaaatgctggtgaatgataacaaggtgcttcgttatttggctgtactggaatcccccatcccagaagacaaagaccgcagatttgtcttctcttactttctagctaccgacatgatcagtatctttgagcctcctgttcgcaattctggtatcattgggggcaagtaccttggcaggactaaagttgttaaaccatactctacagtggacaaccctgtctactatggccccagtgacttcttcattggtgctgtgattgaagtgtttggtcaccggttcatcatccttgatacagacgagtatgttttgaaatacatggagagcaacgctgcccagtattcaccagaagcactcgcgtcaattcagaaccatgtccgaaagcgagaagcgcctgctccagaagcagaaagcaagcaaactgaaaaggatccaggcgtgcaggaattggaagcattaatagacacaattcagaagcaactgaaagatcactcatgcaaagacaacattcgtgaggcatttcaaatttatgacaaggaagcttcaggatatgtggacagagacatgttctttaaaatctgtgaatcgcttaacgtcccagtggatgactccttggttaaggagttaatcaggatgtgctctcatggagaaggcaaaattaactactataactttgttcgtgctttctcaaactgacctgctgatgagaaaatgcaagacaatttttgatactggaactatgctttgaaatacaccttacactcttcatagaggcatttacagggttcctgaagttttatttctgttttggttcttctttcactcctactgaagtcgaaactaaattggatctaataggatctaagattggtgccttatttagggtgataggggtatagcaatgtctaattttgtgtgtcaaattgacttggccacagggggcccaaatatttcctttctttctttttaaaaaaataaatttttttagagatgggatctcactctgtcatacaggctggagtgtggtggcactatcctagttctatgaagcctcagactcctgggctcaagtgatcctcccacttcaacctccccagtagctgggacaacaggctcaagccaccatgcccagctaatttttaaaattattttgtagagacaaggtcttgctaggttgcctgaacttgtctcaaactcatgagctccagaaattctcccacctcagcctccaaaagtgctgggattataggcatgagccactgtgcccagcctcagatatttcattattctgggggtttctctgaaggtatttttcgatgagataaacatttgaatcagaagactaagtaaaacagatagtcctccctaatgtgggtgggcctcctccaatcatttgaagacatgagtagaataaaaaggctgacctttccccaggtaagagaattcctcctgcctgactggcttcaaattggaacatcagccttttcttgccttcagacacaaatggaaacatcagctgttggtctggagcctgctgaccttcagactggacctaaaccatcagctctcctaagtcataggcctttggattcagactggaattatacctttagctctcctgggtctccagcttgccaatttaccctgcagatcttgggacttgtaagccttcataattgtgtgagcaatttcttataactctctctttctctctctctacatatatatatatatatatattttatatgtacacattcatacacacacacgcttatatgtatacatatagtatgtatatgtgtatatatattatgtatatacatatatgtgcacacatctctactaaaaatagaaaaattagccaggtgtggtggcgtgtgcctgtagtcccagccactcgggaggcttaaatgggagaatcacttgaaccctggaggcagaggttgcagtgagccaagaccacgccactgcactccatccagcctgggtgacagagcaagactccatctcaaaaaaaaaaaggttagaaaaatgctgcttttagagagcctggccttgagagaggaaggaaagactagttgcagttactattctctggtgagctctgactggctttttacaaacagggcttctctttggttgaagtcagccactaagttcatctttaaacatgctatctcaaattccccgaagccacccaaaatgtggtatgaatgaggatagagttacacagaattcagactgctttgccctctcagaacttctagggaacttcccttggtgtttccttccctaacgagctcagccacttgtaaccagcttattgaaagggctgtgaatgtattatgttgattccttttctgttccaggttattatcttgggaataacccatgttttgttttgttttaccctcagtcgctcataactatttaaaacagtatctctttcaagtacagatgctcctctacttatggggctatgtctcaataaactcacgtaagtaaaaaatatcacaagttgaaaacacatttaataaccctgataagcccattgtaaagtaggcaaataagttggaccattgaaagttggggactatctgtattttagaagttttttcagcttaaaaattaccaagctctatcctacttggcccagctcagtccttcccccaggcttagaagcctgtggtaaagagtgtgtgtatactggggtgatgatagtggtttcttcttactcccttctttctgtcttctgctccctttgttcctattcagccatgctgctgtttctagcccatgtaggctctgggaaaggttaagcgggtagaaaccagagaaaaagggcaaagtcttatttctgtggctagtaatgtcgtaatgtggggccaggtctgagtgacatgtgccgaaaggctgactctttctcccagagcaccttttctctctttttggattcagggggtacatgtgcaggtttgttacatgagtatattgcacccaggtagtgagcatagtgcccagtaagtagtttttccacacataccccctccttcccttcccactctggtagtccccagtgtctattgttcccatcattatgtctatgtgtattcaatgtttagctcccacttagaagtaagaacatgcaatatttggtttcctattcctgcatcaattcactttaggataatggcctccagctgcatccatgttgctgcagaatacatgatttcattttttatggctgcgtagtattccatggtgtagatatacttcatttaaaaaatctaatccaccattgattggcacctaggttgattccatgtcctttgctcagagccccgttttggtgagttcttagaactctttccaaccggaaactgcccagtgcaccactctcagatggacgggacccagtctgtacctgatcaccccggctctaatggtatggtctccaaggctccttctgatcttcccaggaggccctttcaggctgacacaccttccagggtgtgcactctcgccatgttctcacccagatggctctcttggctgtgtaattaggcagctcaatccctttcctttagactgtttcaggggagaaccaggtaccccaaatcttatgctctccaaactccaggggacagacacatgtcaaaccctgagtcttttaaagtataccctcacttagcttgcagacccaaggcactccagcccctttcaagaagcttgcactttctgatattttctccatcactcttgcctcctgtggtagaggagctttgggctactccttaacaaatcattcatggatcggcagcaaatctgcaacatatggatatatttgccaatttttgtcctcagctttgggtctcagccaaaatggagatttaggaaagtctcatttagcatcctctagcctgcttttggctgttttgttttgtttttgtgtttgttttttagagacagggtcttactctgttgccagactggaatgcggtggtgtgaccatagctcactgcagcctcaaactcctgggctcatgcaatcctcctgcctcagccttctgagtagctaggcctgtagtctcagagggaactgtcttcaataaagttggcactgtccacatacactccttaa

SEQ ID NO: 129182 - DNA, 3442 bp, Homo sapiens
  Payload ID: 5274
  Gene Symbol: EFHC1
  Gene Name: EF-hand domain (C-terminal) containing 1
  Uniprot ID: Q5JVL4
  ENST ID: ENST00000480623
  CDS Start-End: 104-940
agcgttaccatggatcctggaggtgcccgcgaacactgcttgtcgcctgggcaaccggagaggacgaagcaggacctaggtggcggcggtggtaccggctgcaatggtgtccaatcccgtgcatggcttgccctttcttccgggcacgtcctttaaggactctacgaaaacagccttccacagaagtcagacgctgagctacaggaacggctatgcaattgttcgacgtccaacagttgggataggcggagaccggctccagttcaaccagctgtcccaggctgagctggatgagttggccagtaaggcaccagtcttaacttatggccaacctaaacaagccccacctgcggattttattcctgcgcatgtggcctttgacaaaaaggtactgaaatttgatgcctatttccaagaagatgttcctatgtcaactgaggaacagtataggatccgtcaggtgaacatttactattatctagaagatgacagcatgtctgtcatagagcctgttgtagaaaattctggaatccttcaaggcaagttaataaaacgccagcggctagccaagaatgaccggggtgaccattaccattggaaagacctaaatcgaggaataaacatcacaatttatggcaaaactttccgcgttgttgactgtgaccaattcacacaggtatttttagaaagccaaggaattgagttaaatccaccagagaagatggctcttgatccttacactgaactccgaaaacagcctcttcgtaagtatgtcaccccatcagactttgatcaactcaagcaatttctcacctttgacaaacaggtaagtgacataggaaccacaataggcttacttatttccaaatgtgacctacatttattggcaaaaggtttgggtagctgtattggtaactattttgaaacattacagctataattgaactgtttggacacagtactgtctttctgctttcatcaagggttacaggtacaggaatgcctacatttcatatggagatccaaagaagatcgtggagttgcggagttgttttgtgaacctcaccaaacatttaaatctcaaagcaattcctgagctacatctgcttcccaccttacgtttccaattgacaatttctttcccttaaaatgagctaatttcatagactcctttgtgaaaccataaatcgattattaggaaatttcacaaatatgcatacatgtaggttgtaatgttaaaatgtttaatttcacagaagccccactacagatgcttccttgttaaatgttatattaatattggagtccagaatgttctgagcattttccaactctgttccaaccttcctaatcctctcccttgtgagctgatgtgtataagcagatttaaatccttccctttctgtactaaagggagaaagaaaaggaagagatcaccctcagtgcttctttgctgctccttttctttagacatttaaccccttttagttcagaaaatgtaaactagcactagcatggtcttttaaggattttgttcatatcagtcatatatctgttattattttgtatttaaagattgtgtttattcccacgatttgaagaagcctagccaaaaaaaaaaaaaaaaagattgtgtttatattattgctagaagatatgtgttgatgggaccaaaaaaagactggttaataaataaaaattttttctacactaattatatataaaccatattcacatgtacctttattaatatatatataccactatgtaaagaacttcattgctcttttaatttagcttctctttcactgactaatattttggatcaaagtgagctcttcttttttggcacaaacttataatcctattatttaattctttccagctgctgacatatagtacataatttcagatgttttagtatgtttgatgaatatttctttttttttcaatttaccccatctgaaattacttcatagtctttccagctagtctttccatcgttgatacataattgccaaagtagccaagttgaactccctacttttaggattcttgagtcactactttggattcttcaaaggtccttcgattctatgcaatctgggatgatacagacagcatgtatggtgaatgtcggacctacatcattcattactatcttatggatgatacggtggaaattcgagaggtccacgaacggaatgatgggagagatcctttcccactcctaatgaaccgccagcgtgtgcccaaagttttggtggaaaatgcaaagaacttccctcagtgtgtgctagaaatctctgaccaagaagtgttggaatggtatactgctaaagacttcattgttgggaagtcactcactatccttgggagaactttcttcatttatgattgtgatccatttactcgacggtattacaaagagaagtttggaatcactgatttaccacgtattgatgtgagcaagcgggaaccacctccagtaaaacaggagttgcctccttataacggttttggactagtggaagattctgctcagaattgttttgctctcattccaaaagctccaaaaaaagacgttattaaaatgctggtgaatgataacaaggtgcttcgttatttggctgtactggaatcccccatcccagaagacaaagaccgcagatttgtcttctcttactttctagctaccgacatgatcagtatctttgagcctcctgttcgcaattctggtatcattgggggcaagtaccttggcaggactaaagttgttaaaccatactctacagtggacaaccctgtctactatggccccagtgacttcttcattggtgctgtgattgaagtgtttggtcaccggttcatcatccttgatacagacgagtatgttttgaaatacatggagagcaacgctgcccagtattcaccagaagcactcgcgtcaattcagaaccatgtccgaaagcgagaagcgcctgctccagaagcagaaagcaagcaaactgaaaaggatccaggcgtgcaggaattggaagcattaatagacacaattcagaagcaactgaaagatcactcatgcaaagacaacattcgtgaggcatttcaaatttatgacaaggaagcttcaggatatgtggacagagacatgttctttaaaatctgtgaatcgcttaacgtcccagtggatgactccttggttaaggagttaatcaggatgtgctctcatggagaaggcaaaattaactactataactttgttcgtgctttctcaaactgacctgctgatgagaaaatgcaagacaatttttgatactggaactatgctttgaaatacaccttacactcttcatagaggcatttacagggttcctgaagttttatttctgttttggttcttctttcactcctactgaagtcgaaactaaattggatctaa

SEQ ID NO: 129183 - DNA, 5308 bp, Homo sapiens
  Payload ID: 5274
  Gene Symbol: EFHC1
  Gene Name: EF-hand domain (C-terminal) containing 1
  Uniprot ID: Q5JVL4
  ENST ID: ENST00000538167
  CDS Start-End: 1-1866
atgttgaaaacagccttccacagaagtcagacgctgagctacaggaacggctatgcaattgttcgacgtccaacagttgggataggcggagaccggctccagttcaaccagctgtcccaggctgagctggatgagttggccagtaaggcaccagtcttaacttatggccaacctaaacaagccccacctgcggattttattcctgcgcatgtggcctttgacaaaaaggtactgaaatttgatgcctatttccaagaagatgttcctatgtcaactgaggaacagtataggatccgtcaggtgaacatttactattatctagaagatgacagcatgtctgtcatagagcctgttgtagaaaattctggaatccttcaaggcaagttaataaaacgccagcggctagccaagaatgaccggggtgaccattaccattggaaagacctaaatcgaggaataaacatcacaatttatggcaaaactttccgcgttgttgactgtgaccaattcacacaggtatttttagaaagccaaggaattgagttaaatccaccagagaagatggctcttgatccttacactgaactccgaaaacagcctcttcgtaagtatgtcaccccatcagactttgatcaactcaagcaatttctcacctttgacaaacaggtccttcgattctatgcaatctgggatgatacagacagcatgtatggtgaatgtcggacctacatcattcattactatcttatggatgatacggtggaaattcgagaggtccacgaacggaatgatgggagagatcctttcccactcctaatgaaccgccagcgtgtgcccaaagttttggtggaaaatgcaaagaacttccctcagtgtgtgctagaaatctctgaccaagaagtgttggaatggtatactgctaaagacttcattgttgggaagtcactcactatccttgggagaactttcttcatttatgattgtgatccatttactcgacggtattacaaagagaagtttggaatcactgatttaccacgtattgatgtgagcaagcgggaaccacctccagtaaaacaggagttgcctccttataacggttttggactagtggaagattctgctcagaattgttttgctctcattccaaaagctccaaaaaaagacgttattaaaatgctggtgaatgataacaaggtgcttcgttatttggctgtactggaatcccccatcccagaagacaaagaccgcagatttgtcttctcttactttctagctaccgacatgatcagtatctttgagcctcctgttcgcaattctggtatcattgggggcaagtaccttggcaggactaaagttgttaaaccatactctacagtggacaaccctgtctactatggccccagtgacttcttcattggtgctgtgattgaagtgtttggtcaccggttcatcatccttgatacagacgagtatgttttgaaatacatggagagcaacgctgcccagtattcaccagaagcactcgcgtcaattcagaaccatgtccgaaagcgagaagcgcctgctccagaagcagaaagcaagcaaactgaaaaggatccaggcgtgcaggaattggaagcattaatagacacaattcagaagcaactgaaagatcactcatgcaaagacaacattcgtgaggcatttcaaatttatgacaaggaagcttcaggatatgtggacagagacatgttctttaaaatctgtgaatcgcttaacgtcccagtggatgactccttggttaaggagttaatcaggatgtgctctcatggagaaggcaaaattaactactataactttgttcgtgctttctcaaactgacctgctgatgagaaaatgcaagacaatttttgatactggaactatgctttgaaatacaccttacactcttcatagaggcatttacagggttcctgaagttttatttctgttttggttcttctttcactcctactgaagtcgaaactaaattggatctaataggatctaagattggtgccttatttagggtgataggggtatagcaatgtctaattttgtgtgtcaaattgacttggccacagggggcccaaatatttcctttctttctttttaaaaaaataaatttttttagagatgggatctcactctgtcatacaggctggagtgtggtggcactatcctagttctatgaagcctcagactcctgggctcaagtgatcctcccacttcaacctccccagtagctgggacaacaggctcaagccaccatgcccagctaatttttaaaattattttgtagagacaaggtcttgctaggttgcctgaacttgtctcaaactcatgagctccagaaattctcccacctcagcctccaaaagtgctgggattataggcatgagccactgtgcccagcctcagatatttcattattctgggggtttctctgaaggtatttttcgatgagataaacatttgaatcagaagactaagtaaaacagatagtcctccctaatgtgggtgggcctcctccaatcatttgaagacatgagtagaataaaaaggctgacctttccccaggtaagagaattcctcctgcctgactggcttcaaattggaacatcagccttttcttgccttcagacacaaatggaaacatcagctgttggtctggagcctgctgaccttcagactggacctaaaccatcagctctcctaagtcataggcctttggattcagactggaattatacctttagctctcctgggtctccagcttgccaatttaccctgcagatcttgggacttgtaagccttcataattgtgtgagcaatttcttataactctctctttctctctctctacatatatatatatatatatattttatatgtacacattcatacacacacacgcttatatgtatacatatagtatgtatatgtgtatatatattatgtatatacatatatgtgcacacatctctactaaaaatagaaaaattagccaggtgtggtggcgtgtgcctgtagtcccagccactcgggaggcttaaatgggagaatcacttgaaccctggaggcagaggttgcagtgagccaagaccacgccactgcactccatccagcctgggtgacagagcaagactccatctcaaaaaaaaaaaggttagaaaaatgctgcttttagagagcctggccttgagagaggaaggaaagactagttgcagttactattctctggtgagctctgactggctttttacaaacagggcttctctttggttgaagtcagccactaagttcatctttaaacatgctatctcaaattccccgaagccacccaaaatgtggtatgaatgaggatagagttacacagaattcagactgctttgccctctcagaacttctagggaacttcccttggtgtttccttccctaacgagctcagccacttgtaaccagcttattgaaagggctgtgaatgtattatgttgattccttttctgttccaggttattatcttgggaataacccatgttttgttttgttttaccctcagtcgctcataactatttaaaacagtatctctttcaagtacagatgctcctctacttatggggctatgtctcaataaactcacgtaagtaaaaaatatcacaagttgaaaacacatttaataaccctgataagcccattgtaaagtaggcaaataagttggaccattgaaagttggggactatctgtattttagaagttttttcagcttaaaaattaccaagctctatcctacttggcccagctcagtccttcccccaggcttagaagcctgtggtaaagagtgtgtgtatactggggtgatgatagtggtttcttcttactcccttctttctgtcttctgctccctttgttcctattcagccatgctgctgtttctagcccatgtaggctctgggaaaggttaagcgggtagaaaccagagaaaaagggcaaagtcttatttctgtggctagtaatgtcgtaatgtggggccaggtctgagtgacatgtgccgaaaggctgactctttctcccagagcaccttttctctctttttggattcagggggtacatgtgcaggtttgttacatgagtatattgcacccaggtagtgagcatagtgcccagtaagtagtttttccacacataccccctccttcccttcccactctggtagtccccagtgtctattgttcccatcattatgtctatgtgtattcaatgtttagctcccacttagaagtaagaacatgcaatatttggtttcctattcctgcatcaattcactttaggataatggcctccagctgcatccatgttgctgcagaatacatgatttcattttttatggctgcgtagtattccatggtgtagatatacttcatttaaaaaatctaatccaccattgattggcacctaggttgattccatgtcctttgctcagagccccgttttggtgagttcttagaactctttccaaccggaaactgcccagtgcaccactctcagatggacgggacccagtctgtacctgatcaccccggctctaatggtatggtctccaaggctccttctgatcttcccaggaggccctttcaggctgacacaccttccagggtgtgcactctcgccatgttctcacccagatggctctcttggctgtgtaattaggcagctcaatccctttcctttagactgtttcaggggagaaccaggtaccccaaatcttatgctctccaaactccaggggacagacacatgtcaaaccctgagtcttttaaagtataccctcacttagcttgcagacccaaggcactccagcccctttcaagaagcttgcactttctgatattttctccatcactcttgcctcctgtggtagaggagctttgggctactccttaacaaatcattcatggatcggcagcaaatctgcaacatatggatatatttgccaatttttgtcctcagctttgggtctcagccaaaatggagatttaggaaagtctcatttagcatcctctagcctgcttttggctgttttgttttgtttttgtgtttgttttttagagacagggtcttactctgttgccagactggaatgcggtggtgtgaccatagctcactgcagcctcaaactcctgggctcatgcaatcctcctgcctcagccttctgagtagctaggcctgtagtctcagagggaactgtcttcaataaagttggcactgtccacatacactcctt

SEQ ID NO: 129184 - DNA, 2464 bp, Homo sapiens
  Payload ID: 5275
  Gene Symbol: EFHC2
  Gene Name: EF-hand domain (C-terminal) containing 2
  Uniprot ID: Q5JST6
  ENST ID: ENST00000420999
  CDS Start-End: 85-2334
gggggccaaacaacacggccgggaggcgccgctgcctgccgggccctctcttctgggaccctggattttcggacactgagcgccatggccctgcctctgctgccgggcaacagcttcaaccgcaacgtgggaaaggagaagtttcacaaatcccaacattggggcttttgcaacaatgttatgatgttggtgagtgatgaaaagcctggaataggtggagaaccacttctggggcaaaagataaagcctaaatgtagcatatatcctaaaggagatggaagtgatgtaccatcatgggtagcctttgataaacaggtattatcttttgatgcctatttggaagaggaagtacttgataaaagccaaaccaactacagaataagatactataaaatctacttctaccctgaagatgacacaattcaagtaaatgaaccagaggtgaaaaatagtggattacttcaagggacttctatccggcgtcatcggattactcttccgcctcctgatgaggatcagttttatactgtgtatcattttaatgtcggcacagaggttgtcttctatggccggacattcaagatttatgactgtgatgcattcacaagaaactttttgaggaaaataggggtcaaagtgaatcccccagtgcaatgtccagaagatccttacatgaagattcggagagaggttgtagaacacgtagagcccttacgtccctacgaatccctcgacaccctgaaacagttcctccagtatcatggcaagattttgtgtttcttctgcctgtgggatgactcagtctcaatgtttggagaccgtagagaactcatcctgcattacttcttgtgtgatgatactattgaaatcaaagaattgcttccacacagctcaggccgagatgctctaaaaatgttcctccggaggagtaagctacccaagaattgcccacctagagtctatcaaccaggccagataacagatcgagcagttctcaattcatatggtgactttataaagaaccaagcggatggctacctgttcgatagatataagctaggaaaagtagaccaagagttttacaaagatagtgacctgtccctaggagtcaccatcaatgtgtggggaagaaaagtgctcctttatgactgtgatgaatttacgaagtcttattataagtctaaatatggaattgagaactttacctcagtttcatgcaagcctccttctcctcctccaaaaatagaaaggaaatttccaccttacaacggttttggttctgaagaggattctctccgtaactgcatagacctcaagcccacacctcatcggaggaacttcaagaagtttatggaaaaagacagctatggctccaaaagcaatatactccgtttttttgcaaaactagtcacagacaaatgtgttgacttggacaggatgtttgttatttcatattatctcggtgatgacaccatttcagtgtttgaacctatagagaggaattcaggaattgctggtgggatgttcttgaaaagaagtcgcgttaagaagcctggacaagaagtctttaaaagtgaactatctgaatatatcaaggccgaggagctgtacattggagtcacggtgaatgtgaatggttacctatttcgtttgctcaatgctgatgagtataccttaaactacatggagcagaatacagataagtatcctttcagtaacctcaaacttgccctacaaaagctgaagcaagaagaaggaaaatccagagagctcaagcaggtatttaaagctgctgactctaagcacacaaatatggtggattataatacattcagagacatattgatgtctttgactgttggaaaccttgcagagcaagaatttgtaaccattgcacgtcactaccgtgtgcctgagggcacatgttcagatatggatttcttaatcgcactggcccacgaaaagttcaagaaaaatatgtttgagaatttcgacactttcatttattcctgtgtgtatgaagatcgagaaaaaaaaaatgtattacccaccaaagacattaaaaggctgtgcaaatcctccagattacctttgagtgatgatcttctagaatccttattgtcaaggtttgaagacagtgaaaaacaaatagattataagtcatttttctctgccctgaactggagaaagaatccagtgcctgaattgcaaccagcatcataccttaaagagagatgtgaagatgtttggcttggtatgccatcacctattcctgcgaaatacattgactactggacctttttgaaggacgcgtttggcttagaggaggaataaccatgccagttttggtcaattctctatgatttacttctctcattttgccacatttactttagtagatataatttcattaaaaacaaaaaagaaacaaggtttatattaaatggaaatccataaaccacaa

SEQ ID NO: 129185 - DNA, 2823 bp, Homo sapiens
  Payload ID: 5276
  Gene Symbol: EFHB
  Gene Name: EF-hand domain family, member B
  Uniprot ID: Q8N7U6
  ENST ID: ENST00000295824
  CDS Start-End: 163-2664
taagaggcaggcaggaagcaatggacagggagtccgagtgaggttgtgctctttcctgagagaggggttccgcaagggattggaggcgtctttgtagccaggtacagctttccccttagagatgagcgctcttggagaaatgagaatggggagaaatcgtccatgaacatggagattggacatccccacgaaggaaaggatgatttaggagacaagagggtcatcatgggaacaaaatttcccatggagttggggatcagagtaggattaggaaaagaagattcccgatgcggggagagccctgtggttagtaataagtgtgagggaaggatggcaccaccagaaacaaaatttccattgagcaaggggcttgaaatgggattagaaagacagaatatttctaggactgtcatgcagaggggtagtttaggagtcgacagtgtctcagcttcacagggaacaaaaccttctctgttgccaggaagaatggggttagaaaatgagagtcttcttgcaggatatacccatgaacggataatacagcctcctttgggcagggtgtgtggaagttcacaggctgcagggagcaggagagctcctttggctagtggccctgaaggggtagaggaattagtgggaaagcctgctttcgttatggaaccaagacaggaaatggaaaaagagtctacctgtgttttaatgaaacccaacacagagattaagcttcctgtggaggtggacattggactaacccaagccgaggggccagatgagactaagaatacagagccccaaatgggcttggtgatagaacctccccaatgccagtttgcccaacaacatgaacagagaaaggaggctggaaacattgaatcaggagtggaacctccagatcgcatcagacccatatactctgggaagttttttgatcggaccccttgctggccaagtgcaggaaaagttattccagttggttacagagttgcaacctgcttgactgaaaaacttcccaggctaattactccacctgaagcaaaaaagtatttcaacttcagatatccacctgctggagtagaaagagtattttacggaagagcaaatgatccccagattgcaccttatttgacacatggaattagatctaaaatttcagtactggcaaacacattgataaacccacagcctattaccacatttcaacagaaaattaaagataaaaaagaatctatatatcttagcaatcgacgagcaccattaggaaaatctcacgatcaagcaccaggattaccaaaaggcatggacacaaccaatacgacatttgggacagcagtcatcaaagaatactctgctaaagatgtggtgaatccaccaaaatcctatgaagaagtatttaaagaaggaaatgaaggacatgatttgtatgttgtttctcacaatgattattatgcaggagaggcaaagaaccgaaagtataacccatcaagtttccataggtgtagtgtgtatggagtaccaacaccacattttaatgatggacgagccatggcaaaatctctatattggctccatgaactacaaatgaaaagaggagctaagtttgtatccaaaagagcagatgatttcaaagaaaagtttcaacataaacttggaagagttttagatcccattgcagaaacaatgaatgttcccccagactgcacatttggagcttgtctccgtcctgaggaatatggagttggtgatctcatccataatagacttccggatgaatatcttcgaggcaaggatagacagcgagccctgattgcagcagttcggcatcacctgaagaaagttaattaccaaaagtttgacactttgctggcagccttcaggcactatgacaagaagggagatgggatgatagataaagacgagctgcaggaagcttgtgaccaggccaacttgagtttagatgacaagctcctggaccagctatttgactactgtgatgtggataatgatggcttcattaactatctggaattcgcaaattttcttaactggaaagacaaaatgcttcttaaagagtatgaagagagggtcattattaaaggtagaaaaccagattgtgtaaaccctactgaggctaatgttgaagaacctgaacaaactctcctcataaagccagaagatattgtcttaaaagaagcaggaagcacagaaaagactctccggacacttctgagaccaagtgataaagtttccaactactataagacaacttcttctgagatcaatgcaattgtaggagccattccttctacttgttaccccatttgtggtgttccaaccattcgatctgacattcctgctccccgaattcgtcgcatcagtgacagaactaattatggtgaagaaggtagtgcatattcactactatatcctaccatttttgcccggaaaggagtgtttgaaagagacttcttcaagaccagatcaaaagaagagattgcagagatattgtgtaacattggtgtcaaactgtctgatgaagaatttgaaaatgtatggaatcttgcatcaaaaaagcatcacagaggagaagtttgtgttgagaacatcagaaatgttctagatgagctacggcatgcagaccggatcaagtgtaaaacactcatgtgatatttttggacttcattcattcaagcaaaagaattattaactctgtgtttatctaaaatgttgaatccattctggttttagatattatgttagagttcacagtggtaagactcatatgcctgtatgtgttgctaataaattagattttggattttaaaa

SEQ ID NO: 129186 - DNA, 2389 bp, Homo sapiens
  Payload ID: 5276
  Gene Symbol: EFHB
  Gene Name: EF-hand domain family, member B
  Uniprot ID: Q8N7U6
  ENST ID: ENST00000344838
  CDS Start-End: 123-2234
gttcgcggggcggggcgaggcaggatgtcacgtgaccctgcgagtggctcagatccgaactggccgcctttctccccttcccccaccccagtctgtcgcccaggctggcatgcaatggtgcaatgatggctcactgccgcatagacctcctgggctcaagtgatcctcccacttcagcctctcagatagctgagactacagatgtgagccaccacgctgggctaattgaattcttggcgttaagcaattcttctgccttggcttcccgaagtgttgagattacagagattaagcttcctgtggaggtggacattggactaacccaagccgaggggccagatgagactaagaatacagagccccaaatgggcttggtgatagaacctccccaatgccagtttgcccaacaacatgaacagagaaaggaggctggaaacattgaatcaggagtggaacctccagatcgcatcagacccatatactctgggaagttttttgatcggaccccttgctggccaagtgcaggaaaagttattccagttggttacagagttgcaacctgcttgactgaaaaacttcccaggctaattactccacctgaagcaaaaaagtatttcaacttcagatatccacctgctggagtagaaagagtattttacggaagagcaaatgatccccagattgcaccttatttgacacatggaattagatctaaaatttcagtactggcaaacacattgataaacccacagcctattaccacatttcaacagaaaattaaagataaaaaagaatctatatatcttagcaatcgacgagcaccattaggaaaatctcacgatcaagcaccaggattaccaaaaggcatggacacaaccaatacgacatttgggacagcagtcatcaaagaatactctgctaaagatgtggtgaatccaccaaaatcctatgaagaagtatttaaagaaggaaatgaaggacatgatttgtatgttgtttctcacaatgattattatgcaggagaggcaaagaaccgaaagtataacccatcaagtttccataggtgtagtgtgtatggagtaccaacaccacattttaatgatggacgagccatggcaaaatctctatattggctccatgaactacaaatgaaaagaggagctaagtttgtatccaaaagagcagatgatttcaaagaaaagtttcaacataaacttggaagagttttagatcccattgcagaaacaatgaatgttcccccagactgcacatttggagcttgtctccgtcctgaggaatatggagttggtgatctcatccataatagacttccggatgaatatcttcgaggcaaggatagacagcgagccctgattgcagcagttcggcatcacctgaagaaagttaattaccaaaagtttgacactttgctggcagccttcaggcactatgacaagaagggagatgggatgatagataaagacgagctgcaggaagcttgtgaccaggccaacttgagtttagatgacaagctcctggaccagctatttgactactgtgatgtggataatgatggcttcattaactatctggaattcgcaaattttcttaactggaaagacaaaatgcttcttaaagagtatgaagagagggtcattattaaaggtagaaaaccagattgtgtaaaccctactgaggctaatgttgaagaacctgaacaaactctcctcataaagccagaagatattgtcttaaaagaagcaggaagcacagaaaagactctccggacacttctgagaccaagtgataaagtttccaactactataagacaacttcttctgagatcaatgcaattgtaggagccattccttctacttgttaccccatttgtggtgttccaaccattcgatctgacattcctgctccccgaattcgtcgcatcagtgacagaactaattatggtgaagaaggtagtgcatattcactactatatcctaccatttttgcccggaaaggagtgtttgaaagagacttcttcaagaccagatcaaaagaagagattgcagagatattgtgtaacattggtgtcaaactgtctgatgaagaatttgaaaatgtatggaatcttgcatcaaaaaagcatcacagaggagaagtttgtgttgagaacatcagaaatgttctagatgagctacggcatgcagaccggatcaagtgtaaaacactcatgtgatatttttggacttcattcattcaagcaaaagaattattaactctgtgtttatctaaaatgttgaatccattctggttttagatattatgttagagttcacagtggtaagactcatatgcctgtatgtgttgctaataaattagattttggatttt

SEQ ID NO: 129187 - DNA, 2077 bp, Homo sapiens
  Payload ID: 5276
  Gene Symbol: EFHB
  Gene Name: EF-hand domain family, member B
  ENST ID: ENST00000389256
  CDS Start-End: 207-2077
gataaacagactccatcttttcctctgtgaactcggctaggtgttaagaggcaggcaggaagcaatggacagggagtccgagtgaggttgtgctctttcctgagagaggggttccgcaagggattggaggcgtctttgtagccaggtacagctttccccttagagatgagcgctcttggagaaatgagaatggggagaaatcgtccatgaacatggagattggacatccccacgaaggaaaggatgatttaggagacaagagggtcatcatgggaacaaaatttcccatggagttggggatcagagtaggattaggaaaagaagattcccgatgcggggagagccctgtggttagtaataagtgtgagggaaggatggcaccaccagaaacaaaatttccattgagcaaggggcttgaaatgggattagaaagacagaatatttctaggactgtcatgcagaggggtagtttaggagtcgacagtgtctcagcttcacagggaacaaaaccttctctgttgccaggaagaatggggttagaaaatgagagtcttcttgcaggatatacccatgaacggataatacagcctcctttgggcagggtgtgtggaagttcacaggctgcagggagcaggagagctcctttggctagtggccctgaaggggtagaggaattagtgggaaagcctgctttcgttatggaaccaagacaggaaatggaaaaagagtctacctgtgttttaatgaaacccaacacagagattaagcttcctgtggaggtggacattggactaacccaagccgaggggccagatgagactaagaatacagagccccaaatgggcttggtgatagaacctccccaatgccagtttgcccaacaacatgaacagagaaaggaggctggaaacattgaatcaggagtggaacctccagatcgcatcagacccatatactctgggaagttttttgatcggaccccttgctggccaagtgcaggaaaagttattccagttggttacagagttgcaacctgcttgactgaaaaacttcccaggctaattactccacctgaagcaaaaaagtatttcaacttcagatatccacctgctggagtagaaagagtattttacggaagagcaaatgatccccagattgcaccttatttgacacatggaattagatctaaaatttcagtactggcaaacacattgataaacccacagcctattaccacatttcaacagaaaattaaagataaaaaagaatctatatatcttagcaatcgacgagcaccattaggaaaatctcacgatcaagcaccaggattaccaaaaggcatggacacaaccaatacgacatttgggacagcagtcatcaaagaatactctgctaaagatgtggtgaatccaccaaaatcctatgaagaagtatttaaagaaggaaatgaaggacatgatttgtatgttgtttctcacaatgattattatgcaggagaggcaaagaaccgaaagtataacccatcaagtttccataggtgtagtgtgtatggagtaccaacaccacattttaatgatggacgagccatggcaaaatctctatattggctccatgaactacaaatgaaaagaggagctaagtttgtatccaaaagagcagatgatttcaaagaaaagtttcaacataaacttggaagagttttagatcccattgcagaaacaatgaatgttcccccagactgcacatttggagcttgtctccgtcctgaggaatatggagttggtgatctcatccataatagacttccggatgaatatcttcgaggcaaggatagacagcgagccctgattgcagcagttcggcatcacctgaagaaagttaattaccaaaagtttgacactttgctggcagccttcaggcactatgacaaggccagtaatgggggagagctttttggtaatgcatgggcttacagatcccagcagtttggtgtagatcaggggtcagcaaactatagcctgtgggccaaatccagcccactgtttgtttgtgtcagtaaagttttactggaacacaa

SEQ ID NO: 129188 - DNA, 782 bp, Homo sapiens
  Payload ID: 5276
  Gene Symbol: EFHB
  Gene Name: EF-hand domain family, member B
  ENST ID: ENST00000440022
  CDS Start-End: 1-782
ccagatcgcatcagacccatatactctgggaagttttttgatcggaccccttgctggccaagtctaattactccacctgaagcaaaaaagtatttcaacttcagatatccacctgctggagtagaaagagtattttacggaagagcaaatgatccccagattgcaccttatttgacacatggaattagatctaaaatttcagtactggcaaacacattgataaacccacagcctattaccacatttcaacagaaaattaaagataaaaaagaatctatatatcttagcaatcgacgagcaccattaggaaaatctcacgatcaagcaccaggattaccaaaaggcatggacacaaccaatacgacatttgggacagcagtcatcaaagaatactctgctaaagatgtggtgaatccaccaaaatcctatgaagaagtatttaaagaaggaaatgaaggacatgatttgtatgttgtttctcacaatgattattatgcaggagaggcaaagaaccgaaagtataacccatcaagtttccataggtgtagtgtgtatggagtaccaacaccacattttaatgatggacgagccatggcaaaatctctatattggctccatgaactacaaatgaaaagaggagctaagtttgtatccaaaagagcagatgatttcaaagaaaagtttcaacataaacttggaagagttttagatcccattgcagaaacaatgaatgttcccccagactgcacatttggagcttgtctccgtcctgaggaatatgg

SEQ ID NO: 129189 - DNA, 2259 bp, Homo sapiens
  Payload ID: 5277
  Gene Symbol: EFHD1
  Gene Name: EF-hand domain family, member D1
  Uniprot ID: Q9BUP0
  ENST ID: ENST00000264059
  CDS Start-End: 478-1197
cccagcctgtcccgggccgcgagcgcttccagtcgggttacttctgggggacaagaaaggcaccgtctgaacggtcgagacgctttttcccgctacggttttccccggagctgacaggggcagcaaggtcggagttgatccgagggtccctgcctggtcccggggggacggtcagcctcccgcccggagccgcggggagaggaagcaggtcggggtctccgggacgcgcagacacccagacaccggcggcctcctcccaccaggctggcagtcgctgagccctggcgcctccttaaagccgcagctccgccccgaccgccccgcccgccagtccgtcctcagaccctcccaaccgccgggtccccgccgcctcggcggagtgttgtagagcctcgagcctgcgaggagcgcgccgcccgccagctccctgcgtcccgtcccgcgtccccgcgttcccgcgtcctgcgatccgccgccatggccagtgaggagctggcgtgcaagctggagcgccggctgcggcgcgaggaggccgaggagagtggcccccagctggctcccctcggcgccccagccccggagcccaagcccgagcccgagcctcccgcccgtgcgcccacggccagcgccgacgcggagctgagcgcccagctgagccggcggctggacatcaacgagggcgctgcgcggccccggcgctgcagggtcttcaacccctacacggagttcccggagttcagccgccgcctcatcaaggacctggagagcatgttcaaactgtatgacgctgggcgggatggcttcatcgacctgatggagctgaagctgatgatggagaagctgggggccccccagacccacctgggcctgaagagcatgatcaaggaggtggatgaggacttcgatggcaagctcagcttccgggagttcctgctcattttccacaaggccgcggcaggggagctgcaggaggacagtgggctgatggcgctggcaaagctttctgagatcgatgtggccctggagggtgtcaaaggtgccaagaacttctttgaagccaaggtccaagccttgtcatcggccagtaagtttgaagcagagttgaaagctgagcaagatgagcggaagcgggaggaggaggagaggcggctccgccaggcagccttccagaaactcaaggccaacttcaatacatagtcctgctgaccttgccctctgcccacagctgtgcctcacagatgccccgagaagagatgactaggcatcttcatcactgctgtcggtcccctccctgagccagcatctccatccaccaccccgtgccagctcccgtgccagccttcattcctcccagtgtccaagcccctccaggagggtcctggggtgggccagatgcctgcccacctctgtctcctgcctctgctcctctgcccttcttatagccagaacttgtatcttctcagcaaccttcactttgtccttgtccctttaccattccccatcaaagagtagtctgctatatcaatttgtgtagatatgtctgtctttttgggtcctcagagaaaatgcccattttctcggagaattctctgcactcctctctgcttcacattcaacttccctgttctcatctttggtaggattctgccagttgcttttgcatcttctgttcctgggtaatggtgggtcttaatggaggctgggtggaccactgcccgtccactcttcaacaggaggaacagcatgccaccatagtaacacacattagagaaaggacagaggtctgctccttcctgccacctttctcctggccccttagcattcccccagtccctccctcttcaccttgctccgtctatgtcttcccagctcagccttttccccactcttaaatactgtactacttcactgtaagaacgaaagaatagttaggataccaatgagtaaaagggttcctgttcactctgactctgtgcaaattgtattacagtagaccgctgacgttcccaagtgacagatccagggcctttcaaacatccccaaagtcatggccatactcaccattagccagtttctaacatctgtttcagggtatccagctgtagatgttcttatcccccatacttgtgagttcttggggttgctcacaaatactaggggtttttgttgtatttttaacaaatatatcctaatgtcatatttattctcttttgtaactgctgtctttacaataaagaaatcatctgcctttctatctta

SEQ ID NO: 129190 - DNA, 1817 bp, Homo sapiens
  Payload ID: 5277
  Gene Symbol: EFHD1
  Gene Name: EF-hand domain family, member D1
  ENST ID: ENST00000409708
  CDS Start-End: 379-762
actctacagcgtgtatccgtggctgtaacgtgagctggtggagcagtcaaggttagacaggaaattttaattaccctggacttatctggaggcctctttcaaagggaggcaatgagggcagccacttaaaggcaggaccccaatgcaacatcttaaaatgcagccgcaaggtttttgcagcatactaaaagcttgtgttttaattccccaaagagagggtgggaagaggaacatttggctatgggaaagttgtctttttcttaagaatctgaaacggtgatgtcatggatgtcctgccagtgccagagtcccgcgttaccaagacaccagtgaaacccaaaaaggtatgacgctgggcgggatggcttcatcgacctgatggagctgaagctgatgatggagaagctgggggccccccagacccacctgggcctgaagagcatgatcaaggaggtggatgaggacttcgatggcaagctcagcttccgggagttcctgctcattttccacaaggccgcggcaggggagctgcaggaggacagtgggctgatggcgctggcaaagctttctgagatcgatgtggccctggagggtgtcaaaggtgccaagaacttctttgaagccaaggtccaagccttgtcatcggccagtaagtttgaagcagagttgaaagctgagcaagatgagcggaagcgggaggaggaggagaggcggctccgccaggcagccttccagaaactcaaggccaacttcaatacatagtcctgctgaccttgccctctgcccacagctgtgcctcacagatgccccgagaagagatgactaggcatcttcatcactgctgtcggtcccctccctgagccagcatctccatccaccaccccgtgccagctcccgtgccagccttcattcctcccagtgtccaagcccctccaggagggtcctggggtgggccagatgcctgcccacctctgtctcctgcctctgctcctctgcccttcttatagccagaacttgtatcttctcagcaaccttcactttgtccttgtccctttaccattccccatcaaagagtagtctgctatatcaatttgtgtagatatgtctgtctttttgggtcctcagagaaaatgcccattttctcggagaattctctgcactcctctctgcttcacattcaacttccctgttctcatctttggtaggattctgccagttgcttttgcatcttctgttcctgggtaatggtgggtcttaatggaggctgggtggaccactgcccgtccactcttcaacaggaggaacagcatgccaccatagtaacacacattagagaaaggacagaggtctgctccttcctgccacctttctcctggccccttagcattcccccagtccctccctcttcaccttgctccgtctatgtcttcccagctcagccttttccccactcttaaatactgtactacttcactgtaagaacgaaagaatagttaggataccaatgagtaaaagggttcctgttcactctgactctgtgcaaattgtattacagtagaccgctgacgttcccaagtgacagatccagggcctttcaaacatccccaaagtcatggccatactcaccattagccagtttctaacatctgtttcagggtatccagctgtagatgttcttatcccccatacttgtgagttcttggggttgctcacaaatactaggggtttttgttgtatttttaacaaatatatcctaatgtcatatttattctcttttgtaactgctgtctttacaataaagaaatcatctgcctttc

SEQ ID NO: 129191 - DNA, 1156 bp, Homo sapiens
  Payload ID: 5277
  Gene Symbol: EFHD1
  Gene Name: EF-hand domain family, member D1
  Uniprot ID: Q9BUP0
  ENST ID: ENST00000409613
  CDS Start-End: 104-535
gctaagtgcaggcggataccccggccttggcggctgcttgcctttctccgtactgtccctgtgaaggccaagatctgtaacgctgacagtccccagacatacgatgggagagttgcagtatgacgctgggcgggatggcttcatcgacctgatggagctgaagctgatgatggagaagctgggggccccccagacccacctgggcctgaagagcatgatcaaggaggtggatgaggacttcgatggcaagctcagcttccgggagttcctgctcattttccacaaggccgcggcaggggagctgcaggaggacagtgggctgatggcgctggcaaagctttctgagatcgatgtggccctggagggtgtcaaaggtgccaagaacttctttgaagccaaggtccaagccttgtcatcggccagtaagtttgaagcagagttgaaagctgagcaagatgagcggaagcgggaggaggaggagaggcggctccgccaggcagccttccagaaactcaaggccaacttcaatacatagtcctgctgaccttgccctctgcccacagctgtgcctcacagatgccccgagaagagatgactaggcatcttcatcactgctgtcggtcccctccctgagccagcatctccatccaccaccccgtgccagctcccgtgccagccttcattcctcccagtgtccaagcccctccaggagggtcctggggtgggccagatgcctgcccacctctgtctcctgcctctgctcctctgcccttcttatagccagaacttgtatcttctcagcaaccttcactttgtccttgtccctttaccattccccatcaaagagtagtctgctatatcaatttgtgtagatatgtctgtctttttgggtcctcagagaaaatgcccattttctcggagaattctctgcactcctctctgcttcacattcaacttccctgttctcatctttggtaggattctgccagttgcttttgcatcttctgttcctgggtaatggtgggtcttaatggaggctgggtggaccactgcccgtccactcttcaacaggaggaacagcatgccaccatagtaacacacattagagaaaggacagaggtctgctccttcctgccacctttctcctggcccctta

SEQ ID NO: 129192 - DNA, 1538 bp, Homo sapiens
  Payload ID: 5277
  Gene Symbol: EFHD1
  Gene Name: EF-hand domain family, member D1
  ENST ID: ENST00000410095
  CDS Start-End: 104-487
aggaattacatgtttcggagactaacgagtgtcctttcatcccggtcatgcattcctttgaccctgcaggtatgacgctgggcgggatggcttcatcgacctgatggagctgaagctgatgatggagaagctgggggccccccagacccacctgggcctgaagagcatgatcaaggaggtggatgaggacttcgatggcaagctcagcttccgggagttcctgctcattttccacaaggccgcggcaggggagctgcaggaggacagtgggctgatggcgctggcaaagctttctgagatcgatgtggccctggagggtgtcaaaggtgccaagaacttctttgaagccaaggtccaagccttgtcatcggccagtaagtttgaagcagagttgaaagctgagcaagatgagcggaagcgggaggaggaggagaggcggctccgccaggcagccttccagaaactcaaggccaacttcaatacatagtcctgctgaccttgccctctgcccacagctgtgcctcacagatgccccgagaagagatgactaggcatcttcatcactgctgtcggtcccctccctgagccagcatctccatccaccaccccgtgccagctcccgtgccagccttcattcctcccagtgtccaagcccctccaggagggtcctggggtgggccagatgcctgcccacctctgtctcctgcctctgctcctctgcccttcttatagccagaacttgtatcttctcagcaaccttcactttgtccttgtccctttaccattccccatcaaagagtagtctgctatatcaatttgtgtagatatgtctgtctttttgggtcctcagagaaaatgcccattttctcggagaattctctgcactcctctctgcttcacattcaacttccctgttctcatctttggtaggattctgccagttgcttttgcatcttctgttcctgggtaatggtgggtcttaatggaggctgggtggaccactgcccgtccactcttcaacaggaggaacagcatgccaccatagtaacacacattagagaaaggacagaggtctgctccttcctgccacctttctcctggccccttagcattcccccagtccctccctcttcaccttgctccgtctatgtcttcccagctcagccttttccccactcttaaatactgtactacttcactgtaagaacgaaagaatagttaggataccaatgagtaaaagggttcctgttcactctgactctgtgcaaattgtattacagtagaccgctgacgttcccaagtgacagatccagggcctttcaaacatccccaaagtcatggccatactcaccattagccagtttctaacatctgtttcagggtatccagctgtagatgttcttatcccccatacttgtgagttcttggggttgctcacaaatactaggggtttttgttgtatttttaacaaatatatcctaatgtcatatttattctcttttgtaactgctgtctttacaataaagaaatcatctgcc

SEQ ID NO: 129193 - DNA, 843 bp, Homo sapiens
  Payload ID: 5277
  Gene Symbol: EFHD1
  Gene Name: EF-hand domain family, member D1
  ENST ID: ENST00000442845
  CDS Start-End: 1-298
ggagctggcgtgcaagctggagcgccggctgcggcgcgaggaggccgaggagagtggcccccagctggctcccctcggcgccccagccccggagcccaagcccgagcccgagcctcccgcccgtgcgcccacggccagcgccgacgcggagctgagcgcccagctgagccggcggctggacatcaacgagggcgctgcgcggccccggcgctgcagggtcttcaacccctacacggagttcccggagttcagccgccgcctcatcaaggacctggagagcatgttcaaactaatctgaaacggtgatgtcatggatgtcctgccagtgccagagtcccgcgttaccaagacaccagtgaaacccaaaaaggtatgacgctgggcgggatggcttcatcgacctgatggagctgaagctgatgatggagaagctgggggccccccagacccacctgggcctgaagagcatgatcaaggaggtggatgaggacttcgatggcaagctcagcttccgggagttcctgctcattttccacaaggccgcggcaggggagctgcaggaggacagtgggctgatggcgctggcaaagctttctgagatcgatgtggccctggagggtgtcaaaggtgccaagaacttctttgaagccaaggtccaagccttgtcatcggccagtaagtttgaagcagagttgaaagctgagcaagatgagcggaagcgggaggaggaggagaggcggctccgccaggcagccttccagaaactcaaggccaacttcaatacatagtcctgctgaccttgccctctgcccacagctgtgcctcacagatgccccgagaaga

SEQ ID NO: 129194 - DNA, 541 bp, Homo sapiens
  Payload ID: 5277
  Gene Symbol: EFHD1
  Gene Name: EF-hand domain family, member D1
  ENST ID: ENST00000427698
  CDS Start-End: 298-541
gattacaggcgtgcaccaccatgcccagctaatttttgtatttttagtagaaacagggtttcaccatgtttgccaggctggtctacgaactcttgacctcaggtgatccgcccgcctcggcctcctgaagtgctggaattacaggcatgagccaccacgcctggctggatataccccgtttcgtttctcctttcatctgtccgcagacacccgcgttgtttccaccttttggctgttgtaaactgatttgtttttagagcaaggtatgacgctgggcgggatggcttcatcgacctgatggagctgaagctgatgatggagaagctgggggccccccagacccacctgggcctgaagagcatgatcaaggaggtggatgaggacttcgatggcaagctcagcttccgggagttcctgctcattttccacaaggccgcggcaggggagctgcaggaggacagtgggctgatggcgctggcaaagctttctgagatcgatgtggccctggagggtgtcaaaggtgccaagaacttctttgaag

SEQ ID NO: 129195 - DNA, 1490 bp, Homo sapiens
  Payload ID: 5277
  Gene Symbol: EFHD1
  Gene Name: EF-hand domain family, member D1
  ENST ID: ENST00000611312
  CDS Start-End: 1-429
atgtttcggaggtatgacgctgggcgggatggcttcatcgacctgatggagctgaagctgatgatggagaagctgggggccccccagacccacctgggcctgaagagcatgatcaaggaggtggatgaggacttcgatggcaagctcagcttccgggagttcctgctcattttccacaaggccgcggcaggggagctgcaggaggacagtgggctgatggcgctggcaaagctttctgagatcgatgtggccctggagggtgtcaaaggtgccaagaacttctttgaagccaaggtccaagccttgtcatcggccagtaagtttgaagcagagttgaaagctgagcaagatgagcggaagcgggaggaggaggagaggcggctccgccaggcagccttccagaaactcaaggccaacttcaatacatagtcctgctgaccttgccctctgcccacagctgtgcctcacagatgccccgagaagagatgactaggcatcttcatcactgctgtcggtcccctccctgagccagcatctccatccaccaccccgtgccagctcccgtgccagccttcattcctcccagtgtccaagcccctccaggagggtcctggggtgggccagatgcctgcccacctctgtctcctgcctctgctcctctgcccttcttatagccagaacttgtatcttctcagcaaccttcactttgtccttgtccctttaccattccccatcaaagagtagtctgctatatcaatttgtgtagatatgtctgtctttttgggtcctcagagaaaatgcccattttctcggagaattctctgcactcctctctgcttcacattcaacttccctgttctcatctttggtaggattctgccagttgcttttgcatcttctgttcctgggtaatggtgggtcttaatggaggctgggtggaccactgcccgtccactcttcaacaggaggaacagcatgccaccatagtaacacacattagagaaaggacagaggtctgctccttcctgccacctttctcctggccccttagcattcccccagtccctccctcttcaccttgctccgtctatgtcttcccagctcagccttttccccactcttaaatactgtactacttcactgtaagaacgaaagaatagttaggataccaatgagtaaaagggttcctgttcactctgactctgtgcaaattgtattacagtagaccgctgacgttcccaagtgacagatccagggcctttcaaacatccccaaagtcatggccatactcaccattagccagtttctaacatctgtttcagggtatccagctgtagatgttcttatcccccatacttgtgagttcttggggttgctcacaaatactaggggtttttgttgtatttttaacaaatatatcctaatgtcatatttattctcttttgtaactgctgtctttacaataaagaaatcatctgcctttctatctt

SEQ ID NO: 129196 - DNA, 2419 bp, Homo sapiens
  Payload ID: 5278
  Gene Symbol: EFHD2
  Gene Name: EF-hand domain family, member D2
  Uniprot ID: Q96C19
  ENST ID: ENST00000375980
  CDS Start-End: 78-800
aggaagaggaagagcgcggccggcggcgctgcgctgagagcaggggcccggccaaggcgagtgccgcgcgggccaccatggccacggacgagctggccaccaagctgagccggcggctgcagatggagggcgagggcggcggcgagaccccggagcagcccgggctgaacggggcagcggcggcggcggcgggggcacccgacgaggcggccgaggcgctgggcagcgcggactgcgagctgagcgccaagctgctgcggcgcgcagacctcaaccagggcatcggcgagccccagtcgcccagccgccgcgtcttcaacccctacaccgagttcaaggagttctccaggaagcagatcaaggacatggagaagatgttcaagcagtatgatgccgggcgggacggcttcatcgacctgatggagctaaaactcatgatggagaaacttggggcccctcagacccacctgggcctgaaaaacatgatcaaggaggtggatgaggactttgacagcaagctgagcttccgggagttcctcctgatcttccgcaaggcggcggccggggagcttcaggaggacagcgggctgtgcgtgctggcccgcctctctgagatcgacgtctccagtgagggtgtcaagggggccaagagcttctttgaggccaaggtccaggccatcaacgtgtccagccgcttcgaggaggagatcaaggcagagcaggaggaaaggaagaagcaggcggaggagatgaagcagcggaaagcggccttcaaggagctgcagtccacctttaagtagcgggggctgcagccgaccgccctgctccggccccagtgtggtgggcgagggtggcgcatgggaggccgagcctgaatccttgcctgtgtctgacgggaccactactaaaaacctaaaaatatctgtgaatggagcaagttcaggggtcttatggaggtggcccggcccctccccgctcccttccactctgcacgaggccgccacaccggcgctggctccctgcccggcccggccctccctggcaatccctgggctctcttgcacccctaactgccccctgcctgctccggcactgccccaggcccagctcctggccctaggtccctcccagccccatgtgcctgccgcctgccctccacacatccctgtccccccaacccgggaacccctgccctcctccagcaggccgcaccgcccctggggccccctgccagccccttcccaggctgggagacggcagaagagatagaatcagggctgcccccacagagtgggacccaaggggctaattggaggcacgaggggacccctccccagggccttttcctcctctgcgtcttccatctactgaaatgggagagggggtggggagcttctgttctggtgaagggacccgggcaggcccccagcaccccatgctgacttggagaaccccagatctctggggcccagccaggcagggtgtgggggcagctgtgccaatctacctcacaggcccaccccctgccgggcatgccgtgggatcatgggcagggaaggctctgggggtcggagacaccgctgcttagcacccccagccagaacaccctgagggtctcggggctctggagagagtggggcgggaggaagaattggcaccttcctagggaaggagacgagcgcttcgccttgattctccgagaagcctccgagaagtgctttaagtgtgtttgcatgcgccaggcggtgggcagcgggggcctgtccagccctctcccgccatccttccccaagtgacgtccactgccttgtcaccagcgacctgcctgtcatgcccaccccctgaggaagcatggggaccctaacaccctggtgccctgcaccagacaggccgtggtcaggcccaggccaccggccgggttctgccacagcttcccacgtgcttgctgacatgcgtgtgcctgtgtgtggtgtctgttgctgtgtcgtgaaactgtgaccatcactcagtccaaacaagtgagtggccctcgaggccacagttatgcaactttcagtgtgtgtcataacgacgtcactgctttttaaactcgataactctttattttagtaaaatgcccaggagtcctggaagctacgcggacttgcagaggttttattttttggccttagaatctgcagaaattaggaggcaccgagcccagcgcagcagcctcggacccggattgcgtttgccttagcggatatgtttatacagatgaatataaaatgtttttttctttgggctttttgcttcttttttcccccccttctcaccttcccttctccccgaccccaccccccaaaaaagctacttcttcattccgtggtacgattattttttttaactaaaggaagataaaattctatattcttatgtg

SEQ ID NO: 129197 - DNA, 899 bp, Homo sapiens
  Payload ID: 5278
  Gene Symbol: EFHD2
  Gene Name: EF-hand domain family, member D2
  ENST ID: ENST00000445566
  CDS Start-End: 1-538
gaagatgttcaagcagtatgatgccgggcgggacggcttcatcgacctgatggagctaaaactcatgatggagaaacttggggcccctcagacccacctgggcctgaaaaacatgatcaaggaggtggatgaggactttgacagcaagctgagcttccgggagttcctcctgatcttccgcaaggcggcggccggggagcttcaggaggacagcgggctgtgcgtgctggcccgcctctctgagatcgacgtctccagtgagggtgtcaagggggccaagagcttctttgaggccaagtggaactgggtgtgccgctgggctccccggacaggaagcagaggatcaggatggcagcagcttgagcgactcccttcgagcgcccttgctttgcagcagccacagaatataggtccaggccatcaacgtgtccagccgcttcgaggaggagatcaaggcagagcaggaggaaaggaagaagcaggcggaggagatgaagcagcggaaagcggccttcaaggagctgcagtccacctttaagtagcgggggctgcagccgaccgccctgctccggccccagtgtggtgggcgagggtggcgcatgggaggccgagcctgaatccttgcctgtgtctgacgggaccactactaaaaacctaaaaatatctgtgaatggagcaagttcaggggtcttatggaggtggcccggcccctccccgctcccttccactctgcacgaggccgccacaccggcgctggctccctgcccggcccggccctccctggcaatccctgggctctcttgcacccctaactgccccctgcctgctccggcactgccccaggcccagctcctggccctaggtccctcccagccccatgtgcctgccgcctgccctcc

SEQ ID NO: 129198 - DNA, 5438 bp, Homo sapiens
  Payload ID: 5279
  Gene Symbol: EFR3A
  Gene Name: EFR3 homolog A
  Uniprot ID: Q14156
  ENST ID: ENST00000254624
  CDS Start-End: 226-2691
gggtcgtccgtcgcgccgcccggcgaggagtgggctggcggcggtagctgtcgcccgcttggttgcgtgaccgcggggtccgcgtccgctccctccacccttcgcccttcgcccttcgcctcgttccggcctccgcggcccagcaacggccgtcatggtgccgtcggcgctccctgcgcggccccgctgagcctcggtgcggcggcgagcgcggtcgagatcgccatgcctacccgagtatgctgctgctgttccgctttgcgtcctcgctacaaacgcctggtggacaacatattccctgaagatccaaaagatggccttgtgaaaactgatatggagaaattgacattttatgcagtatctgctccagagaaactggatcgaattggttcttacctggcagaaaggttgagcagggatgttgtcagacatcgttctgggtatgttttgattgctatggaggcactggaccaacttctcatggcttgccattctcaaagcattaagccatttgtagaaagctttcttcatatggtggcaaagctgctggaatcgggggaaccaaagcttcaagttcttggaacaaattcttttgtcaaatttgcaaatattgaagaagacacaccatcctatcacagacgttatgacttttttgtgtctcgattcagtgccatgtgccattcctgtcatagtgatccagaaatacgaacagagatacgaattgctggaattagaggtattcaaggtgtggttcgcaaaacagtcaacgatgaacttcgggccaccatttgggaacctcagcatatggataagattgttccatccctcctgtttaacatgcaaaagatagaagaagttgacagtcgcataggccctccttcttctccttctgcaactgacaaagaagagaatcctgctgtgctggctgaaaactgtttcagagaactgctgggtcgagcaacttttgggaatatgaataatgctgttagaccagtttttgcgcatttagatcatcacaaactgtgggatcccaatgaatttgcagttcactgctttaaaattataatgtattccattcaggctcagtattctcaccatgtgatccaggagattctaggacaccttgatgctcgtaaaaaagatgctccccgggttcgagcaggtattattcaggttctgttagaggctgttgccattgctgctaaaggttccataggtccgacagtgctggaagtcttcaatacccttttgaaacatctgcgtctcagcgttgaattcgaagcaaatgatttacaggggggatctgtaggcagtgtcaacttaaatacaagttccaaagacaatgatgagaagattgtgcagaatgctatcatccaaacaataggattttttggaagtaacctaccagattatcagaggtcagaaatcatgatgttcattatggggaaagtacctgtctttggaacatctacccatactttggatatcagtcaactaggggatttgggaaccaggagaattcagataatgttgctgagatctttgcttatggtgacctctggatataaagcgaagacgattgttactgcactgccagggtctttcctggatcctttgttatcaccatctctcatggaggactacgaactgagacagttggtcttggaagtaatgcataatctcatggatcgtcatgacaatagggcaaagcttcgagggatcagaataataccggatgtagctgacctaaagataaaaagagaaaaaatttgcagacaagacacaagtttcatgaaaaagaatgggcaacagctgtatcggcacatatatttgggttgtaaagaggaagacaacgttcagaaaaactatgaactactttatacttctcttgctcttataactattgaactggctaatgaagaagtagttattgatctcattcgactggccattgctttacaggacagtgcaattatcaatgaggataatttgccaatgttccatcgttgtggaatcatggcactggttgcagcatacctcaactttgtaagtcagatgatagctgtccctgcattttgccagcatgttagcaaggttattgaaattcgaactatggaagccccttattttctaccagagcatatcttcagagataagtgcatgcttccaaaatctttagagaagcatgaaaaagatttgtactttctgaccaacaagattgcagagtcgctaggtggaagtggatatagtgttgagagattgtcagttccgtatgtaccacaagtaacagatgaagatcgactttctagaagaaaaagcattgtggacaccgtatccattcaggtggatattttatccaacaatgttccttctgatgatgtggttagtaacactgaagaaatcacttttgaagcattgaagaaagcaattgataccagtggaatggaagaacaggaaaaggaaaagaggcgtcttgtgatagagaaatttcagaaagcaccttttgaagaaatagcagcacagtgtgaatccaaagcaaatttgcttcatgatagacttgcccaaatattggaactcaccatacgtcctcctcccagtccatcaggaacactgaccattacttctgggcatgcccaataccaatctgtcccagtctatgagatgaagtttccagatctgtgtgtgtactgatcggcgcatgaagacctcaggatatgatttgtaaagcctaaaaattaaggccaagctgagctttcagggtttacttaatgtgtattaacatacttcttgaaaataatgatggaacatatctttaaccaaatgtttggcataccatattagaagttttggagctatatataatttcgagtactttcaaagatagatttatgccatgttaatttgctttgaggttcctgttgcctttttaagttgaacatgttttggtttcactttattccactgttaagtagtatgttttaaacttttcacaaatgtaatgttttttaaaaagtaagccttcagaggattgaaactgtataaattgtttatctcttaaacatctacacagccgcttagatgtagaatttttgttgttgttttctgcaaaggcagatacatttaaatatattcctagtcctgggactgcaaaactgttcggtggctttttgtccccatgctttagataagctgggataggcaccttgctattcagttactataataatatgtgataggcattcctcatcttcttcacaataataggacatctgttgaatagcattcctcgaatataaccctaaaaacgccatactttaaattgtctggttcttgtaatattgtgtttcctgccaagagtttgaccattctgcttgagaagtgtagagcttactcttggagtaccaaactgtgcaatatttttacatcataagatgtattagtttacaggctgtgctttgaaattatagtagtattttgctgtggctccattaattaaatgagatatatatttagtgcagaaaaaagacatttaaaacagctattagttcacctgtgaagagtctgtacattttgatttctattaagagcacatttatttacatttgtatattattttaaatcctcatagtcaaaaaattctccagatggacttttaatttgtaagatttgaactgtgacttgtatacatctgtttagaatcaattatatttgaaaagctgcctgtgttttaacagtcaagtgtgctaaagtttgtcaatttaagctgcttttgatttcagctaccaagatcacaggtgcactctacacataacactgacagacccataacattacatacatcttagtgaattctatcacatggtaaaatgaacagctttctttgtaactcataaaattctcttaggacatttttataaagtcacctgtttatagttctatcttttcagattccatttctttttacataaaacagcatacatatcaaaaactgtagcctagaatacagtttaatttttggcttttgtttttgtttaaaaaattgcagtgaagaatgggatgtttgtgtttatggctatttgggcacctttagtagaaacagacaaaagtaaggaaacgataataggacaagcatacttgaaaatttctgaatacttaaacaaaagcgcaacatcttgaaaaccagtctagtcattgaaacctatgaaatgacactgaaagatcctgggctgcttcttaaataagtagatcagcaagacttgtttcagagtgacagtggagtcgttaccgctggaggactaaagggccctgtggcagctgtcactggaactttgcctcttgatcaggaaaaatgcttcaccagtccgtaaagccaagttgtatttttttaattgcccttttttccttctgtatttttaaagaaggatgttaatttttgactatatattttaaaaaaatctaagcagggggacatgcaaaaacaatcatcatccacttggatgtcattttatagattaacactgtgtgcttttgtatggaaaaaatatatataatttaatagtataaaaaataaaatatatattcatttgcacttacgtgaaacacaaactttgctctacaaaatttcgtgtttcttagtgattttaaaatgcatgtattgcatgtaaaggaaaaccattacaattaatgtttatcacacctttatcttggtctttgttgatttgggttttgttggggtttttgttactgtttttaaattacagtaggcttctatatatcctggatttctgaactggtcttgttgacaaggattcccaagaaatggatcttttcactggctgactctcccatatctgcaagagattctgcaggaactgggtgtgcacacggtgttgtagccagttcaggtactgaatatttaggatttggtgaagttcactgtattgctatatttttgtagataaataaaactcaataaattgttaatcattctctttttgctgtatagaattgcttatatcactctttctttcatgacattggttaacatttaaatgttcctcctgtacttgtgttgtctgtgaccgcttatagagttttattgttattggtgtttacctgaatacctatgcgtacacacacacatatttccttaatacttctgaactcattatcttttagaataataatactactacactttaccagcaattaacttctccctacccaaaatgtttttcttcctgtctgaaaatggaactaatttgtcttattcgtgcttatatctgtattaaatgcaataaagttagtttttgaaatgtaaaaattcactgtgcaattcatatgtcagcaataaaacatagattatttgtatataagttcatttttatagctattgttacatttaattaaatttattcaatatttgcttaaattaaaaa

SEQ ID NO: 129199 - DNA, 5247 bp, Homo sapiens
  Payload ID: 5279
  Gene Symbol: EFR3A
  Gene Name: EFR3 homolog A
  Uniprot ID: Q14156
  ENST ID: ENST00000519656
  CDS Start-End: 143-2500
acagatgaggaccagtaaacacaatagaaagtttatttaatgtggagtatgctgctgctgttccgctttgcgtcctcgctacaaacgcctggtggacaacatattccctgaagatccaaaagatggccttgtgaaaactgatatggagaaattgacattttatgcagtatctgctccagagaaactggatcgaattggttcttacctggcagaaaggttgagcagggatgttgtcagacatcgttctgggtatgttttgattgctatggaggcactggaccaacttctcatggcttgccattctcaaagcattaagccatttgtagaaagctttcttcatatggtggcaaagctgctggaatcgggggaaccaaagcttcaagttcttggaacaaattcttttgtcaaatttgcaaatattgaagaagacacaccatcctatcacagacgttatgacttttttgtgtctcgattcagtgccatgtgccattcctgtcatagtgatccagaaatacgaacagagatacgaattgctggaattagaggtattcaaggtgtggttcgcaaaacagtcaacgatgaacttcgggccaccatttgggaacctcagcatatggataagattgttccatccctcctgtttaacatgcaaaagatagaagaagttgacagtcgcataggccctccttcttctccttctgcaactgacaaagaagagaatcctgctgtgctggctgaaaactgtttcagagaactgctgggtcgagcaacttttgggaatatgaataatgctgttagaccagtttttgcgcatttagatcatcacaaactgtgggatcccaatgaatttgcagttcactgctttaaaattataatgtattccattcaggctcagtattctcaccatgtgatccaggagattctaggacaccttgatgctcgtaaaaaagatgctccccgggttcgagcaggtattattcaggttctgttagaggctgttgccattgctgctaaaggttccataggtccgacagtgctggaagtcttcaatacccttttgaaacatctgcgtctcagcgttgaattcgaagcaaatgatttacaggggggatctgtaggcagtgtcaacttaaatacaagttccaaagacaatgatgagaagattgtgcagaatgctatcatccaaacaataggattttttggaagtaacctaccagattatcagaggtcagaaatcatgatgttcattatggggaaagtacctgtctttggaacatctacccatactttggatatcagtcaactaggggatttgggaaccaggagaattcagataatgttgctgagatctttgcttatggtgacctctggatataaagcgaagacgattgttactgcactgccagggtctttcctggatcctttgttatcaccatctctcatggaggactacgaactgagacagttggtcttggaagtaatgcataatctcatggatcgtcatgacaatagggcaaagcttcgagggatcagaataataccggatgtagctgacctaaagataaaaagagaaaaaatttgcagacaagacacaagtttcatgaaaaagaatgggcaacagctgtatcggcacatatatttgggttgtaaagaggaagacaacgttcagaaaaactatgaactactttatacttctcttgctcttataactattgaactggctaatgaagaagtagttattgatctcattcgactggccattgctttacaggacagtgcaattatcaatgaggataatttgccaatgttccatcgttgtggaatcatggcactggttgcagcatacctcaactttgtaagtcagatgatagctgtccctgcattttgccagcatgttagcaaggttattgaaattcgaactatggaagccccttattttctaccagagcatatcttcagagataagtgcatgcttccaaaatctttagagaagcatgaaaaagatttgtactttctgaccaacaagattgcagagtcgctaggtggaagtggatatagtgttgagagattgtcagttccgtatgtaccacaagtaacagatgaagatcgactttctagaagaaaaagcattgtggacaccgtatccattcaggtggatattttatccaacaatgttccttctgatgatgtggttagtaacactgaagaaatcacttttgaagcattgaagaaagcaattgataccagtggaatggaagaacaggaaaaggaaaagaggcgtcttgtgatagagaaatttcagaaagcaccttttgaagaaatagcagcacagtgtgaatccaaagcaaatttgcttcatgatagacttgcccaaatattggaactcaccatacgtcctcctcccagtccatcaggaacactgaccattacttctgggcatgcccaataccaatctgtcccagtctatgagatgaagtttccagatctgtgtgtgtactgatcggcgcatgaagacctcaggatatgatttgtaaagcctaaaaattaaggccaagctgagctttcagggtttacttaatgtgtattaacatacttcttgaaaataatgatggaacatatctttaaccaaatgtttggcataccatattagaagttttggagctatatataatttcgagtactttcaaagatagatttatgccatgttaatttgctttgaggttcctgttgcctttttaagttgaacatgttttggtttcactttattccactgttaagtagtatgttttaaacttttcacaaatgtaatgttttttaaaaagtaagccttcagaggattgaaactgtataaattgtttatctcttaaacatctacacagccgcttagatgtagaatttttgttgttgttttctgcaaaggcagatacatttaaatatattcctagtcctgggactgcaaaactgttcggtggctttttgtccccatgctttagataagctgggataggcaccttgctattcagttactataataatatgtgataggcattcctcatcttcttcacaataataggacatctgttgaatagcattcctcgaatataaccctaaaaacgccatactttaaattgtctggttcttgtaatattgtgtttcctgccaagagtttgaccattctgcttgagaagtgtagagcttactcttggagtaccaaactgtgcaatatttttacatcataagatgtattagtttacaggctgtgctttgaaattatagtagtattttgctgtggctccattaattaaatgagatatatatttagtgcagaaaaaagacatttaaaacagctattagttcacctgtgaagagtctgtacattttgatttctattaagagcacatttatttacatttgtatattattttaaatcctcatagtcaaaaaattctccagatggacttttaatttgtaagatttgaactgtgacttgtatacatctgtttagaatcaattatatttgaaaagctgcctgtgttttaacagtcaagtgtgctaaagtttgtcaatttaagctgcttttgatttcagctaccaagatcacaggtgcactctacacataacactgacagacccataacattacatacatcttagtgaattctatcacatggtaaaatgaacagctttctttgtaactcataaaattctcttaggacatttttataaagtcacctgtttatagttctatcttttcagattccatttctttttacataaaacagcatacatatcaaaaactgtagcctagaatacagtttaatttttggcttttgtttttgtttaaaaaattgcagtgaagaatgggatgtttgtgtttatggctatttgggcacctttagtagaaacagacaaaagtaaggaaacgataataggacaagcatacttgaaaatttctgaatacttaaacaaaagcgcaacatcttgaaaaccagtctagtcattgaaacctatgaaatgacactgaaagatcctgggctgcttcttaaataagtagatcagcaagacttgtttcagagtgacagtggagtcgttaccgctggaggactaaagggccctgtggcagctgtcactggaactttgcctcttgatcaggaaaaatgcttcaccagtccgtaaagccaagttgtatttttttaattgcccttttttccttctgtatttttaaagaaggatgttaatttttgactatatattttaaaaaaatctaagcagggggacatgcaaaaacaatcatcatccacttggatgtcattttatagattaacactgtgtgcttttgtatggaaaaaatatatataatttaatagtataaaaaataaaatatatattcatttgcacttacgtgaaacacaaactttgctctacaaaatttcgtgtttcttagtgattttaaaatgcatgtattgcatgtaaaggaaaaccattacaattaatgtttatcacacctttatcttggtctttgttgatttgggttttgttggggtttttgttactgtttttaaattacagtaggcttctatatatcctggatttctgaactggtcttgttgacaaggattcccaagaaatggatcttttcactggctgactctcccatatctgcaagagattctgcaggaactgggtgtgcacacggtgttgtagccagttcaggtactgaatatttaggatttggtgaagttcactgtattgctatatttttgtagataaataaaactcaataaattgttaatcattctctttttgctgtatagaattgcttatatcactctttctttcatgacattggttaacatttaaatgttcctcctgtacttgtgttgtctgtgaccgcttatagagttttattgttattggtgtttacctgaatacctatgcgtacacacacacatatttccttaatacttctgaactcattatcttttagaataataatactactacactttaccagcaattaacttctccctacccaaaatgtttttcttcctgtctgaaaatggaactaatttgtcttattcgtgcttatatctgtattaaatgcaataaagttagtttttgaaatgtaaaaattcactgtgcaattcatatgtcagcaataaaacatagattatttgtatataagttcatttttatagctattgttacatttaattaaatttattcaatatttgcttaaattaaaaa

SEQ ID NO: 129200 - DNA, 477 bp, Homo sapiens
  Payload ID: 5279
  Gene Symbol: EFR3A
  Gene Name: EFR3 homolog A
  ENST ID: ENST00000520362
  CDS Start-End: 438-477
gtttgtcctggtgagggggcacagatgaggaccagtaaacacaatagaaagtttatttaatgtggtaggtgataagtgctatgggaaaaagaaggtagagcagggtaagggtggtcagagaggcgtagatgaagaattgaagaaggtgacagagttattatagctgttagtagatacttgggcatgccccaggcagagggaacagtgagagttaagatccaaaggagggggtctagctggttagaattagcagggagaccactgtggcttgagtagagtggattgcaacaggtgggtgggggtatgccggagttgcgggcagatgacatcagaaaggaggagtatgctgctgctgttccgctttgcgtcctcgctacaaacgcctggtggacaacatattccctgaagatccaaaagatggccttgtgaaaactgatatggagaaattgacattttatgcagtatctgctccagaga

SEQ ID NO: 129201 - DNA, 780 bp, Homo sapiens
  Payload ID: 5279
  Gene Symbol: EFR3A
  Gene Name: EFR3 homolog A
  ENST ID: ENST00000522709
  CDS Start-End: 382-780
ggcgaggagtgggctggcggcggtagctgtcgcccgcttggttgcgtgaccgcggggtccgcgtccgctccctccacccttcgcccttcgcccttcgcctcgttccggcctccgcggcccagcaacggccgtcatggtgccgtcggcgctccctgcgcggccccgctgagcctcggtgcggcggcgagcgcggtcgagatcgccatgcctacccgagtatgctgctgctgttccgctttgcgtcctcgctacaaacgcctggtggacaacatattccctgaagatccaaaagtaatttgatctacatctactgatccttctctttgctgacccattctgccccccgctgacctccttaaggatggccttgtgaaaactgatatggagaaattgacattttatgcagtatctgctccagagaaactggatcgaattggttcttacctggcagaaaggttgagcagggatgttgtcagacatcgttctgggtatgttttgattgctatggaggcactggaccaacttctcatggcttgccattctcaaagcattaagccatttgtagaaagctttcttcatatggtggcaaagctgctggaatcgggggaaccaaagcttcaagttcttggaacaaattcttttgtcaaatttgcaaatattgaagaagacacaccatcctatcacagacgttatgacttttttgtgtctcgattcagtgccatgtgccattcctgtcatagtgatccagaaatacgaacagagatacgaattgctggaatt

SEQ ID NO: 129202 - DNA, 1980 bp, Homo sapiens
  Payload ID: 5280
  Gene Symbol: EFR3B
  Gene Name: EFR3 homolog B
  ENST ID: ENST00000264719
  CDS Start-End: 1-1959
tttgtgaagtttgccaacatcgaggaggacaccccgtcctatcaccggagctatgacttctttgtgtcccgattcagtgaaatgtgccactcgagccatgatgacttagaaatcaagaccaaaattcgaatgtcaggcatcaaaggcctgcaaggggtggtgaggaagacggtgaatgatgaactgcaggccaatatctgggacccacagcacatggataagatcgttccatcactgcttttcaatctacagcatgtagaggaggcagagagccggtctccctcacccctccaagcacctgagaaggagaaagagagccccgcggagctggctgagaggtgtcttcgggagctgctgggccgggctgcctttggcaacatcaaaaacgccatcaagcctgttctcatccatctggataaccattctctttgggaacccaaggtgtttgccatccgttgctttaaaatcatcatgtactcaattcagccgcagcactcacacctggtcatccagcagctcctgggccacctggacgccaacagccgcagcgctgcgacggtgcgcgcgggcatcgtggaagtcttgtcggaagccgcggtcatcgctgccaccggctctgtggggcccacagtactggagatgttcaacacgctgctgaggcagctgcggctcagcatcgactacgcgctgaccgggagctacgacggggcggtcagcctcggcaccaagatcatcaaggagcacgaggagcgcatgttccaggaggccgtcatcaagaccgtgggctcctttgccagcacgctgcccacctaccagcgctccgaggtgatcctcttcatcatgagcaaggtcccgcggccatccctgcaccaggcggtggacacaggcaggacgggggagaataggaaccgtctgacccagattatgctgctaaaatccctcctgcaggtatccacaggtttccagtgcaacaacatgatgtcagccctgcctagcaacttcctggaccgccttctctccaccgccctcatggaggatgcagaaattcgactctttgttctagagattctcatcagtttcattgatcgtcatggcaaccgccacaagttctctaccatcagtaccctcagtgacatctctgtcctgaagctgaaagtggacaagtgctctcgacaggacaccgtcttcatgaagaagcactcccagcagctctacagacacatctacctgagctgcaaggaggaaacaaacgtgcagaaacactacgaggcgctctatggcttgctggccctcatcagcatcgagctggctaacgaggaggtggtggtggacctcatccgtctggtgctggctgttcaggtgatagagaccaggaagaaagaggctccatacatgctccccgaggatgtgtttgtggagaggcccaggctgtctcagaatcttgatggggtggtcattgagctcctcttccgccagagcaagatcagtgaagtcctgggaggcagtggctacaactcggaccggctctgcctgccctacattcctcagctgacagatgaggatcgtttatccaagaggaggagcattggagagaccatctccctgcaggtggaggtagaatcgaggaacagtccggagaaggaggagcgagtgcctgccgaggagatcacctatgagacactgaagaaagccattgtggacagcgtagcagtggaggagcaggagcgtgagcggcggcggcaggtggtggagaagttccagaaggcacccttcgaggagattgctgcacactgcggggcccgggcatcgctgctccagagcaaactcaatcagatctttgaaatcaccatccggcccccaccaagcccatcaggaaccatcactgcagcctacggtcagccgcagaaccactccatccccgtctatgaaatgaagtttcccgatctgtgtgtatactgaattccaagagcctgagctcct

SEQ ID NO: 129203 - DNA, 7434 bp, Homo sapiens
  Payload ID: 5280
  Gene Symbol: EFR3B
  Gene Name: EFR3 homolog B
  Uniprot ID: Q9Y2G0
  ENST ID: ENST00000403714
  CDS Start-End: 184-2637
gctggcggcgcccggctccgtcctgcccgcggccggcccccgcgtctgctccctccccgcccgggcccctgtcggccgccgccagtccccgccccgactgtgaatgaaaggcgggcgccgccgagggctggctgggaacgccgcagcgacgccggcctctcgagaggcgcgcgccccgccgagatgtacggtgtgtgtggctgctgtggtgccctacgccccaggtacaaaaggctggttgacaacatcttccctgaggatcccgaggatggtctggtgaagaccaacatggagaagctgaccttctatgccctctcagctccagaaaaacttgatcgtattggcgcctacctctctgagaggctcatccgtgacgtgggtcgccatcgatatgggtacgtgtgcattgctatggaggctttggaccagctgctcatggcctgccactgccagagcatcaacctcttcgtggagagcttcctcaagatggtggccaagctgctggagtcagagaaacccaacctgcagatcctcggcaccaactcgtttgtgaagtttgccaacatcgaggaggacaccccgtcctatcaccggagctatgacttctttgtgtcccgattcagtgaaatgtgccactcgagccatgatgacttagaaatcaagaccaaaattcgaatgtcaggcatcaaaggcctgcaaggggtggtgaggaagacggtgaatgatgaactgcaggccaatatctgggacccacagcacatggataagatcgttccatcactgcttttcaatctacagcatgtagaggaggcagagagccggtctccctcacccctccaagcacctgagaaggagaaagagagccccgcggagctggctgagaggtgtcttcgggagctgctgggccgggctgcctttggcaacatcaaaaacgccatcaagcctgttctcatccatctggataaccattctctttgggaacccaaggtgtttgccatccgttgctttaaaatcatcatgtactcaattcagccgcagcactcacacctggtcatccagcagctcctgggccacctggacgccaacagccgcagcgctgcgacggtgcgcgcgggcatcgtggaagtcttgtcggaagccgcggtcatcgctgccaccggctctgtggggcccacagtactggagatgttcaacacgctgctgaggcagctgcggctcagcatcgactacgcgctgaccgggagctacgacggggcggtcagcctcggcaccaagatcatcaaggagcacgaggagcgcatgttccaggaggccgtcatcaagaccgtgggctcctttgccagcacgctgcccacctaccagcgctccgaggtgatcctcttcatcatgagcaaggtcccgcggccatccctgcaccaggcggtggacacaggcaggacgggggagaataggaaccgtctgacccagattatgctgctaaaatccctcctgcaggtatccacaggtttccagtgcaacaacatgatgtcagccctgcctagcaacttcctggaccgccttctctccaccgccctcatggaggatgcagaaattcgactctttgttctagagattctcatcagtttcattgatcgtcatggcaaccgccacaagttctctaccatcagtaccctcagtgacatctctgtcctgaagctgaaagtggacaagtgctctcgacaggacaccgtcttcatgaagaagcactcccagcagctctacagacacatctacctgagctgcaaggaggaaacaaacgtgcagaaacactacgaggcgctctatggcttgctggccctcatcagcatcgagctggctaacgaggaggtggtggtggacctcatccgtctggtgctggctgttcaggacgtggcccaagtcaatgaggagaacttgcctgtctacaaccgctgtgccctctatgctctgggcgcagcctacctgaacctcatcagtcagctcacaacagtgcctgccttctgccagcacatccatgaggtgatagagaccaggaagaaagaggctccatacatgctccccgaggatgtgtttgtggagaggcccaggctgtctcagaatcttgatggggtggtcattgagctcctcttccgccagagcaagatcagtgaagtcctgggaggcagtggctacaactcggaccggctctgcctgccctacattcctcagctgacagatgaggatcgtttatccaagaggaggagcattggagagaccatctccctgcaggtggaggtagaatcgaggaacagtccggagaaggaggagcgagtgcctgccgaggagatcacctatgagacactgaagaaagccattgtggacagcgtagcagtggaggagcaggagcgtgagcggcggcggcaggtggtggagaagttccagaaggcacccttcgaggagattgctgcacactgcggggcccgggcatcgctgctccagagcaaactcaatcagatctttgaaatcaccatccggcccccaccaagcccatcaggaaccatcactgcagcctacggtcagccgcagaaccactccatccccgtctatgaaatgaagtttcccgatctgtgtgtatactgaattccaagagcctgagctcctcaaggagatggggtctgaggaggggctcacctcacgcccaccccgaccacatggagatctggctgtgatctctgagaaaacatcaccttagatggcagcgcctcccaggctaagccaaggtggagactctctggtccttcttggccctcctacctcctcctcgtcttccctgagggaggtctcaccaatcagcatctcacctgtgccctctttgtcttctcttgtgtcagccaggggcagagaatcatggggtgtctctcaggagaagccggggggagggggctgagaagctcctacttggtgttttgagtgaagggcatgtcctccccagaggacggagctggatggagacttggttggtgagaggaagctaaggactctactcccctggggaaggaagctgagatggggatggctctctcctccccagcactccccctgctccccgcccatgtccctgctgtgtctctcactctcttgctcatctcccagttgtctgttcatgtttctttctactattaatgaatgctgagcccttataacaggagctggggtggagacatcacgaggggtcgggggacagcaaagggcaggaagcaggatgcagggctggcaggaggtgggcctgtggcatcagcaggcccagcgggcgagtgtggtccctgcagcagcttcccacctcctttgttcataaggagcttgtgttggcctcccacagtcctgtctgctggacgtttttcagagttgggttctctctctttgatgtctttcttctgagggtcccaaggtgttcctggagcttctgggttgaggaaaggcagagcaagataatcttggaggggaactacagggtccccaagatttgcccacatcacctcctatggaaaaggctcccagcctgacctgggttgtaggagagtggggagggtgggatgagtggtgttttggggctcaaggatatcagaagccaactttttggatgttccgtttgaagaaagaaggatctaacacctaatattggaatgatttcttcactctctggacaaagtctgggacatcagcaccacctggcaacgcttgtggcttgggaggagccatggagacccctttgggttctgggttcctgttttcctggtgtgccgtctgtgtctctgtgtaatgaggatgtgcagagaggagctaacgcggagccgggcagagccacccaggaggcagtttgttgccttctttgccaattccccttcccggcccctcctccaggtgcctttgtgtctcccggggtgccactgacagaacctcacctggggctcctcccatggcagtgccatgtggtccaaaattgccctttccttctccgttagtcacatttcccataactcctccgagccaacataacctacagtaagatgtgagtgtcagacgttctctccctggagtctgctttccaaaggaggcagggtgagtagatttcttgatccaaaggaatccgtttttaatttttttttttttctagagatgggggtctcactatgttgcccaggctggcctcgaactcctgagtttaagtgattctcccacctcagcctcctgagtagctgagaatccctttttagggtacaatttcaggcagtgtggcatggagtcagaagcaggctgtttctcctcaggggagggcaggcttctcaggacggcctcagctcatagccccacgtgtggtgtgcacggatgtgcagggagagcctgattgttaggtggatgtattttccagaatcggggagggactgaacacgagcatttcccattaatatgtgcaataaatgtcttggggaaggggctatttgaccctcattcccatagttttggcacttcaaatgaagctcttccttgtggtcaccatctctgctgtgggcacacagcttctttttcttgtttttttttttttttttttttttttgagacaccgtctcgctctgtcacccaggctggagtacaatggtgtgacctcaactcactgtgacttccgcctcctgggttcaagtgattctcctgcctcagcctcctgagtagctgggattacaggcgtgcaccaccacgcctggcgaattttgtgtttttagtagacatgaggtttcaccgtgttggccaggctggtctggaactcctgatctcaagtgatccgcccgcctcagcctctcaaagtgctgggattacaggcgtgagccactgcgcctgcttggcacgtggcttctgaatggcctgagtgagggcagggcccaggcatggaggctcctgcacccccaaggctttttggctgtgctttatggcctctggcttatactcaacccaattttacaagcatgaacttagacttctctttagtatttatatatttaaaaaccaagtttaaattaactcaaacttgacagcaactaacctctgaaagaaactttaaagaaaattgaaatcttgagccacaaacatgttctttcctcactagctcctcccaggttttatcctgcacccagcttggatgagagacccactgtttcttgtgcctacttaacattagggttccccgtggcagcttcatcctgagcactgcctgtgagccctggttctgggacttggcagtcgcctccctggagcatctttccagagccagcattagaacctgagatccccagatgtttctgcccctcatccccatcctgtgaatagagagacagaaaaggtgcaggttcccattctgcatagattctgctgtttcctctccaccggtcccaggcagcttttcctttccatcactgccgcttagcaaaaatgtgcttcttttgaagaactggtcattttttttgagtgccctcttctcagttttgtttaaacttacactcagtagagtgttgggttgtctgctgacatggagtagaacctggattctggccaaataggccagaatcggaaaggtgaaggtgagtgtgatagtaggtaatctcctcaccccagcacaggccctgggagagaggcaaagcagtttgatgggatctggaggggagggaggtaccctggcccttggtctagcatcagtgagtcctgcccttccaagcccctggaggctagtggcattgcattgtgcccctttttgccacccttctctgatgtgattttgagcgaagaggagtcagtaagcccattgagaccggctgctcccaaagcccgaggactctagctgtgtggggaagggctagcattggtcaggactctgctgacagcactgagtaggcaggaatgtatttgagatttggaagtactgttaatttggtggagtcaggtgaatggataagaggcagatcggcagaaagcatcagtgtggtcccgaggctccctctgttttccttgccatggagtccccagcgccttgtgcctgtttccatttccctctctctttgaaaagtagaaatcagtggtttcttgactcctaaacagcctcctcactatagaaggagcctgagcaggtcagaagaactagaaaagtcctcagatacccccctctgtccagccccctttcccatacacagatatcaatggatgagcaggaaaagaggaggcctggactcactgaagtacttgaagaagcacaagtgtcatagatgtgccgccctttgccctgggtgttctagatcacacagaacacgtttcagctggactaagaatcagactagccaggggttcttctgaacagctcaggccagacctctgggctcctctgggggccctgggacatgatgccttgcagtttccattccattgtccccaggcctcctgacctggtgacagagagtgccctgcagaagtgagtctatttttcccaattcctcttcatgaccagaaaatggcagctggccggttggggtcctgtgggaaagggctaacctgggctgttaggtagacactaggtttaaaggtagacagggagatggcatcatcagggcaggccaggcccacttcctgtgaccccagaccttggcaggcgggtcgtgctgaaaccaggcatctccctcacacctggggaaaggtttagggcaacatgttgcctcttcatcccattaaccctagaaatcttctggttagagtggccccttaccccaaatctggcctaggtctgaagactgcaggatagtcatgatgggcccatcctagagcctggctagctggaagacgcggtatggcagggacaggagggcggcaggaagggctttgtggccctgctggggccaaaggcagttttctgtgctccctttagccccagcctggctggccaggtctcctgtacttcaggggaccatggggccgcccaagccagtcaccttccccttccaagctctccccccatgactgttgatttctggcgcgtggaggcagagttgtgaatccacaaatgctgtagcccatatctcgtaatgtgtctgtgtccacttagagcctcacgacctggctgtgtgtgtgcatgtgtgtgtagtatagtttgtagttgacaatatgtgtatataatagctggtgtatttatatgtgagtgcagaattagtgcccgtggcggttttctgtattttaaacccattgaattggttagttttattttagggaagtgggaaaggcggagtggggggaagtataggaagaaggattcttagcaaaatcattctctaggactattagtcgcgatctcccagtgagccatcacgatgcccttttcaaataaatgttaatgttgtcaccaca

SEQ ID NO: 129204 - DNA, 2432 bp, Homo sapiens
  Payload ID: 5280
  Gene Symbol: EFR3B
  Gene Name: EFR3 homolog B
  Uniprot ID: Q9Y2G0
  ENST ID: ENST00000405108
  CDS Start-End: 198-2207
gcaaataagctttactacaaccatatctgaaatgtgttttcctgatcaagtgggatgggaaagaacagtgagtggagtcccaggcatgttaagaatggcgtgctgttttttaagtgtttgtgaagtttgccaacatcgaggaggacaccccgtcctatcaccggagctatgacttctttgtgtcccgattcagtgaaatgtgccactcgagccatgatgacttagaaatcaagaccaaaattcgaatgtcaggcatcaaaggcctgcaaggggtggtgaggaagacggtgaatgatgaactgcaggccaatatctgggacccacagcacatggataagatcgttccatcactgcttttcaatctacagcatgtagaggaggcagagagccggtctccctcacccctccaagcacctgagaaggagaaagagagccccgcggagctggctgagaggtgtcttcgggagctgctgggccgggctgcctttggcaacatcaaaaacgccatcaagcctgttctcatccatctggataaccattctctttgggaacccaaggtgtttgccatccgttgctttaaaatcatcatgtactcaattcagccgcagcactcacacctggtcatccagcagctcctgggccacctggacgccaacagccgcagcgctgcgacggtgcgcgcgggcatcgtggaagtcttgtcggaagccgcggtcatcgctgccaccggctctgtggggcccacagtactggagatgttcaacacgctgctgaggcagctgcggctcagcatcgactacgcgctgaccgggagctacgacggggcggtcagcctcggcaccaagatcatcaaggagcacgaggagcgcatgttccaggaggccgtcatcaagaccgtgggctcctttgccagcacgctgcccacctaccagcgctccgaggtgatcctcttcatcatgagcaaggtcccgcggccatccctgcaccaggcggtggacacaggcaggacgggggagaataggaaccgtctgacccagattatgctgctaaaatccctcctgcaggtatccacaggtttccagtgcaacaacatgatgtcagccctgcctagcaacttcctggaccgccttctctccaccgccctcatggaggatgcagaaattcgactctttgttctagagattctcatcagtttcattgatcgtcatggcaaccgccacaagttctctaccatcagtaccctcagtgacatctctgtcctgaagctgaaagtggacaagtgctctcgacaggacaccgtcttcatgaagaagcactcccagcagctctacagacacatctacctgagctgcaaggaggaaacaaacgtgcagaaacactacgaggcgctctatggcttgctggccctcatcagcatcgagctggctaacgaggaggtggtggtggacctcatccgtctggtgctggctgttcaggacgtggcccaagtcaatgaggagaacttgcctgtctacaaccgctgtgccctctatgctctgggcgcagcctacctgaacctcatcagtcagctcacaacagtgcctgccttctgccagcacatccatgaggtgatagagaccaggaagaaagaggctccatacatgctccccgaggatgtgtttgtggagaggcccaggctgtctcagaatcttgatggggtggtcattgagctcctcttccgccagagcaagatcagtgaagtcctgggaggcagtggctacaactcggaccggctctgcctgccctacattcctcagctgacagatgaggatcgtttatccaagaggaggagcattggagagaccatctccctgcaggtggaggtagaatcgaggaacagtccggagaaggaggagcgagtgcctgccgaggagatcacctatgagacactgaagaaagccattgtggacagcgtagcagtggaggagcaggagcgtgagcggcggcggcaggtggtggagaagttccagaaggcacccttcgaggagattgctgcacactgcggggcccgggcatcgctgctccagagcaaactcaatcagatctttgaaatcaccatccggcccccaccaagcccatcaggaaccatcactgcagcctacggtcagccgcagaaccactccatccccgtctatgaaatgaagtttcccgatctgtgtgtatactgaattccaagagcctgagctcctcaaggagatggggtctgaggaggggctcacctcacgcccaccccgaccacatggagatctggctgtgatctctgagaaaacatcaccttagatggcagcgcctcccaggctaagccaaggtggagactctctggtccttcttggccctcctacctcctcctcgtcttccctgagggaggtctcaccaatcagcatctcacctgt

SEQ ID NO: 129205 - DNA, 3685 bp, Homo sapiens
  Payload ID: 5280
  Gene Symbol: EFR3B
  Gene Name: EFR3 homolog B
  ENST ID: ENST00000402191
  CDS Start-End: 303-2651
gtgcgcgcgcgtctgcgctgcgaggacaaagatgcctcgggccggggaccctggggtcctctccaggcccggcgcgtgccggtgctgggcggtggtccttcggggggcggaggctcaggggaaagcgggtctcccggagccgagcagaccgggagtgctggaggaggtggtcgtgtggcagcatttgcggaattaacaaaagcggtgtgtgtggctgctgtggtgccctacgccccaggtacaaaaggctggttgacaacatcttccctgaggatcccgaggatggtctggtgaagaccaacatggagaagctgaccttctatgccctctcagctccagaaaaacttgatcgtattggcgcctacctctctgagaggctcatccgtgacgtgggtcgccatcgatatgggtacgtgtgcattgctatggaggctttggaccagctgctcatggcctgccactgccagagcatcaacctcttcgtggagagcttcctcaagatggtggccaagctgctggagtcagagaaacccaacctgcagatcctcggcaccaactcgtttgtgaagtttgccaacatcgaggaggacaccccgtcctatcaccggagctatgacttctttgtgtcccgattcagtgaaatgtgccactcgagccatgatgacttagaaatcaagaccaaaattcgaatgtcaggcatcaaaggcctgcaaggggtggtgaggaagacggtgaatgatgaactgcaggccaatatctgggacccacagcacatggataagatcgttccatcactgcttttcaatctacagcatgtagaggaggcagagagccggtctccctcacccctccaagcacctgagaaggagaaagagagccccgcggagctggctgagaggtgtcttcgggagctgctgggccgggctgcctttggcaacatcaaaaacgccatcaagcctgttctcatccatctggataaccattctctttgggaacccaaggtgtttgccatccgttgctttaaaatcatcatgtactcaattcagccgcagcactcacacctggtcatccagcagctcctgggccacctggacgccaacagccgcagcgctgcgacggtgcgcgcgggcatcgtggaagtcttgtcggaagccgcggtcatcgctgccaccggctctgtggggcccacagtactggagatgttcaacacgctgctgaggcagctgcggctcagcatcgactacgcgctgaccgggagctacgacggggcggtcagcctcggcaccaagatcatcaaggagcacgaggagcgcatgttccaggaggccgtcatcaagaccgtgggctcctttgccagcacgctgcccacctaccagcgctccgaggtgatcctcttcatcatgagcaaggtcccgcggccatccctgcaccaggcggtggacacaggcaggacgggggagaataggaaccgtctgacccagattatgctgctaaaatccctcctgcaggtatccacaggtttccagtgcaacaacatgatgtcagccctgcctagcaacttcctggaccgccttctctccaccgccctcatggaggatgcagaaattcgactctttgttctagagattctcatcagtttcattgatcgtcatggcaaccgccacaagttctctaccatcagtaccctcagtgacatctctgtcctgaagctgaaagtggacaagtgctctcgacaggacaccgtcttcatgaagaagcactcccagcagctctacagacacatctacctgagctgcaaggaggaaacaaacgtgcagaaacactacgaggcgctctatggcttgctggccctcatcagcatcgagctggctaacgaggaggtggtggtggacctcatccgtctggtgctggctgttcaggacgtggcccaagtcaatgaggagaacttgcctgtctacaaccgctgtgccctctatgctctgggcgcagcctacctgaacctcatcagtcagctcacaacagtgcctgccttctgccagcacatccatgaggtgatagagaccaggaagaaagaggctccatacatgctccccgaggatgtgtttgtggagaggcccaggctgtctcagaatcttgatggggtggtcattgagctcctcttccgccagagcaagatcagtgaagtcctgggaggcagtggctacaactcggaccggctctgcctgccctacattcctcagctgacagatgaggatcgtttatccaagaggaggagcattggagagaccatctccctgcaggtggaggtagaatcgaggaacagtccggagaaggaggagcgagtgcctgccgaggagatcacctatgagacactgaagaaagccattgtggacagcgtagcagtggaggagcaggagcgtgagcggcggcggcaggtggtggagaagttccagaaggcacccttcgaggagattgctgcacactgcggggcccgggcatcgctgctccagagcaaactcaatcagatctttgaaatcaccatccggcccccaccaagcccatcaggaaccatcactgcagcctacggtcagccgcagaaccactccatccccgtctatgaaatgaagtttcccgatctgtgtgtatactgaattccaagagcctgagctcctcaaggagatggggtctgaggaggggctcacctcacgcccaccccgaccacatggagatctggctgtgatctctgagaaaacatcaccttagatggcagcgcctcccaggctaagccaaggtggagactctctggtccttcttggccctcctacctcctcctcgtcttccctgagggaggtctcaccaatcagcatctcacctgtgccctctttgtcttctcttgtgtcagccaggggcagagaatcatggggtgtctctcaggagaagccggggggagggggctgagaagctcctacttggtgttttgagtgaagggcatgtcctccccagaggacggagctggatggagacttggttggtgagaggaagctaaggactctactcccctggggaaggaagctgagatggggatggctctctcctccccagcactccccctgctccccgcccatgtccctgctgtgtctctcactctcttgctcatctcccagttgtctgttcatgtttctttctactattaatgaatgctgagcccttataacaggagctggggtggagacatcacgaggggtcgggggacagcaaagggcaggaagcaggatgcagggctggcaggaggtgggcctgtggcatcagcaggcccagcgggcgagtgtggtccctgcagcagcttcccacctcctttgttcataaggagcttgtgttggcctcccacagtcctgtctgctggacgtttttcagagttgggttctctctctttgatgtctttcttctgagggtcccaaggtgttcctggagcttctgggttgaggaaaggcagagcaagataatcttggaggggaactacagggtccccaagatttgcccacatcacctcctatggaaaaggctcccagcctgacctgggttgtaggagagtggggagggtgggatgagtggtgttttggggctcaaggatatcagaagccaactttttggatgttccgtttgaagaaagaaggatctaacacct

SEQ ID NO: 129206 - DNA, 5162 bp, Homo sapiens
  Payload ID: 5280
  Gene Symbol: EFR3B
  Gene Name: EFR3 homolog B
  Uniprot ID: Q9Y2G0
  ENST ID: ENST00000401432
  CDS Start-End: 184-2370
gctggcggcgcccggctccgtcctgcccgcggccggcccccgcgtctgctccctccccgcccgggcccctgtcggccgccgccagtccccgccccgactgtgaatgaaaggcgggcgccgccgagggctggctgggaacgccgcagcgacgccggcctctcgagaggcgcgcgccccgccgagatgtacggtgtgtgtggctgctgtggtgccctacgccccaggtacaaaaggctggttgacaacatcttccctgaggatcccgaggatggtctggtgaagaccaacatggagaagctgaccttctatgccctctcagctccagaaaaacttgatcgtattggcgcctacctctctgagaggctcatccgtgacgtgggtcgccatcgatatgggtacgtgtgcattgctatggaggctttggaccagctgctcatggcctgccactgccagagcatcaacctcttcgtggagagcttcctcaagatggtggccaagctgctggagtcagagaaacccaacctgcagatcctcggcaccaactcgtttgtgaagtttgccaacatcgaggaggacaccccgtcctatcaccggagctatgacttctttgtgtcccgattcagtgaaatgtgccactcgagccatgatgacttagaaatcaagaccaaaattcgaatgtcaggcatcaaaggcctgcaaggggtggtgaggaagacggtgaatgatgaactgcaggccaatatctgggacccacagcacatggataagatcgttccatcactgcttttcaatctacagcatgtagaggaggcagagagccggtctccctcacccctccaagcacctgagaaggagaaagagagccccgcggagctggctgagaggtgtcttcgggagctgctgggccgggctgcctttggcaacatcaaaaacgccatcaagcctgttctcatccatctggataaccattctctttgggaacccaaggtgtttgccatccgttgctttaaaatcatcatgtactcaattcagccgcagcactcacacctggtcatccagcagctcctgggccacctggacgccaacagccgcagcgctgcgacggtgcgcgcgggcatcgtggaagtcttgtcggaagccgcggtcatcgctgccaccggctctgtggggcccacagtactggagatgttcaacacgctgctgaggcagctgcggctcagcatcgactacgcgctgaccgggagctacgacggggcggtcagcctcggcaccaagatcatcaaggagcacgaggagcgcatgttccaggaggccgtcatcaagaccgtgggctcctttgccagcacgctgcccacctaccagcgctccgaggtgatcctcttcatcatgagcaaggtcccgcggccatccctgcaccaggcggtggacacaggcaggacgggggagaataggaaccgtctgacccagattatgctgctaaaatccctcctgcaggtatccacaggtttccagtgcaacaacatgatgtcagccctgcctagcaacttcctggaccgccttctctccaccgccctcatggaggatgcagaaattcgactctttgttctagagattctcatcagtttcattgatcgtcatggcaaccgccacaagttctctaccatcagtaccctcagtgacatctctgtcctgaagctgaaagtggacaagtgctctcgacaggacaccgtcttcatgaagaagcactcccagcagctctacagacacatctacctgagctgcaaggaggaaacaaacgtgcagaaacactacgaggcgctctatggcttgctggccctcatcagcatcgagctggctaacgaggaggtggtggtggacctcatccgtctggtgctggctgttcaggacgtggcccaagtcaatgaggagaacttgcctgtctacaaccgctgtgccctctatgctctgggcgcagcctacctgaacctcatcagtcagctcacaacagtgcctgccttctgccagcacatccatgaggtgatagagaccaggaagaaagaggctccatacatgctccccgaggatgtgtttgtggagaggcccaggctgtctcagaatcttgatggggtggtcattgagctcctcttccgccagagcaagatcagtgaagtcctgggaggcagtggctacaactcggaccggctctgcctgccctacattcctcagctgacagatgaggatcgtttatccaagaggaggagcattggagagaccatctccctgcaggtggaggtagaatcgaggaacagtccggagaaggaggaggtgagtgtccgtgccaccgtcctggggcagccccacctcctgtagattggacgctggactccaggctcccctgcctgcatagtgggcttaaggctgcatggaaagcaagtttctcgagtaattccacacttgtactgactctccccacgtatgcgtcatagatacttcccttcggaaaaattgttagggtcctccctgctcccatgaggatatcataaaactcactcttgaaaggcctggctggggatggtggctcacacctgtgatcccaacattttggaggctgaggcaggaggactgcttgagcccaggagtttgagatgatctggggcaatataaggagaccccatctctacaaaaaataattgaaaaatcagccaggcatggtgacgtgcacctgtggtcccaggtactcaggatgctgaggtgggagaatcacctgagcctgggaggtcaaggctgctgtaagccatgatggcagcacggcacttcagcctaggtgacagagtgagacctcgtctcaaaaaattaaaaagaaaggcatgctggtcatcattccccactcacagggggaccgatatgctctgggttggaaactagaagacttaactggagagataagggtgagaacagctttcatagtgttgcttccgtatgtatcaataaagaatctttttttaaatttacactatttttaaagcaattttagttacagcaaaattgagaggaaggtacagagatcgccctttgccccctcccctcccctgacacatgcacagcctcccctcctatccatatcccccagcagagtggtgcatttcttacagttcaacctgccttaacacaacagtatcatctgaagtctgtcgtttacactggggttcgccctcagcgttgtacattctgtgggtttggacaaatgcgtaatgacatgcatcccccaccagagtaccatacagagtcatttcctgccctaaaaccccctgtgctccacctcttcatctctcccctaaccactgacagccaagatgttttttttttttttttttttaatgctgactgttacagttcacaagaagtacggaggacacacatctgggtgggaccgggacagaaagacttacatggtcctcaggcatggacaggctggcattccccagcctctctgcccattagggctgatatagacatggaggacagctttgacatcaagcctttccccagatgcaatcagaggtaggagaagtctctaggggtcaggatcaagcctccccctaactgtgccctcgaccacttcatttattggggcagatctctaccccagggccctcaaagcttatccagaaccttcccacggaaggaagctctgacttgggctaattggacaagtaaaatgaggttgaacgaggcatcctccatggcccttccagctccaaggactgggaacctccaatgcgttaggcatcggggtgagttggctgctctctccccatagtggcgattctcccttcccaagaggtaagagaccctcgggaattgaggagtgaagtgactcagaagcgcaaggcgaaatgcttacacagctacagagccacctcctcactagtggcctcctgggccaccagtatcagttccttcctcccttcaagagtcagcttagcccagaggtagcttggtggcaaagcaggggtgcaggggccttcatcctgtgcccttctgccatgccacaactctctccactctcagccatcagtgccagtccagagtcccacggtggttcctagggccgtactgcccagccttgccgcaggggtgaataaatgcttgtttggtcaaatctgaatcctggtgcctggcattcccagccatgcatagtctgggctctgccatttcatttttccccacctgctctggcccgtatccactgtcccactctggtggggctgctctcgatctctcccacgctgcgctccgccatctccaggcctttgctagtgcagaatgccacatctgaaccacccttccctccacactggtgcagctgagcgcctgtgaactgtctgttctccagcgcccggcccctgttcagtttcctcataaacttctctctccctgctcttgcccagggagcatcccttctctcttgcccagagagcggcattttctttgactgttgccaccacacagttccctagcaccctgcaggtgaatatccaatgttgctcggtgctgacagtggatgaatggatggacgtacagaggataagtcctcagagcgagttaaagccgagcatagctctctcttgcatgtaattcctatgctagcaaattgtgcagtttctatagactcacctacagtcctgcatgtagttggtgctcacttaatgtttgttaaatgactttatctcatacatatacttctgtcctctcctactcaaacaaaaatgccaaacaaatcaaaaaatgcacgactcagtgaattttcataaagtgtgtatgcccacgcaaccacgcctggatgagagagtggaacactgtcatcatccaggggccctgcctctgtgccccctcccctaagggagctcccagcctgagttgcgttacttctggaactttatatcaatgaaatcattctgttctgtgtctgctgcttttgcttaagattatgtttaaatgatagagcatgaggctgggcgtggtggctcatgcctgtaatctcagcactttgggaggccaaggcaggtggatcacctgaggttaggagttcaagaccagcctgatcaacatggtgaaaccccgtctttactaaaactacaaaaaattagccgggcatggtg

SEQ ID NO: 129207 - DNA, 1820 bp, Homo sapiens
  Payload ID: 5281
  Gene Symbol: EFEMP1
  Gene Name: EGF containing fibulin-like extracellular matrix protein 1
  Uniprot ID: Q12805
  ENST ID: ENST00000355426
  CDS Start-End: 126-1607
agatcagacccacggggctgccctcccctgcgcactcccctcgctgcccgggcccggagcgcagcgcggccgcacaggtatttttgctgtgctgtgcaaggaactctgctagctcaagattcacaatgttgaaagcccttttcctaactatgctgactctggcgctggtcaagtcacaggacaccgaagaaaccatcacgtacacgcaatgcactgacggatatgagtgggatcctgtgagacagcaatgcaaagatattgatgaatgtgacattgtcccagacgcttgtaaaggtggaatgaagtgtgtcaaccactatggaggatacctctgccttccgaaaacagcccagattattgtcaataatgaacagcctcagcaggaaacacaaccagcagaaggaacctcaggggcaaccaccggggttgtagctgccagcagcatggcaaccagtggagtgttgcccgggggtggttttgtggccagtgctgctgcagtcgcaggccctgaaatgcagactggccgaaataactttgtcatccggcggaacccagctgaccctcagcgcattccctccaacccttcccaccgtatccagtgtgcagcaggctacgagcaaagtgaacacaacgtgtgccaagacatagacgagtgcactgcagggacgcacaactgtagagcagaccaagtgtgcatcaatttacggggatcctttgcatgtcagtgccctcctggatatcagaagcgaggggagcagtgcgtagacatagatgaatgtaccatccctccatattgccaccaaagatgcgtgaatacaccaggctcattttattgccagtgcagtcctgggtttcaattggcagcaaacaactatacctgcgtagatataaatgaatgtgatgccagcaatcaatgtgctcagcagtgctacaacattcttggttcattcatctgtcagtgcaatcaaggatatgagctaagcagtgacaggctcaactgtgaagacattgatgaatgcagaacctcaagctacctgtgtcaatatcaatgtgtcaatgaacctgggaaattctcatgtatgtgcccccagggataccaagtggtgagaagtagaacatgtcaagatataaatgagtgtgagaccacaaatgaatgccgggaggatgaaatgtgttggaattatcatggcggcttccgttgttatccacgaaatccttgtcaagatccctacattctaacaccagagaaccgatgtgtttgcccagtctcaaatgccatgtgccgagaactgccccagtcaatagtctacaaatacatgagcatccgatctgataggtctgtgccatcagacatcttccagatacaggccacaactatttatgccaacaccatcaatacttttcggattaaatctggaaatgaaaatggagagttctacctacgacaaacaagtcctgtaagtgcaatgcttgtgctcgtgaagtcattatcaggaccaagagaacatatcgtggacctggagatgctgacagtcagcagtatagggaccttccgcacaagctctgtgttaagattgacaataatagtggggccattttcattttagtcttttctaagagtcaaccacaggcatttaagtcagccaaagaatattgttaccttaaagcactattttatttatagatatatctagtgcatctacatctctatactgtacactcacccataattcaaacaattacaccatggtataaagtgggcatttaatatgtaaagattcaaagtttgtctttattactatatgtaaattagacattaa

SEQ ID NO: 129208 - DNA, 3024 bp, Homo sapiens
  Payload ID: 5281
  Gene Symbol: EFEMP1
  Gene Name: EGF containing fibulin-like extracellular matrix protein 1
  Uniprot ID: Q12805
  ENST ID: ENST00000394555
  CDS Start-End: 437-1918
agatgctgtgttcccctcctcagagaagaagaaaacgcactagagagtgggagcatccccaaggctgaagcgcatccaggacatcacatgtcaacgtgtcctctctggcgtggggtccccgcgagtctgggaaacgaggagctggcaagggagggcaagcgggggcggcaaagagggcccctggagcagggggcgcggacctcgctgcgctgcgcgctctaccgccgggctcgcaacgctgggctcagcgctcgcgcctccctcagctctctcctccgccccccttcgccctccccctttccctccctttctcctcctcctcctgccgccgcggccgctgccggacttcgccagatcagacccacggggctgccctcccctgcgcactcccctcgctgcccgggcccggagcgcagcgcggccgcacagattcacaatgttgaaagcccttttcctaactatgctgactctggcgctggtcaagtcacaggacaccgaagaaaccatcacgtacacgcaatgcactgacggatatgagtgggatcctgtgagacagcaatgcaaagatattgatgaatgtgacattgtcccagacgcttgtaaaggtggaatgaagtgtgtcaaccactatggaggatacctctgccttccgaaaacagcccagattattgtcaataatgaacagcctcagcaggaaacacaaccagcagaaggaacctcaggggcaaccaccggggttgtagctgccagcagcatggcaaccagtggagtgttgcccgggggtggttttgtggccagtgctgctgcagtcgcaggccctgaaatgcagactggccgaaataactttgtcatccggcggaacccagctgaccctcagcgcattccctccaacccttcccaccgtatccagtgtgcagcaggctacgagcaaagtgaacacaacgtgtgccaagacatagacgagtgcactgcagggacgcacaactgtagagcagaccaagtgtgcatcaatttacggggatcctttgcatgtcagtgccctcctggatatcagaagcgaggggagcagtgcgtagacatagatgaatgtaccatccctccatattgccaccaaagatgcgtgaatacaccaggctcattttattgccagtgcagtcctgggtttcaattggcagcaaacaactatacctgcgtagatataaatgaatgtgatgccagcaatcaatgtgctcagcagtgctacaacattcttggttcattcatctgtcagtgcaatcaaggatatgagctaagcagtgacaggctcaactgtgaagacattgatgaatgcagaacctcaagctacctgtgtcaatatcaatgtgtcaatgaacctgggaaattctcatgtatgtgcccccagggataccaagtggtgagaagtagaacatgtcaagatataaatgagtgtgagaccacaaatgaatgccgggaggatgaaatgtgttggaattatcatggcggcttccgttgttatccacgaaatccttgtcaagatccctacattctaacaccagagaaccgatgtgtttgcccagtctcaaatgccatgtgccgagaactgccccagtcaatagtctacaaatacatgagcatccgatctgataggtctgtgccatcagacatcttccagatacaggccacaactatttatgccaacaccatcaatacttttcggattaaatctggaaatgaaaatggagagttctacctacgacaaacaagtcctgtaagtgcaatgcttgtgctcgtgaagtcattatcaggaccaagagaacatatcgtggacctggagatgctgacagtcagcagtatagggaccttccgcacaagctctgtgttaagattgacaataatagtggggccattttcattttagtcttttctaagagtcaaccacaggcatttaagtcagccaaagaatattgttaccttaaagcactattttatttatagatatatctagtgcatctacatctctatactgtacactcacccataattcaaacaattacaccatggtataaagtgggcatttaatatgtaaagattcaaagtttgtctttattactatatgtaaattagacattaatccactaaactggtcttcttcaagagagctaagtatacactatctggtgaaacttggattctttcctataaaagtgggaccaagcaatgatgatcttctgtggtgcttaaggaaacttactagagctccactaacagtctcataaggaggcagccatcataaccattgaatagcatgcaagggtaagaatgagtttttaactgctttgtaagaaaatggaaaaggtcaataaagatatatttctttagaaaatggggatctgccatatttgtgttggtttttattttcatatccagcctaaaggtggttgtttattatatagtaataaatcattgctgtacaatatgctggtttctgtagggtatttttaattttgtcagaaattttagattgtgaatattttgtaaaaaacagtaagcaaaattttccagaattcccaaaatgaaccagatatcccctagaaaattatactattgagaaatctatggggaggatatgagaaaataaattccttctaaaccacattggaactgacctgaagaagcaaactcggaaaatataataacatccctgaattcaggacttccacaagatgcagaacaaaatggataaaaggtatttcactggagaagttttaatttctaagtaaaatttaaatcctaacacttcactaatttataactaaaatttctcatcttcgtacttgatgctcacagaggaagaaaatgatgatggtttttattcctggcatccagagtgacagtgaacttaagcaaattaccctcctacccaattctatggaatattttatacgtctccttgtttaaaatgtcactgctttactttgatgtatcatatttttaaataaaaataaatattcctttagaagatca

SEQ ID NO: 129209 - DNA, 558 bp, Homo sapiens
  Payload ID: 5281
  Gene Symbol: EFEMP1
  Gene Name: EGF containing fibulin-like extracellular matrix protein 1
  ENST ID: ENST00000429909
  CDS Start-End: 298-558
agacccacggggctgccctcccctgcgcactcccctcgctgcccgggcccggagcgcagcgcggccgcacaggtatttttgctgtgctgtgcaaggaactctgctagctcaagcctgctttgtaggtgcagtataaaatgcacgctgaatgtcttttgtatgtaaacagcgtagcaggatggagtaacgtgaaatgcaattctacagcagtttttacgtctttgctgcctcgttcgttggctaccgagaaggttcaggagggggaggggagatgagaaagcagattggaaattcacaatgttgaaagcccttttcctaactatgctgactctggcgctggtcaagtcacaggacaccgaagaaaccatcacgtacacgcaatgcactgacggatatgagtgggatcctgtgagacagcaatgcaaagatattgatgaatgtgacattgtcccagacgcttgtaaaggtggaatgaagtgtgtcaaccactatggaggatacctctgccttccgaaaacagcccagattattgtcaataatgaacagcctcagcaggaa

SEQ ID NO: 129210 - DNA, 733 bp, Homo sapiens
  Payload ID: 5281
  Gene Symbol: EFEMP1
  Gene Name: EGF containing fibulin-like extracellular matrix protein 1
  ENST ID: ENST00000438672
  CDS Start-End: 217-733
gacccacggggctgccctcccctgcgcactcccctcgctgcccgggcccggagcgcagcgcggccgcacagcctgctttgtaggtgcagtataaaatgcacgctgaatgtcttttgtatgtaaacagcgtagcaggatggagtaacgtgaaatgcaattctacagcagtttttacgtctttgctgcctcgttcgttggctaccgagaagattcacaatgttgaaagcccttttcctaactatgctgactctggcgctggtcaagtcacaggacaccgaagaaaccatcacgtacacgcaatgcactgacggatatgagtgggatcctgtgagacagcaatgcaaagatattgatgaatgtgacattgtcccagacgcttgtaaaggtggaatgaagtgtgtcaaccactatggaggatacctctgccttccgaaaacagcccagattattgtcaataatgaacagcctcagcaggaaacacaaccagcagaaggaacctcaggggcaaccaccggggttgtagctgccagcagcatggcaaccagtggagtgttgcccgggggtggttttgtggccagtgctgctgcagtcgcaggccctgaaatgcagactggccgaaataactttgtcatccggcggaacccagctgaccctcagcgcattccctccaacccttcccaccgtatccagtgtgcagcaggctacgagcaaagtgaacacaacgtgtgccaag

SEQ ID NO: 129211 - DNA, 559 bp, Homo sapiens
  Payload ID: 5281
  Gene Symbol: EFEMP1
  Gene Name: EGF containing fibulin-like extracellular matrix protein 1
  ENST ID: ENST00000440439
  CDS Start-End: 242-559
agacccacggggctgccctcccctgcgcactcccctcgctgcccgggcccggagcgcagcgcggccgcacaggtatttttgctgtgctgtgcaaggaactctgctagctcaagcgtagcaggatggagtaacgtgaaatgcaattctacagcagtttttacgtctttgctgcctcgttcgttggctaccgagaaggttcaggagggggaggggagatgagaaagcagattggaaattcacaatgttgaaagcccttttcctaactatgctgactctggcgctggtcaagtcacaggacaccgaagaaaccatcacgtacacgcaatgcactgacggatatgagtgggatcctgtgagacagcaatgcaaagatattgatgaatgtgacattgtcccagacgcttgtaaaggtggaatgaagtgtgtcaaccactatggaggatacctctgccttccgaaaacagcccagattattgtcaataatgaacagcctcagcaggaaacacaaccagcagaaggaacctcaggggcaaccaccggggttgtagctgccagcagc

SEQ ID NO: 129212 - DNA, 339 bp, Homo sapiens
  Payload ID: 5281
  Gene Symbol: EFEMP1
  Gene Name: EGF containing fibulin-like extracellular matrix protein 1
  ENST ID: ENST00000424207
  CDS Start-End: 259-339
agacccacggggctgccctcccctgcgcactcccctcgctgcccgggcccggagcgcagcgcggccgcacaggtatttttgctgtgctgtgcaaggaactctgctagctcaagcctgctttgtaggtgcagtataaaatgcacgctgaatgtcttttgtatgtaaacagcgtagcaggatggagtaacgtgaaatgcaattctacagcagtttttacgtctttgctgcctcgttcgttggctaccgagaagattcacaatgttgaaagcccttttcctaactatgctgactctggcgctggtcaagtcacaggacaccgaagaaaccatcacgtacacg

SEQ ID NO: 129213 - DNA, 552 bp, Homo sapiens
  Payload ID: 5281
  Gene Symbol: EFEMP1
  Gene Name: EGF containing fibulin-like extracellular matrix protein 1
  ENST ID: ENST00000452337
  CDS Start-End: 368-552
atcagacccacggggctgccctcccctgcgcactcccctcgctgcccgggcccggagcgcagcgcggccgcacaggtatttttgctgtgctgtgcaaggaactctgctagctcaagcgtagcaggatggagtaacgtgaaatgcaattctacagcagtttttacgtctttgctgcctcgttcgttggctaccgagaaggttcaggagggggaggggagatgagaaagcagattggaagttgagtatggtggagcctcagcctctcccaccctcctttcctcgcttgtgctcactgctaaagttttgttactttccccgcagcagatactaaacattagtttgtcctgtattttctttgagattcacaatgttgaaagcccttttcctaactatgctgactctggcgctggtcaagtcacaggacaccgaagaaaccatcacgtacacgcaatgcactgacggatatgagtgggatcctgtgagacagcaatgcaaagatattgatgaatgtgacattgtcccagacgcttgtaaaggtggaatgaagtgtgt

SEQ ID NO: 129214 - DNA, 547 bp, Homo sapiens
  Payload ID: 5281
  Gene Symbol: EFEMP1
  Gene Name: EGF containing fibulin-like extracellular matrix protein 1
  ENST ID: ENST00000421664
  CDS Start-End: 393-547
acttcgccagatcagacccacggggctgccctcccctgcgcactcccctcgctgcccgggcccggagcgcagcgcggccgcacagcctgctttgtaggtgcagtataaaatgcacgctgaatgtcttttgtatgtaaacagcgtagcaggatggagtaacgtgaaatgcaattctacagcagtttttacgtctttgctgcctcgttcgttggctaccgagaaggttcaggagggggaggggagatgagaaagcagattggaagttgagtatggtggagcctcagcctctcccaccctcctttcctcgcttgtgctcactgctaaagttttgttactttccccgcagcagatactaaacattagtttgtcctgtattttctttgagattcacaatgttgaaagcccttttcctaactatgctgactctggcgctggtcaagtcacaggacaccgaagaaaccatcacgtacacgcaatgcactgacggatatgagtgggatcctgtgagacagcaatgcaaagatattgatgaatgtgacattgtccc

SEQ ID NO: 129215 - DNA, 572 bp, Homo sapiens
  Payload ID: 5281
  Gene Symbol: EFEMP1
  Gene Name: EGF containing fibulin-like extracellular matrix protein 1
  ENST ID: ENST00000439193
  CDS Start-End: 216-572
acttcgccagatcagacccacggggctgccctcccctgcgcactcccctcgctgcccgggcccggagcgcagcgcggccgcacaggtatttttgctgtgctgtgcaaggaactctgctagctcaagcgtagcaggatggagtaacgtgaaatgcaattctacagcagtttttacgtctttgctgcctcgttcgttggctaccgagaagattcacaatgttgaaagcccttttcctaactatgctgactctggcgctggtcaagtcacaggacaccgaagaaaccatcacgtacacgcaatgcactgacggatatgagtgggatcctgtgagacagcaatgcaaagatattgatgaatgtgacattgtcccagacgcttgtaaaggtggaatgaagtgtgtcaaccactatggaggatacctctgccttccgaaaacagcccagattattgtcaataatgaacagcctcagcaggaaacacaaccagcagaaggaacctcaggggcaaccaccggggttgtagctgccagcagcatggcaaccagtggagtgttgcccgggggtggttttgtg

SEQ ID NO: 129216 - DNA, 1007 bp, Homo sapiens
  Payload ID: 5281
  Gene Symbol: EFEMP1
  Gene Name: EGF containing fibulin-like extracellular matrix protein 1
  ENST ID: ENST00000634374
  CDS Start-End: 1-841
aaataactttgtcatccggcggaacccagctgaccctcagcgcattccctccaacccttcccaccgtatccagtgtgcagcaggctacgagcaaagtgaacacaacgtgtgccaagacatagacgagtgcactgcagggacgcacaactgtagagcagaccaagtgtgcatcaatttacggggatcctttgcatgtcagtgccctcctggatatcagaagcgaggggagcagtgcgtagacattgatgaatgcagaacctcaagctacctgtgtcaatatcaatgtgtcaatgaacctgggaaattctcatgtatgtgcccccagggataccaagtggtgagaagtagaacatgtcaagatataaatgagtgtgagaccacaaatgaatgccgggaggatgaaatgtgttggaattatcatggcggcttccgttgttatccacgaaatccttgtcaagatccctacattctaacaccagagaaccgatgtgtttgcccagtctcaaatgccatgtgccgagaactgccccagtcaatagtctacaaatacatgagcatccgatctgataggtctgtgccatcagacatcttccagatacaggccacaactatttatgccaacaccatcaatacttttcggattaaatctggaaatgaaaatggagagttctacctacgacaaacaagtcctgtaagtgcaatgcttgtgctcgtgaagtcattatcaggaccaagagaacatatcgtggacctggagatgctgacagtcagcagtatagggaccttccgcacaagctctgtgttaagattgacaataatagtggggccattttcattttagtcttttctaagagtcaaccacaggcatttaagtcagccaaagaatattgttaccttaaagcactattttatttatagatatatctagtgcatctacatctctatactgtacactcacccataattcaaacaattacaccatggtataaagtgggcatttaatatgt

SEQ ID NO: 129217 - DNA, 1809 bp, Homo sapiens
  Payload ID: 5281
  Gene Symbol: EFEMP1
  Gene Name: EGF containing fibulin-like extracellular matrix protein 1
  ENST ID: ENST00000635671
  CDS Start-End: 74-214
acggggctgccctcccctgcgcactcccctcgctgcccgggcccggagcgcagcgcggccgcacagattcacaatgttgaaagcccttttcctaactatgctgactctggcgctggtcaagtcacaggacaccgaagaaaccatcacgtacacgcaatgcactgacggatatgagtgggatcctgtgagacagcaatgcaaagaagattcctgacttattttattactgaccacagatattgatgaatgtgacattgtcccagacgcttgtaaaggtggaatgaagtgtgtcaaccactatggaggatacctctgccttccgaaaacagcccagattattgtcaataatgaacagcctcagcaggaaacacaaccagcagaaggaacctcaggggcaaccaccggggttgtagctgccagcagcatggcaaccagtggagtgttgcccgggggtggttttgtggccagtgctgctgcagtcgcaggccctgaaatgcagactggccgaaataactttgtcatccggcggaacccagctgaccctcagcgcattccctccaacccttcccaccgtatccagtgtgcagcaggctacgagcaaagtgaacacaacgtgtgccaagacatagacgagtgcactgcagggacgcacaactgtagagcagaccaagtgtgcatcaatttacggggatcctttgcatgtcagtgccctcctggatatcagaagcgaggggagcagtgcgtagacattgatgaatgcagaacctcaagctacctgtgtcaatatcaatgtgtcaatgaacctgggaaattctcatgtatgtgcccccagggataccaagtggtgagaagtagaacatgtcaagatataaatgagtgtgagaccacaaatgaatgccgggaggatgaaatgtgttggaattatcatggcggcttccgttgttatccacgaaatccttgtcaagatccctacattctaacaccagagaaccgatgtgtttgcccagtctcaaatgccatgtgccgagaactgccccagtcaatagtctacaaatacatgagcatccgatctgataggtctgtgccatcagacatcttccagatacaggccacaactatttatgccaacaccatcaatacttttcggattaaatctggaaatgaaaatggagagttctacctacgacaaacaagtcctgtaagtgcaatgcttgtgctcgtgaagtcattatcaggaccaagagaacatatcgtggacctggagatgctgacagtcagcagtatagggaccttccgcacaagctctgtgttaagattgacaataatagtggggccattttcattttagtcttttctaagagtcaaccacaggcatttaagtcagccaaagaatattgttaccttaaagcactattttatttatagatatatctagtgcatctacatctctatactgtacactcacccataattcaaacaattacaccatggtataaagtgggcatttaatatgtaaagattcaaagtttgtctttattactatatgtaaattagacattaatccactaaactggtcttcttcaagagagctaagtatacactatctggtgaaacttggattctttcctataaaagtgggaccaagcaatgatgatcttctgtggtgcttaaggaaacttactagagctccactaacagtctcataaggaggcagccatcataaccattgaatagcatgcaagggtaagaatgagtttttaactgctttgtaagaaaatggaaaaggtcaataaagatatatttctttag

SEQ ID NO: 129218 - DNA, 2034 bp, Homo sapiens
  Payload ID: 5282
  Gene Symbol: EFEMP2
  Gene Name: EGF containing fibulin-like extracellular matrix protein 2
  Uniprot ID: O95967
  ENST ID: ENST00000307998
  CDS Start-End: 232-1563
gcggggggtcggggtccctccccctggcgctggctcaggaatccgccgaagggcgggcggaggcgccggggtgggccgcgccgcggcaggcgggcgggcggggggcgcttcctggggccgcgcgtccagggagctgtgccgtccgcccgtccgtctgcccgcaggcattgcccgagccagccgagccgccagagccgcgggccgcgggggtgtcgcgggcccaaccccaggatgctcccctgcgcctcctgcctacccgggtctctactgctctgggcgctgctactgttgctcttgggatcagcttctcctcaggattctgaagagcccgacagctacacggaatgcacagatggctatgagtgggacccagacagccagcactgccgggatgtcaacgagtgtctgaccatccctgaggcctgcaagggggaaatgaagtgcatcaaccactacgggggctacttgtgcctgccccgctccgctgccgtcatcaacgacctacacggcgagggacccccgccaccagtgcctcccgctcaacaccccaacccctgcccaccaggctatgagcccgacgatcaggacagctgtgtggatgtggacgagtgtgcccaggccctgcacgactgtcgccccagccaggactgccataacttgcctggctcctatcagtgcacctgccctgatggttaccgcaagatcgggcccgagtgtgtggacatagacgagtgccgctaccgctactgccagcaccgctgcgtgaacctgcctggctccttccgctgccagtgcgagccgggcttccagctggggcctaacaaccgctcctgtgttgatgtgaacgagtgtgacatgggggccccatgcgagcagcgctgcttcaactcctatgggaccttcctgtgtcgctgccaccagggctatgagctgcatcgggatggcttctcctgcagtgatattgatgagtgtagctactccagctacctctgtcagtaccgctgcatcaacgagccaggccgtttctcctgccactgcccacagggttaccagctgctggccacacgcctctgccaagacattgatgagtgtgagtctggtgcgcaccagtgctccgaggcccaaacctgtgtcaacttccatgggggctaccgctgcgtggacaccaaccgctgcgtggagccctacatccaggtctctgagaaccgctgtctctgcccggcctccaaccctctatgtcgagagcagccttcatccattgtgcaccgctacatgaccatcacctcggagcggagcgtgcccgctgacgtgttccagatccaggcgacctccgtctaccccggtgcctacaatgcctttcagatccgtgctggaaactcgcagggggacttttacattaggcaaatcaacaacgtcagcgccatgctggtcctcgcccggccggtgacgggcccccgggagtacgtgctggacctggagatggtcaccatgaattccctcatgagctaccgggccagctctgtactgaggctcaccgtctttgtaggggcctacaccttctgaggagcaggagggagccaccctccctgcagctaccctagctgaggagcctgttgtgaggggcagaatgagaaaggcaataaagggagaaagaaagtcctggtggctgaggtgggcgggtcacactgcaggaagcctcaggctggggcagggtggcacttgggggggcaggccaagttcacctaaatgggggtctctatatgttcaggcccaggggcccccattgacaggagctgggagctctgcaccacgagcttcagtcaccccgagaggagaggaggtaacgaggagggcggactccaggccccggcccagagatttggacttggctggcttgcaggggtcctaagaaactccactctggacagcgccaggaggccctgggttccattcctaactctgcctcaaactgtacatttggataagccctagtagttccctgggcctgtttttctataaaacgaggcaactgga

SEQ ID NO: 129219 - DNA, 543 bp, Homo sapiens
  Payload ID: 5282
  Gene Symbol: EFEMP2
  Gene Name: EGF containing fibulin-like extracellular matrix protein 2
  ENST ID: ENST00000527277
  CDS Start-End: 1-163
gcaaatcaacaacgtcagcgccatgctggtcctcgcccggccggtgacgggcccccgggagtacgtgctggacctggagatggtcaccatgaattccctcatgagctaccgggccagctctgtactgaggctcaccgtctttgtaggggcctacaccttctgaggagcaggagggagccaccctccctgcagctaccctagctgaggagcctgttgtgaggggcagaatgagaaaggcaataaagggagaaagaaagtcctggtggctgaggcccaggggcccccattgacaggagctgggagctctgcaccacgagcttcagtcaccccgagaggagaggaggtaacgaggagggcggactccaggccccggcccagagatttggacttggctggcttgcaggggtcctaagaaactccactctggacagcgccaggaggccctgggttccattcctaactctgcctcaaactgtacatttggataagccctagtagttccctgggcctgtttttctataaaacgaggcaactggactgtta

SEQ ID NO: 129220 - DNA, 525 bp, Homo sapiens
  Payload ID: 5282
  Gene Symbol: EFEMP2
  Gene Name: EGF containing fibulin-like extracellular matrix protein 2
  ENST ID: ENST00000524408
  CDS Start-End: 1-208
ctttcagatccgtgctggaaactcgcagggggacttttacattaggcaaatcaacaacgtcagcgccatgctggtcctcgcccggccggtgacgggcccccgggagtacgtgctggacctggagatggtcaccatgaattccctcatgagctaccgggccagctctgtactgaggctcaccgtctttgtaggggcctacaccttctgaggagcaggagggagccaccctccctgcagctaccctagctgaggagcctgttgcccaggggcccccattgacaggagctgggagctctgcaccacgagcttcagtcaccccgagaggagaggaggtaacgaggagggcggactccaggccccggcccagagatttggacttggctggcttgcaggggtcctaagaaactccactctggacagcgccaggaggccctgggttccattcctaactctgcctcaaactgtacatttggataagccctagtagttccctgggcctgtttttctataaaacgaggcaactgg

SEQ ID NO: 129221 - DNA, 1504 bp, Homo sapiens
  Payload ID: 5282
  Gene Symbol: EFEMP2
  Gene Name: EGF containing fibulin-like extracellular matrix protein 2
  ENST ID: ENST00000528176
  CDS Start-End: 69-1379
ggcattgcccgagccagccgagccgccagagccgcgggccgcgggggtgtcgcgggcccaaccccaggatgctcccctgcgcctcctgcctacccgggtctctactgctctgggcgctgctactgttgctcttgggatcagcttctcctcaggattctgaagagcccgacagctacacggaatgcacagatggctatgagtgggacccagacagccagcactgccgggatgtcaacgagtgtctgaccatccctgaggcctgcaagggggaaatgaagtgcatcaaccactacgggggctacttgtgcctgccccgctccgctgccgtcatcaacgacctacacggcgagggacccccgccaccagtgcctcccgctcaacaccccaacccctgcccaccaggctatgagcccgacgatcaggacagctgtgtggatgtggacgagtgtgcccaggccctgcacgactgtcgccccagccaggactgccataacttgcctggctcctatcagtgcacctgccctgatggttaccgcaagatcgggcccgagtgtgtggacatagacgagtgccgctaccgctactgccagcaccgctgcgtgaacctgcctggctccttccgctgccagtgcgagccgggcttccagctggggcctaacaaccgctcctgtgttgatgtgaacgagtgtgacatgggggccccatgcgagcagcgctgcttcaactcctatgggaccttcctgtgtcgctgccaccagggctatgagctgcatcgggatggcttctcctgcagtgatattgatgagtgtagctactccagctacctctgtcagtaccgctgcatcaacgagccaggccgtttctcctgccactgcccacagggttaccagctgctggccacacgcctctgccaagacattgatgagtgtgagtctggtgcgcaccagtgctccgaggcccaaacctgtgtcaacttccatgggggctaccgctgcgtggacaccaaccgctgcgtggagccctacatccaggtctctgagaaccgctgtctctgcccggcctccaaccctctatgtcgagagcagccttcatccattgtgcaccgctacatgaccatcacctcggagcggagcgtgcccgctgacgtgttccagatccaggcgacctccgtctaccccggtgcctacaatgcctttcagatccgtgctggaaactcgcagggggacttttacattagggcccaggggcccccattgacaggagctgggagctctgcaccacgagcttcagtcaccccgagaggagaggaggtaacgaggagggcggactccaggccccggcccagagatttggacttggctggcttgcaggggtcctaagaaactccactctggacagcgccaggaggccctgggttccattcctaactctgcctcaaactgtacatttggataagccctagtagttccctgggcctgtttttctataaaacgaggcaactgga

SEQ ID NO: 129222 - DNA, 1813 bp, Homo sapiens
  Payload ID: 5282
  Gene Symbol: EFEMP2
  Gene Name: EGF containing fibulin-like extracellular matrix protein 2
  Uniprot ID: O95967
  ENST ID: ENST00000531972
  CDS Start-End: 137-1468
gggcggggggcgcttcctggggccgcgcgtccagggagctgtgccgtccgcccgtccgtctgcccgcaggcattgcccgagccagccgagccgccagagccgcgggccgcgggggtgtcgcgggcccaaccccaggatgctcccctgcgcctcctgcctacccgggtctctactgctctgggcgctgctactgttgctcttgggatcagcttctcctcaggattctgaagagcccgacagctacacggaatgcacagatggctatgagtgggacccagacagccagcactgccgggatgtcaacgagtgtctgaccatccctgaggcctgcaagggggaaatgaagtgcatcaaccactacgggggctacttgtgcctgccccgctccgctgccgtcatcaacgacctacacggcgagggacccccgccaccagtgcctcccgctcaacaccccaacccctgcccaccaggctatgagcccgacgatcaggacagctgtgtggatgtggacgagtgtgcccaggccctgcacgactgtcgccccagccaggactgccataacttgcctggctcctatcagtgcacctgccctgatggttaccgcaagatcgggcccgagtgtgtggacatagacgagtgccgctaccgctactgccagcaccgctgcgtgaacctgcctggctccttccgctgccagtgcgagccgggcttccagctggggcctaacaaccgctcctgtgttgatgtgaacgagtgtgacatgggggccccatgcgagcagcgctgcttcaactcctatgggaccttcctgtgtcgctgccaccagggctatgagctgcatcgggatggcttctcctgcagtgatattgatgagtgtagctactccagctacctctgtcagtaccgctgcatcaacgagccaggccgtttctcctgccactgcccacagggttaccagctgctggccacacgcctctgccaagacattgatgagtgtgagtctggtgcgcaccagtgctccgaggcccaaacctgtgtcaacttccatgggggctaccgctgcgtggacaccaaccgctgcgtggagccctacatccaggtctctgagaaccgctgtctctgcccggcctccaaccctctatgtcgagagcagccttcatccattgtgcaccgctacatgaccatcacctcggagcggagcgtgcccgctgacgtgttccagatccaggcgacctccgtctaccccggtgcctacaatgcctttcagatccgtgctggaaactcgcagggggacttttacattaggcaaatcaacaacgtcagcgccatgctggtcctcgcccggccggtgacgggcccccgggagtacgtgctggacctggagatggtcaccatgaattccctcatgagctaccgggccagctctgtactgaggctcaccgtctttgtaggggcctacaccttctgaggagcaggagggagccaccctccctgcagctaccctagctgaggagcctgttgtgaggggcagaatgagaaaggcccaggggcccccattgacaggagctgggagctctgcaccacgagcttcagtcaccccgagaggagaggaggtaacgaggagggcggactccaggccccggcccagagatttggacttggctggcttgcaggggtcctaagaaactccactctggacagcgccaggaggccctgggttccattcctaactctgcctcaaactgtacatttggataagccctagtagttccctgggcctgtttttctataaaacgaggcaactggactgtta

SEQ ID NO: 129223 - DNA, 907 bp, Homo sapiens
  Payload ID: 5282
  Gene Symbol: EFEMP2
  Gene Name: EGF containing fibulin-like extracellular matrix protein 2
  ENST ID: ENST00000526624
  CDS Start-End: 301-907
gggcgtgggccggagtctcggccgagtccgcggcagcgtagcgcccacagaggcccgcgctcctcggccttcgccgcaggggcgcggggcgggggcggggtggccggggcgggtgggcctgggacccgggcctgggacctgggcctgtgaggagtcggcccccagccctgggaggccccgaggcccaagcacggtcctgagcgggcagtggcgggggctgggctcgggctcccggtacagggagttgaggtgccgcgggcagaggcccctgacccgtgtccaccatctcgcagccccaggatgctcccctgcgcctcctgcctacccgggtctctactgctctgggcgctgctactgttgctcttgggatcagcttctcctcaggattctgaagagcccgacagctacacggaatgcacagatggctatgagtgggacccagacagccagcactgccgggatgtcaacgagtgtctgaccatccctgaggcctgcaagggggaaatgaagtgcatcaaccactacgggggctacttgtgcctgccccgctccgctgccgtcatcaacgacctacacggcgagggacccccgccaccagtgcctcccgctcaacaccccaacccctgcccaccaggctatgagcccgacgatcaggacagctgtgtggatgtggacgagtgtgcccaggccctgcacgactgtcgccccagccaggactgccataacttgcctggctcctatcagtgcacctgccctgatggttaccgcaagatcgggcccgagtgtgtggacatagacgagtgccgctaccgctactgccagcaccgctgcgtgaacctgcctggctccttccgctgccagtgcgagccgggcttccagctggggcctaacaaccgctcctgtgttg

SEQ ID NO: 129224 - DNA, 1040 bp, Homo sapiens
  Payload ID: 5282
  Gene Symbol: EFEMP2
  Gene Name: EGF containing fibulin-like extracellular matrix protein 2
  ENST ID: ENST00000533347
  CDS Start-End: 268-501
ccgggtaggggcctgtggctggccgggggcggagaagcggggggtcggggtccctccccctggcgctggctcaggaatccgccgaagggcgggcggaggcgccggggtgggccgcgccgcggcaggcgggcgggcggggggcgcttcctggggccgcgcgtccagggagctgtgccgtccgcccgtccgtctgcccgcaggcattgcccgagccagccgagccgccagagccgcgggccgcgggggtgtcgcgggcccaaccccaggatgctcccctgcgcctcctgcctacccgggtctctactgctctgggcgctgctactgttgctcttgggatcagcttctcctcaggattctgaagagcccgacagctacacggaatgcacagatggctatgagtgggacccagacagccagcactgccgggggccagcccaggagactggctgtgcccagcaggcccctctctgcagatgtcaacgagtgtctgaccatccctgaggcctgcaagggggaaatgaagtgcatcaaccactacgggggctacttgtgcctgccccgctccgctgccgtcatcaacgacctacacggcgagggacccccgccaccagtgcctcccgctcaacaccccaacccctgcccaccaggctatgagcccgacgatcaggacagctgtgtggatgtggacgagtgtgcccaggccctgcacgactgtcgccccagccaggactgccataacttgcctggctcctatcagtgcacctgccctgatggttaccgcaagatcgggcccgagtgtgtggacatagacgagtgccgctaccgctactgccagcaccgctgcgtgaacctgcctggctccttccgctgccagtgcgagccgggcttccagctggggcctaacaaccgctcctgtgttgatgtgaacgagtgtgacatgggggccccatgcgagcagcgctgcttcaactcctatgggaccttcctgtgtcgctgccaccagggctatgagctgcatcgggatggcttctcctgcagtg

SEQ ID NO: 129225 - DNA, 614 bp, Homo sapiens
  Payload ID: 5282
  Gene Symbol: EFEMP2
  Gene Name: EGF containing fibulin-like extracellular matrix protein 2
  ENST ID: ENST00000527378
  CDS Start-End: 66-614
gacgctggtgcgaggaggtcgaggaggcgccttggcacccgactctggcatcccgcacccccaggatgctcccctgcgcctcctgcctacccgggtctctactgctctgggcgctgctactgttgctcttgggatcagcttctcctcaggattctgaagagcccgacagctacacggaatgcacagatggctatgagtgggacccagacagccagcactgccgggatgtcaacgagtgtctgaccatccctgaggcctgcaagggggaaatgaagtgcatcaaccactacgggggctacttgtgcctgccccgctccgctgccgtcatcaacgacctacacggcgagggacccccgccaccagtgcctcccgctcaacaccccaacccctgcccaccaggctatgagcccgacgatcaggacagctgtgtggatgtggacgagtgtgcccaggccctgcacgactgtcgccccagccaggactgccataacttgcctggctcctatcagtgcacctgccctgatggttaccgcaagatcgggcccgagtgtgtggacatagacgagtgccgctaccgctactgccagcaccgctgcgtgaacctgcctggctcc

SEQ ID NO: 129226 - DNA, 674 bp, Homo sapiens
  Payload ID: 5282
  Gene Symbol: EFEMP2
  Gene Name: EGF containing fibulin-like extracellular matrix protein 2
  ENST ID: ENST00000531645
  CDS Start-End: 1-549
gatgagtgtgagtctggtgcgcaccagtgctccgaggcccaaacctgtgtcaacttccatgggggctaccgctgcgtggacaccaaccgctgcgtggagccctacatccaggtctctgagaaccgctgtctctgcccggcctccaaccctctatgtcgagagcagccttcatccattgtgcaccgctacatgaccatcacctcggagcggagcgtgcccgctgacgtgttccagatccaggcgacctccgtctaccccggtgcctacaatgcctttcagatccgtgctggaaactcgcagggggacttttacattagggggcctacaccttctgaggagcaggagggagccaccctccctgcagctaccctagctgaggagcctgttgtgaggggcagaatgagaaaggcccaggggcccccattgacaggagctgggagctctgcaccacgagcttcagtcaccccgagaggagaggaggtaacgaggagggcggactccaggccccggcccagagatttggacttggctggcttgcaggggtcctaagaaactccactctggacagcgccaggaggccctgggttccattcctaactctgcctcaaactgtacatttggataagccctagtagttccctgggcctgtttttctataaaacgaggcaactgga

SEQ ID NO: 129227 - DNA, 408 bp, Homo sapiens
  Payload ID: 5282
  Gene Symbol: EFEMP2
  Gene Name: EGF containing fibulin-like extracellular matrix protein 2
  ENST ID: ENST00000530806
  CDS Start-End: 179-408
agctgctggccacacgcctctgccaagacattgatgagtgtgagtctggtgcgcaccagtgctccgaggcccaaacctgtgtcaacttccatgggggctaccgctgcgtggacaccaaccgctgcgtggagccctacatccaggtctctgagaaccttcatccattgtgcaccgctacatgaccatcacctcggagcggagcgtgcccgctgacgtgttccagatccaggcgacctccgtctaccccggtgcctacaatgcctttcagatccgtgctggaaactcgcagggggacttttacattaggcaaatcaacaacgtcagcgccatgctggtcctcgcccggccggtgacgggcccccgggagtacgtgctggacctggagatggtcaccatgaattccctcat

SEQ ID NO: 129228 - DNA, 472 bp, Homo sapiens
  Payload ID: 5282
  Gene Symbol: EFEMP2
  Gene Name: EGF containing fibulin-like extracellular matrix protein 2
  ENST ID: ENST00000526911
  CDS Start-End: 1-225
tccattgtgcaccgctacatgaccatcacctcggagcggagcgtgcccgctgacgtgttccagatccaggcgacctccgtctaccccggtgcctacaatgcctttcagatccgtgctggaaactcgcagggggacttttacattaggcaaatcaacaacgtcagcgccatgctggtcctcgcccggccggtgacgggcccccgggagcccaggggcccccattgacaggagctgggagctctgcaccacgagcttcagtcaccccgagaggagaggaggtaacgaggagggcggactccaggccccggcccagagatttggacttggctggcttgcaggggtcctaagaaactccactctggacagcgccaggaggccctgggttccattcctaactctgcctcaaactgtacatttggataagccctagtagttccctgggcctgtttttctataaaacgaggcaactgga

SEQ ID NO: 129229 - DNA, 566 bp, Homo sapiens
  Payload ID: 5282
  Gene Symbol: EFEMP2
  Gene Name: EGF containing fibulin-like extracellular matrix protein 2
  ENST ID: ENST00000530850
  CDS Start-End: 66-242
attgcccgagccagccgagccgccagagccgcgggccgcgggggtgtcgcgggcccaaccccaggatgctcccctgcgcctcctgcctacccgggtctctactgctctgggcgctgctactgttgctcttgggatcagcttctcctcaggattctgaagagcccgacagctacacggtggggacagtgagggccgctggcctgggacaggaaggatgtcaacgagtgtctgaccatccctgaggcctgcaagggggaaatgaagtgcatcaaccactacgggggctacttgtgcctgccccgctccgctgccgtcatcaacgacctacacggcgagggacccccgccaccagtgcctcccgctcaacaccccaacccctgcccaccaggctatgagcccgacgatcaggacagctgtgtggatgtggacgagtgtgcccaggccctgcacgactgtcgccccagccaggactgccataacttgcctggctcctatcagtgcacctgccctgatggttaccgcaagatcgggcccgagtgtgtggacatagacgagtgccgctaccg

SEQ ID NO: 129230 - DNA, 4138 bp, Homo sapiens
  Payload ID: 5283
  Gene Symbol: EOGT
  Gene Name: EGF domain-specific O-linked N-acetylglucosamine (GlcNAc) transferase
  Uniprot ID: Q5NDL2
  ENST ID: ENST00000295571
  CDS Start-End: 406-1737
gccgtctcctccgcctcctcctcggtagttcacggctgccccggctccaggcctgtggaaatcgaatcaagggtttctggagtggagtgattccagctgctttgagctgaaggaaaagtagcctggccagtaaagcgtccgtgtgctggaggagtgcagccacccatcccggcgggccttgcaggacgaccgacaccaggaaggctttgtgccaggcccagcagccacccccagccgccttatgcaagtgggtacatgccctcgccagacgccagctttctgatctgcgtctttagattttttccatcgcctaagcgttacttctccactgatcggttttagagacctgaaacatcacagaagcttctgagtggttctgaagattcaagaggtttgcaggttgctatgttaatgttgtttgtctttggagtcttacttcatgaagtctcactgagtggtcagaatgaagctcctcctaatactcacagcattccaggcgaacctctgtataactatgccagcatccgcttgccagaggagcacattcccttctttttgcacaacaataggcatattgccactgtctgtaggaaagactctctttgtccatataagaaacacctagagaagctaaagtactgctggggttatgagaaatcctgcaaaccagagttcaggtttggttacccagtttgcagctatgtcgacatgggatggacggacactcttgagtcagctgaggacatattttggaaacaagctgactttggatatgccagagagaggctggaggagatgcatgtgctctgtcagcctaaggaaacgagtgactcaagtctggtgtgttcccgttatcttcagtactgcagagcaaccaatctctatcttgatttaagaaacatcaagagaaatcatgacagatttaaggaggactttttccagagtggtgaaattggagggcactgtaaacttgacatccgtacattgacgtctgaaggtcagcgcaaaagccctctgcagtcatggtttgctgagctacaaagctatactcagctcaacttcagacctatagaagatgctaaatgtgacattgtcattgaaaaaccaacatatttcatgaaattagatgcaggtgttaacatgtatcaccacttctgtgatttcatcaatctttatattactcagcacgttaataactcattcagtactgacgtgtacatcgtgatgtgggacaccgatggaaaaattcgagtcaccattcttgcacggagcacagaataccggaaaatccttaaccaaaatgagcttgtaaatgcactgaaaacagtatctacatttgaagtccagattgttgattacaagtatagagaacttgggtttttagatcaactaaggatcacacacaacacggacatatttattggaatgcatggagctggtctgacccatttacttttccttccagactgggctgctgtatttgaactgtacaactgtgaagatgaacgctgttacttagacttggccaggctgagaggcgttcactacatcacttggcgacggcagaacaaagtctttcctcaggataagggccaccatccaaccctgggggagcacccgaagttcaccaactactctttcgatgtagaagaatttatgtatcttgtccttcaggctgcagaccacgtattgcaacacccaaagtggccatttaagaagaaacatgatgagctataaatatgctgagtctgtttgcaaaaagagagtgtttaaacactccaacacccagacttagaattaaatcagtaaagcaatctgttatttcctatccccgaattaccttttctatgccaaaacataccttcaggatattgttatgtgttgtatagatgttaagtgtttcatgtggtttttgtgtcattgctatttatcaatagcaataattttgcactgaaaactttttatagttcaaaaattaagcatggactccccagtatactttaactttctttctttctttttttttttttggagacagagtctcactgtcacccaggctggagtgcagtggcatgatctcagtttatgcaacttctgcctccccaggttcaagcgattcttttgcctcagccacctgactagctgggattgcagcctgcaccaccacacctggctaaatttttgttgttgtcgttgagatacagtttcactctgtcacccaggctggagtgcagtggcatgatctcagctcactgcaacctctgccttctggattcaagtgattcttgtgccttagcctcccaagtagctgggattacaggcgtgcaccaccacgcccagttgatttttgtatttttgatagagacggagtttcaccatgttggccaggctggtctcgaactctgggttcaagaaatcctcccaccttgcctcccaaagtgctgggattacaggtgtgagccaccacgcatggccctgaactttctctttttaggaataccaaagttttcaactttttcagctttagaatttgtaaatatttttgtagaatatcatatgactgtaattccagagtgttccaacttgtttatgatatatttgggtaaatttacaactgttcttttatttgccataatctggttataacactgtttgtggtaggaaaggaaaacatgcaaaacatacacacacacacacacacacacacacacacgcagagttgtgattctcagtaccaagctataggaccatgttatagatcagcgtttagtcacctccaggttatatgcatcgagaacctgaataaatcatgccactatattaatttatattacatgtttcatatttaaatcatgttttcctaaaatgtagcaactacatgtgataaaagcaaattagaacattctgtaggactgtcttgcataccttctgtctggtttccactgattccttcttagccatggagagcatttgtgattaattaatttatatatgaaataatggtttccattttatgcgagtatttgtaactgcatataccagtgcgtgtgcgtctacctctgtcagcatgaaagtattccagtctttaatttcaaaaacttcaaattagcctcatgaagagaatttttccctgtgaaaagtaagaccaagaaaaaacaaactaaagacatgtgacttattcaatgaaagtgaaaaagaagctctaaaacagtgtcattgattaaaaagaatatctggaatgtagccccactctttgagtgggattcatttcttactgcttatgaactttcaatttagtagtcagaaaccatggatttattttactgcacaatgtgaagtttacattttattaacacttgagtagtctgatttagagactagttacttctattttttaaaataatggagtaacaaattacagaatagctaaataattttttaaaaatattttacagttgtaaaaaatatccatcagaaaaatgacacacaaaacaaaatatctggacctttacagaagacgtttgctgacccccactttaaaggattggaacagtcttctagaattgaggaatatttattaaaatacctgtaaagaaaatagtgaatcactgtagcaatggctttgattcagaccttaaaatcacataagaagaattacaacatgttatggatttttaagtggcaggtattgtaactgttttttgtgtgcaaaatactgagtaaccactgggaaaatatttcagatgaaagggatgacaaaagcatgttgcgctttgcatcagcaaggcattgacttctgaaaaaatgatctgaaaaaagtttcaccgtttgtcttcttacctcattttaagaagcatgtgaaaatgggatactatagactactgagaatttcagaaattgagaacaatttcataataaaacggctatatttgaagagagaatacattttatataaacaggaaaatacatttgacactttatggaattttatgagactttttgtgggaacagaaggtcttcaaattgtaaaatgtaaagattgctctttttattaagtctttaacagggatgtatttcattgtatgttttgggtatggctttggaataaatcattttatattttatttgaatatcagaa

SEQ ID NO: 129231 - DNA, 4731 bp, Homo sapiens
  Payload ID: 5283
  Gene Symbol: EOGT
  Gene Name: EGF domain-specific O-linked N-acetylglucosamine (GlcNAc) transferase
  Uniprot ID: Q5NDL2
  ENST ID: ENST00000383701
  CDS Start-End: 744-2327
ctttccggccctggtgagggagctggcggactcgcgcgaacgttcgcgggagaacgccaggaagggcagatggttcctcgactctgagcccctccctgctgcgctcgccgggtcgaggccgctcgccgggctgaagccgctccgagcgtcgggccccgcgccctggccctcctgggtgtagtcccggtcctgcctctgcggggcccgagcccgcccacggcgccggctggccaaggtgtcccagctgctccttggcgccccctggcccagctcccgcgcccgaggtttccggtgagcggcagtagccggttatgacgactccctcctctggaacagccgccgtctcctccgcctcctcctcggtagttcacggctgccccggctccaggcctgtggaaatcgaatcaagggtttctggagtggagtgattccagctgctttgagctgaaggaaaagtagcctggccagtaaagcgtccgtgtgctggaggagtgcagccacccatcccggcgggccttgcaggacgaccgacaccaggaaggctttgtgccaggcccagcagccacccccagccgccttatgcaagtgggtacatgccctcgccagacgccagctttctgatctgcgtctttagattttttccatcgcctaagcgttacttctccactgatcggttttagagacctgaaacatcacagaagcttctgagtggttctgaagattcaagaggtttgcaggttgctatgttaatgttgtttgtctttggagtcttacttcatgaagtctcactgagtggtcagaatgaagctcctcctaatactcacagcattccaggcgaacctctgtataactatgccagcatccgcttgccagaggagcacattcccttctttttgcacaacaataggcatattgccactgtctgtaggaaagactctctttgtccatataagaaacacctagagaagctaaagtactgctggggttatgagaaatcctgcaaaccagagttcaggtttggttacccagtttgcagctatgtcgacatgggatggacggacactcttgagtcagctgaggacatattttggaaacaagctgactttggatatgccagagagaggctggaggagatgcatgtgctctgtcagcctaaggaaacgagtgactcaagtctggtgtgttcccgttatcttcagtactgcagagcaaccaatctctatcttgatttaagaaacatcaagagaaatcatgacagatttaaggaggactttttccagagtggtgaaattggagggcactgtaaacttgacatccgtacattgacgtctgaaggtcagcgcaaaagccctctgcagtcatggtttgctgagctacaaagctatactcagctcaacttcagacctatagaagatgctaaatgtgacattgtcattgaaaaaccaacatatttcatgaaattagatgcaggtgttaacatgtatcaccacttctgtgatttcatcaatctttatattactcagcacgttaataactcattcagtactgacgtgtacatcgtgatgtgggacaccagttcttacggatatggtgacctattctccgacacatggaatgcatttactgattatgacgttatacatttgaaaacttatgattccaaaagggtatgttttaaagaagctgttttttcattactcccccgcatgaggtatgggctgttctataatactcctctgatatctggctgtcaaaatactggactattcagggcatttgcccagcatgtactacacagactaaacatcacacaagaaggacctaaggatggaaaaattcgagtcaccattcttgcacggagcacagaataccggaaaatccttaaccaaaatgagcttgtaaatgcactgaaaacagtatctacatttgaagtccagattgttgattacaagtatagagaacttgggtttttagatcaactaaggatcacacacaacacggacatatttattggaatgcatggagctggtctgacccatttacttttccttccagactgggctgctgtatttgaactgtacaactgtgaagatgaacgctgttacttagacttggccaggctgagaggcgttcactacatcacttggcgacggcagaacaaagtctttcctcaggataagggccaccatccaaccctgggggagcacccgaagttcaccaactactctttcgatgtagaagaatttatgtatcttgtccttcaggctgcagaccacgtattgcaacacccaaagtggccatttaagaagaaacatgatgagctataaatatgctgagtctgtttgcaaaaagagagtgtttaaacactccaacacccagacttagaattaaatcagtaaagcaatctgttatttcctatccccgaattaccttttctatgccaaaacataccttcaggatattgttatgtgttgtatagatgttaagtgtttcatgtggtttttgtgtcattgctatttatcaatagcaataattttgcactgaaaactttttatagttcaaaaattaagcatggactccccagtatactttaactttctttctttctttttttttttttggagacagagtctcactgtcacccaggctggagtgcagtggcatgatctcagtttatgcaacttctgcctccccaggttcaagcgattcttttgcctcagccacctgactagctgggattgcagcctgcaccaccacacctggctaaatttttgttgttgtcgttgagatacagtttcactctgtcacccaggctggagtgcagtggcatgatctcagctcactgcaacctctgccttctggattcaagtgattcttgtgccttagcctcccaagtagctgggattacaggcgtgcaccaccacgcccagttgatttttgtatttttgatagagacggagtttcaccatgttggccaggctggtctcgaactctgggttcaagaaatcctcccaccttgcctcccaaagtgctgggattacaggtgtgagccaccacgcatggccctgaactttctctttttaggaataccaaagttttcaactttttcagctttagaatttgtaaatatttttgtagaatatcatatgactgtaattccagagtgttccaacttgtttatgatatatttgggtaaatttacaactgttcttttatttgccataatctggttataacactgtttgtggtaggaaaggaaaacatgcaaaacatacacacacacacacacacacacacacacacgcagagttgtgattctcagtaccaagctataggaccatgttatagatcagcgtttagtcacctccaggttatatgcatcgagaacctgaataaatcatgccactatattaatttatattacatgtttcatatttaaatcatgttttcctaaaatgtagcaactacatgtgataaaagcaaattagaacattctgtaggactgtcttgcataccttctgtctggtttccactgattccttcttagccatggagagcatttgtgattaattaatttatatatgaaataatggtttccattttatgcgagtatttgtaactgcatataccagtgcgtgtgcgtctacctctgtcagcatgaaagtattccagtctttaatttcaaaaacttcaaattagcctcatgaagagaatttttccctgtgaaaagtaagaccaagaaaaaacaaactaaagacatgtgacttattcaatgaaagtgaaaaagaagctctaaaacagtgtcattgattaaaaagaatatctggaatgtagccccactctttgagtgggattcatttcttactgcttatgaactttcaatttagtagtcagaaaccatggatttattttactgcacaatgtgaagtttacattttattaacacttgagtagtctgatttagagactagttacttctattttttaaaataatggagtaacaaattacagaatagctaaataattttttaaaaatattttacagttgtaaaaaatatccatcagaaaaatgacacacaaaacaaaatatctggacctttacagaagacgtttgctgacccccactttaaaggattggaacagtcttctagaattgaggaatatttattaaaatacctgtaaagaaaatagtgaatcactgtagcaatggctttgattcagaccttaaaatcacataagaagaattacaacatgttatggatttttaagtggcaggtattgtaactgttttttgtgtgcaaaatactgagtaaccactgggaaaatatttcagatgaaagggatgacaaaagcatgttgcgctttgcatcagcaaggcattgacttctgaaaaaatgatctgaaaaaagtttcaccgtttgtcttcttacctcattttaagaagcatgtgaaaatgggatactatagactactgagaatttcagaaattgagaacaatttcataataaaacggctatatttgaagagagaatacattttatataaacaggaaaatacatttgacactttatggaattttatgagactttttgtgggaacagaaggtcttcaaattgtaaaatgtaaagattgctctttttattaagtctttaacagggatgtatttcattgtatgttttgggtatggctttggaataaatcattttatattttatttgaatatcagaacca

SEQ ID NO: 129232 - DNA, 2243 bp, Homo sapiens
  Payload ID: 5283
  Gene Symbol: EOGT
  Gene Name: EGF domain-specific O-linked N-acetylglucosamine (GlcNAc) transferase
  ENST ID: ENST00000403140
  CDS Start-End: 433-1053
atgacgactccctcctctggaacagccgccgtctcctccgcctcctcctcggtagttcacggctgccccggctccaggcctgtggaaatcgaatcaagggtttctggagtggagtgattccagctgctttgagctgaaggaaaagtagcctggccagtaaagcgtccgtgtgctggaggagtgcagccacccatcccggcgggccttgcaggacgaccgacaccaggaaggctttgtgccaggcccagcagccacccccagccgccttatgcaagtgggtacatgccctcgccagacgccagctttctgatctgcgtctttagattttttccatcgcctaagcgttacttctccactgatcggttttagagacctgaaacatcacagaagcttctgagtggttctgaagattcaagaggtttgcaggttgctatgttaatgttgtttgtctttggagtcttacttcatgaagtctcactgagtggtcagaatgaagctcctcctaatactcacagcattccaggcgaacctctgtataactatgccagcatccgcttgccagaggagcacattcccttctttttgcacaacaataggcatattgccactgtctgtaggaaagactctctttgtccatataagaaacacctagagaagctaaagtactgctggggttatgagaaatcctgcaaaccagagttcaggtttggttacccagtttgcagctatgtcgacatgggatggacggacactcttgagtcagctgaggacatattttggaaacaagctgactttggatatgccagagagaggctggaggagatgcatgtgctctgtcagcctaaggaaacgagtgactcaagtctggtgtgttcccgttatcttcagtactgcagagcaaccaatctctatcttgatttaagaaacatcaagagaaatcatgacagatttaaggaggactttttccagagtggtgaaattggagggcactgtaaacttgacatccgtacattgacgtctgaaggtcagcgcaaaagccctctgcagtcatgagttcttacggatatggtgacctattctccgacacatggaatgcatttactgattatgacgttatacatttgaaaacttatgattccaaaagggtatgttttaaagaagctgttttttcattactcccccgcatgaggtatgggctgttctataatactcctctgatatctggctgtcaaaatactggactattcagggcatttgcccagcatgtactacacagactaaacatcacacaagaaggacctaaggatggaaaaattcgagtcaccattcttgcacggagcacagaataccggaaaatccttaaccaaaatgagcttgtaaatgcactgaaaacagtatctacatttgaagtccagattgttgattacaagtatagagaacttgggtttttagatcaactaaggatcacacacaacacggacatatttattggaatgcatggagctggtctgacccatttacttttccttccagactgggctgctgtatttgaactgtacaactgtgaagatgaacgctgttacttagacttggccaggctgagaggcgttcactacatcacttggcgacggcagaacaaagtctttcctcaggataagggccaccatccaaccctgggggagcacccgaagttcaccaactactctttcgatgtagaagaatttatgtatcttgtccttcaggctgcagaccacgtattgcaacacccaaagtggccatttaagaagaaacatgatgagctataaatatgctgagtctgtttgcaaaaagagagtgtttaaacactccaacacccagacttagaattaaatcagtaaagcaatctgttatttcctatccccgaattaccttttctatgccaaaacataccttcaggatattgttatgtgttgtatagatgttaagtgtttcatgtggtttttgtgtcattgctatttatcaatagcaataattttgcactgaaaactttttatagttcaaaaattaagcatggactccccagtatactttaactttctttctttctttttttttttttggagacagagtctcactgtcacccaggctggagtgcagtggcatgatctcagtttatgcaacttctgcctccccaggttcaagcgattcttttgcctcagccacctgactagctgggattgcagcctgcaccaccacacctggct

SEQ ID NO: 129233 - DNA, 924 bp, Homo sapiens
  Payload ID: 5283
  Gene Symbol: EOGT
  Gene Name: EGF domain-specific O-linked N-acetylglucosamine (GlcNAc) transferase
  ENST ID: ENST00000424374
  CDS Start-End: 529-924
gtagttcacggctgccccggctccaggcctgtggaaatcgaatcaagggtttctggagtggagtgattccagctgctttgagctgaaggaaaagtagcctggccagtaaagcgtccgtgtgctggaggagtgcagccacccatcccggcgggccttgcaggacgaccgacaccaggaaggctttgtgccaggcccagcagccacccccagccgccttatgcaagtgggtacatgccctcgccagacgccagctttctgatctgcgtctttagattttttccatcgcctaagcgttacttctccactgatcggtgagtttagtgatggccagagctcactggaggacaatggacttggataaccaaaggtcagggcttggtcataacaatgactttattaccgggaaggacgagtcaaaaaataggaaggcctgggaaccctcaggctcgccactctaggttttagagacctgaaacatcacagaagcttctgagtggttctgaagattcaagaggtttgcaggttgctatgttaatgttgtttgtctttggagtcttacttcatgaagtctcactgagtggtcagaatgaagctcctcctaatactcacagcattccaggcgaacctctgtataactatgccagcatccgcttgccagaggagcacattcccttctttttgcacaacaataggcatattgccactgtctgtaggaaagactctctttgtccatataagaaacacctagagaagctaaagtactgctggggttatgagaaatcctgcaaaccagagttcaggtttggttacccagtttgcagctatgtcgacatgggatggacggacactcttgagtcagctgaggacatattttggaaacaagctgactttggatatgccagagagaggctggaggagatgcat

SEQ ID NO: 129234 - DNA, 736 bp, Homo sapiens
  Payload ID: 5283
  Gene Symbol: EOGT
  Gene Name: EGF domain-specific O-linked N-acetylglucosamine (GlcNAc) transferase
  ENST ID: ENST00000456376
  CDS Start-End: 366-736
ggtgagcggcagtagccggttatgacgactccctcctctggaacagccgccgtctcctccgcctcctcctcggtagttcacggctgccccggctccaggcctgtggaaatcgaatcaagggtttctggagtggagtgattccagctgctttgagctgaaggaaaagtagcctggccagtaaagcgtccgtgtgctggaggagtgcagccacccatcccggcgggccttgcaggacgaccgacaccaggaaggctttgtgccaggcccagcagccacccccagccgccttatgcaagttttagagacctgaaacatcacagaagcttctgagtggttctgaagattcaagaggtttgcaggttgctatgttaatgttgtttgtctttggagtcttacttcatgaagtctcactgagtggtcagaatgaagctcctcctaatactcacagcattccaggcgaacctctgtataactatgccagcatccgcttgccagaggagcacattcccttctttttgcacaacaataggcatattgccactgtctgtaggaaagactctctttgtccatataagaaacacctagagaagctaaagtactgctggggttatgagaaatcctgcaaaccagagttcaggtttggttacccagtttgcagctatgtcgacatgggatggacggacactcttgagtcagctgaggacatattttggaaacaagctgactttggatatgc

SEQ ID NO: 129235 - DNA, 1584 bp, Homo sapiens
  Payload ID: 5283
  Gene Symbol: EOGT
  Gene Name: EGF domain-specific O-linked N-acetylglucosamine (GlcNAc) transferase
  Uniprot ID: Q5NDL2
  ENST ID: ENST00000540764
  CDS Start-End: 1-1584
atgttaatgttgtttgtctttggagtcttacttcatgaagtctcactgagtggtcagaatgaagctcctcctaatactcacagcattccaggcgaacctctgtataactatgccagcatccgcttgccagaggagcacattcccttctttttgcacaacaataggcatattgccactgtctgtaggaaagactctctttgtccatataagaaacacctagagaagctaaagtactgctggggttatgagaaatcctgcaaaccagagttcaggtttggttacccagtttgcagctatgtcgacatgggatggacggacactcttgagtcagctgaggacatattttggaaacaagctgactttggatatgccagagagaggctggaggagatgcatgtgctctgtcagcctaaggaaacgagtgactcaagtctggtgtgttcccgttatcttcagtactgcagagcaaccaatctctatcttgatttaagaaacatcaagagaaatcatgacagatttaaggaggactttttccagagtggtgaaattggagggcactgtaaacttgacatccgtacattgacgtctgaaggtcagcgcaaaagccctctgcagtcatggtttgctgagctacaaagctatactcagctcaacttcagacctatagaagatgctaaatgtgacattgtcattgaaaaaccaacatatttcatgaaattagatgcaggtgttaacatgtatcaccacttctgtgatttcatcaatctttatattactcagcacgttaataactcattcagtactgacgtgtacatcgtgatgtgggacaccagttcttacggatatggtgacctattctccgacacatggaatgcatttactgattatgacgttatacatttgaaaacttatgattccaaaagggtatgttttaaagaagctgttttttcattactcccccgcatgaggtatgggctgttctataatactcctctgatatctggctgtcaaaatactggactattcagggcatttgcccagcatgtactacacagactaaacatcacacaagaaggacctaaggatggaaaaattcgagtcaccattcttgcacggagcacagaataccggaaaatccttaaccaaaatgagcttgtaaatgcactgaaaacagtatctacatttgaagtccagattgttgattacaagtatagagaacttgggtttttagatcaactaaggatcacacacaacacggacatatttattggaatgcatggagctggtctgacccatttacttttccttccagactgggctgctgtatttgaactgtacaactgtgaagatgaacgctgttacttagacttggccaggctgagaggcgttcactacatcacttggcgacggcagaacaaagtctttcctcaggataagggccaccatccaaccctgggggagcacccgaagttcaccaactactctttcgatgtagaagaatttatgtatcttgtccttcaggctgcagaccacgtattgcaacacccaaagtggccatttaagaagaaacatgatgagctataa

SEQ ID NO: 129236 - DNA, 1332 bp, Homo sapiens
  Payload ID: 5283
  Gene Symbol: EOGT
  Gene Name: EGF domain-specific O-linked N-acetylglucosamine (GlcNAc) transferase
  Uniprot ID: Q5NDL2
  ENST ID: ENST00000540955
  CDS Start-End: 1-1332
atgttaatgttgtttgtctttggagtcttacttcatgaagtctcactgagtggtcagaatgaagctcctcctaatactcacagcattccaggcgaacctctgtataactatgccagcatccgcttgccagaggagcacattcccttctttttgcacaacaataggcatattgccactgtctgtaggaaagactctctttgtccatataagaaacacctagagaagctaaagtactgctggggttatgagaaatcctgcaaaccagagttcaggtttggttacccagtttgcagctatgtcgacatgggatggacggacactcttgagtcagctgaggacatattttggaaacaagctgactttggatatgccagagagaggctggaggagatgcatgtgctctgtcagcctaaggaaacgagtgactcaagtctggtgtgttcccgttatcttcagtactgcagagcaaccaatctctatcttgatttaagaaacatcaagagaaatcatgacagatttaaggaggactttttccagagtggtgaaattggagggcactgtaaacttgacatccgtacattgacgtctgaaggtcagcgcaaaagccctctgcagtcatggtttgctgagctacaaagctatactcagctcaacttcagacctatagaagatgctaaatgtgacattgtcattgaaaaaccaacatatttcatgaaattagatgcaggtgttaacatgtatcaccacttctgtgatttcatcaatctttatattactcagcacgttaataactcattcagtactgacgtgtacatcgtgatgtgggacaccgatggaaaaattcgagtcaccattcttgcacggagcacagaataccggaaaatccttaaccaaaatgagcttgtaaatgcactgaaaacagtatctacatttgaagtccagattgttgattacaagtatagagaacttgggtttttagatcaactaaggatcacacacaacacggacatatttattggaatgcatggagctggtctgacccatttacttttccttccagactgggctgctgtatttgaactgtacaactgtgaagatgaacgctgttacttagacttggccaggctgagaggcgttcactacatcacttggcgacggcagaacaaagtctttcctcaggataagggccaccatccaaccctgggggagcacccgaagttcaccaactactctttcgatgtagaagaatttatgtatcttgtccttcaggctgcagaccacgtattgcaacacccaaagtggccatttaagaagaaacatgatgagctataa

SEQ ID NO: 129237 - DNA, 1931 bp, Homo sapiens
  Payload ID: 5283
  Gene Symbol: EOGT
  Gene Name: EGF domain-specific O-linked N-acetylglucosamine (GlcNAc) transferase
  ENST ID: ENST00000615922
  CDS Start-End: 42-449
gatacagtttcactctgtcacccaggctggagtgcagtggcatgatctcagctcactgcaacctctgccttctggattcaagtgattcttgtgccttagcctcccaagtagctgggattacaggcgtgcaccaccacgcccagttgatttttgtatttttgatagagacggagtttcaccatgttggccaggctggtctcgaactctgggttcaagaaatcctcccaccttgcctcccaaagtgctgggattacaggtgtgagccaccacgcatggccctgaactttctctttttaggaataccaaagttttcaactttttcagctttagaatttgtaaatatttttgtagaatatcatatgactgtaattccagagtgttccaacttgtttatgatatatttgggtaaatttacaactgttcttttatttgccataatctggttataacactgtttgtggtaggaaaggaaaacatgcaaaacatacacacacacacacacacacacacacacacgcagagttgtgattctcagtaccaagctataggaccatgttatagatcagcgtttagtcacctccaggttatatgcatcgagaacctgaataaatcatgccactatattaatttatattacatgtttcatatttaaatcatgttttcctaaaatgtagcaactacatgtgataaaagcaaattagaacattctgtaggactgtcttgcataccttctgtctggtttccactgattccttcttagccatggagagcatttgtgattaattaatttatatatgaaataatggtttccattttatgcgagtatttgtaactgcatataccagtgcgtgtgcgtctacctctgtcagcatgaaagtattccagtctttaatttcaaaaacttcaaattagcctcatgaagagaatttttccctgtgaaaagtaagaccaagaaaaaacaaactaaagacatgtgacttattcaatgaaagtgaaaaagaagctctaaaacagtgtcattgattaaaaagaatatctggaatgtagccccactctttgagtgggattcatttcttactgcttatgaactttcaatttagtagtcagaaaccatggatttattttactgcacaatgtgaagtttacattttattaacacttgagtagtctgatttagagactagttacttctattttttaaaataatggagtaacaaattacagaatagctaaataattttttaaaaatattttacagttgtaaaaaatatccatcagaaaaatgacacacaaaacaaaatatctggacctttacagaagacgtttgctgacccccactttaaaggattggaacagtcttctagaattgaggaatatttattaaaatacctgtaaagaaaatagtgaatcactgtagcaatggctttgattcagaccttaaaatcacataagaagaattacaacatgttatggatttttaagtggcaggtattgtaactgttttttgtgtgcaaaatactgagtaaccactgggaaaatatttcagatgaaagggatgacaaaagcatgttgcgctttgcatcagcaaggcattgacttctgaaaaaatgatctgaaaaaagtttcaccgtttgtcttcttacctcattttaagaagcatgtgaaaatgggatactatagactactgagaatttcagaaattgagaacaatttcataataaaacggctatatttgaagagagaatacattttatataaacaggaaaatacatttgacactttatggaattttatgagactttttgtgggaacagaaggtcttcaaattgtaaaatgtaaagattgctctttttattaagtctttaacagggatgtatttcattgtatgttttgggtatggctttggaataaatcattttatattttatttg

SEQ ID NO: 129238 - DNA, 4727 bp, Homo sapiens
  Payload ID: 5284
  Gene Symbol: EDIL3
  Gene Name: EGF-like repeats and discoidin I-like domains 3
  Uniprot ID: O43854
  ENST ID: ENST00000296591
  CDS Start-End: 420-1862
agaagccccgcagccgccgcgcggagaacagcgacagccgagcgcccggtccgcctgtctgccggtgggtctgcctgcccgcgcagcagacccggggcggccgcgggagcccgcgccccgcccgccgcgcctctgccgggacccacccgcagcggagggctgagcccgccggcggctccccggagctcacccacctccgcgcgccggagcgcaggcaaaaggggaggaaaggctcctctctttagtcaccactctcgccctctccaagaatttgtttaacaaagcgctgaggaaagagaacgtcttcttgaattctttagtaggggcggagtctgctgctgccctgcgctgccacctcggctacactgccctccgcgacgacccctgaccagccggggtcacgtccgggagacgggatcatgaagcgctcggtagccgtctggctcttggtcgggctcagcctcggtgtcccccagttcggcaaaggtgatatttgtgatcccaatccatgtgaaaatggaggtatctgtttgccaggattggctgatggttccttttcctgtgagtgtccagatggcttcacagaccccaactgttctagtgttgtggaggttgcatcagatgaagaagaaccaacttcagcaggtccctgcactcctaatccatgccataatggaggaacctgtgaaataagtgaagcataccgaggggatacattcataggctatgtttgtaaatgtccccgaggatttaatgggattcactgtcagcacaacataaatgaatgcgaagttgagccttgcaaaaatggtggaatatgtacagatcttgttgctaactattcctgtgagtgcccaggcgaatttatgggaagaaattgtcaatacaaatgctcaggcccactgggaattgaaggtggaattatatcaaaccagcaaatcacagcttcctctactcaccgagctctttttggactccaaaaatggtatccctactatgcacgtcttaataagaaggggcttataaatgcgtggacagctgcagaaaatgacagatggccgtggattcagataaatttgcaaaggaaaatgagagttactggtgtgattacccaaggagccaagaggattggaagcccagagtatataaaatcctacaaaattgcctacagtaatgatggaaagacttgggcaatgtacaaagtgaaaggcaccaatgaagacatggtgtttcgtggaaacattgataacaacactccatatgctaactctttcacaccccccataaaagctcagtatgtaagactctatccccaagtttgtcgaagacattgcactttgcgaatggaacttcttggctgtgaactgtcgggttgttctgagcctctgggtatgaaatcaggacatatacaagactatcagatcactgcctccagcatcttcagaacgctcaacatggacatgttcacttgggaaccaaggaaagctcggctggacaagcaaggcaaagtgaatgcctggacctctggccacaatgaccagtcacaatggttacaggtggatcttcttgttccaaccaaagtgactggcatcattacacaaggagctaaagattttggtcatgtacagtttgttggctcctacaaactggcttacagcaatgatggagaacactggactgtataccaggatgaaaagcaaagaaaagataaggttttccagggaaattttgacaatgacactcacagaaaaaatgtcatcgaccctcccatctatgcacgacacataagaatccttccttggtcctggtacgggaggatcacattgcggtcagagctgctgggctgcacagaggaggaatgaggggaggctacatttcacaaccctcttccctatttccctaaaagtatctccatggaatgaactgtgcaaaatctgtaggaaactgaatggtttttttttttttttcatgaaaaagtgctcaaattatggtaggcaactaacggtgtttttaagggggtctaagcctgccttttcaatgatttaatttgattttattttatccgtcaaatctcttaagtaacaacacattaagtgtgaattacttttctctcattgtttcctgaattattcgcattggtagaaatatattagggaaagaaagtagccttctttttatagcaagagtaaaaaagtctcaaagtcatcaaataagagcaagagttgatagagcttttacaatcaatactcacctaattctgataaaaggaatactgcaatgttagcaataagtttttttcttctgtaatgactctacgttatcctgtttccctgtgcctaccaaacactgtcaatgtttattacaaaattttaaagaagaatatgtaacatgcagtactgatattataattctcattttactttcattatttctaataagagattatgtgacttctttttcttttagttctattctacattcttaatattgtatattacctgaataattcaatttttttctaattgaatttcctattagttgactaaaagaagtgtcatgtttactcatatatgtagaacatgactgcctatcagtagattgatctgtatttaatattcgttaattaaatctgcagttttatttttgaaggaagccataactatttaatttccaaataattgcttcataaagaatcccatactctcagtttgcacaaaagaacaaaaaatatatatgtctctttaaatttaaatcttcatttagatggtaattacatatccttatatttactttaaaaaatcggcttatttgtttattttataaaaaatttagcaaagaaatattaatatagtgctgcatagtttggccaagcatactcatcatttctttgttcagctccacatttcctgtgaaactaacatcttattgagatttgaaactggtggtagtttcccaggaaggcacaggtggagttatttgtgagaagcaaagtgtttactaatgacaaagtagtaaaccattttcaagatgaaaactgatttctatttattttgcttcaaaggtcctgaaaaaataagcaattatcataacaatttgttattgatactggaggtttcattgacatgtctctcaaattaaagctcacactgcctccataaaagtcttcaacatctaatttataagctttacaagtatttattttataaggcttagacagaattattggagttttaaattaagtgtattggaaaagaaaggatggtatgtgtatgaaatgttaagatcctacgcaacactgctatttttttcctttaatatttgtgctgcataacaaaagccactagactgttactgtcttgtctgtccatgtgttaacagcatttcttaatgatgtatatatggagtggtcttcaatcatagtgaagaatttaaagagaaagtcaattgtattggcatttttaataagaacaaaattagttcgtctaaggggactggctggccacatatttgttccttgcccatatgctttctacttcttgttcttattatgaaattatgaatttgaagcctctgaaatggtgatcagttttcaacatctttcaaaaacaaaattactatttcctccatattgccttttttagataactttaaagttaggattttaaaatatttgtaactggctaaattttaaagtcgtgacaaataattacttaggttcagaaatatacacacacttactctttagccagtttctttcaaggtttactgtcccatcagatatctagccattttcctttgcaaattacataccttcttaagagtgtatttttaagattattacttacgctttatgatgatatagtttttcaaaattatttatagcttcatatgatgttttgtaattttttctattgatacctgttttaaaaatattttccaaggaagttgattaaaattatatttgttaccttttagaaaaagcattgaaatgagtttctcttgctttttcattttccctctgctttatatgctcttcgcaatacatcatgtccaacgggatacctattgttctcatgacacccaaaattgatgagagcaaaggggtcgcaccatatggaaatgttgaaaactattgtaaagtagtattatgaagtagcttttgtgtcattcatgtcgatgacatgaaagtgaagtaaatttattctatgtaaattcacactaaaaccagtacagtaccataagtagaatacatgtaagaatcacctagtcttcactatattgagtaaatataacatgctaattttacaattaatgaaactaaacttttaaacatctccattatatctacatccttttgaaggtatttatcatagttgccaattttaattttaggattgactttctctttctgaatgacttcataaagtttggtgtgaattttgaagacttgggttactaatgattgtatctttgctagtcaacaacttatgaaatatactcaatgcgtctgatgtgtcattaagtgcagaaataactaagacacaaataacctttgcaaaccttcaagctgtgtaatattccaatgttgtttttttctttgtatatatacttatatcacgtaggatgtaaaaccagtatgaccttgtctagtctccaaacttaaaataaacttttgaaaagctgggattcttttgaagcagttgtaattaaacacatttataagaata

SEQ ID NO: 129239 - DNA, 4244 bp, Homo sapiens
  Payload ID: 5284
  Gene Symbol: EDIL3
  Gene Name: EGF-like repeats and discoidin I-like domains 3
  Uniprot ID: O43854
  ENST ID: ENST00000380138
  CDS Start-End: 13-1425
ggagacgggatcatgaagcgctcggtagccgtctggctcttggtcgggctcagcctcggtgtcccccagttcggcaaaggtgatatttgtgatcccaatccatgtgaaaatggaggtatctgtttgccaggattggctgatggttccttttcctgtgagtgtccagatggcttcacagaccccaactgttctagtgttgtggaggttggtccctgcactcctaatccatgccataatggaggaacctgtgaaataagtgaagcataccgaggggatacattcataggctatgtttgtaaatgtccccgaggatttaatgggattcactgtcagcacaacataaatgaatgcgaagttgagccttgcaaaaatggtggaatatgtacagatcttgttgctaactattcctgtgagtgcccaggcgaatttatgggaagaaattgtcaatacaaatgctcaggcccactgggaattgaaggtggaattatatcaaaccagcaaatcacagcttcctctactcaccgagctctttttggactccaaaaatggtatccctactatgcacgtcttaataagaaggggcttataaatgcgtggacagctgcagaaaatgacagatggccgtggattcagataaatttgcaaaggaaaatgagagttactggtgtgattacccaaggagccaagaggattggaagcccagagtatataaaatcctacaaaattgcctacagtaatgatggaaagacttgggcaatgtacaaagtgaaaggcaccaatgaagacatggtgtttcgtggaaacattgataacaacactccatatgctaactctttcacaccccccataaaagctcagtatgtaagactctatccccaagtttgtcgaagacattgcactttgcgaatggaacttcttggctgtgaactgtcgggttgttctgagcctctgggtatgaaatcaggacatatacaagactatcagatcactgcctccagcatcttcagaacgctcaacatggacatgttcacttgggaaccaaggaaagctcggctggacaagcaaggcaaagtgaatgcctggacctctggccacaatgaccagtcacaatggttacaggtggatcttcttgttccaaccaaagtgactggcatcattacacaaggagctaaagattttggtcatgtacagtttgttggctcctacaaactggcttacagcaatgatggagaacactggactgtataccaggatgaaaagcaaagaaaagataaggttttccagggaaattttgacaatgacactcacagaaaaaatgtcatcgaccctcccatctatgcacgacacataagaatccttccttggtcctggtacgggaggatcacattgcggtcagagctgctgggctgcacagaggaggaatgaggggaggctacatttcacaaccctcttccctatttccctaaaagtatctccatggaatgaactgtgcaaaatctgtaggaaactgaatggtttttttttttttttcatgaaaaagtgctcaaattatggtaggcaactaacggtgtttttaagggggtctaagcctgccttttcaatgatttaatttgattttattttatccgtcaaatctcttaagtaacaacacattaagtgtgaattacttttctctcattgtttcctgaattattcgcattggtagaaatatattagggaaagaaagtagccttctttttatagcaagagtaaaaaagtctcaaagtcatcaaataagagcaagagttgatagagcttttacaatcaatactcacctaattctgataaaaggaatactgcaatgttagcaataagtttttttcttctgtaatgactctacgttatcctgtttccctgtgcctaccaaacactgtcaatgtttattacaaaattttaaagaagaatatgtaacatgcagtactgatattataattctcattttactttcattatttctaataagagattatgtgacttctttttcttttagttctattctacattcttaatattgtatattacctgaataattcaatttttttctaattgaatttcctattagttgactaaaagaagtgtcatgtttactcatatatgtagaacatgactgcctatcagtagattgatctgtatttaatattcgttaattaaatctgcagttttatttttgaaggaagccataactatttaatttccaaataattgcttcataaagaatcccatactctcagtttgcacaaaagaacaaaaaatatatatgtctctttaaatttaaatcttcatttagatggtaattacatatccttatatttactttaaaaaatcggcttatttgtttattttataaaaaatttagcaaagaaatattaatatagtgctgcatagtttggccaagcatactcatcatttctttgttcagctccacatttcctgtgaaactaacatcttattgagatttgaaactggtggtagtttcccaggaaggcacaggtggagttatttgtgagaagcaaagtgtttactaatgacaaagtagtaaaccattttcaagatgaaaactgatttctatttattttgcttcaaaggtcctgaaaaaataagcaattatcataacaatttgttattgatactggaggtttcattgacatgtctctcaaattaaagctcacactgcctccataaaagtcttcaacatctaatttataagctttacaagtatttattttataaggcttagacagaattattggagttttaaattaagtgtattggaaaagaaaggatggtatgtgtatgaaatgttaagatcctacgcaacactgctatttttttcctttaatatttgtgctgcataacaaaagccactagactgttactgtcttgtctgtccatgtgttaacagcatttcttaatgatgtatatatggagtggtcttcaatcatagtgaagaatttaaagagaaagtcaattgtattggcatttttaataagaacaaaattagttcgtctaaggggactggctggccacatatttgttccttgcccatatgctttctacttcttgttcttattatgaaattatgaatttgaagcctctgaaatggtgatcagttttcaacatctttcaaaaacaaaattactatttcctccatattgccttttttagataactttaaagttaggattttaaaatatttgtaactggctaaattttaaagtcgtgacaaataattacttaggttcagaaatatacacacacttactctttagccagtttctttcaaggtttactgtcccatcagatatctagccattttcctttgcaaattacataccttcttaagagtgtatttttaagattattacttacgctttatgatgatatagtttttcaaaattatttatagcttcatatgatgttttgtaattttttctattgatacctgttttaaaaatattttccaaggaagttgattaaaattatatttgttaccttttagaaaaagcattgaaatgagtttctcttgctttttcattttccctctgctttatatgctcttcgcaatacatcatgtccaacgggatacctattgttctcatgacacccaaaattgatgagagcaaaggggtcgcaccatatggaaatgttgaaaactattgtaaagtagtattatgaagtagcttttgtgtcattcatgtcgatgacatgaaagtgaagtaaatttattctatgtaaattcacactaaaaccagtacagtaccataagtagaatacatgtaagaatcacctagtcttcactatattgagtaaatataacatgctaattttacaattaatgaaactaaacttttaaacatctccattatatctacatccttttgaaggtatttatcatagttgccaattttaattttaggattgactttctctttctgaatgacttcataaagtttggtgtgaattttgaagacttgggttactaatgattgtatctttgctagtcaacaacttatgaaatatactcaatgcgtctgatgtgtcattaagtgcagaaataactaagacacaaataacctttgcaaaccttcaagctgtgtaatattccaatgttgtttttttctttgtatatatacttatatcacgtaggatgtaaaaccagtatgaccttgtctagtctccaaacttaaaataaacttttgaaaagc

SEQ ID NO: 129240 - DNA, 4411 bp, Homo sapiens
  Payload ID: 5285
  Gene Symbol: EGFLAM
  Gene Name: EGF-like, fibronectin type III and laminin G domains
  Uniprot ID: Q63HQ2
  ENST ID: ENST00000322350
  CDS Start-End: 347-3376
agggcctgtccctctcacttccactcgattgtaatttcatccccgggccggtcgagcctccctccctcccgcggccagcccttccctcccagtcggcctccttcgtcgcccccgcccccgcgaaaagccctgcagcttgcagccggcttcactcgcgcacgccgacctcccggctgcagtcctacctcttggaactacccgtgtttccgggcccagccctcgcagccccccacctcctcgccccggcccggggatccgttggggccgcgtcccccacgcgcccccggagacgccctttccgtgtgcgcccgggacttggtgaaactttgcaggcgccggctgcgaaatggatttaatccgaggcgtcttgctccggctcctgctcctggcttccagcctcggacccggcgcggtgtcgctccgagcggccatccgaaaaccaggcaaggtagggcctcctcttgacatcaagctgggcgcattgaactgtacggctttcagcatccagtggaaaatgccaaggcatcctggaagtcccatccttgggtacactgtcttttactctgaggttggcgcagataaatccctgcaggagcagttgcacagcgtgcctctcagccgggacatcccgaccacggaggaagtgattggagatttgaaaccaggcactgaatatcgtgtgagcatagcagcttacagccaggctggcaaagggcggctgagctctcctcggcatgtcaccactttgtcccaagattcctgcctgcctcctgcagctccccagcagccacatgtcattgtggtttcggattctgaggtggccctgtcttggaaacctggagcgagtgaaggaagcgcccctattcagtactattctgtggaattcatcaggccagatttcgacaagaagtggacctcaatccatgagcggatccagatggactccatggttatcaagggcctcgatccagataccaactaccagtttgccgtgagggcaatgaattcccatggccccagcccccgcagctggcccagtgacatcatccggaccctctgccctgaggaggcgggaagtggccgctatggaccccgttatatcaccgacatgggagctggtgaggatgatgaaggatttgaagacgacttagatttggatatttcctttgaggaggttaaaccacttcctgctaccaaaggagggaataagaaatttttggtggaaagcaagaagatgtctatatctaacccaaagaccatttctaggctcatcccccctacctcagcatctctccctgtgaccacggtggctccccagcccattcccatacagagaaaggggaagaatggtgtggccataatgtcaaggctctttgacatgccttgtgatgaaactctctgctctgctgacagcttctgtgtcaatgactacacctgggggggctcgcgatgccagtgcaccctgggcaaaggtggtgagagctgctcagaagatattgttatccagtatcctcagttctttggccactcctatgtaacgtttgaacctctgaagaattcttatcaggcatttcaaattactcttgaatttagggcggaggcagaggatggcttactgctctactgtggggagaacgaacacgggaggggggatttcatgtccctggctatcatccgacgctccctgcagttcaggtttaattgtggaactggggttgccatcatcgtaagtgagaccaaaatcaaactagggggttggcacacggttatgctctacagagatgggctgaacgggctgctgcagctgaacaatggcaccccagtgacaggccagtctcagggccaatacagtaaaattactttccggacacctctctatcttggtggcgctcccagcgcttactggttggttagagcaacagggacaaaccgaggctttcaaggctgtgtgcagtcgctcgctgtgaatgggaggagaattgacatgaggccctggcccctgggaaaagcactcagtggggctgatgtgggggaatgcagcagtggaatctgtgatgaggcctcgtgcatccatggtggcacctgcacagcaatcaaagccgactcctacatttgcctctgtccccttgggtttaaaggtcgacactgtgaagatgctttcaccttgaccattcctcagttcagagagtctctgagatcttacgctgcaactccctggccactggagccccagcattacctttccttcatggaatttgagatcacatttcggccagactcaggagatggtgtcctcctgtacagctatgacacaggcagcaaagacttcctgtccatcaacttggcagggggccacgtggagttccgctttgactgtggctctgggaccggtgtcctcaggagtgaagatcccctcaccctgggcaactggcacgagcttcgtgtatctcgcacagcaaagaatggaatcttacaggtggataagcagaagatagtggagggaatggcagagggaggcttcacacagattaagtgcaacacagacattttcattggcggagtccccaattatgatgatgtgaagaagaactcgggtgtcctgaagcctttcagcgggagcatccagaagatcatcctgaatgaccgaaccatccatgtgaagcatgacttcacctccggagtgaatgtggagaatgcggcccacccctgtgtgagagccccttgtgcccatgggggcagctgccggcccaggaaggagggctatgactgtgactgccccttgggctttgaggggcttcactgccagaaagcgatcatagaagccattgagatcccgcagtttatcggccgcagttacctgacgtatgacaacccagatatcttgaagagggtgtcaggatcaagatcaaatgtgttcatgaggtttaaaacaactgccaaggatggccttttgctgtggaggggagacagccccatgagacccaacagcgacttcatttccttgggccttcgggatggagccctcgtgttcagctataacctgggcagtggtgtggcatccatcatggtgaatggctccttcaacgatggtcggtggcaccgagttaaggccgttagggatggccagtcaggaaagataaccgtggatgactatggagccagaacaggcaaatccccaggcatgatgcggcagcttaacatcaatggagctctgtatgtgggtggaatgaaggaaattgctctgcacactaacaggcaatatatgagagggctcgtgggctgtatctctcacttcaccctgtccaccgattaccacatttccctcgtggaagatgccgtggatgggaaaaacatcaacacttgtggagccaagtaacaccagctggccttgtccaagggacagagccttctattctgagaatcccaggggccctcagaccctgcctgatgctatatgcagaggcccagggaccaggtgtgtttcctctcaccaagaagaaagtacacactgatgagaaactgagaaccaagacaggcatccctgggtggcctttcctgctgacactccacgagctgacccagcagaattctctgtgtaggaagcatcggactttgtccattgaatatgtagcggctgccagagatcacacatcaatgcaaattccagagcctgtctgctatagctcagtgactgtgttgtgattcatagtacattaaaaagagagagagagagaaagaatcccacagggcactattaaaatacttctctccttccctgactcatgacactcttcctgacagcagaatgactgtgtgaccttgaacttcacatttcccacattggcccttggattgttcggattaaccccttccactcctcactggctggttcactgtgttctgactagtccataaaaataaagatggaaggagatcaaacacagaatcataatcataatgcggcccccttccccagagcttacctcgaatgtgaaatccctacttcttataatgcagagttaaggagctgagcccccatgattttgtagctgtacttttgtatgtgtatatttttatagctgcagattgtccacacagtatacttttggaagtttgggtggatgactctgaattcttgcacacctttcctaaaaatttctcccaagagagacttgtttgggccttttgtggtgtcagtggaatggataggtaacttgggtgggcaacttggggagctgaccattctcttttggtaaatgttgacggctcaagaggatgaatatgaagctttccaagataagcagattaaaaggaacatgtgttaccgaggtaggtcactgtcatttttgttttaagagttggggggagtatctatagtaaacttgaataaaggggacaaagctagaactta

SEQ ID NO: 129241 - DNA, 3071 bp, Homo sapiens
  Payload ID: 5285
  Gene Symbol: EGFLAM
  Gene Name: EGF-like, fibronectin type III and laminin G domains
  Uniprot ID: Q63HQ2
  ENST ID: ENST00000336740
  CDS Start-End: 342-2669
gacaactgagacggctgcagaccatggggcagggagcatatggagcacggatatgccagacagagggatgattcatatcccaggcaggatggagcagggcagtgtgctatttcatcgtgctactcagaacttatgaattgtttatttctggaatttcccatttaatatttttggactgtggttgatcgagggtaaatgaaattgcagaaagcaaaaatacagataagggggactgcttgctgtacaaagatagagacaagaggaaggagctgtcctcaagggccttttgtgtgaagacatctggcacacagatacgctgcatgcaggtggcttgagagaacatgcatccaggccctgaggaggcgggaagtggccgctatggaccccgttatatcaccgacatgggagctggtgaggatgatgaaggatttgaagacgacttagatttggatatttcctttgaggaggttaaaccacttcctgctaccaaaggagggaataagaaatttttggtggaaagcaagaagatgtctatatctaacccaaagaccatttctaggctcatcccccctacctcagcatctctccctgtgaccacggtggctccccagcccattcccatacagagaaaggggaagaatggtgtggccataatgtcaaggctctttgacatgccttgtgatgaaactctctgctctgctgacagcttctgtgtcaatgactacacctgggggggctcgcgatgccagtgcaccctgggcaaaggtggtgagagctgctcagaagatattgttatccagtatcctcagttctttggccactcctatgtaacgtttgaacctctgaagaattcttatcaggcatttcaaattactcttgaatttagggcggaggcagaggatggcttactgctctactgtggggagaacgaacacgggaggggggatttcatgtccctggctatcatccgacgctccctgcagttcaggtttaattgtggaactggggttgccatcatcgtaagtgagaccaaaatcaaactagggggttggcacacggttatgctctacagagatgggctgaacgggctgctgcagctgaacaatggcaccccagtgacaggccagtctcagggccaatacagtaaaattactttccggacacctctctatcttggtggcgctcccagcgcttactggttggttagagcaacagggacaaaccgaggctttcaaggctgtgtgcagtcgctcgctgtgaatgggaggagaattgacatgaggccctggcccctgggaaaagcactcagtggggctgatgtgggggaatgcagcagtggaatctgtgatgaggcctcgtgcatccatggtggcacctgcacagcaatcaaagccgactcctacatttgcctctgtccccttgggtttaaaggtcgacactgtgaagatgctttcaccttgaccattcctcagttcagagagtctctgagatcttacgctgcaactccctggccactggagccccagcattacctttccttcatggaatttgagatcacatttcggccagactcaggagatggtgtcctcctgtacagctatgacacaggcagcaaagacttcctgtccatcaacttggcagggggccacgtggagttccgctttgactgtggctctgggaccggtgtcctcaggagtgaagatcccctcaccctgggcaactggcacgagcttcgtgtatctcgcacagcaaagaatggaatcttacaggtggataagcagaagatagtggagggaatggcagagggaggcttcacacagattaagtgcaacacagacattttcattggcggagtccccaattatgatgatgtgaagaagaactcgggtgtcctgaagcctttcagcgggagcatccagaagatcatcctgaatgaccgaaccatccatgtgaagcatgacttcacctccggagtgaatgtggagaatgcggcccacccctgtgtgagagccccttgtgcccatgggggcagctgccggcccaggaaggagggctatgactgtgactgccccttgggctttgaggggcttcactgccagaaagcgatcatagaagccattgagatcccgcagtttatcggccgcagttacctgacgtatgacaacccagatatcttgaagagggtgtcaggatcaagatcaaatgtgttcatgaggtttaaaacaactgccaaggatggccttttgctgtggaggggagacagccccatgagacccaacagcgacttcatttccttgggccttcgggatggagccctcgtgttcagctataacctgggcagtggtgtggcatccatcatggtgaatggctccttcaacgatggtcggtggcaccgagttaaggccgttagggatggccagtcaggaaagataaccgtggatgactatggagccagaacaggcaaatccccaggcatgatgcggcagcttaacatcaatggagctctgtatgtgggtggaatgaaggaaattgctctgcacactaacaggcaatatatgagagggctcgtgggctgtatctctcacttcaccctgtccaccgattaccacatttccctcgtggaagatgccgtggatgggaaaaacatcaacacttgtggagccaagtaacaccagctggccttgtccaagggacagagccttctattctgagaatcccaggggccctcagaccctgcctgatgctatatgcagaggcccagggaccaggtgtgtttcctctcaccaagaagaaagtacacactgatgagaaactgagaaccaagacaggcatccctgggtggcctttcctgctgacactccacgagctgacccagcagaattctctgtgtaggaagcatcggactttgtccattgaatatgtagcggctgccagagatcacacatcaatgcaaattccagagcctgtctgctatagctcagtgactgtgttgtgattcatagtacattaaaaagagagagagagagaaagaatcccacagggcactattaaaatacttctctccttccctg

SEQ ID NO: 129242 - DNA, 3963 bp, Homo sapiens
  Payload ID: 5285
  Gene Symbol: EGFLAM
  Gene Name: EGF-like, fibronectin type III and laminin G domains
  Uniprot ID: Q63HQ2
  ENST ID: ENST00000354891
  CDS Start-End: 347-3400
agggcctgtccctctcacttccactcgattgtaatttcatccccgggccggtcgagcctccctccctcccgcggccagcccttccctcccagtcggcctccttcgtcgcccccgcccccgcgaaaagccctgcagcttgcagccggcttcactcgcgcacgccgacctcccggctgcagtcctacctcttggaactacccgtgtttccgggcccagccctcgcagccccccacctcctcgccccggcccggggatccgttggggccgcgtcccccacgcgcccccggagacgccctttccgtgtgcgcccgggacttggtgaaactttgcaggcgccggctgcgaaatggatttaatccgaggcgtcttgctccggctcctgctcctggcttccagcctcggacccggcgcggtgtcgctccgagcggccatccgaaaaccaggcaaggtagggcctcctcttgacatcaagctgggcgcattgaactgtacggctttcagcatccagtggaaaatgccaaggcatcctggaagtcccatccttgggtacactgtcttttactctgaggttggcgcagataaatccctgcaggagcagttgcacagcgtgcctctcagccgggacatcccgaccacggaggaagtgattggagatttgaaaccaggcactgaatatcgtgtgagcatagcagcttacagccaggctggcaaagggcggctgagctctcctcggcatgtcaccactttgtcccaagattcctgcctgcctcctgcagctccccagcagccacatgtcattgtggtttcggattctgaggtggccctgtcttggaaacctggagcgagtgaaggaagcgcccctattcagtactattctgtggaattcatcaggccagatttcgacaagaagtggacctcaatccatgagcggatccagatggactccatggttatcaagggcctcgatccagataccaactaccagtttgccgtgagggcaatgaattcccatggccccagcccccgcagctggcccagtgacatcatccggaccctctgccctgaggaggcgggaagtggccgctatggaccccgttatatcaccgacatgggagctggtgaggatgatgaaggatttgaagacgacttagatttggatatttcctttgaggaggttaaaccacttcctgctaccaaaggagggaataagaaatttttggtggaaagcaagaagatgtctatatctaacccaaagaccatttctaggctcatcccccctacctcagcatctctccctgtgaccacggtggctccccagcccattcccatacagagaaaggggaagaatggtgtggccataatgtcaaggctctttgacatgccttgtgatgaaactctctgctctgctgacagcttctgtgtcaatgactacacctgggggggctcgcgatgccagtgcaccctgggcaaaggtggtgagagctgctcagaagatattgttatccagtatcctcagttctttggccactcctatgtaacgtttgaacctctgaagaattcttatcaggcatttcaaattactcttgaatttagggcggaggcagaggatggcttactgctctactgtggggagaacgaacacgggaggggggatttcatgtccctggctatcatccgacgctccctgcagttcaggtttaattgtggaactggggttgccatcatcgtaagtgagaccaaaatcaaactagggggttggcacacggttatgctctacagagatgggctgaacgggctgctgcagctgaacaatggcaccccagtgacaggccagtctcagggccaatacagtaaaattactttccggacacctctctatcttggtggcgctcccagcgcttactggttggttagagcaacagggacaaaccgaggctttcaaggctgtgtgcagtcgctcgctgtgaatgggaggagaattgacatgaggccctggcccctgggaaaagcactcagtggggctgatgtgggggaatgcagcagtggaatctgtgatgaggcctcgtgcatccatggtggcacctgcacagcaatcaaagccgactcctacatttgcctctgtccccttgggtttaaaggtcgacactgtgaagatgctttcaccttgaccattcctcagttcagagagtctctgagatcttacgctgcaactccctggccactggagccccagcattacctttccttcatggaatttgagatcacatttcggccagactcaggagatggtgtcctcctgtacagctatgacacaggcagcaaagacttcctgtccatcaacttggcagggggccacgtggagttccgctttgactgtggctctgggaccggtgtcctcaggagtgaagatcccctcaccctgggcaactggcacgagcttcgtgtatctcgcacagcaaagaatggaatcttacaggtggataagcagaagatagtggagggaatggcagagggaggcttcacacagattaagtgcaacacagacattttcattggcggagtccccaattatgatgatgtgaagaagaactcgggtgtcctgaagcctttcagcgggagcatccagaagatcatcctgaatgaccgaaccatccatgtgaagcatgacttcacctccggagtgaatgtggagaatgcggcccacccctgtgtgagagccccttgtgcccatgggggcagctgccggcccaggaaggagggctatgactgtgactgccccttgggctttgaggggcttcactgccagaaagagtgtgggaactactgcctcaatacgatcatagaagccattgagatcccgcagtttatcggccgcagttacctgacgtatgacaacccagatatcttgaagagggtgtcaggatcaagatcaaatgtgttcatgaggtttaaaacaactgccaaggatggccttttgctgtggaggggagacagccccatgagacccaacagcgacttcatttccttgggccttcgggatggagccctcgtgttcagctataacctgggcagtggtgtggcatccatcatggtgaatggctccttcaacgatggtcggtggcaccgagttaaggccgttagggatggccagtcaggaaagataaccgtggatgactatggagccagaacaggcaaatccccaggcatgatgcggcagcttaacatcaatggagctctgtatgtgggtggaatgaaggaaattgctctgcacactaacaggcaatatatgagagggctcgtgggctgtatctctcacttcaccctgtccaccgattaccacatttccctcgtggaagatgccgtggatgggaaaaacatcaacacttgtggagccaagtaacaccagctggccttgtccaagggacagagccttctattctgagaatcccaggggccctcagaccctgcctgatgctatatgcagaggcccagggaccaggtgtgtttcctctcaccaagaagaaagtacacactgatgagaaactgagaaccaagacaggcatccctgggtggcctttcctgctgacactccacgagctgacccagcagaattctctgtgtaggaagcatcggactttgtccattgaatatgtagcggctgccagagatcacacatcaatgcaaattccagagcctgtctgctatagctcagtgactgtgttgtgattcatagtacattaaaaagagagagagagagaaagaatcccacagggcactattaaaatacttctctccttccctgactcatgacactcttcctgacagcagaatgactgtgtgaccttgaacttcacatttcccacattggcccttggattgttcggattaaccccttccactcctcactggctggttcactgtgttctgactagtccataaaaataaagatggaaggagatcaaa

SEQ ID NO: 129243 - DNA, 2398 bp, Homo sapiens
  Payload ID: 5285
  Gene Symbol: EGFLAM
  Gene Name: EGF-like, fibronectin type III and laminin G domains
  Uniprot ID: Q63HQ2
  ENST ID: ENST00000397202
  CDS Start-End: 708-1835
gagacggctgcagaccatggggcagggagcatatggagcacggatatgccagacagagggatgattcatatcccaggcaggatggagcagggcagtgtgctatttcatcgtgctactcagaacttatgaattgtttatttctggaatttcccatttaatatttttggactgtggttgatcgagggtaaatgaaattgcagaaagcaaaaatacagataagggggactgcttgctgtacaaagatagagacaagaggaaggagctgtcctcaagggccttttgtgtgaagacatctggcacacagatacgctgcatgcaggtggcttgagagaacatgcatccaggtttaattgtggaactggggttgccatcatcgtaagtgagaccaaaatcaaactagggggttggcacacggttatgctctacagagatgggctgaacgggctgctgcagctgaacaatggcaccccagtgacaggccagtctcaggggaatgcagcagtggaatctgtgatgaggcctcgtgcatccatggtggcacctgcacagcaatcaaagccgactcctacatttgcctctgtccccttgggtttaaaggtcgacactgtgaagatgctttcaccttgaccattcctcagttcagagagtctctgagatcttacgctgcaactccctggccactggagccccagcattacctttccttcatggaatttgagatcacatttcggccagactcaggagatggtgtcctcctgtacagctatgacacaggcagcaaagacttcctgtccatcaacttggcagggggccacgtggagttccgctttgactgtggctctgggaccggtgtcctcaggagtgaagatcccctcaccctgggcaactggcacgagcttcgtgtatctcgcacagcaaagaatggaatcttacaggtggataagcagaagatagtggagggaatggcagagggaggcttcacacagattaagtgcaacacagacattttcattggcggagtccccaattatgatgatgtgaagaagaactcgggtgtcctgaagcctttcagcgggagcatccagaagatcatcctgaatgaccgaaccatccatgtgaagcatgacttcacctccggagtgaatgtggagaatgcggcccacccctgtgtgagagccccttgtgcccatgggggcagctgccggcccaggaaggagggctatgactgtgactgccccttgggctttgaggggcttcactgccagaaagcgatcatagaagccattgagatcccgcagtttatcggccgcagttacctgacgtatgacaacccagatatcttgaagagggtgtcaggatcaagatcaaatgtgttcatgaggtttaaaacaactgccaaggatggccttttgctgtggaggggagacagccccatgagacccaacagcgacttcatttccttgggccttcgggatggagccctcgtgttcagctataacctgggcagtggtgtggcatccatcatggtgaatggctccttcaacgatggtcggtggcaccgagttaaggccgttagggatggccagtcaggaaagataaccgtggatgactatggagccagaacaggcaaatccccaggcatgatgcggcagcttaacatcaatggagctctgtatgtgggtggaatgaaggaaattgctctgcacactaacaggcaatatatgagagggctcgtgggctgtatctctcacttcaccctgtccaccgattaccacatttccctcgtggaagatgccgtggatgggaaaaacatcaacacttgtggagccaagtaacaccagctggccttgtccaagggacagagccttctattctgagaatcccaggggccctcagaccctgcctgatgctatatgcagaggcccagggaccaggtgtgtttcctctcaccaagaagaaagtacacactgatgagaaactgagaaccaagacaggcatccctgggtggcctttcctgctgacactccacgagctgacccagcagaattctctgtgtaggaagcatcggactttgtccattgaatatgtagcggctgccagagatcacacatcaatgcaaattccagagcctgtctgctatagctcagtgactgtgttgtgattcatagtacattaaaaagagagagagagagaaagaatcccacagggcactattaaaatacttctctccttccctgactcatgacactcttcctgacagcagaatgactgtgtgaccttgaacttcacatttcccacattggcccttggattgttcggattaaccccttccactcctcactggctggttcactgtgttctgactagtccataaaaataaagatggaaggagatcaaa

SEQ ID NO: 129244 - DNA, 1299 bp, Homo sapiens
  Payload ID: 5285
  Gene Symbol: EGFLAM
  Gene Name: EGF-like, fibronectin type III and laminin G domains
  Uniprot ID: Q63HQ2
  ENST ID: ENST00000397210
  CDS Start-End: 271-729
gacgttctggactctcgggcagagctttgtgagagaaacaaggctggcttcaagtgatctgcaaccagagtaattgggatttgacaaggactgtgaaaggctgactctccctgttctctttcatgctggcaccgggcagagtgtgggaactactgcctcaatacgatcatagaagccattgagatcccgcagtttatcggccgcagttacctgacgtatgacaacccagatatcttgaagagggtgtcaggatcaagatcaaatgtgttcatgaggtttaaaacaactgccaaggatggccttttgctgtggaggggagacagccccatgagacccaacagcgacttcatttccttgggccttcgggatggagccctcgtgttcagctataacctgggcagtggtgtggcatccatcatggtgaatggctccttcaacgatggtcggtggcaccgagttaaggccgttagggatggccagtcaggaaagataaccgtggatgactatggagccagaacaggcaaatccccaggcatgatgcggcagcttaacatcaatggagctctgtatgtgggtggaatgaaggaaattgctctgcacactaacaggcaatatatgagagggctcgtgggctgtatctctcacttcaccctgtccaccgattaccacatttccctcgtggaagatgccgtggatgggaaaaacatcaacacttgtggagccaagtaacaccagctggccttgtccaagggacagagccttctattctgagaatcccaggggccctcagaccctgcctgatgctatatgcagaggcccagggaccaggtgtgtttcctctcaccaagaagaaagtacacactgatgagaaactgagaaccaagacaggcatccctgggtggcctttcctgctgacactccacgagctgacccagcagaattctctgtgtaggaagcatcggactttgtccattgaatatgtagcggctgccagagatcacacatcaatgcaaattccagagcctgtctgctatagctcagtgactgtgttgtgattcatagtacattaaaaagagagagagagagaaagaatcccacagggcactattaaaatacttctctccttccctgactcatgacactcttcctgacagcagaatgactgtgtgaccttgaacttcacatttcccacattggcccttggattgttcggattaaccccttccactcctcactggctggttcactgtgttctgactagtccataaaaataaagatggaaggagatcaaacacagaa

SEQ ID NO: 129245 - DNA, 676 bp, Homo sapiens
  Payload ID: 5285
  Gene Symbol: EGFLAM
  Gene Name: EGF-like, fibronectin type III and laminin G domains
  Uniprot ID: Q63HQ2
  ENST ID: ENST00000514476
  CDS Start-End: 153-611
agagaaccacatactatgtaacctcctttttctgttctgtcccagcgatcatagaagccattgagatcccgcagtttatcggccgcagttacctgacgtatgacaacccagatatcttgaagagggtgtcaggatcaagatcaaatgtgttcatgaggtttaaaacaactgccaaggatggccttttgctgtggaggggagacagccccatgagacccaacagcgacttcatttccttgggccttcgggatggagccctcgtgttcagctataacctgggcagtggtgtggcatccatcatggtgaatggctccttcaacgatggtcggtggcaccgagttaaggccgttagggatggccagtcaggaaagataaccgtggatgactatggagccagaacaggcaaatccccaggcatgatgcggcagcttaacatcaatggagctctgtatgtgggtggaatgaaggaaattgctctgcacactaacaggcaatatatgagagggctcgtgggctgtatctctcacttcaccctgtccaccgattaccacatttccctcgtggaagatgccgtggatgggaaaaacatcaacacttgtggagccaagtaacaccagctggccttgtccaagggacagagccttctattctgagaatcccaggggccctcagaccc

SEQ ID NO: 129246 - DNA, 889 bp, Homo sapiens
  Payload ID: 5285
  Gene Symbol: EGFLAM
  Gene Name: EGF-like, fibronectin type III and laminin G domains
  Uniprot ID: Q63HQ2
  ENST ID: ENST00000506135
  CDS Start-End: 280-738
agagaaacaaggctggcttcaagtgatctgcaaccagagtaattgggatttgacaaggactgtgaaaggctgactctccctgttctctttcatgctggcaccgggcagagtgtgggaactactgcctcaatacgatcatagaagccattgagatcccgcagtttatcggccgcagttacctgacgtatgacaacccagatatcttgaagaggtaataagcttcaacaggcaccttcctcagctttctggggggtgtcaggatcaagatcaaatgtgttcatgaggtttaaaacaactgccaaggatggccttttgctgtggaggggagacagccccatgagacccaacagcgacttcatttccttgggccttcgggatggagccctcgtgttcagctataacctgggcagtggtgtggcatccatcatggtgaatggctccttcaacgatggtcggtggcaccgagttaaggccgttagggatggccagtcaggaaagataaccgtggatgactatggagccagaacaggcaaatccccaggcatgatgcggcagcttaacatcaatggagctctgtatgtgggtggaatgaaggaaattgctctgcacactaacaggcaatatatgagagggctcgtgggctgtatctctcacttcaccctgtccaccgattaccacatttccctcgtggaagatgccgtggatgggaaaaacatcaacacttgtggagccaagtaacaccagctggccttgtccaagggacagagccttctattctgagaatcccaggggccctcagaccctgcctgatgctatatgcagaggcccagggaccaggtgtgtttcctctcaccaagaagaaagtacacactgatgagaaactgagaac

SEQ ID NO: 129247 - DNA, 821 bp, Homo sapiens
  Payload ID: 5285
  Gene Symbol: EGFLAM
  Gene Name: EGF-like, fibronectin type III and laminin G domains
  ENST ID: ENST00000504709
  CDS Start-End: 91-234
cgttggggccgcgtcccccacgcgcccccggagacgccctttccgtgtgcgcccgggacttggtgaaactttgcaggcgccggctgcgaaatggatttaatccgaggcgtcttgctccggctcctgctcctggcttccagcctcggacccggcgcggtgtcgctccgagcggccatccgaaaaccaggaaggtgttggaggatgactgtcacgaaaacttggacagaaccatgacgcaggaccaaagctgcaggaaacagaagatccaatccaggagagggatataagaagtccccagaataatagtgggaaggagatgctagaatgacaaatatttactagatagaaaaggcaaccagtccaactggaacaggcaaggtagggcctcctcttgacatcaagctgggcgcattgaactgtacggctttcagcatccagtggaaaatgccaaggcatcctggaagtcccatccttgggtacactgtcttttactctgaggttggcgcagataaatccctgcaggagcagttgcacagcgtgcctctcagccgggacatcccgaccacggaggaagtgattggagatttgaaaccaggcactgaatatcgtgtgagcatagcagcttacagccaggctggcaaagggcggctgagctctcctcggcatgtcaccactttgtcccaagattcctgcctgcctcctgcagctccccagcagccacatgtcattgtggtttcggattctgaggtggccctgtcttggaaacctggagcgagtgaaggaagcgcccctattcagtactattctgtggaattcatcag

SEQ ID NO: 129248 - DNA, 552 bp, Homo sapiens
  Payload ID: 5285
  Gene Symbol: EGFLAM
  Gene Name: EGF-like, fibronectin type III and laminin G domains
  ENST ID: ENST00000508131
  CDS Start-End: 215-552
atctgcaaccagagtaattgggatttgacaaggactgtgaaaggctgactctccctgttctctttcatgctggcaccgggcagagtgtgggaactactgcctcaatagtaagtacaaagccattgagatcccgcagtttatcggccgcagttacctgacgtatgacaacccagatatcttgaagagggtgtcaggatcaagatcaaatgtgttcatgaggtttaaaacaactgccaaggatggccttttgctgtggaggggagacagccccatgagacccaacagcgacttcatttccttgggccttcgggatggagccctcgtgttcagctataacctgggcagtggtgtggcatccatcatggtgaatggctccttcaacgatggtcggtggcaccgagttaaggccgttagggatggccagtcaggaaagataaccgtggatgactatggagccagaacaggcaaatccccaggcatgatgcggcagcttaacatcaatggagctctgtatgtgggtggaatgaaggaaattgctctgcacactaacag

SEQ ID NO: 129249 - DNA, 2398 bp, Homo sapiens
  Payload ID: 5286
  Gene Symbol: EGFL6
  Gene Name: EGF-like-domain, multiple 6
  Uniprot ID: Q8IUX8
  ENST ID: ENST00000361306
  CDS Start-End: 258-1919
accccgtccagcttcatccgcagaggagcctcggccaggcttgccagggcgcccccagcccctccccaggccgcgagcgcccctgccgcggtgcctggcctcccctcccagactgcagggacagcacccggtaactgcgagtggagcggaggacccgagcggctgaggagagaggaggcggcggcttagctgctacggggtccggccggcgccctcccgaggggggctcaggaggaggaaggaggacccgtgcgagaatgcctctgccctggagccttgcgctcccgctgctgctctcctgggtggcaggtggtttcgggaacgcggccagtgcaaggcatcacgggttgttagcatcggcacgtcagcctggggtctgtcactatggaactaaactggcctgctgctacggctggagaagaaacagcaagggagtctgtgaagctacatgcgaacctggatgtaagtttggtgagtgcgtgggaccaaacaaatgcagatgctttccaggatacaccgggaaaacctgcagtcaagatgtgaatgagtgtggaatgaaaccccggccatgccaacacagatgtgtgaatacacacggaagctacaagtgcttttgcctcagtggccacatgctcatgccagatgctacgtgtgtgaactctaggacatgtgccatgataaactgtcagtacagctgtgaagacacagaagaagggccacagtgcctgtgtccatcctcaggactccgcctggccccaaatggaagagactgtctagatattgatgaatgtgcctctggtaaagtcatctgtccctacaatcgaagatgtgtgaacacatttggaagctactactgcaaatgtcacattggtttcgaactgcaatatatcagtggacgatatgactgtatagatataaatgaatgtactatggatagccatacgtgcagccaccatgccaattgcttcaatacccaagggtccttcaagtgtaaatgcaagcagggatataaaggcaatggacttcggtgttctgctatccctgaaaattctgtgaaggaagtcctcagagcacctggtaccatcaaagacagaatcaagaagttgcttgctcacaaaaacagcatgaaaaagaaggcaaaaattaaaaatgttaccccagaacccaccaggactcctacccctaaggtgaacttgcagcccttcaactatgaagagatagtttccagaggcgggaactctcatggaggtaaaaaagggaatgaagagaaaatgaaagaggggcttgaggatgagaaaagagaagagaaagccctgaagaatgacatagaggagcgaagcctgcgaggagatgtgtttttccctaaggtgaatgaagcaggtgaattcggcctgattctggtccaaaggaaagcgctaacttccaaactggaacataaagatttaaatatctcggttgactgcagcttcaatcatgggatctgtgactggaaacaggatagagaagatgattttgactggaatcctgctgatcgagataatgctattggcttctatatggcagttccggccttggcaggtcacaagaaagacattggccgattgaaacttctcctacctgacctgcaaccccaaagcaacttctgtttgctctttgattaccggctggccggagacaaagtcgggaaacttcgagtgtttgtgaaaaacagtaacaatgccctggcatgggagaagaccacgagtgaggatgaaaagtggaagacagggaaaattcagttgtatcaaggaactgatgctaccaaaagcatcatttttgaagcagaacgtggcaagggcaaaaccggcgaaatcgcagtggatggcgtcttgcttgtttcaggcttatgtccagatagccttttatctgtggatgactgaatgttactatctttatatttgactttgtatgtcagttccctggtttttttgatattgcatcataggacctctggcattttagaattactagctgaaaaattgtaatgtaccaacagaaatattattgtaagatgcctttcttgtataagatatgccaatatttgctttaaatatcatatcactgtatcttctcagtcatttctgaatctttccacattatattataaaatatggaaatgtcagtttatctcccctcctcagtatatctgatttgtataagtaagttgatgagcttctctctacaacatttctagaaaatagaaaaaaaagcacagagaaatgtttaactgtttgactcttatgatacttcttggaaactatgacatcaaagatagacttttgcctaagtggcttagctgggtctttcatagccaaacttgtatatttaaattctttgtaataataatatccaaatcatc

SEQ ID NO: 129250 - DNA, 2385 bp, Homo sapiens
  Payload ID: 5286
  Gene Symbol: EGFL6
  Gene Name: EGF-like-domain, multiple 6
  Uniprot ID: Q8IUX8
  ENST ID: ENST00000380602
  CDS Start-End: 241-1905
ccgcagaggagcctcggccaggcttgccagggcgcccccagcccctccccaggccgcgagcgcccctgccgcggtgcctggcctcccctcccagactgcagggacagcacccggtaactgcgagtggagcggaggacccgagcggctgaggagagaggaggcggcggcttagctgctacggggtccggccggcgccctcccgaggggggctcaggaggaggaaggaggacccgtgcgagaatgcctctgccctggagccttgcgctcccgctgctgctctcctgggtggcaggtggtttcgggaacgcggccagtgcaaggcatcacgggttgttagcatcggcacgtcagcctggggtctgtcactatggaactaaactggcctgctgctacggctggagaagaaacagcaagggagtctgtgaagctacatgcgaacctggatgtaagtttggtgagtgcgtgggaccaaacaaatgcagatgctttccaggatacaccgggaaaacctgcagtcaagatgtgaatgagtgtggaatgaaaccccggccatgccaacacagatgtgtgaatacacacggaagctacaagtgcttttgcctcagtggccacatgctcatgccagatgctacgtgtgtgaactctaggacatgtgccatgataaactgtcagtacagctgtgaagacacagaagaagggccacagtgcctgtgtccatcctcaggactccgcctggccccaaatggaagagactgtctagatattgatgaatgtgcctctggtaaagtcatctgtccctacaatcgaagatgtgtgaacacatttggaagctactactgcaaatgtcacattggtttcgaactgcaatatatcagtggacgatatgactgtatagatataaatgaatgtactatggatagccatacgtgcagccaccatgccaattgcttcaatacccaagggtccttcaagtgtaaatgcaagcagggatataaaggcaatggacttcggtgttctgctatccctgaaaattctgtgaaggaagtcctcagagcacctggtaccatcaaagacagaatcaagaagttgcttgctcacaaaaacagcatgaaaaagaaggcaaaaattaaaaatgttaccccagaacccaccaggactcctacccctaaggtgaacttgcagcccttcaactatgaagagatagtttccagaggcgggaactctcatggaggtaaaaaagggaatgaagagaaaatgaaagaggggcttgaggatgagaaaagagaagagaaagccctgaagaatgacatagaggagcgaagcctgcgaggagatgtgtttttccctaaggtgaatgaagcaggtgaattcggcctgattctggtccaaaggaaagcgctaacttccaaactggaacataaagcagatttaaatatctcggttgactgcagcttcaatcatgggatctgtgactggaaacaggatagagaagatgattttgactggaatcctgctgatcgagataatgctattggcttctatatggcagttccggccttggcaggtcacaagaaagacattggccgattgaaacttctcctacctgacctgcaaccccaaagcaacttctgtttgctctttgattaccggctggccggagacaaagtcgggaaacttcgagtgtttgtgaaaaacagtaacaatgccctggcatgggagaagaccacgagtgaggatgaaaagtggaagacagggaaaattcagttgtatcaaggaactgatgctaccaaaagcatcatttttgaagcagaacgtggcaagggcaaaaccggcgaaatcgcagtggatggcgtcttgcttgtttcaggcttatgtccagatagccttttatctgtggatgactgaatgttactatctttatatttgactttgtatgtcagttccctggtttttttgatattgcatcataggacctctggcattttagaattactagctgaaaaattgtaatgtaccaacagaaatattattgtaagatgcctttcttgtataagatatgccaatatttgctttaaatatcatatcactgtatcttctcagtcatttctgaatctttccacattatattataaaatatggaaatgtcagtttatctcccctcctcagtatatctgatttgtataagtaagttgatgagcttctctctacaacatttctagaaaatagaaaaaaaagcacagagaaatgtttaactgtttgactcttatgatacttcttggaaactatgacatcaaagatagacttttgcctaagtggcttagctgggtctttcatagccaaacttgtatatttaaattctttgtaataataatatccaaatcatca

SEQ ID NO: 129251 - DNA, 1747 bp, Homo sapiens
  Payload ID: 5287
  Gene Symbol: EGFL7
  Gene Name: EGF-like-domain, multiple 7
  Uniprot ID: Q9UHF1
  ENST ID: ENST00000308874
  CDS Start-End: 535-1356
gcaccaagctggccctgcacggctgcaagggaggctcctgtggacaggccaggcaggtgggcctcaggaggtgcctccaggcggccagtgggcctgaggccccagcaagggctagggtccatctccagtcccaggacacagcagcggccaccatggccacgcctgggctccagcagcatcagagcagcccctgtggttggcagcaaagttcagcttggctgggcccgctgtgaggggcttcgcgctacgccctgcggtgtcccgagggctgaggtctcctcatcttctccctagcagtggatgagcaacccaacgggggcccggggaggggaactggccccgagggagaggaaccccaaagccacatctgtagccaggatgagcagtgtgaatccaggcagcccccaggaccggggaggcacaggtggcccccaccacccggaggagcagctcctgcccctgtccgggggatgactgattctcctccgccaggccacccagaggagaaggccaccccgcctggaggcacaggccatgaggggctctcaggaggtgctgctgatgtggcttctggtgttggcagtgggcggcacagagcacgcctaccggcccggccgtagggtgtgtgctgtccgggctcacggggaccctgtctccgagtcgttcgtgcagcgtgtgtaccagcccttcctcaccacctgcgacgggcaccgggcctgcagcacctaccgaaccatctataggaccgcctaccgccgcagccctgggctggcccctgccaggcctcgctacgcgtgctgccccggctggaagaggaccagcgggcttcctggggcctgtggagcagcaatatgccagccgccatgccggaacggagggagctgtgtccagcctggccgctgccgctgccctgcaggatggcggggtgacacttgccagtcagatgtggatgaatgcagtgctaggaggggcggctgtccccagcgctgcgtcaacaccgccggcagttactggtgccagtgttgggaggggcacagcctgtctgcagacggtacactctgtgtgcccaagggagggccccccagggtggcccccaacccgacaggagtggacagtgcaatgaaggaagaagtgcagaggctgcagtccagggtggacctgctggaggagaagctgcagctggtgctggccccactgcacagcctggcctcgcaggcactggagcatgggctcccggaccccggcagcctcctggtgcactccttccagcagctcggccgcatcgactccctgagcgagcagatttccttcctggaggagcagctggggtcctgctcctgcaagaaagactcgtgactgcccagcgccccaggctggactgagcccctcacgccgccctgcagcccccatgcccctgcccaacatgctgggggtccagaaaccacctcggggtgactgagcggaaggccaggcagggccttcctcctcttcctcctccccttcctcgggaggctccccagaccctggcatgggatgggctgggatcttctctgtgaatccacccctggctacccccaccctggctaccccaacggcatcccaaggccaggtgggccctcagctgagggaaggtacgagctccctgctggagcctgggacccatggcacaggccaggcagcccggaggctgggtggggcctcagtgggggctgctgcctgacccccagcacaataaaaatgaaacgtg

SEQ ID NO: 129252 - DNA, 1282 bp, Homo sapiens
  Payload ID: 5287
  Gene Symbol: EGFL7
  Gene Name: EGF-like-domain, multiple 7
  Uniprot ID: Q9UHF1
  ENST ID: ENST00000371698
  CDS Start-End: 69-890
ggcgcgtgcgcgccccggatccggcggccacccagaggagaaggccaccccgcctggaggcacaggccatgaggggctctcaggaggtgctgctgatgtggcttctggtgttggcagtgggcggcacagagcacgcctaccggcccggccgtagggtgtgtgctgtccgggctcacggggaccctgtctccgagtcgttcgtgcagcgtgtgtaccagcccttcctcaccacctgcgacgggcaccgggcctgcagcacctaccgaaccatctataggaccgcctaccgccgcagccctgggctggcccctgccaggcctcgctacgcgtgctgccccggctggaagaggaccagcgggcttcctggggcctgtggagcagcaatatgccagccgccatgccggaacggagggagctgtgtccagcctggccgctgccgctgccctgcaggatggcggggtgacacttgccagtcagatgtggatgaatgcagtgctaggaggggcggctgtccccagcgctgcgtcaacaccgccggcagttactggtgccagtgttgggaggggcacagcctgtctgcagacggtacactctgtgtgcccaagggagggccccccagggtggcccccaacccgacaggagtggacagtgcaatgaaggaagaagtgcagaggctgcagtccagggtggacctgctggaggagaagctgcagctggtgctggccccactgcacagcctggcctcgcaggcactggagcatgggctcccggaccccggcagcctcctggtgcactccttccagcagctcggccgcatcgactccctgagcgagcagatttccttcctggaggagcagctggggtcctgctcctgcaagaaagactcgtgactgcccagcgccccaggctggactgagcccctcacgccgccctgcagcccccatgcccctgcccaacatgctgggggtccagaaaccacctcggggtgactgagcggaaggccaggcagggccttcctcctcttcctcctccccttcctcgggaggctccccagaccctggcatgggatgggctgggatcttctctgtgaatccacccctggctacccccaccctggctaccccaacggcatcccaaggccaggtgggccctcagctgagggaaggtacgagctccctgctggagcctgggacccatggcacaggccaggcagcccggaggctgggtggggcctcagtgggggctgctgcctgacccccagcacaataaaaatgaaacgtga

SEQ ID NO: 129253 - DNA, 2125 bp, Homo sapiens
  Payload ID: 5287
  Gene Symbol: EGFL7
  Gene Name: EGF-like-domain, multiple 7
  Uniprot ID: Q9UHF1
  ENST ID: ENST00000371699
  CDS Start-End: 912-1733
agatgcaaagccggtggggacctgccaagaagccagcccacaaggccatggactcctccacgccatcagctggagcagtgggcagccccaggaagggagacgggagcggccaggggaagggcgaggggtcccccgggcgacccccgaggctcaggcgcccggactccagtcctgggcctccgttttccacccttgaacaagcggcttccacctgtgagccagctgcctcctctgaaaatggaagcccctcaactcagagggtgtcgctctgggacgtgggtcaggggccggagcaggcagggagaggtgagaggaaaggctggggaccctcacttctccctgcccaaaccctcgctcgggagcagacggctcctctgcccgcaggcacccctgcctggcagctccctccagcccccgtcgggtccgggacgtcctctgatgggaaggttccaccacatccgtggctgacagagccagcccgtccgaggccggggggcgctcggggtaaacaggaagccccatccctcccgcactctgcttcactccctcctcctgcacctcctgcagcccggctcccgcggccgcgcctggtgcccctctgtctcgcgccacctgagatgcccaggctggcctctgccaggggcttagtctgccctctcctggggcttcagaggccaaaagcaccctggtgaggggtccgggaggcccgggagggcccggggggctctgccaggcccctccacgcctctctgcccagccagcacgctctgggaagcagcccccaggaccggggaggcacaggtggcccccaccacccggaggagcagctcctgcccctgtccgggggatgactgattctcctccgccaggccacccagaggagaaggccaccccgcctggaggcacaggccatgaggggctctcaggaggtgctgctgatgtggcttctggtgttggcagtgggcggcacagagcacgcctaccggcccggccgtagggtgtgtgctgtccgggctcacggggaccctgtctccgagtcgttcgtgcagcgtgtgtaccagcccttcctcaccacctgcgacgggcaccgggcctgcagcacctaccgaaccatctataggaccgcctaccgccgcagccctgggctggcccctgccaggcctcgctacgcgtgctgccccggctggaagaggaccagcgggcttcctggggcctgtggagcagcaatatgccagccgccatgccggaacggagggagctgtgtccagcctggccgctgccgctgccctgcaggatggcggggtgacacttgccagtcagatgtggatgaatgcagtgctaggaggggcggctgtccccagcgctgcgtcaacaccgccggcagttactggtgccagtgttgggaggggcacagcctgtctgcagacggtacactctgtgtgcccaagggagggccccccagggtggcccccaacccgacaggagtggacagtgcaatgaaggaagaagtgcagaggctgcagtccagggtggacctgctggaggagaagctgcagctggtgctggccccactgcacagcctggcctcgcaggcactggagcatgggctcccggaccccggcagcctcctggtgcactccttccagcagctcggccgcatcgactccctgagcgagcagatttccttcctggaggagcagctggggtcctgctcctgcaagaaagactcgtgactgcccagcgccccaggctggactgagcccctcacgccgccctgcagcccccatgcccctgcccaacatgctgggggtccagaaaccacctcggggtgactgagcggaaggccaggcagggccttcctcctcttcctcctccccttcctcgggaggctccccagaccctggcatgggatgggctgggatcttctctgtgaatccacccctggctacccccaccctggctaccccaacggcatcccaaggccaggtgggccctcagctgagggaaggtacgagctccctgctggagcctgggacccatggcacaggccaggcagcccggaggctgggtggggcctcagtgggggctgctgcctgacccccagcacaataaaaatgaaacgtga

SEQ ID NO: 129254 - DNA, 1529 bp, Homo sapiens
  Payload ID: 5287
  Gene Symbol: EGFL7
  Gene Name: EGF-like-domain, multiple 7
  Uniprot ID: Q9UHF1
  ENST ID: ENST00000406555
  CDS Start-End: 316-1137
ccaagctggccctgcacggctgcaagggaggctcctgtggacaggccaggcaggtgggcctcaggaggtgcctccaggcggccagtgggcctgaggccccagcaagggctagggtccatctccagtcccaggacacagcagcggccaccatggccacgcctgggctccagcagcatcagcagcccccaggaccggggaggcacaggtggcccccaccacccggaggagcagctcctgcccctgtccgggggatgactgattctcctccgccaggccacccagaggagaaggccaccccgcctggaggcacaggccatgaggggctctcaggaggtgctgctgatgtggcttctggtgttggcagtgggcggcacagagcacgcctaccggcccggccgtagggtgtgtgctgtccgggctcacggggaccctgtctccgagtcgttcgtgcagcgtgtgtaccagcccttcctcaccacctgcgacgggcaccgggcctgcagcacctaccgaaccatctataggaccgcctaccgccgcagccctgggctggcccctgccaggcctcgctacgcgtgctgccccggctggaagaggaccagcgggcttcctggggcctgtggagcagcaatatgccagccgccatgccggaacggagggagctgtgtccagcctggccgctgccgctgccctgcaggatggcggggtgacacttgccagtcagatgtggatgaatgcagtgctaggaggggcggctgtccccagcgctgcgtcaacaccgccggcagttactggtgccagtgttgggaggggcacagcctgtctgcagacggtacactctgtgtgcccaagggagggccccccagggtggcccccaacccgacaggagtggacagtgcaatgaaggaagaagtgcagaggctgcagtccagggtggacctgctggaggagaagctgcagctggtgctggccccactgcacagcctggcctcgcaggcactggagcatgggctcccggaccccggcagcctcctggtgcactccttccagcagctcggccgcatcgactccctgagcgagcagatttccttcctggaggagcagctggggtcctgctcctgcaagaaagactcgtgactgcccagcgccccaggctggactgagcccctcacgccgccctgcagcccccatgcccctgcccaacatgctgggggtccagaaaccacctcggggtgactgagcggaaggccaggcagggccttcctcctcttcctcctccccttcctcgggaggctccccagaccctggcatgggatgggctgggatcttctctgtgaatccacccctggctacccccaccctggctaccccaacggcatcccaaggccaggtgggccctcagctgagggaaggtacgagctccctgctggagcctgggacccatggcacaggccaggcagcccggaggctgggtggggcctcagtgggggctgctgcctgacccccagcacaataaaaatgaaacgtga

SEQ ID NO: 129255 - DNA, 723 bp, Homo sapiens
  Payload ID: 5287
  Gene Symbol: EGFL7
  Gene Name: EGF-like-domain, multiple 7
  ENST ID: ENST00000492862
  CDS Start-End: 527-723
aagctggccctgcacggctgcaagggaggctcctgtggacaggccaggcaggtgggcctcaggaggtgcctccaggcggccagtgggcctgaggccccagcaagggctagggtccatctccagtcccaggacacagcagcggccaccatggccacgcctgggctccagcagcatcagagcagcccctgtggttggcagcaaagttcagcttggctgggcccgctgtgaggggcttcgcgctacgccctgcggtgtcccgagggctgaggtctcctcatcttctccctagcagtggatgagcaacccaacgggggcccggggaggggaactggccccgagggagaggaaccccaaagccacatctgtagccaggatgagcagtgtgaatccaggcccccaggaccggggaggcacaggtggcccccaccacccggaggagcagctcctgcccctgtccgggggatgactgattctcctccgccaggccacccagaggagaaggccaccccgcctggaggcacaggccatgaggggctctcaggaggtgctgctgatgtggcttctggtgttggcagtgggcggcacagagcacgcctaccggcccggccgtagggtgtgtgctgtccgggctcacggggaccctgtctccgagtcgttcgtgcagcgtgtgtaccagcccttcctcaccacctgcgacgggcaccgggcctgcagcacctaccg

SEQ ID NO: 129256 - DNA, 1310 bp, Homo sapiens
  Payload ID: 5288
  Gene Symbol: EGFL8
  Gene Name: EGF-like-domain, multiple 8
  Uniprot ID: Q99944
  ENST ID: ENST00000333845
  CDS Start-End: 104-985
ccaggcccacccaccagtctgagctgcttctgctgaggctggtctgcttgaagcctcccaggagaaagaagccagcctgtagggtccagcgtcaaagcgaatcatggggtccagggctgagctgtgcactctcttaggcggattctccttcctcctgctactgataccaggcgagggggccaagggtggatccctcagagagagtcagggagtctgctccaagcagacactggtggtcccgctccactacaacgagtcctacagccaaccagtgtacaagccctacctgaccttgtgcgctgggaggcgcatctgcagcacttacaggaccatgtaccgcgttatgtggcgggaggtgaggcgggaggttcagcagacccatgcagtgtgctgccagggctggaagaagcggcacccgggggcgctcacctgtgaagccatctgcgccaagccttgcctgaacggaggcgtctgcgttaggcctgaccagtgcgagtgcgcccccggctggggagggaagcactgtcatgtggacgtggatgaatgtaggaccagcatcaccctctgctcgcaccattgttttaatacggcaggcagcttcacctgcggctgcccccatgacctagtgctaggcgtggacgggcgcacctgcatggaggggtccccagagcccccaaccagtgccagcatactcagcgtggccgttcgggaggcggaaaaagatgagcgcgctctgaagcaggagattcacgagctgcgagggcgcctggagcggctggagcagtgggccggtcaggctggggcctgggtcagagcggtgctgcccgtgccgcctgaagagctgcagccagaacaggtggctgagctgtggggccggggtgaccggatcgaatctctcagcgaccaggtgctgctgctggaggagaggctaggtgcctgctcctgtgaggacaacagcctgggcctcggcgtcaatcatcgataagaagcctctacagcacccctgccccctaatttatacagaaaccggacccactaatcctctgggattggccgactgtgagctgcagataaggctatcagccaccaaagagcaatgaacaatggaaacttcagagagctgaagaaagggggaggcctgtgttcttggcctgcccctgagtcttctggctgggggcaggttgcctgggcaagaactgcttcttcaattccttaacaaatgcaaccaccaacacccagatctctctctctctttattttcagtttttttgctgttatccagataattaataaaaaccaaccacgcaaaa

SEQ ID NO: 129257 - DNA, 1312 bp, Homo sapiens
  Payload ID: 5288
  Gene Symbol: EGFL8
  Gene Name: EGF-like-domain, multiple 8
  Uniprot ID: Q99944
  ENST ID: ENST00000395512
  CDS Start-End: 106-987
gctgcttctgctgaggctggtctgcttgaagcctcccaggagaaagaagccaggtgggaatggagagagagaggaagcctgtagggtccagcgtcaaagcgaatcatggggtccagggctgagctgtgcactctcttaggcggattctccttcctcctgctactgataccaggcgagggggccaagggtggatccctcagagagagtcagggagtctgctccaagcagacactggtggtcccgctccactacaacgagtcctacagccaaccagtgtacaagccctacctgaccttgtgcgctgggaggcgcatctgcagcacttacaggaccatgtaccgcgttatgtggcgggaggtgaggcgggaggttcagcagacccatgcagtgtgctgccagggctggaagaagcggcacccgggggcgctcacctgtgaagccatctgcgccaagccttgcctgaacggaggcgtctgcgttaggcctgaccagtgcgagtgcgcccccggctggggagggaagcactgtcatgtggacgtggatgaatgtaggaccagcatcaccctctgctcgcaccattgttttaatacggcaggcagcttcacctgcggctgcccccatgacctagtgctaggcgtggacgggcgcacctgcatggaggggtccccagagcccccaaccagtgccagcatactcagcgtggccgttcgggaggcggaaaaagatgagcgcgctctgaagcaggagattcacgagctgcgagggcgcctggagcggctggagcagtgggccggtcaggctggggcctgggtcagagcggtgctgcccgtgccgcctgaagagctgcagccagaacaggtggctgagctgtggggccggggtgaccggatcgaatctctcagcgaccaggtgctgctgctggaggagaggctaggtgcctgctcctgtgaggacaacagcctgggcctcggcgtcaatcatcgataagaagcctctacagcacccctgccccctaatttatacagaaaccggacccactaatcctctgggattggccgactgtgagctgcagataaggctatcagccaccaaagagcaatgaacaatggaaacttcagagagctgaagaaagggggaggcctgtgttcttggcctgcccctgagtcttctggctgggggcaggttgcctgggcaagaactgcttcttcaattccttaacaaatgcaaccaccaacacccagatctctctctctctttattttcagtttttttgctgttatccagataattaataaaaaccaaccacgcaaaa

SEQ ID NO: 129258 - DNA, 1312 bp, Homo sapiens
  Payload ID: 5288
  Gene Symbol: EGFL8
  Gene Name: EGF-like-domain, multiple 8
  Uniprot ID: Q99944
  ENST ID: ENST00000399648
  CDS Start-End: 106-987
gctgcttctgctgaggctggtctgcttgaagcctcccaggagaaagaagccaggtgggaatggagagagagaggaagcctgtagggtccagcgtcaaagcgaatcatggggtccagggctgagctgtgcactctcttaggcggattctccttcctcctgctactgataccaggcgagggggccaagggtggatccctcagagagagtcagggagtctgctccaagcagacactggtggtcccgctccactacaacgagtcctacagccaaccagtgtacaagccctacctgaccttgtgcgctgggaggcgcatctgcagcacttacaggaccatgtaccgcgttatgtggcgggaggtgaagcgggaggttcagcagacccatgcagtgtgctgccagggctggaagaagcggcacccgggggcgctcacctgtgaagccatctgcgccaagccttgcctgaacggaggcgtctgcgttaggcctgaccagtgcgagtgcgcccccggctggggagggaagcactgtcatgtggacgtggatgaatgtaggaccagcatcaccctctgctcgcaccattgttttaatacggcaggcagcttcacctgcggctgcccccatgacctagtgctaggcgtggacgggcgcacctgcatggaggggtccccagagcccccaaccagtgccagcatactcagcgtggccgttcgggaggcggaaaaagatgagcgcgctctgaagcaggagattcacgagctgcgagggcgcctggagcggctggagcagtgggccggtcaggctggggcctgggtcagagcggtgctgcccgtgccgcctgaagagctgcagccagaacaggtggctgagctgtggggccggggtgaccggatcgaatctctcagcgaccaggtgctgctgctggaggagaggctaggtgcctgctcctgtgaggacaacagcctgggcctcggcgtcaatcatcgataagaagcctctacagcacccctgccccctaatttatacagaaaccggacccactaatcctctgggattggccgactgtgagctgcagataaggctatcagccaccaaagagcaatgaacaatggaaacttcagagagctgaagaaagggggaggcctgtgttcttggcctgcccctgagtcttctggctgggggcaggttgcctgggcaagaactgcttcttcaattccttaacaaatgcaaccaccaacacccagatctctctctctctttattttcagtttttttgctgttatccagataattaataaaaaccaaccacgcaaaa

SEQ ID NO: 129259 - DNA, 825 bp, Homo sapiens
  Payload ID: 5288
  Gene Symbol: EGFL8
  Gene Name: EGF-like-domain, multiple 8
  ENST ID: ENST00000454755
  CDS Start-End: 51-825
gggaatggagagagagaggaagcctgtagggtccagcgtcaaagcgaatcatggggtccagggctgagctgtgcactctcttaggcggattctccttcctcctgctactgataccaggcgagggggccaagggtggatccctcagagagagtcagggagtctgctccaagcagacactggtggtcccgctccactacaacgagtcctacagccaaccagtgtacaagccctacctgaccttgtgcgctgggaggcgcatctgcagcacttacaggaccatgtaccgcgttatgtggcgggaggtgaggcgggaggttcagcagacccatgcagtgtgctgccagggctggaagaagcggcacccgggggcgctcacctgtgaagccatctgcgccaagccttgcctgaacggaggcgtctgcgttaggcctgaccagtgcgagtgcgcccccggctggggagggaagcactgtcatgtgggcagcttcacctgcggctgcccccatgacctagtgctaggcgtggacgggcgcacctgcatggaggggtccccagagcccccaaccagtgccagcatactcagcgtggccgttcgggaggcggaaaaagatgagcgcgctctgaagcaggagattcacgagctgcgagggcgcctggagcggctggagcagtgggccggtcaggctggggcctgggtcagagcggtgctgcccgtgccgcctgaagagctgcagccagaacaggtggctgagctgtggggccggggtgaccggatcgaatctctcagcgaccaggtgctgctgctggaggagaggctaggtgcct

SEQ ID NO: 129260 - DNA, 1312 bp, Homo sapiens; identical to SEQ ID NO: 129257
  Payload ID: 5288
  Gene Symbol: EGFL8
  Gene Name: EGF-like-domain, multiple 8
  Uniprot ID: Q99944
  ENST ID: ENST00000433364
  CDS Start-End: 106-987

SEQ ID NO: 129261 - DNA, 1312 bp, Homo sapiens; identical to SEQ ID NO: 129257
  Payload ID: 5288
  Gene Symbol: EGFL8
  Gene Name: EGF-like-domain, multiple 8
  Uniprot ID: Q99944
  ENST ID: ENST00000413733
  CDS Start-End: 106-987

SEQ ID NO: 129262 - DNA, 1310 bp, Homo sapiens
  Payload ID: 5288
  Gene Symbol: EGFL8
  Gene Name: EGF-like-domain, multiple 8
  Uniprot ID: Q99944
  ENST ID: ENST00000443511
  CDS Start-End: 104-985
ccaggcccacccaccagtctgagctgcttctgctgaggctggtctgcttgaagcctcccaggagaaagaagccagcctgtagggtccagcgtcaaagcgaatcatggggtccagggctgagctgtgcactctcttaggcggattctccttcctcctgctactgataccaggcgagggggccaagggtggatccctcagagagagtcagggagtctgctccaagcagacactggtggtcccgctccactacaacgagtcctacagccaaccagtgtacaagccctacctgaccttgtgcgctgggaggcgcatctgcagcacttacaggaccatgtaccgcgttatgtggcgggaggtgaggcgggaggttcagcagacccatgcagtgtgctgccagggctggaagaagcggcacccgggggcgctcacctgtgaagccatctgcgccaagccttgcctgaacggaggcgtctgcgttaggcctgaccagtgcgagtgcgcccccggctggggagggaagcactgtcatgtggacgtggatgaatgtaggaccagcatcaccctctgctcgcaccattgttttaatacggcaggcagcttcacctgcggctgcccccatgacctagtgctaggcgtggacgggcgcacctgcatggaggggtccccagagcccccaaccagtgccagcatactcagcgtggccgttcgggaggcggaaaaagatgagcgcgctctgaagcaggagattcacgagctgcgagggcgcctggagcggctggagcagtgggccggtcaggctggggcctgggtcagagcggtgctgcccgtgccgcctgaagagctgcagccagaacaggtggctgagctgtggggccggggtgaccggatcgaatctctcagcgaccaggtgctgctgctggaggagaggctaggtgcctgctcctgtgaggacaacagcctgggcctcggcgtcaatcatcgataagaagcctctacagcacccctgccccctaatttatacagaaaccggacccactaatcctctgggattggccgactgtgagctgcagataaggctatcagccaccaaagagcaatgaacaatggaaacttcagagagctgaagaaacggggaggcctgtgttcttggcctgcccctgagtcttctggctgggggcaggttgcctgggcaagaactgcttcttcaattccttaacaaatgcaaccaccaacacccagatctctctctctctttattttcagtttttttgctgttatccagataattaataaaaaccaaccacgcaaaa

SEQ ID NO: 129263 - DNA, 825 bp, Homo sapiens; identical to SEQ ID NO: 129259
  Payload ID: 5288
  Gene Symbol: EGFL8
  Gene Name: EGF-like-domain, multiple 8
  ENST ID: ENST00000418522
  CDS Start-End: 51-825

SEQ ID NO: 129264 - DNA, 1310 bp, Homo sapiens; identical to SEQ ID NO: 129256
  Payload ID: 5288
  Gene Symbol: EGFL8
  Gene Name: EGF-like-domain, multiple 8
  Uniprot ID: Q99944
  ENST ID: ENST00000452189
  CDS Start-End: 104-985

SEQ ID NO: 129265 - DNA, 1277 bp, Homo sapiens
  Payload ID: 5288
  Gene Symbol: EGFL8
  Gene Name: EGF-like-domain, multiple 8
  Uniprot ID: Q99944
  ENST ID: ENST00000450526
  CDS Start-End: 74-955
tgctgaggctggtctgcttgaagcctcccaggagaaagaagccagcctgtagggtccagcgtcaaagcgaatcatggggtccagggctgagctgtgcactctcttaggcggattctccttcctcctgctactgataccaggcgagggggccaagggtggatccctcagagagagtcagggagtctgctccaagcagacactggtggtcccgctccactacaacgagtcctacagccaaccagtgtacaagccctacctgaccttgtgcgctgggaggcgcatctgcagcacttacaggaccatgtaccgcgttatgtggcgggaggtgaggcgggaggttcagcagacccatgcagtgtgctgccagggctggaagaagcggcacccgggggcgctcacctgtgaagccatctgcgccaagccttgcctgaacggaggcgtctgcgttaggcctgaccagtgcgagtgcgcccccggctggggagggaagcactgtcatgtggacgtggatgaatgtaggaccagcatcaccctctgctcgcaccattgttttaatacggcaggcagcttcacctgcggctgcccccatgacctagtgctaggcgtggacgggcgcacctgcatggaggggtccccagagcccccaaccagtgccagcatactcagcgtggccgttcgggaggcggaaaaagatgagcgcgctctgaagcaggagattcacgagctgcgagggcgcctggagcggctggagcagtgggccggtcaggctggggcctgggtcagagcggtgctgcccgtgccgcctgaagagctgcagccagaacaggtggctgagctgtggggccggggtgaccggatcgaatctctcagcgaccaggtgctgctgctggaggagaggctaggtgcctgctcctgtgaggacaacagcctgggcctcggcgtcaatcatcgataagaagcctctacagcacccctgccccctaatttatacagaaaccggacccactaatcctctgggattggccgactgtgagctgcagataaggctatcagccaccaaagagcaatgaacaatggaaacttcagagagctgaagaaagggggaggcctgtgttcttggcctgcccctgagtcttctggctgggggcaggttgcctgggcaagaactgcttcaattccttaacaaatgcaaccaccaacacccagatctctctctctctttattttcagtttttttgctgttatccagataattaataaaaaccaaccacgcaaaa

SEQ ID NO: 129266 - DNA, 825 bp, Homo sapiens; identical to SEQ ID NO: 129259
  Payload ID: 5288
  Gene Symbol: EGFL8
  Gene Name: EGF-like-domain, multiple 8
  ENST ID: ENST00000432129
  CDS Start-End: 51-825

SEQ ID NO: 129267 - DNA, 825 bp, Homo sapiens
  Payload ID: 5288
  Gene Symbol: EGFL8
  Gene Name: EGF-like-domain, multiple 8
  ENST ID: ENST00000423079
  CDS Start-End: 51-825
gggaatggagagagagaggaagcctgtagggtccagcgtcaaagcgaatcatggggtccagggctgagctgtgcactctcttaggcggattctccttcctcctgctactgataccaggcgagggggccaagggtggatccctcagagagagtcagggagtctgctccaagcagacactggtggtcccgctccactacaacgagtcctacagccaaccagtgtacaagccctacctgaccttgtgcgctgggaggcgcatctgcagcacttacaggaccatgtaccgcgttatgtggcgggaggtgaggcgggaggttcagcagacccatgcagtgtgctgccagggctggaagaagcggcacccgggggcgctcacctgtgaagccatctgcgccaagccttgcctgaacggaggcgtctgcgttaggcctgaccagtgcgagtgcgcccccggctggggagggaagcactgtcatgtgggcagcttcacctgcggctgcccccatgacctagtgctaggcgtggacgggcgcacctgcatggaggggtccccagagcccccaaccagtgccagcatactcagcgtggccgttcgggaggcagaaaaagatgagcgcgctctgaagcaggagattcacgagctgcgagggcgcctggagcggctggagcagtgggccggtcaggctggggcctgggtcagagcggtgctgcccgtgccgcctgaagagctgcagccagaacaggtggctgagctgtggggccggggtgaccggatcgaatctctcagcgaccaggtgctgctgctggaggagaggctaggtgcct

SEQ ID NO: 129268 - DNA, 825 bp, Homo sapiens
  Payload ID: 5288
  Gene Symbol: EGFL8
  Gene Name: EGF-like-domain, multiple 8
  ENST ID: ENST00000422193
  CDS Start-End: 51-825
gggaatggagagagagaggaagcctgtagggtccagcgtcaaagcgaatcatggggtccagggctgagctgtgcactctcttaggcggattctccttcctcctgctactgataccaggcgagggggccaagggtggatccctcagagagagtcagggagtctgctccaagcagacactggtggtcccgctccactacaacgagtcctacagccaaccagtgtacaagccctacctgaccttgtgcgctgggaggcgcatctgcagcacttacaggaccatgtaccgcgttatgtggcgggaggtgaagcgggaggttcagcagacccatgcagtgtgctgccagggctggaagaagcggcacccgggggcgctcacctgtgaagccatctgcgccaagccttgcctgaacggaggcgtctgcgttaggcctgaccagtgcgagtgcgcccccggctggggagggaagcactgtcatgtgggcagcttcacctgcggctgcccccatgacctagtgctaggcgtggacgggcgcacctgcatggaggggtccccagagcccccaaccagtgccagcatactcagcgtggccgttcgggaggcggaaaaagatgagcgcgctctgaagcaggagattcacgagctgcgagggcgcctggagcggctggagcagtgggccggtcaggctggggcctgggtcagagcggtgctgcccgtgccgcctgaagagctgcagccagaacaggtggctgagctgtggggccggggtgaccggatcgaatctctcagcgaccaggtgctgctgctggaggagaggctaggtgcct

SEQ ID NO: 129269 - DNA, 825 bp, Homo sapiens; identical to SEQ ID NO: 129259
  Payload ID: 5288
  Gene Symbol: EGFL8
  Gene Name: EGF-like-domain, multiple 8
  ENST ID: ENST00000411747
  CDS Start-End: 51-825

SEQ ID NO: 129270 - DNA, 1309 bp, Homo sapiens
  Payload ID: 5288
  Gene Symbol: EGFL8
  Gene Name: EGF-like-domain, multiple 8
  Uniprot ID: Q99944
  ENST ID: ENST00000436155
  CDS Start-End: 106-987
gctgcttctgctgaggctggtctgcttgaagcctcccaggagaaagaagccaggtgggaatggagagagagaggaagcctgtagggtccagcgtcaaagcgaatcatggggtccagggctgagctgtgcactctcttaggcggattctccttcctcctgctactgataccaggcgagggggccaagggtggatccctcagagagagtcagggagtctgctccaagcagacactggtggtcccgctccactacaacgagtcctacagccaaccagtgtacaagccctacctgaccttgtgcgctgggaggcgcatctgcagcacttacaggaccatgtaccgcgttatgtggcgggaggtgaggcgggaggttcagcagacccatgcagtgtgctgccagggctggaagaagcggcacccgggggcgctcacctgtgaagccatctgcgccaagccttgcctgaacggaggcgtctgcgttaggcctgaccagtgcgagtgcgcccccggctggggagggaagcactgtcatgtggacgtggatgaatgtaggaccagcatcaccctctgctcgcaccattgttttaatacggcaggcagcttcacctgcggctgcccccatgacctagtgctaggcgtggacgggcgcacctgcatggaggggtccccagagcccccaaccagtgccagcatactcagcgtggccgttcgggaggcggaaaaagatgagcgcgctctgaagcaggagattcacgagctgcgagggcgcctggagcggctggagcagtgggccggtcaggctggggcctgggtcagagcggtgctgcccgtgccgcctgaagagctgcagccagaacaggtggctgagctgtggggccggggtgaccggatcgaatctctcagcgaccaggtgctgctgctggaggagaggctaggtgcctgctcctgtgaggacaacagcctgggcctcggcgtcaatcatcgataagaagcctctacagcacccctgccccctaatttatacagaaaccggacccactaatcctctgggattggccgactgtgagctgcagataaggctatcagccaccaaagagcaatgaacaatggaaacttcagagagctgaagaaagggggaggcctgtgttcttggcctgcccctgagtcttctggctgggggcaggttgcctgggcaagaactgcttcaattccttaacaaatgcaaccaccaacacccagatctctctctctctttattttcagtttttttgctgttatccagataattaataaaaaccaaccacgcaaaa

SEQ ID NO: 129271 - DNA, 1310 bp, Homo sapiens
  Payload ID: 5288
  Gene Symbol: EGFL8
  Gene Name: EGF-like-domain, multiple 8
  Uniprot ID: Q99944
  ENST ID: ENST00000447331
  CDS Start-End: 104-985
ccaggcccacccaccagtctgagctgcttctgctgaggctggtctgcttgaagcctcccaggagaaagaagccagcctgtagggtccagcgtcaaagcgaatcatggggtccagggctgagctgtgcactctcttaggcggattctccttcctcctgctactgataccaggcgagggggccaagggtggatccctcagagagagtcagggagtctgctccaagcagacactggtggtcccgctccactacaacgagtcctacagccaaccagtgtacaagccctacctgaccttgtgcgctgggaggcgcatctgcagcacttacaggaccatgtaccgcgttatgtggcgggaggtgaagcgggaggttcagcagacccatgcagtgtgctgccagggctggaagaagcggcacccgggggcgctcacctgtgaagccatctgcgccaagccttgcctgaacggaggcgtctgcgttaggcctgaccagtgcgagtgcgcccccggctggggagggaagcactgtcatgtggacgtggatgaatgtaggaccagcatcaccctctgctcgcaccattgttttaatacggcaggcagcttcacctgcggctgcccccatgacctagtgctaggcgtggacgggcgcacctgcatggaggggtccccagagcccccaaccagtgccagcatactcagcgtggccgttcgggaggcggaaaaagatgagcgcgctctgaagcaggagattcacgagctgcgagggcgcctggagcggctggagcagtgggccggtcaggctggggcctgggtcagagcggtgctgcccgtgccgcctgaagagctgcagccagaacaggtggctgagctgtggggccggggtgaccggatcgaatctctcagcgaccaggtgctgctgctggaggagaggctaggtgcctgctcctgtgaggacaacagcctgggcctcggcgtcaatcatcgataagaagcctctacagcacccctgccccctaatttatacagaaaccggacccactaatcctctgggattggccgactgtgagctgcagataaggctatcagccaccaaagagcaatgaacaatggaaacttcagagagctgaagaaagggggaggcctgtgttcttggcctgcccctgagtcttctggctgggggcaggttgcctgggcaagaactgcttcttcaattccttaacaaatgcaaccaccaacacccagatctctctctctctttattttcagtttttttgctgttatccagataattaataaaaaccaaccacgcaaaa

SEQ ID NO: 129272 - DNA, 1310 bp, Homo sapiens
  Payload ID: 5288
  Gene Symbol: EGFL8
  Gene Name: EGF-like-domain, multiple 8
  Uniprot ID: Q99944
  ENST ID: ENST00000455889
  CDS Start-End: 104-985
ccaggcccacccaccagtctgagctgcttctgctgaggctggtctgcttgaagcctcccaggagaaagaagccagcctgtagggtccagcgtcaaagcgaatcatggggtccagggctgagctgtgcactctcttaggcggattctccttcctcctgctactgataccaggcgagggggccaagggtggatccctcagagagagtcagggagtctgctccaagcagacactggtggtcccgctccactacaacgagtcctacagccaaccagtgtacaagccctacctgaccttgtgcgctgggaggcgcatctgcagcacttacaggaccatgtaccgcgttatgtggcgggaggtgaggcgggaggttcagcagacccatgcagtgtgctgccagggctggaagaagcggcacccgggggcgctcacctgtgaagccatctgcgccaagccttgcctgaacggaggcgtctgcgttaggcctgaccagtgcgagtgcgcccccggctggggagggaagcactgtcatgtggacgtggatgaatgtaggaccagcatcaccctctgctcgcaccattgttttaatacggcaggcagcttcacctgcggctgcccccatgacctagtgctaggcgtggacgggcgcacctgcatggaggggtccccagagcccccaaccagtgccagcatactcagcgtggccgttcgggaggcagaaaaagatgagcgcgctctgaagcaggagattcacgagctgcgagggcgcctggagcggctggagcagtgggccggtcaggctggggcctgggtcagagcggtgctgcccgtgccgcctgaagagctgcagccagaacaggtggctgagctgtggggccggggtgaccggatcgaatctctcagcgaccaggtgctgctgctggaggagaggctaggtgcctgctcctgtgaggacaacagcctgggcctcggcgtcaatcatcgataagaagcctctacagcacccctgccccctaatttatacagaaaccggacccactaatcctctgggattggccgactgtgagctgcagataaggctatcagccaccaaagagcaatgaacaatggaaacttcagagagctgaagaaagggggaggcctgtgttcttggcctgcccctgagtcttctggctgggggcaggttgcctgggcaagaactgcttcttcaattccttaacaaatgcaaccaccaacacccagatctctctctctctttattttcagtttttttgctgttatccagataattaataaaaaccaaccacgcaaaa

SEQ ID NO: 129273 - DNA, 825 bp, Homo sapiens; identical to SEQ ID NO: 129259
  Payload ID: 5288
  Gene Symbol: EGFL8
  Gene Name: EGF-like-domain, multiple 8
  ENST ID: ENST00000421005
  CDS Start-End: 51-825

SEQ ID NO: 129274 - DNA, 1312 bp, Homo sapiens
  Payload ID: 5288
  Gene Symbol: EGFL8
  Gene Name: EGF-like-domain, multiple 8
  Uniprot ID: Q99944
  ENST ID: ENST00000418252
  CDS Start-End: 106-987
gctgcttctgctgaggctggtctgcttgaagcctcccaggagaaagaagccaggtgggaatggagagagagaggaagcctgtagggtccagcgtcaaagcgaatcatggggtccagggctgagctgtgcactctcttaggcggattctccttcctcctgctactgataccaggcgagggggccaagggtggatccctcagagagagtcagggagtctgctccaagcagacactggtggtcccgctccactacaacgagtcctacagccaaccagtgtacaagccctacctgaccttgtgcgctgggaggcgcatctgcagcacttacaggaccatgtaccgcgttatgtggcgggaggtgaggcgggaggttcagcagacccatgcagtgtgctgccagggctggaagaagcggcacccgggggcgctcacctgtgaagccatctgcgccaagccttgcctgaacggaggcgtctgcgttaggcctgaccagtgcgagtgcgcccccggctggggagggaagcactgtcatgtggacgtggatgaatgtaggaccagcatcaccctctgctcgcaccattgttttaatacggcaggcagcttcacctgcggctgcccccatgacctagtgctaggcgtggacgggcgcacctgcatggaggggtccccagagcccccaaccagtgccagcatactcagcgtggccgttcgggaggcggaaaaagatgagcgcgctctgaagcaggagattcacgagctgcgagggcgcctggagcggctggagcagtgggccggtcaggctggggcctgggtcagagcggtgctgcccgtgccgcctgaagagctgcagccagaacaggtggctgagctgtggggccggggtgaccggatcgaatctctcagcgaccaggtgctgctgctggaggagaggctaggtgcctgctcctgtgaggacaacagcctgggcctcggcgtcaatcatcgataagaagcctctacagcacccctgccccctaatttatacagaaaccggacccactaatcctctgggattggccgactgtgagctgcagataaggctatcagccaccaaagagcaatgaacaatggaaacttcagagagctgaagaaacggggaggcctgtgttcttggcctgcccctgagtcttctggctgggggcaggttgcctgggcaagaactgcttcttcaattccttaacaaatgcaaccaccaacacccagatctctctctctctttattttcagtttttttgctgttatccagataattaataaaaaccaaccacgcaaaa

SEQ ID NO: 129275 - DNA, 1310 bp, Homo sapiens; identical to SEQ ID NO: 129256
  Payload ID: 5288
  Gene Symbol: EGFL8
  Gene Name: EGF-like-domain, multiple 8
  Uniprot ID: Q99944
  ENST ID: ENST00000414111
  CDS Start-End: 104-985

SEQ ID NO: 129276 - DNA, 1312 bp, Homo sapiens
  Payload ID: 5288
  Gene Symbol: EGFL8
  Gene Name: EGF-like-domain, multiple 8
  Uniprot ID: Q99944
  ENST ID: ENST00000452290
  CDS Start-End: 106-987
gctgcttctgctgaggctggtctgcttgaagcctcccaggagaaagaagccaggtgggaatggagagagagaggaagcctgtagggtccagcgtcaaagcgaatcatggggtccagggctgagctgtgcactctcttaggcggattctccttcctcctgctactgataccaggcgagggggccaagggtggatccctcagagagagtcagggagtctgctccaagcagacactggtggtcccgctccactacaacgagtcctacagccaaccagtgtacaagccctacctgaccttgtgcgctgggaggcgcatctgcagcacttacaggaccatgtaccgcgttatgtggcgggaggtgaggcgggaggttcagcagacccatgcagtgtgctgccagggctggaagaagcggcacccgggggcgctcacctgtgaagccatctgcgccaagccttgcctgaacggaggcgtctgcgttaggcctgaccagtgcgagtgcgcccccggctggggagggaagcactgtcatgtggacgtggatgaatgtaggaccagcatcaccctctgctcgcaccattgttttaatacggcaggcagcttcacctgcggctgcccccatgacctagtgctaggcgtggacgggcgcacctgcatggaggggtccccagagcccccaaccagtgccagcatactcagcgtggccgttcgggaggcagaaaaagatgagcgcgctctgaagcaggagattcacgagctgcgagggcgcctggagcggctggagcagtgggccggtcaggctggggcctgggtcagagcggtgctgcccgtgccgcctgaagagctgcagccagaacaggtggctgagctgtggggccggggtgaccggatcgaatctctcagcgaccaggtgctgctgctggaggagaggctaggtgcctgctcctgtgaggacaacagcctgggcctcggcgtcaatcatcgataagaagcctctacagcacccctgccccctaatttatacagaaaccggacccactaatcctctgggattggccgactgtgagctgcagataaggctatcagccaccaaagagcaatgaacaatggaaacttcagagagctgaagaaagggggaggcctgtgttcttggcctgcccctgagtcttctggctgggggcaggttgcctgggcaagaactgcttcttcaattccttaacaaatgcaaccaccaacacccagatctctctctctctttattttcagtttttttgctgttatccagataattaataaaaaccaaccacgcaaaa

SEQ ID NO: 129277 - DNA, 7097 bp, Homo sapiens
  Payload ID: 5289
  Gene Symbol: EGLN1
  Gene Name: egl-9 family hypoxia-inducible factor 1
  Uniprot ID: Q9GZT9
  ENST ID: ENST00000366641
  CDS Start-End: 3157-4437
ttaggggcagaaaaacatttgtaataattaatggctttgagagacacaaggctttgtttgccccagagtattagttaacccacctagtgctcctaatcatacaatattaaggattgggagggacattcattgcctcactctctatttgtttcaccttctgtaaaattggtagaataatagtacccacttcatagcattgtatgatgattaaattggttaatatttttaaaatgcttagaacacagattgggcacataacagcaagcaccacatgtgtttataagataaattcctttgtgttgccttccgttaaagtttaaataagtaaataaataaataaatacttgcatgacattttgaagtctctctataacatctgagtaagtggcggctgcgacaatgctactggagttccagaatcgtgttggtgacaagattgttcaccagcatatggtgtggtgaaaactcactaatttggaattagttcagattattaagcctgaataggtgaaaatcctgaaatcaaggatctttggaactatttgaaatcagtattttatattttcctgttgtattcattaaagtgttgcaagtgttctatttgatggattaagtatatttaggatatacatgttcaatttgtgattttgtatacttaattggaacaagaaagctaataaaggttttgatatggacatctattcttttaagtaaacttcaatgaaaatatatgagtagagcatatagagatgtaaataatttgtggacacaccacagactgaaatagcaaatttaaaagaaattgttggaagaatcaagtgtttgtggaatgagtcctcctagtaaagttcctgctcttgtgaataattaagcctcatgtataattactatagcaaaaggaagcctaagaagtattagactctacttgtatttaaattacattttacataatttatgtgtatgaaaaatgttttaaatgcttattttcgtaagccatgagatagctcctttatattttaagaatttctgaattaatttgcttggattttattagtgcaaatggcagagctagcaattcctttttctgtgttcccattccatcctattcatccctcttttaggaaactctgaactctggattgtccttgtttacatacctgcctcctgcattggactatgtgtctctgagtgtagtatgactaattcatttgtttgtcaaggactctcaatgcatttgttgaacagcctaattagtaatgtctgcaacaatgacattttactgtatttaataaagctctgggaaagtaggatacacataagacaggtctaggtctaaattctttacagaaacttggatttttagttcggtttgaaatttgaagatgtgagtatatttatctcagtttcccaaaggacaagctaattggaattatcatcctctttcacttgattggatccccagaatgccatttacgcatgcagcaggattttataacagttttaaattctgtatatttgatgaagaggttttatatttttggattcaagcctctttttaaacttctacaatatggtttacaataattccttatatcctgcttttgaaatacatattacaactttttaagtttggaaggctatatttcaaggactgaagttacagtatactcaagtgatacacaagcctagcaccccactttccacatagtgttcgataaagattgataaactcgaaatcacagaccttttaattcttaagacaaatagcagcagaaagaaacatctttggcttatttctggtaaggtttttatgctctgtaaaacaaagaattgtattcatccgcgcagcacagattctattaaaaataaatgtgagagtcgttaatgtagtactgctcatttaccatcaaaattcacttttcaggaataatcccatcagtttaaattggatattggaatgagcattgattacatttaacttggtagcccaaaatttcttcatggggttttgaactcggcgggatttcaaaggttttaaaaatgagtttttgattttttttaaaaccctcaaatttcattacctttaaactaggtcgaaacggggcgcaagagattggattaacaccatagtaatacttattttgttcttaaccatttcagggcttcttgaaatagaggctgtatggtgtaatggaaaaaacagccttggaatctgggagcctgattcctggattcagtcccagttttgcgtgaccttgggcaagttactttacttctctgaatttccgtttcctcctctgcaaaatgaggatcgcaatagccaccttgcaaccttgactggagcgagcctcgcacaccccgcgccggcctggaggaagagcagccatgattacgccgccttcgctccgctacccgcttgcggctggcgccctcctccagcaggtgtaggcgctgccgcgctgccccacgcctttccgccgctcgcgggcctgcgcctcggcgtccccgaggaggccgctgcgggctgaggtagcgcaccggcctctcggcgtcccagtccggtcccgggcggagggaaagcgggcgacccacctccgaggcagaagccgaggcccggccccgccgagtgcggaggagcgcaggcagcccccgcccctcggccctccccccggccctcccggccctccctccgccccctccgccctcgcgcgccgcccgcccgggtcgccgcggggccgtggtgtacgtgcagagcgcgcagagcgagtggcgcccgtatgccctgcgctcctccacagcctgggccgggccgcccgggacgctgaggcggcggcggcggccgagggggccggtcttgcgctccccaggcccgcgcgcctgagcccaggttgccattcgccgcacaggccctattctctcagccctcggcggcgatgaggcgctgaggcggctgccggcgctgcgccggagcttaggactcggaagcggccgggccgagggcgtggggtgccggcctccctgaggcgagggtagcgggtgcatggcgcagtaacggcccctatctctctccccgctccccagcctcgggcgaggccgtccggccgctacccctcctgctcggccgccgcagtcgccgtcgccgccgccgccgccgccatggccaatgacagcggcgggcccggcgggccgagcccgagcgagcgagaccggcagtactgcgagctgtgcgggaagatggagaacctgctgcgctgcagccgctgccgcagctccttctactgctgcaaggagcaccagcgtcaggactggaagaagcacaagctcgtgtgccagggcagcgagggcgccctcggccacggagtgggcccacaccagcattccggccccgcgccgccggctgcagtgccgccgcccagggccggggcccgggagcccaggaaggcagcggcgcgccgggacaacgcctccggggacgcggccaagggaaaagtaaaggccaagcccccggccgacccagcggcggccgcgtcgccgtgtcgtgcggccgccggcggccagggctcggcggtggctgccgaagccgagcccggcaaggaggagccgccggcccgctcatcgctgttccaggagaaggcgaacctgtaccccccaagcaacacgcccggggatgcgctgagccccggcggcggcctgcggcccaacgggcagacgaagcccctgccggcgctgaagctggcgctcgagtacatcgtgccgtgcatgaacaagcacggcatctgtgtggtggacgacttcctcggcaaggagaccggacagcagatcggcgacgaggtgcgcgccctgcacgacaccgggaagttcacggacgggcagctggtcagccagaagagtgactcgtccaaggacatccgaggcgataagatcacctggatcgagggcaaggagcccggctgcgaaaccattgggctgctcatgagcagcatggacgacctgatacgccactgtaacgggaagctgggcagctacaaaatcaatggccggacgaaagccatggttgcttgttatccgggcaatggaacgggttatgtacgtcatgttgataatccaaatggagatggaagatgtgtgacatgtatatattatcttaataaagactgggatgccaaggtaagtggaggtatacttcgaatttttccagaaggcaaagcccagtttgctgacattgaacccaaatttgatagactgctgtttttctggtctgaccgtcgcaaccctcatgaagtacaaccagcatatgctacaaggtacgcaataactgtttggtattttgatgcagatgagagagcacgagctaaagtaaaatatctaacaggtgaaaaaggtgtgagggttgaactcaataaaccttcagattcggtcggtaaagacgtcttctagagcctttgatccagcaataccccacttcacctacaatattgttaactatttgttaacttgtgaatacgaataaatgggataaagaaaaatagacaaccagttcgcattttaataaggaaacagaaacaactttttgtgttgcatcaaacagaagattttgactgctgtgactttgtactgcatgatcaacttcaaatctgtgattgcttacaggaggaagataagctactaattgaaaatggtttttacatctggatatgaaataagtgccctgtgtagaatttttttcattcttatattttgccagatctgttatctagctgagttcatttcatctctcccttttttatatcaagtttgaatttgggataatttttctatattaggtacaatttatctaaactgaattgagaaaaaattacagtattattcctcaaaataacatcaatctatttttgtaaacctgttcatactattaaattttgccctaaaagacctcttaataatgattgttgccagtgactgatgattaattttattttacttaaaataagaaaaggagcactttaattacaactgaaaaatcagattgttttgtagtccttccttacactaatttgaactgttaaagattgctgctttttttttgacattgtcaataacgaaacctaattgtaaaacagtcaccatttactaccaataacttttagttaatgttttacaaggaaaaagacacaagaagagtttaaatttttttgttttgttttgtttttttgagacagtcttgctctgttacccaggctggaggggagtggtgcattcttggctcactgcaacctccgcctcccaggttcaagcaatcctcccacctcagcctcccaactagctgggactgcaggcacacaccaccatgcctgactaatttttgtatgtttagtagagacggggttttgccatgttgcctaggctggggtttaagttaaattttttaaaaaactaaagtgactggcactaagtgaacttgagattatcctcagcttcaagttcctaagataagggctttcttaagctttcaggtgtatgtatcctctagatgtagacaataatgtcccatttctaagtcttttccttttgcttctccttaaattgattgtacttccaaatttgctgttatgtttttttcctaatactgtgatctatctgatctgcagacaagaaccttgtctctgttgaagagcatcaaggggagattatgtacacattgaaactgaagtgtggtgttactgacggaatgtgcagtaactcctcagatatctgttaaggcatttcccagatgtgatgccagccttcttacctgtactgaaagatgcttagcttagaaaaaaacaaaacagatgcaaaatcagataattttattttgtttcatgggttttcttatttactttttaaacaaggaaggaatattagaaaatcacacaaggcctcacatacatgttatttaaagaatgaattgggacggatgtcttagacttcactttcctaggctttttagcaaaacctaaagggtggtatccatattttgcgtgaattatgggtgtaagaccttgcccacttaggttttctatctctgtccttgatcttctttgccaaaatgtgagtatacagaaattttctgtatatttcaacttaagacatttttagcatctgtatagtttgtattcaatttgagaccttttctatgggaagctcagtaatttttattaaaagattgccattgctattcatgtaaaacatggaaaaaaattgtgtagtgaagccaacagtggacttaggatgggattgaatgttcagtatagtgatctcacttaggagaatttgcaggagaaagtgatagtttattgttttttcctcgcccatattcagttttgttctacttcctccccttccttccagatgataacatcacatctctacagtaagtgcctctgccagcccaacccaggagcgcaagttgtctttgccatctggtctatagtacagtgcgcggcgttaggccacaactcaaaagcattatcttttttagggttagtagaaattgttttatgttgatgggaggtttgtttgattgtcaaaatgtacagccacagccttttaatttgggagcccctgttgtcattcaaatgtgtacctctacagttgtaaaaagtattagattctactatctgtgggttgtgcttgccagacaggtcttaaattgtatattttttggaaaagtttatatactctcttaggaatcattgtgaaaagatcaagaaatcaggatggccatttatttaatatccattcatttcatgttagtgggactattaacttgtcaccaagcaggactctatttcaaacaaaatttaaaactgtttgtggcctatatgtgtttaatcctggttaaagataaagcttcataatgctgtttttattcaacacattaaccagctgtaaaacacagacctttatcaagagtaggcaaagattttcaggattcatatacagatagactataaagtcatgtaatttgaaaagcagtgtttcattatgaaagagctctcaagttgcttgtaaagctaatctaattaaaaagatgtataaatgttgttgaaacatta

SEQ ID NO: 129278 - DNA, 2102 bp, Homo sapiens
  Payload ID: 5290
  Gene Symbol: EGLN2
  Gene Name: egl-9 family hypoxia-inducible factor 2
  Uniprot ID: Q96KS0
  ENST ID: ENST00000303961
  CDS Start-End: 311-1534
gggcggggtatggcgcgctgtgcggcgcagggcggctggcacaaacggcggcgccggggccggaggaaaaagctcgccaccctgaagggtcccttcccaagcccttagggaccgcagaggacttggggaccagcaagcaacccccagggcacgagaagagctcttgctgtctgccctgcctcaccctgccccacgccaggcccggtggcccccagctgcatcaagtggaggcggaggaggaggcggaggagggtggcaccatgggcccgggcggtgccctccatgcccgggggatgaagacactgctgccatggacagcccgtgccagccgcagcccctaagtcaggctctccctcagttaccagggtcttcgtcagagcccttggagcctgagcctggccgggccaggatgggagtggagagttacctgccctgtcccctgctcccctcctaccactgtccaggagtgcctagtgaggcctcggcagggagtgggacccccagagccacagccacctctaccactgccagccctcttcgggacggttttggcgggcaggatggtggtgagctgcggccgctgcagagtgaaggcgctgcagcgctggtcaccaaggggtgccagcgattggcagcccagggcgcacggcctgaggcccccaaacggaaatgggccgaggatggtggggatgccccttcacccagcaaacggccctgggccaggcaagagaaccaggaggcagagcgggagggtggcatgagctgcagctgcagcagtggcagtggtgaggccagtgctgggctgatggaggaggcgctgccctctgcgcccgagcgcctggccctggactatatcgtgccctgcatgcggtactacggcatctgcgtcaaggacagcttcctgggggcagcactgggcggtcgcgtgctggccgaggtggaggccctcaaacggggtgggcgcctgcgagacgggcagctagtgagccagagggcgatcccgccgcgcagcatccgtggggaccagattgcctgggtggaaggccatgaaccaggctgtcgaagcattggtgccctcatggcccatgtggacgccgtcatccgccactgcgcagggcggctgggcagctatgtcatcaacgggcgcaccaaggccatggtggcgtgttacccaggcaacgggctcgggtacgtaaggcacgttgacaatccccacggcgatgggcgctgcatcacctgtatctattacctgaatcagaactgggacgttaaggtgcatggcggcctgctgcagatcttccctgagggccggcccgtggtagccaacatcgagccactctttgaccggttgctcattttctggtctgaccggcggaacccccacgaggtgaagccagcctatgccaccaggtacgccatcactgtctggtattttgatgccaaggagcgggcagcagccaaagacaagtatcagctagcatcaggacagaaaggtgtccaagtacctgtatcacagccgcctacgcccacctagtggccagtcccagagccgcatggcagacagcttaaatgacttcaggagagccctgggcctgtgctggctgctccttccctgccaccgctgctgcttctgactttgcctctgtcctgcctggtgtggagggctctgtctgttgctgaggaccaaggaggagaagagacctttgctgccccatcatgggggctggggttgtcacctggacagggggcagccgtggaggccaccgttaccaactgaagctgggggcctgggtcctaccctgtctggtcatgaccccattaggtatggagagctgggaggaggcattgtcacttcccaccaggatgcaggacttggggttgaggtgagtcatggcctcttgctggcaatggggtgggaggagtacccccaagtcctctcactcctccagcctggaatgtgaagtgactccccaacccctttggccatggcaggcaccttttggactgggctgccactgcttgggcagagtaaaaggtgccaggaggagcatgggtgtggaagtcctgtcagccaagaaataaaagtttacctcagagctgca

SEQ ID NO: 129279 - DNA, 2150 bp, Homo sapiens
  Payload ID: 5290
  Gene Symbol: EGLN2
  Gene Name: egl-9 family hypoxia-inducible factor 2
  Uniprot ID: Q96KS0
  ENST ID: ENST00000406058
  CDS Start-End: 359-1582
gagcggcccttaggccctgcccctgtcgcctactgcgctcagaaggggcctcagggcctgccccgggttgggggcgttggggtgccctggatgggggcacctttatctctcgtcctgtctccggccaccctgaagggtcccttcccaagcccttagggaccgcagaggacttggggaccagcaagcaacccccagggcacgagaagagctcttgctgtctgccctgcctcaccctgccccacgccaggcccggtggcccccagctgcatcaagtggaggcggaggaggaggcggaggagggtggcaccatgggcccgggcggtgccctccatgcccgggggatgaagacactgctgccatggacagcccgtgccagccgcagcccctaagtcaggctctccctcagttaccagggtcttcgtcagagcccttggagcctgagcctggccgggccaggatgggagtggagagttacctgccctgtcccctgctcccctcctaccactgtccaggagtgcctagtgaggcctcggcagggagtgggacccccagagccacagccacctctaccactgccagccctcttcgggacggttttggcgggcaggatggtggtgagctgcggccgctgcagagtgaaggcgctgcagcgctggtcaccaaggggtgccagcgattggcagcccagggcgcacggcctgaggcccccaaacggaaatgggccgaggatggtggggatgccccttcacccagcaaacggccctgggccaggcaagagaaccaggaggcagagcgggagggtggcatgagctgcagctgcagcagtggcagtggtgaggccagtgctgggctgatggaggaggcgctgccctctgcgcccgagcgcctggccctggactatatcgtgccctgcatgcggtactacggcatctgcgtcaaggacagcttcctgggggcagcactgggcggtcgcgtgctggccgaggtggaggccctcaaacggggtgggcgcctgcgagacgggcagctagtgagccagagggcgatcccgccgcgcagcatccgtggggaccagattgcctgggtggaaggccatgaaccaggctgtcgaagcattggtgccctcatggcccatgtggacgccgtcatccgccactgcgcagggcggctgggcagctatgtcatcaacgggcgcaccaaggccatggtggcgtgttacccaggcaacgggctcgggtacgtaaggcacgttgacaatccccacggcgatgggcgctgcatcacctgtatctattacctgaatcagaactgggacgttaaggtgcatggcggcctgctgcagatcttccctgagggccggcccgtggtagccaacatcgagccactctttgaccggttgctcattttctggtctgaccggcggaacccccacgaggtgaagccagcctatgccaccaggtacgccatcactgtctggtattttgatgccaaggagcgggcagcagccaaagacaagtatcagctagcatcaggacagaaaggtgtccaagtacctgtatcacagccgcctacgcccacctagtggccagtcccagagccgcatggcagacagcttaaatgacttcaggagagccctgggcctgtgctggctgctccttccctgccaccgctgctgcttctgactttgcctctgtcctgcctggtgtggagggctctgtctgttgctgaggaccaaggaggagaagagacctttgctgccccatcatgggggctggggttgtcacctggacagggggcagccgtggaggccaccgttaccaactgaagctgggggcctgggtcctaccctgtctggtcatgaccccattaggtatggagagctgggaggaggcattgtcacttcccaccaggatgcaggacttggggttgaggtgagtcatggcctcttgctggcaatggggtgggaggagtacccccaagtcctctcactcctccagcctggaatgtgaagtgactccccaacccctttggccatggcaggcaccttttggactgggctgccactgcttgggcagagtaaaaggtgccaggaggagcatgggtgtggaagtcctgtcagccaagaaataaaagtttacctcagagctgca

SEQ ID NO: 129280 - DNA, 709 bp, Homo sapiens
  Payload ID: 5290
  Gene Symbol: EGLN2
  Gene Name: egl-9 family hypoxia-inducible factor 2
  ENST ID: ENST00000593525
  CDS Start-End: 479-709
cttccgtctgggcgtgtgtccgcccccggccggcttcctcccgtcgggctcgggtcgaccccaccgtcccgctccgccccgggtcctccctcccagcttccctccggtctatttttctgtctctgggcccctcgttctctttgtttttggactccccagtttcctctgtcttttgacccccccgcccccaccctgactctccctggaacccccacgtttctcgttgtctttctggaacgccgagccaccctgaagggtcccttcccaagcccttagggaccgcagaggacttggggaccagcaagcaacccccagggcacgagaagagctcttgctgtctgccctgcctcaccctgccccacgccaggcccggtggcccccagctgcatcaagtggaggcggaggaggaggcggaggagggtggcaccatgggcccgggcggtgccctccatgcccgggggatgaagacactgctgccatggacagcccgtgccagccgcagcccctaagtcaggctctccctcagttaccagggtcttcgtcagagcccttggagcctgagcctggccgggccaggatgggagtggagagttacctgccctgtcccctgctcccctcctaccactgtccaggagtgcctagtgaggcctcggcagggagtgggacccccagagccacagccacctctaccactgccagccctcttcgg

SEQ ID NO: 129281 - DNA, 584 bp, Homo sapiens
  Payload ID: 5290
  Gene Symbol: EGLN2
  Gene Name: egl-9 family hypoxia-inducible factor 2
  ENST ID: ENST00000601733
  CDS Start-End: 303-584
agtctcgggacctcccttccgtctgggcgtgtgtccgcccccggccggcttcctcccgtcgggctcggccaccctgaagggtcccttcccaagcccttagggaccgcagaggacttggggaccagcaagcaacccccagggcacgagaagagctcttgctgtctgccctgcctcaccctgccccacgccaggcccggtggcccccagctgcatcaagtggaggcggaggaggaggcggaggagggtggcaccatgggcccgggcggtgccctccatgcccgggggatgaagacactgctgccatggacagcccgtgccagccgcagcccctaagtcaggctctccctcagttaccagggtcttcgtcagagcccttggagcctgagcctggccgggccaggatgggagtggagagttacctgccctgtcccctgctcccctcctaccactgtccaggagtgcctagtgaggcctcggcagggagtgggacccccagagccacagccacctctaccactgccagccctcttcgggacggttttggcgggcaggatggtggtgagctgcggccgctgcagagtgaa

SEQ ID NO: 129282 - DNA, 2821 bp, Homo sapiens
  Payload ID: 5290
  Gene Symbol: EGLN2
  Gene Name: egl-9 family hypoxia-inducible factor 2
  Uniprot ID: Q96KS0
  ENST ID: ENST00000593726
  CDS Start-End: 1029-2252
tactgcgctcagaaggggcctcagggcctgccccgggttgggggcgttggggtgccctggatgggggcacctttatctctcgtcctgtctccgggtgcgtgcaccctcctccgtcctttcctctgtcgccgcggaccctctccccgagggcccctcccgtcggtcagtctcgggacctcccttccgtctgggcgtgtgtccgcccccggccggcttcctcccgtcgggctcgggtcgaccccaccgtcccgctccgccccgggtcctccctcccagcttccctccggtctatttttctgtctctgggcccctcgttctctttgtttttggactccccagtttcctctgtcttttgacccccccgcccccaccctgactctccctggaacccccacgtttctcgttgtctttctggaacgccgaggcaggtccctcctattttccaaaccccctcctttcccactcctccacaccacccttttctactccagccctccttcttctgtctttggttaccgcgtcccacaacctgcaccacagtcctctgtcttagggtcatctacccagcccctggcctccagcctctccctatcactgcctcttatctgtcagcggactcccgcacctccagattctcagggtcctctccccgacttggcctcaggttttggggggcctctatagtcaagtctgtcctggtcgtcttccccactcctgcccataccatcccggctttcccctgcctgcctgtctctagtttctctcacatccctttttttttttcctttctctagccaccctgaagggtcccttcccaagcccttagggaccgcagaggacttggggaccagcaagcaacccccagggcacgagaagagctcttgctgtctgccctgcctcaccctgccccacgccaggcccggtggcccccagctgcatcaagtggaggcggaggaggaggcggaggagggtggcaccatgggcccgggcggtgccctccatgcccgggggatgaagacactgctgccatggacagcccgtgccagccgcagcccctaagtcaggctctccctcagttaccagggtcttcgtcagagcccttggagcctgagcctggccgggccaggatgggagtggagagttacctgccctgtcccctgctcccctcctaccactgtccaggagtgcctagtgaggcctcggcagggagtgggacccccagagccacagccacctctaccactgccagccctcttcgggacggttttggcgggcaggatggtggtgagctgcggccgctgcagagtgaaggcgctgcagcgctggtcaccaaggggtgccagcgattggcagcccagggcgcacggcctgaggcccccaaacggaaatgggccgaggatggtggggatgccccttcacccagcaaacggccctgggccaggcaagagaaccaggaggcagagcgggagggtggcatgagctgcagctgcagcagtggcagtggtgaggccagtgctgggctgatggaggaggcgctgccctctgcgcccgagcgcctggccctggactatatcgtgccctgcatgcggtactacggcatctgcgtcaaggacagcttcctgggggcagcactgggcggtcgcgtgctggccgaggtggaggccctcaaacggggtgggcgcctgcgagacgggcagctagtgagccagagggcgatcccgccgcgcagcatccgtggggaccagattgcctgggtggaaggccatgaaccaggctgtcgaagcattggtgccctcatggcccatgtggacgccgtcatccgccactgcgcagggcggctgggcagctatgtcatcaacgggcgcaccaaggccatggtggcgtgttacccaggcaacgggctcgggtacgtaaggcacgttgacaatccccacggcgatgggcgctgcatcacctgtatctattacctgaatcagaactgggacgttaaggtgcatggcggcctgctgcagatcttccctgagggccggcccgtggtagccaacatcgagccactctttgaccggttgctcattttctggtctgaccggcggaacccccacgaggtgaagccagcctatgccaccaggtacgccatcactgtctggtattttgatgccaaggagcgggcagcagccaaagacaagtatcagctagcatcaggacagaaaggtgtccaagtacctgtatcacagccgcctacgcccacctagtggccagtcccagagccgcatggcagacagcttaaatgacttcaggagagccctgggcctgtgctggctgctccttccctgccaccgctgctgcttctgactttgcctctgtcctgcctggtgtggagggctctgtctgttgctgaggaccaaggaggagaagagacctttgctgccccatcatgggggctggggttgtcacctggacagggggcagccgtggaggccaccgttaccaactgaagctgggggcctgggtcctaccctgtctggtcatgaccccattaggtatggagagctgggaggaggcattgtcacttcccaccaggatgcaggacttggggttgaggtgagtcatggcctcttgctggcaatggggtgggaggagtacccccaagtcctctcactcctccagcctggaatgtgaagtgactccccaacccctttggccatggcaggcaccttttggactgggctgccactgcttgggcagagtaaaaggtgccaggaggagcatgggtgtggaagtcctgtcagccaagaaataaaagtttacctcagagctgcac

SEQ ID NO: 129283 - DNA, 597 bp, Homo sapiens
  Payload ID: 5290
  Gene Symbol: EGLN2
  Gene Name: egl-9 family hypoxia-inducible factor 2
  ENST ID: ENST00000594380
  CDS Start-End: 335-597
gtcagtctcgggacctcccttccgtctgggcgtgtgtccgcccccggccggcttcctcccgtcgggctcgggtcgaccccaccgtcccgctccgccccggccaccctgaagggtcccttcccaagcccttagggaccgcagaggacttggggaccagcaagcaacccccagggcacgagaagagctcttgctgtctgccctgcctcaccctgccccacgccaggcccggtggcccccagctgcatcaagtggaggcggaggaggaggcggaggagggtggcaccatgggcccgggcggtgccctccatgcccgggggatgaagacactgctgccatggacagcccgtgccagccgcagcccctaagtcaggctctccctcagttaccagggtcttcgtcagagcccttggagcctgagcctggccgggccaggatgggagtggagagttacctgccctgtcccctgctcccctcctaccactgtccaggagtgcctagtgaggcctcggcagggagtgggacccccagagccacagccacctctaccactgccagccctcttcgggacggttttggcgggcaggatggtggtgagct

SEQ ID NO: 129284 - DNA, 935 bp, Homo sapiens
  Payload ID: 5290
  Gene Symbol: EGLN2
  Gene Name: egl-9 family hypoxia-inducible factor 2
  ENST ID: ENST00000593972
  CDS Start-End: 517-935
acgttgggtgccggccgttgtgggggttggggtgggggcggggagcgcgcgccgggcggaggccgagtggagggggaggggagggggtccgagcggcccttaggccctgcccctgtcgcctactgcgctcagaaggggcctcagggcctgccccgggttgggggcgttggggtgccctggatgggggcacctttatctctcgtcctgtctccgggtgcgtgcaccctcctccgtcctttcctctgtcgccgcggaccctctccccgagggcccctcccgtcgccaccctgaagggtcccttcccaagcccttagggaccgcagaggacttggggaccagcaagcaacccccagggcacgagaagagctcttgctgtctgccctgcctcaccctgccccacgccaggcccggtggcccccagctgcatcaagtggaggcggaggaggaggcggaggagggtggcaccatgggcccgggcggtgccctccatgcccgggggatgaagacactgctgccatggacagcccgtgccagccgcagcccctaagtcaggctctccctcagttaccagggtcttcgtcagagcccttggagcctgagcctggccgggccaggatgggagtggagagttacctgccctgtcccctgctcccctcctaccactgtccaggagtgcctagtgaggcctcggcagggagtgggacccccagagccacagccacctctaccactgccagccctcttcgggacggttttggcgggcaggatggtggtgagctgcggccgctgcagagtgaaggcgctgcagcgctggtcaccaaggggtgccagcgattggcagcccagggcgcacggcctgaggcccccaaacggaaatgggccgaggatggtggggatgccccttcacccagcaaacggccctgggccaggcaaga

SEQ ID NO: 129285 - DNA, 590 bp, Homo sapiens
  Payload ID: 5290
  Gene Symbol: EGLN2
  Gene Name: egl-9 family hypoxia-inducible factor 2
  ENST ID: ENST00000598654
  CDS Start-End: 288-590
aggatgcaaatgaacctcgtgtaggccacggaccgctgtttcctttctccttgccaccctgaagggtcccttcccaagcccttagggaccgcagaggacttggggaccagcaagcaacccccagggcacgagaagagctcttgctgtctgccctgcctcaccctgccccacgccaggcccggtggcccccagctgcatcaagtggaggcggaggaggaggcggaggagggtggcaccatgggcccgggcggtgccctccatgcccgggggatgaagacactgctgccatggacagcccgtgccagccgcagcccctaagtcaggctctccctcagttaccagggtcttcgtcagagcccttggagcctgagcctggccgggccaggatgggagtggagagttacctgccctgtcccctgctcccctcctaccactgtccaggagtgcctagtgaggcctcggcagggagtgggacccccagagccacagccacctctaccactgccagccctcttcgggacggttttggcgggcaggatggtggtgagctgcggccgctgcagagtgaaggcgctgcagcgctggtcacc

SEQ ID NO: 129286 - DNA, 477 bp, Homo sapiens
  Payload ID: 5290
  Gene Symbol: EGLN2
  Gene Name: egl-9 family hypoxia-inducible factor 2
  ENST ID: ENST00000595051
  CDS Start-End: 1-156
ccccacgaggtgaagccagcctatgccaccaggtacgccatcactgtctggtattttgatgccaaggagcgggcagcagccaaagacaagtatcagctagcatcaggacagaaaggtgtccaagtacctgtatcacagccgcctacgcccacctagtggccagtcccagagccgcatggcagacagcttaaatgacttcaggagaagctgggaggaggcattgtcacttcccaccaggatgcaggacttggggttgaggtgagtcatggcctcttgctggcaatggggtgggaggagtacccccaagtcctctcactcctccagcctggaatgtgaagtgactccccaacccctttggccatggcaggcaccttttggactgggctgccactgcttgggcagagtaaaaggtgccaggaggagcatgggtgtggaagtcctgtcagccaagaaataaaagtttacctcagagctgca

SEQ ID NO: 129287 - DNA, 758 bp, Homo sapiens
  Payload ID: 5290
  Gene Symbol: EGLN2
  Gene Name: egl-9 family hypoxia-inducible factor 2
  ENST ID: ENST00000595621
  CDS Start-End: 1-290
atggcggcctgctgcagatcttccctgagggccggcccgtggtagccaacatcgagccactctttgaccggttgctcattttctggtctgaccggcggaacccccacgaggtgaagccagcctatgccaccaggtacgccatcactgtctggtattttgatgccaaggagcgggcagcagccaaagacaagtatcagctaggtacctgcttccctcccttcagtccttcctattctgtgggccctcttgggcctgatgccaccccatccccctcatcagcctcttgttaaatcccaccactcatttttcttcatctctgcccaccttccttagcccactctcctggtaccccaacaggagccccatttcttcctggtcctctccccatctccccaggtttcccttggcttctttgtccttctgatgactcactgtctcctgtcccctctcacccccagcatcaggacagaaaggtgtccaagtacctgtatcacagccgcctacgcccacctagtggccagtcccagagccgcatggcagacagcttaaatgacttcaggagagccctgggcctgtgctggctgctccttccctgccaccgctgctgcttctgactttgcctctgtcctgcctggtgtggagggctctgtctgttgctgaggaccaaggaggagaagagacctttgctgccccatcatgggggctggggttgtcacctggacagggggcagccgtggaggccaccgttaccaactgaa

SEQ ID NO: 129288 - DNA, 572 bp, Homo sapiens
  Payload ID: 5290
  Gene Symbol: EGLN2
  Gene Name: egl-9 family hypoxia-inducible factor 2
  ENST ID: ENST00000593397
  CDS Start-End: 356-572
agtctcgggacctcccttccgtctgggcgtgtgtccgcccccggccggcttcctcccgtcgggctcgggtcgaccccaccgtcccgctccgccccgggtcctccctcccagcttccctccgccaccctgaagggtcccttcccaagcccttagggaccgcagaggacttggggaccagcaagcaacccccagggcacgagaagagctcttgctgtctgccctgcctcaccctgccccacgccaggcccggtggcccccagctgcatcaagtggaggcggaggaggaggcggaggagggtggcaccatgggcccgggcggtgccctccatgcccgggggatgaagacactgctgccatggacagcccgtgccagccgcagcccctaagtcaggctctccctcagttaccagggtcttcgtcagagcccttggagcctgagcctggccgggccaggatgggagtggagagttacctgccctgtcccctgctcccctcctaccactgtccaggagtgcctagtgaggcctcggcagggagtgggacccccagagccacagccacctctaccactg

SEQ ID NO: 129289 - DNA, 991 bp, Homo sapiens
  Payload ID: 5290
  Gene Symbol: EGLN2
  Gene Name: egl-9 family hypoxia-inducible factor 2
  ENST ID: ENST00000594140
  CDS Start-End: 100-477
agggggagaccagaagggctgagtggcccagatgggacactgctctgagcctcaatttgctgatccacggaatacgaaaaccaggttacatccccagccatggtggcgtgttacccaggcaacgggctcgggtacgtaaggcacgttgacaatccccacggcgatgggcgctgcatcacctgtatctattacctgaatcagaactgggacgttaaggtgcatggcggcctgctgcagatcttccctgagggccggcccgtggtagccaacatcgagccactctttgaccggttgctcattttctggtctgaccggcggaacccccacgaggtgaagccagcctatgccaccaggtacgccatcactgtctggtattttgatgccaaggagcgggcagcagccaaagacaagtatcagctagcatcaggacagaaaggtgtccaagtacctgtatcacagccgcctacgcccacctagtggccagtcccagagccgcatggcagacagcttaaatgacttcaggagagccctgggcctgtgctggctgctccttccctgccaccgctgctgcttctgactttgcctctgtcctgcctggtgtggagggctctgtctgttgctgaggaccaaggaggagaagagacctttgctgccccatcatgggggctggggttgtcacctggacagggggcagccgtggaggccaccgttaccaactgaagctgggggcctgggtcctaccctgtctggtcatgaccccattaggtatggagagctgggaggaggcattgtcacttcccaccaggatgcaggacttggggttgaggtgagtcatggcctcttgctggcaatggggtgggaggagtacccccaagtcctctcactcctccagcctggaatgtgaagtgactccccaacccctttggccatggcaggcaccttttggactgggctgccactgcttgggcagagtaaaaggtgccaggaggag

SEQ ID NO: 129290 - DNA, 574 bp, Homo sapiens
  Payload ID: 5290
  Gene Symbol: EGLN2
  Gene Name: egl-9 family hypoxia-inducible factor 2
  ENST ID: ENST00000596517
  CDS Start-End: 373-574
atttttctgtctctgggcccctcgttctctttgtttttggactccccagtttcctctgtcttttgacccccccgcccccaccctgactctccctggaacccccacgtttctcgttgtctttctggaacgccgaggcagccaccctgaagggtcccttcccaagcccttagggaccgcagaggacttggggaccagcaagcaacccccagggcacgagaagagctcttgctgtctgccctgcctcaccctgccccacgccaggcccggtggcccccagctgcatcaagtggaggcggaggaggaggcggaggagggtggcaccatgggcccgggcggtgccctccatgcccgggggatgaagacactgctgccatggacagcccgtgccagccgcagcccctaagtcaggctctccctcagttaccagggtcttcgtcagagcccttggagcctgagcctggccgggccaggatgggagtggagagttacctgccctgtcccctgctcccctcctaccactgtccaggagtgcctagtgaggcctcggcagggagtgggacccccagagccacag

SEQ ID NO: 129291 - DNA, 459 bp, Homo sapiens
  Payload ID: 5290
  Gene Symbol: EGLN2
  Gene Name: egl-9 family hypoxia-inducible factor 2
  ENST ID: ENST00000597746
  CDS Start-End: 1-387
attgcctgggtggaaggccatgaaccaggctgtcgaagcattggtgccctcatggcccatgtggacgccgtcatccgccactgcgcagggcggctgggcagctatgtcatcaacgggcgcaccaaggtgcatggcggcctgctgcagatcttccctgagggccggcccgtggtagccaacatcgagccactctttgaccggttgctcattttctggtctgaccggcggaacccccacgaggtgaagccagcctatgccaccaggtacgccatcactgtctggtattttgatgccaaggagcgggcagcagccaaagacaagtatcagctagcatcaggacagaaaggtgtccaagtacctgtatcacagccgcctacgcccacctagtggccagtcccagagccgcatggcagacagcttaaatgacttcaggagagccctgggcctgtgctggctgct

SEQ ID NO: 129292 - DNA, 2709 bp, Homo sapiens
  Payload ID: 5291
  Gene Symbol: EGLN3
  Gene Name: egl-9 family hypoxia-inducible factor 3
  Uniprot ID: Q9H6Z9
  ENST ID: ENST00000250457
  CDS Start-End: 330-1049
ccggagtctggccgcagtcgcggcagtggtggcttcccatccccaaaaggcgccctccgactccttgcgccgcactgctcgccgggccagtccggaaacgggtcgtggagctccgcaccactcccgctggttcccgaaggcagatcccttctcccgagagttgcgagaaactttcccttgtccccgacgctgcagcggctcgggtaccgtggcagccgcaggtttctgaaccccgggccacgctccccgcgcctcggcttcgcgctcgtgtagatcgttccctctctggttgcacgctggggatcccggacctcgattctgcgggcgagatgcccctgggacacatcatgaggctggacctggagaaaattgccctggagtacatcgtgccctgtctgcacgaggtgggcttctgctacctggacaacttcctgggcgaggtggtgggcgactgcgtcctggagcgcgtcaagcagctgcactgcaccggggccctgcgggacggccagctggcggggccgcgcgccggcgtctccaagcgacacctgcggggcgaccagatcacgtggatcgggggcaacgaggagggctgcgaggccatcagcttcctcctgtccctcatcgacaggctggtcctctactgcgggagccggctgggcaaatactacgtcaaggagaggtctaaggcaatggtggcttgctatccgggaaatggaacaggttatgttcgccacgtggacaaccccaacggtgatggtcgctgcatcacctgcatctactatctgaacaagaattgggatgccaagctacatggtgggatcctgcggatatttccagaggggaaatcattcatagcagatgtggagcccatttttgacagactcctgttcttctggtcagatcgtaggaacccacacgaagtgcagccctcttacgcaaccagatatgctatgactgtctggtactttgatgctgaagaaagggcagaagccaaaaagaaattcaggaatttaactaggaaaactgaatctgccctcactgaagactgaccgtgctctgaaatctgctggccttgttcattttagtaacggttcctgaattctcttaaattctttgagatccaaagatggcctcttcagtgacaacaatctccctgctacttcttgcatccttcacatccctgtcttgtgtgtggtacttcatgttttcttgccaagactgtgttgatcttcagatactctctttgccagatgaagttacttgctaactccagaaattcctgcagacatcctactcggccagcggtttacctgatagattcggtaatactatcaagagaagagcctaggagcacagcgagggaatgaaccttacttgcactttatgtatacttcctgatttgaaaggaggaggtttgaaaagaaaaaaatggaggtggtagatgccacagagaggcatcacggaagccttaacagcaggaaacagagaaatttgtgtcatctgaacaatttccagatgttcttaatccagggctgttggggtttctggagaattatcacaacctaatgacattaatacctctagaaagggctgctgtcatagtgaacaatttataagtgtcccatggggcagacactccttttttcccagtcctgcaacctggattttctgcctcagccccattttgctgaaaataatgactttctgaataaagatggcaacacaattttttctccattttcagttcttacctgggaacctaattccccagaagctaaaaaactagacattagttgttttggttgctttgttggaatggaatttaaatttaaatgaaaggaaaaatatatccctggtagttttgtgttaaccactgataactgtggaaagagctaggtctactgatatacaataaacatgtgtgcatcttgaacaatttgagaggggaggtggagttggaaatgtgggtgttcctgttttttttttttttttttttttagttttcctttttaatgagctcaccctttaacacaaaaaaagcaaggtgatgtattttaaaaaaggaagtggaaataaaaaaatctcaaagctatttgagttctcgtctgtccctagcagtctttcttcagctcacttggctctctagatccactgtggttggcagtatgaccagaatcatggaatttgctagaactgtggaagcttctactcctgcagtaagcacagatcgcactgcctcaataacttggtattgagcacgtattttgcaaaagctacttttcctagttttcagtattactttcatgttttaaaaatccctttaatttcttgcttgaaaatcccatgaacattaaagagccagaaatattttcctttgttatgtacggatatatatatatatagtcttccaagatagaagtttactttttcctcttctggttttggaaaatttccagataagacatgtcaccattaattctcaacgactgctctattttgttgtacggtaatagttatcaccttctaaattactatgtaatttattcacttattatgtttattgtcttgtatcctttctctggagtgtaagcacaatgaagacaggaattttgtatatttttaaccaatgcaacatactctcagcacctaaaatagtgccgggaacatagtaagggctcagtaaatacttgttgaataaactcagtctcc

SEQ ID NO: 129293 - DNA, 2849 bp, Homo sapiens
  Payload ID: 5291
  Gene Symbol: EGLN3
  Gene Name: egl-9 family hypoxia-inducible factor 3
  ENST ID: ENST00000547327
  CDS Start-End: 330-776
ccggagtctggccgcagtcgcggcagtggtggcttcccatccccaaaaggcgccctccgactccttgcgccgcactgctcgccgggccagtccggaaacgggtcgtggagctccgcaccactcccgctggttcccgaaggcagatcccttctcccgagagttgcgagaaactttcccttgtccccgacgctgcagcggctcgggtaccgtggcagccgcaggtttctgaaccccgggccacgctccccgcgcctcggcttcgcgctcgtgtagatcgttccctctctggttgcacgctggggatcccggacctcgattctgcgggcgagatgcccctgggacacatcatgaggctggacctggagaaaattgccctggagtacatcgtgccctgtctgcacgaggtgggcttctgctacctggacaacttcctgggcgaggtggtgggcgactgcgtcctggagcgcgtcaagcagctgcactgcaccggggccctgcgggacggccagctggcggggccgcgcgccggcgtctccaagcgacacctgcggggcgaccagatcacgtggatcgggggcaacgaggagggctgcgaggccatcagcttcctcctgtccctcatcgacaggctggtcctctactgcgggagccggctgggcaaatactacgtcaaggagaggtctaaggtaggacgcgctcggcgccctgccgcagctgctcccgcggggacgggaggcactcggagtccgttgtatgtcgacttcccagggccgtaagcgaactttgttttttaaccaagaagtcagcctggtttgtctctactcgctgcttccccccacccctcgccccagctcctctgagcgaaagtcaacgttaaggggctcaggtgaaccatgatgatgaccttctgttgactttgaaatattggctcttgtgggtgacaaaagccagacaagctgtggctgtggtccgattttaagacgaggttctcaaagatccaaaggagggaaagggtattggaaacactgtgtatcatctgagacacacgtgtcctcatgatcttaaatgcctactttaaagccacctaatactgcccttcattgtggtcagaagagatttctacaaaagcactcagaattctggaggcagttgtgattttgccatgtggcagttggtttgtggagttgggcaggtgtgaaagggtaaaactccacttctgaatgctgcttctgccccctgggacccagcacattgttagaccatcttcttgactgaaaattctctcctgatgctgagccctgcaccaccaccttccttttcctaactatgaattgatggcaaagtccactcaaaacaaccagttaagtgctcacgagagagtagtcaagcacctccagaaagaaaccgggtttttgttcacatagcaggaagtgactccctgggtggtaatttatcttggaaacacaggtagattggcagaaaaacgggaacatgtaggtaccgcgatgttggtgcatgtccattactttgggataggctttctcagtctttcctcaaatgatagttgagccagttttccagtggcaattctgagtgacttgcgcttgtcttatggtgtggtcaagggacgttcagaactacggaaaacttttactgaaacagcgaagcagagtataccggcatgagagggaagatgaacactcacctatgtaccactctttgacaataaatatagtatttctcaaatcagtctcaagactgatcctgtctcagaacagaccattgttctctcatttctctaatacgctgagaggaacactctgaataaaggctaagtggtgaggattggaaacgtgtgggagtgaaggggtggaggtggatgagtgcagtggggagtcacagtttgccgtacaacttccaagccaagaggccatgaatagaatatctgaaagcatcgttattaatgcacccaagtaaagtaaatcttagaagatactgctttctaaattttactttggggaaaaaaattccgcgtgagctgaactctgtaggagattgatgctaaagtgtttctttattcttcttccatcatgttggtggtggattagtcactcgtctttgactagtttgatttttgcattaaatgaccttgctgtcttctgtggtggaggtgtgtcggggaggggaagggtcagcctcagtgttgctgagatgctggtagtttctacctggaagagcagacggcttcttattgggtttttaaatgtttcttgtaaatttaggtgttaggagtttttcttcatcattctaggagcagaatttgctctgagggaggtcaggattaattggtatggaaagaggccactaacattgaaagttaaatatttttatttagctttgacttaatggatagggatagggtttcagactagaatttaactcaaatggaaggaaaaacactgtgtaagttagggtaagggaaagaaagatcctgtagatatgattcatcaattttaggttatcttttgggtggaatgaaaaactttccaggtgaccctgtcagaaggtgatcgtgaattgaaaataaaatttatcctgtcccacccccagatttccaggtttactttggctggtttgtcacaaagctccctgccctttagataaatcacctttcgattggaatattccctggccaattagaaccaaatgcaaaccaggcttgagcaaacaactagtgtagttaaattttttttaagtgtgctttgcttgtatacagaagtctccttagtgatgtcttgtggtcttgggtttcttgtttgaagttcattattaaagtcatggtagaaaca

SEQ ID NO: 129294 - DNA, 1004 bp, Homo sapiens
  Payload ID: 5291
  Gene Symbol: EGLN3
  Gene Name: egl-9 family hypoxia-inducible factor 3
  ENST ID: ENST00000553215
  CDS Start-End: 75-512
ggcttcgcgctcgtgtagatcgttccctctctggttgcacgctggggatcccggacctcgattctgcgggcgagatgcccctgggacacatcatgaggctggacctggagaaaattgccctggagtacatcgtgccctgtctgcacgaggcaatggtggcttgctatccgggaaatggaacaggttatgttcgccacgtggacaaccccaacggtgatggtcgctgcatcacctgcatctactatctgaacaagaattgggatgccaagctacatggtgggatcctgcggatatttccagaggggaaatcattcatagcagatgtggagcccatttttgacagactcctgttcttctggtcagatcgtaggaacccacacgaagtgcagccctcttacgcaaccagatatgctatgactgtctggtactttgatgctgaagaaagggcagaagccaaaaagaaattcaggaatttaactaggaaaactgaatctgccctcactgaagactgaccgtgctctgaaatctgctggccttgttcattttagtaacggttcctgaattctcttaaattctttgagatccaaagatggcctcttcagtgacaacaatctccctgctacttcttgcatccttcacatccctgtcttgtgtgtggtacttcatgttttcttgccaagactgtgttgatcttcagatactctctttgccagatgaagttacttgctaactccagaaattcctgcagacatcctactcggccagcggtttacctgatagattcggtaatactatcaagagaagagcctaggagcacagcgagggaatgaaccttacttgcactttatgtatacttcctgatttgaaaggaggaggtttgaaaagaaaaaaatggaggtggtagatgccacagagaggcatcacggaagccttaacagcaggaaacagagaaatttgtgtcatctgaacaatttccagatgttcttaatccagggctgttgggg

SEQ ID NO: 129295 - DNA, 848 bp, Homo sapiens
  Payload ID: 5291
  Gene Symbol: EGLN3
  Gene Name: egl-9 family hypoxia-inducible factor 3
  ENST ID: ENST00000487915
  CDS Start-End: 612-848
acaccctcaaagatcagccaggggaaactacttctggtttctgcagctttcatctaggaagaggtgggctggatacacccactcgtttcccaccatctccagaaggagcagctttaactatgactcagtgatgcagggcttctgaccacaacctaaaaatgaaaggccctatcaccaatcttatctgctcatcaaaaaacagacggtggtgatatgcagtcaagcttgctggtacttccaatgcctgccctgagaaggttctgccatggagatgaagacacgctggagccacaggagtggttctggaacatctaaccttcttgtgcaaagtttctatcataacttgagattagacatgctcttattaggaaagttgcagctaccaggaggcagcctgaacgtgtcagggcctgggcacgacacttgcctttcttggaggagtgatttgaagccatagtggaagactgagcctctataaaaaatgaacgaggacactcttaatggacagatacaaaacaagccccaggagaaaggtgttgttatgtccaaagccatcttgccatgcgcagcctgagaatggagccaatgactgagggtggcagagcagaaagatggcaatggtggcttgctatccgggaaatggaacaggttatgttcgccacgtggacaaccccaacggtgatggtcgctgcatcacctgcatctactatctgaacaagaattgggatgccaagctacatggtgggatcctgcggatatttccagaggggaaatcattcatagcagatgtggagcccatttttgacagactcctgttcttctggtcagatcgtaggaacccacacgaa

SEQ ID NO: 129296 - DNA, 5165 bp, Homo sapiens
  Payload ID: 5292
  Gene Symbol: EHBP1
  Gene Name: EH domain binding protein 1
  Uniprot ID: Q8NDI1
  ENST ID: ENST00000263991
  CDS Start-End: 483-4178
gggcgccgtccgcctgaggggctgcagatcccggctaccgcgagcgccgtggctggcttggctgttccatgtggctccggcggggatggaggactcggtggcggcggcggctgctgctgcggcggcgacggaggagcggctatgagaagggaacggggccagactcagcccgacagcgggattagagccctccagaatacccatcatatagcccctgaggtggcatggtgatgtctccatgagggaaccccttcccactcatcctgtcacgtatatcatagtgttcttgactgggccattcatctaagatgggatttaccctgtgaaacagggagaagacttatggaccccaagcatcatttcgagttgtagttgagtttttaaaagacatacatgcaaagttcctttgctttggaccctctgcattattaaagctgctgtattgctaacccagaactgctccagtgtcttgactgatcatcatggcttcagtttggaagagactgcagcgtgtgggaaaacatgcatccaagttccagtttgtggcctcctaccaggagctcatggttgagtgtacgaagaaatggcaaccagataaactggtggtagtttggaccagaagaagccgaaggaagtcttctaaggcacatagctggcaacctggaataaaaaatccctatcgtggtgttgttgtgtggcctgttcctgaaaacattgaaatcactgtaacactttttaaggatcctcatgcggaagaatttgaagacaaagagtggacatttgtcatagaaaatgaatccccttctggtcgaaggaaagctcttgctactagcagcatcaatatgaaacagtatgcaagccctatgccaactcagactgatgtcaagttaaaattcaagccattatctaaaaaagttgtatctgccgctcttcagttttcattatcttgcatttttctgagggaaggaaaagccacagatgaagacatgcaaagtttggctagtttgatgagtatgaagcaggctgacattggcaatttagatgacttcgaagaagataatgaagatgatgatgagaacagagtgaaccaagaagaaaaggcagctaaaattacagaaattgtaaaccagttgaatgctctgagcagcttagatgaagatcaagatgactgcataaagcaagcaaatatgcgttcagctaaatcagccagttcctctgaagagcttatcaacaaacttaactttttggatgaagcagaaaaggacttggccaccgtgaattcaaatccatttgatgatcctgatgctgcagaattaaatccatttggagatcctgactcagaagaacctatcactgaaacagcttcacctagaaaaacagaagactctttttataataacagctataatccctttaaagaggtgcagactccacagtatttgaacccattcgatgagccagaagcatttgtgaccataaaggattctcctccccagtctacaaaaagaaaaaatataagacctgtggatatgagcaagtacctctatgctgatagttctaaaactgaagaagaagaattggatgaatcaaatcctttttatgaacctaaatcaactcctcctccaaataatttggtaaatcctgttcaagaactagaaactgaaaggcgagtgaaaagaaaggccccggctccaccagtcctctcaccaaaaacaggagtattaaatgaaaacacagtttctgcaggaaaagatctctctacttctcctaagccaagccctataccaagtcctgttttggggcgaaagccaaatgctagtcagtctttgcttgtatggtgtaaagaagttacaaagaactaccgaggagtaaaaatcaccaattttactacatcgtggagaaatggtttatctttttgtgcaatattacaccactttagaccagatttaattgactacaagtctctgaatcctcaagatattaaagagaacaacaaaaaggcatacgatggatttgccagcataggaatttcccgattattggaaccttctgatatggtattattagcaattcctgataaactgactgttatgacttatctctatcaaataagggcacatttcagtggccaagaactaaatgtcgttcagatagaggaaaacagcagtaaaagcacatataaagttggaaactatgaaacagatacaaacagttctgttgatcaagaaaaattctatgcagagcttagtgatctgaagcgggagcctgaactacaacagcctatcagcggagcagtagacttcttatcacaggatgactctgtatttgtaaatgatagcggggttggagagtcagaaagtgagcatcaaactcctgatgatcaccttagtccaagcacagcctccccttactgtcgcaggactaaaagtgacacagaaccccagaagtctcagcagagctctggaaggacttcaggatctgatgaccctggaatatgttccaatacagattcaacccaagcacaggttttgttaggcaaaaagagactattgaaagctgagactttagaattgagtgacttatatgttagtgataagaagaaggatatgtctccaccctttatttgtgaggagacagatgaacaaaagcttcaaactctagacatcggtagtaacttggagaaagaaaaattagagaattccagatccttagaatgcagatcagatccagaatctcctatcaaaaaaacaagtttatctcctacttctaaacttggatactcatatagtagagatctagaccttgctaagaaaaaacatgcttccctgaggcagacggagtctgatccagatgctgatagaaccactttaaatcatgcagatcattcatcaaaaatagtccagcatcgattgttatctagacaagaagaacttaaggaaagagcaagagttctgcttgagcaagcaagaagagatgcagccttaaaggcggggaataagcacaataccaacacagccaccccattctgcaacaggcagctaagtgatcagcaagatgaagagcgacgtcggcagctgagagagagagctcgtcagctaatagcagaagctcgatctggagtgaagatgtcagaacttcccagctatggtgaaatggctgcagaaaagttgaaagaaaggtcaaaggcatctggagatgaaaatgataatattgagatagatactaacgaggagatccctgaaggctttgttgtaggaggtggagatgaacttactaacttagaaaatgaccttgatactcccgaacaaaacagtaagttggtggacttgaagctgaagaagctcctagaagttcagccacaggtggcaaattcaccctccagtgctgcccagaaagctgtaactgagagctcagagcaggacatgaaaagtggcacagaagatctccggactgaacgattacaaaaaacaacagaacgttttagaaatcctgttgtgttcagcaaagattctacagtcagaaaaactcaacttcagtctttcagccaatatattgagaatagaccagagatgaaaaggcagagatcaatacaggaagatacaaagaaaggaaatgaggagaaggcagcgataactgaaactcagaggaagccatcagaagatgaagtgcttaataaagggttcaaagacaccagtcagtatgtagtaggagaattggcagcactagagaatgagcaaaagcaaattgacacccgtgccgcgctggtggagaagcgccttcgctatctcatggacacaggaaggaacacagaagaagaagaagctatgatgcaggaatggtttatgttagttaataagaaaaatgccttaataaggagaatgaatcagctctctcttctggaaaaagaacatgatttagaacgacggtatgagctgctgaaccgggaattgagggcaatgctagccattgaagactggcagaagaccgaggcccagaagcgacgcgaacagcttctgctagatgagctggtggccctggtgaacaagcgcgatgcgctcgtcagggacctggacgcgcaggagaagcaggccgaagaagaagatgagcatttggagcgaactctggagcaaaacaaaggcaagatggccaagaaagaggagaaatgtgttcttcagtagccatcagatcagaaagaatctctcccaacattttagagtcttgcttcccaaaccagaaaaagtcagactcattgttgatttaaaacttttaacattttgtttggctggattgtactactttacctctactttaccaccaccacccttttcctccctcctttccaaataatatacagaactccaaaatagcttcatttaaggatttttttgtgagttaacaatttccttgaaatcctgtgaaatagatttgcacagacaccttgtgagtgattggtattggaggtgttcaagaaactgttcgaaaaagaacaaaaacacttccctcgttattttctctcattttttgatgagaggaaaatttgaaacattattcttgttgttgttggtaatagcataatgacagtgggaggggtacaaggggataagaaaaatgtcatgatttttttccggtcctgccacatgtaacacttactctgttacctaaattttatagttagatcatatccaatctacttattaaactgtgttctatttaccagtggagtttttctgcagtggttgcgtttcactgtaaggataatggagttcctctcctctgctttcctcagaggatggtcctttaacatagccagaaacaagccctgtggtttgaaggtgagctgtgaggatgggactaattgatatgcaccagtttacaaagacagtcttatcatccgagaatacaccatctttttctctggataattatttcttacatcatgcttgattcctacattttgttgggtctcaacattggctcacgaatgctgttaatatttattctgtattgataaaaagtctgtcttgccactacaagtaaatcccccatttaatattttcttctttagcatagcactgtcattttttgtgaaaatggttatgtttatttattacaatactgagtcatatataaattttcaataaaagcagaaactttcttaccttaaa

SEQ ID NO: 129297 - DNA, 4108 bp, Homo sapiens
  Payload ID: 5292
  Gene Symbol: EHBP1
  Gene Name: EH domain binding protein 1
  Uniprot ID: Q8NDI1
  ENST ID: ENST00000405015
  CDS Start-End: 529-4011
aactgggaggctccccagtttgtgggtaacatctgactctccctccccaaagagagactccagcgagagactggggatttggaggtccaagtcatggcagaactgggttgcttgctaggacacaaggttagcatgcccctgtagcagcaatgtgagaatcagaaaaggtgactgtgcatctcaagaagccgaatcaaaaagccaagccaaccacctaaccagtgattttcaagccctccagaatacccatcatatagcccctgaggtggcatggtgatgtctccatgagggaaccccttcccactcatcctgtcacgtatatcatagtgttcttgactgggccattcatctaagatgggatttaccctgtgaaacagggagaagacttatggaccccaagcatcatttcgagttgtagttgagtttttaaaagacatacatgcaaagttcctttgctttggaccctctgcattattaaagctgctgtattgctaacccagaactgctccagtgtcttgactgatcatcatggcttcagtttggaagagactgcagcgtgtgggaaaacatgcatccaagttccagtttgtggcctcctaccaggagctcatggttgagtgtacgaagaaatggcaaccagataaactggtggtagtttggaccagaagaagccgaaggaagtcttctaaggcacatagctggcaacctggaataaaaaatccctatcgtggtgttgttgtgtggcctgttcctgaaaacattgaaatcactgtaacactttttaaggatcctcatgcggaagaatttgaagacaaagagtggacatttgtcatagaaaatgaatccccttctggtcgaaggaaagctcttgctactagcagcatcaatatgaaacagtatgcaagccctatgccaactcagactgatgtcaagttaaaattcaagccattatctaaaaaagttgtatctgccgctcttcagttttcattatcttgcatttttctgagggaaggaaaagccacagatgaagacatgcaaagtttggctagtttgatgagtatgaagcaggctgacattggcaatttagatgacttcgaagaagataatgaagatgatgatgagaacagagtgaaccaagaagaaaaggcagctaaaattacagagcttatcaacaaacttaactttttggatgaagcagaaaaggacttggccaccgtgaattcaaatccatttgatgatcctgatgctgcagaattaaatccatttggagatcctgactcagaagaacctatcactgaaacagcttcacctagaaaaacagaagactctttttataataacagctataatccctttaaagaggtgcagactccacagtatttgaacccattcgatgagccagaagcatttgtgaccataaaggattctcctccccagtctacaaaaagaaaaaatataagacctgtggatatgagcaagtacctctatgctgatagttctaaaactgaagaagaagaattggatgaatcaaatcctttttatgaacctaaatcaactcctcctccaaataatttggtaaatcctgttcaagaactagaaactgaaaggcgagtgaaaagaaaggccccggctccaccagtcctctcaccaaaaacaggagtattaaatgaaaacacagtttctgcaggaaaagatctctctacttctcctaagccaagccctataccaagtcctgttttggggcgaaagccaaatgctagtcagtctttgcttgtatggtgtaaagaagttacaaagaactaccgaggagtaaaaatcaccaattttactacatcgtggagaaatggtttatctttttgtgcaatattacaccactttagaccagatttaattgactacaagtctctgaatcctcaagatattaaagagaacaacaaaaaggcatacgatggatttgccagcataggaatttcccgattattggaaccttctgatatggtattattagcaattcctgataaactgactgttatgacttatctctatcaaataagggcacatttcagtggccaagaactaaatgtcgttcagatagaggaaaacagcagtaaaagcacatataaagttggaaactatgaaacagatacaaacagttctgttgatcaagaaaaattctatgcagagcttagtgatctgaagcgggagcctgaactacaacagcctatcagcggagcagtagacttcttatcacaggatgactctgtatttgtaaatgatagcggggttggagagtcagaaagtgagcatcaaactcctgatgatcaccttagtccaagcacagcctccccttactgtcgcaggactaaaagtgacacagaaccccagaagtctcagcagagctctggaaggacttcaggatctgatgaccctggaatatgttccaatacagattcaacccaagcacaggttttgttaggcaaaaagagactattgaaagctgagactttagaattgagtgacttatatgttagtgataagaagaaggatatgtctccaccctttatttgtgaggagacagatgaacaaaagcttcaaactctagacatcggtagtaacttggagaaagaaaaattagagaattccagatccttagaatgcagatcagatccagaatctcctatcaaaaaaacaagtttatctcctacttctaaacttggatactcatatagtagagatctagaccttgctaagaaaaaacatgcttccctgaggcagacggagtctgatccagatgctgatagaaccactttaaatcatgcagatcattcatcaaaaatagtccagcatcgattgttatctagacaagaagaacttaaggaaagagcaagagttctgcttgagcaagcaagaagagatgcagccttaaaggcggggaataagcacaataccaacacagccaccccattctgcaacaggcagctaagtgatcagcaagatgaagagcgacgtcggcagctgagagagagagctcgtcagctaatagcagaagctcgatctggagtgaagatgtcagaacttcccagctatggtgaaatggctgcagaaaagttgaaagaaaggtcaaaggcatctggagaacaaaacagtaagttggtggacttgaagctgaagaagctcctagaagttcagccacaggtggcaaattcaccctccagtgctgcccagaaagctgtaactgagagctcagagcaggacatgaaaagtggcacagaagatctccggactgaacgattacaaaaaacaacagaacgttttagaaatcctgttgtgttcagcaaagattctacagtcagaaaaactcaacttcagtctttcagccaatatattgagaatagaccagagatgaaaaggcagagatcaatacaggaagatacaaagaaaggaaatgaggagaaggcagcgataactgaaactcagaggaagccatcagaagatgaagtgcttaataaagggttcaaagacaccagtcagtatgtagtaggagaattggcagcactagagaatgagcaaaagcaaattgacacccgtgccgcgctggtggagaagcgccttcgctatctcatggacacaggaaggaacacagaagaagaagaagctatgatgcaggaatggtttatgttagttaataagaaaaatgccttaataaggagaatgaatcagctctctcttctggaaaaagaacatgatttagaacgacggtatgagctgctgaaccgggaattgagggcaatgctagccattgaagactggcagaagaccgaggcccagaagcgacgcgaacagcttctgctagatgagctggtggccctggtgaacaagcgcgatgcgctcgtcagggacctggacgcgcaggagaagcaggccgaagaagaagatgagcatttggagcgaactctggagcaaaacaaaggcaagatggccaagaaagaggagaaatgtgttcttcagtagccatcagatcagaaagaatctctcccaacattttagagtcttgcttcccaaaccagaaaaagtcagactcattgttgatttaaaacttttaacattt

SEQ ID NO: 129298 - DNA, 1311 bp, Homo sapiens
  Payload ID: 5292
  Gene Symbol: EHBP1
  Gene Name: EH domain binding protein 1
  ENST ID: ENST00000405482
  CDS Start-End: 381-1311
acgcgcggggcctggccaatggcggcggggcggtggaggttgagctgccgtgggtagggttagtgtgagaggtgcggcgggggagccctccagaatacccatcatatagcccctgaggtggcatggtgatgtctccatgagggaaccccttcccactcatcctgtcacgtatatcatagtgttcttgactgggccattcatctaagatgggatttaccctgtgaaacagggagaagacttatggaccccaagcatcatttcgagttgtagttgagtttttaaaagacatacatgcaaagttcctttgctttggaccctctgcattattaaagctgctgtattgctaacccagaactgctccagtgtcttgactgatcatcatggcttcagtttggaagagactgcagcgtgtgggaaaacatgcatccaagttccagtttgtggcctcctaccaggagctcatggttgagtgtacgaagaaatggcaaccagataaactggtggtagtttggaccagaagaagccgaaggaagtcttctaaggcacatagctggcaacctggaataaaaaatccctatcgtggtgttgttgtgtggcctgttcctgaaaacattgaaatcactgtaacactttttaaggatcctcatgcggaagaatttgaagacaaagagtggacatttgtcatagaaaatgaatccccttctggtcgaaggaaagctcttgctactagcagcatcaatatgaaacagtatgcaagccctatgccaactcagactgatgtcaagttaaaattcaagccattatctaaaaaagttgtatctgccgctcttcagttttcattatcttgcatttttctgagggaaggaaaagccacagatgaagacatgcaaagtttggctagtttgatgagtatgaagcaggctgacattggcaatttagatgacttcgaagaagataatgaagatgatgatgagaacagagtgaaccaagaagaaaaggcagctaaaattacagagcttatcaacaaacttaactttttggatgaagcagaaaaggacttggccaccgtgaattcaaatccatttgatgatcctgatgctgcagaattaaatccatttggagatcctgactcagaagaacctatcactgaaacagcttcacctagaaaaacagaagactctttttataataacagctataatccctttaaagaggtgcagactccacagtatttgaacccattcgatgagccagaagcatttgtgaccataaaggattctcctccccagtctacaaaaagaaaaaatataa

SEQ ID NO: 129299 - DNA, 3591 bp, Homo sapiens
  Payload ID: 5292
  Gene Symbol: EHBP1
  Gene Name: EH domain binding protein 1
  Uniprot ID: Q8NDI1
  ENST ID: ENST00000405289
  CDS Start-End: 1-3591
atggcttcagtttggaagagactgcagcgtgtgggaaaacatgcatccaagttccagtttgtggcctcctaccaggagctcatggttgagtgtacgaagaaatggcaaccagataaactggtggtagtttggaccagaagaagccgaaggaagtcttctaaggcacatagctggcaacctggaataaaaaatccctatcgtggtgttgttgtgtggcctgttcctgaaaacattgaaatcactgtaacactttttaaggatcctcatgcggaagaatttgaagacaaagagtggacatttgtcatagaaaatgaatccccttctggtcgaaggaaagctcttgctactagcagcatcaatatgaaacagtatgcaagccctatgccaactcagactgatgtcaagttaaaattcaagccattatctaaaaaagttgtatctgccgctcttcagttttcattatcttgcatttttctgagggaaggaaaagccacagatgaagacatgcaaagtttggctagtttgatgagtatgaagcaggctgacattggcaatttagatgacttcgaagaagataatgaagatgatgatgagaacagagtgaaccaagaagaaaaggcagctaaaattacagagcttatcaacaaacttaactttttggatgaagcagaaaaggacttggccaccgtgaattcaaatccatttgatgatcctgatgctgcagaattaaatccatttggagatcctgactcagaagaacctatcactgaaacagcttcacctagaaaaacagaagactctttttataataacagctataatccctttaaagaggtgcagactccacagtatttgaacccattcgatgagccagaagcatttgtgaccataaaggattctcctccccagtctacaaaaagaaaaaatataagacctgtggatatgagcaagtacctctatgctgatagttctaaaactgaagaagaagaattggatgaatcaaatcctttttatgaacctaaatcaactcctcctccaaataatttggtaaatcctgttcaagaactagaaactgaaaggcgagtgaaaagaaaggccccggctccaccagtcctctcaccaaaaacaggagtattaaatgaaaacacagtttctgcaggaaaagatctctctacttctcctaagccaagccctataccaagtcctgttttggggcgaaagccaaatgctagtcagtctttgcttgtatggtgtaaagaagttacaaagaactaccgaggagtaaaaatcaccaattttactacatcgtggagaaatggtttatctttttgtgcaatattacaccactttagaccagatttaattgactacaagtctctgaatcctcaagatattaaagagaacaacaaaaaggcatacgatggatttgccagcataggaatttcccgattattggaaccttctgatatggtattattagcaattcctgataaactgactgttatgacttatctctatcaaataagggcacatttcagtggccaagaactaaatgtcgttcagatagaggaaaacagcagtaaaagcacatataaagttggaaactatgaaacagatacaaacagttctgttgatcaagaaaaattctatgcagagcttagtgatctgaagcgggagcctgaactacaacagcctatcagcggagcagtagacttcttatcacaggatgactctgtatttgtaaatgatagcggggttggagagtcagaaagtgagcatcaaactcctgatgatcaccttagtccaagcacagcctccccttactgtcgcaggactaaaagtgacacagaaccccagaagtctcagcagagctctggaaggacttcaggatctgatgaccctggaatatgttccaatacagattcaacccaagcacaggttttgttaggcaaaaagagactattgaaagctgagactttagaattgagtgacttatatgttagtgataagaagaaggatatgtctccaccctttatttgtgaggagacagatgaacaaaagcttcaaactctagacatcggtagtaacttggagaaagaaaaattagagaattccagatccttagaatgcagatcagatccagaatctcctatcaaaaaaacaagtttatctcctacttctaaacttggatactcatatagtagagatctagaccttgctaagaaaaaacatgcttccctgaggcagacggagtctgatccagatgctgatagaaccactttaaatcatgcagatcattcatcaaaaatagtccagcatcgattgttatctagacaagaagaacttaaggaaagagcaagagttctgcttgagcaagcaagaagagatgcagccttaaaggcggggaataagcacaataccaacacagccaccccattctgcaacaggcagctaagtgatcagcaagatgaagagcgacgtcggcagctgagagagagagctcgtcagctaatagcagaagctcgatctggagtgaagatgtcagaacttcccagctatggtgaaatggctgcagaaaagttgaaagaaaggtcaaaggcatctggagatgaaaatgataatattgagatagatactaacgaggagatccctgaaggctttgttgtaggaggtggagatgaacttactaacttagaaaatgaccttgatactcccgaacaaaacagtaagttggtggacttgaagctgaagaagctcctagaagttcagccacaggtggcaaattcaccctccagtgctgcccagaaagctgtaactgagagctcagagcaggacatgaaaagtggcacagaagatctccggactgaacgattacaaaaaacaacagaacgttttagaaatcctgttgtgttcagcaaagattctacagtcagaaaaactcaacttcagtctttcagccaatatattgagaatagaccagagatgaaaaggcagagatcaatacaggaagatacaaagaaaggaaatgaggagaaggcagcgataactgaaactcagaggaagccatcagaagatgaagtgcttaataaagggttcaaagacaccagtcagtatgtagtaggagaattggcagcactagagaatgagcaaaagcaaattgacacccgtgccgcgctggtggagaagcgccttcgctatctcatggacacaggaaggaacacagaagaagaagaagctatgatgcaggaatggtttatgttagttaataagaaaaatgccttaataaggagaatgaatcagctctctcttctggaaaaagaacatgatttagaacgacggtatgagctgctgaaccgggaattgagggcaatgctagccattgaagactggcagaagaccgaggcccagaagcgacgcgaacagcttctgctagatgagctggtggccctggtgaacaagcgcgatgcgctcgtcagggacctggacgcgcaggagaagcaggccgaagaagaagatgagcatttggagcgaactctggagcaaaacaaaggcaagatggccaagaaagaggagaaatgtgttcttcagtag

SEQ ID NO: 129300 - DNA, 669 bp, Homo sapiens
  Payload ID: 5292
  Gene Symbol: EHBP1
  Gene Name: EH domain binding protein 1
  ENST ID: ENST00000422032
  CDS Start-End: 1-669
caataccaacacagccaccccattctgcaacaggcagctaagtgatcaagatgaagagcgacgtcggcagctgagagagagagctcgtcagctaatagcagaagctcgatctggagtgaagatgtcagaacttcccagctatggtgaaatggctgcagaaaagttgaaagaaaggtcaaaggcatctggagatgaaaatgataatattgagatagatactaacgaggagatccctgaaggctttgttgtaggaggtggagatgaacttactaacttagaaaatgaccttgatactcccgaacaaaacagtaagttggtggacttgaagctgaagaagctcctagaagttcagccacaggtggcaaattcaccctccagtgctgcccagaaagctgtaactgagagctcagagcaggacatgaaaagtggcacagaagatctccggactgaacgattacaaaaaacaacagaacgttttagaaatcctgttgtgttcagcaaagattctacagtcagaaaaactcaacttcagtctttcagccaatatattgagaatagaccagagatgaaaaggcagagatcaatacaggaagatacaaagaaaggaaatgaggagaaggcagcgataactgaaactcagaggaagccatcagaagatgaagtgcttaa

SEQ ID NO: 129301 - DNA, 533 bp, Homo sapiens
  Payload ID: 5292
  Gene Symbol: EHBP1
  Gene Name: EH domain binding protein 1
  ENST ID: ENST00000413434
  CDS Start-End: 209-533
aacatctgactctccctccccaaagagagactccagcgagagactggggatttggaggtccaagtcatggcagaactgggttgcttgctaggacacaaggttagcatgcccctgtagcagcaatgtgagaatcagaaaaggtgactgtgcatctcaagaagccgaatcaaaaagccaagccaaccacctaaccagtgattttcaaggtatgaactggcaaccagataaactggtggtagtttggaccagaagaagccgaaggaagtcttctaaggcacatagctggcaacctggaataaaaaatccctatcgtggtgttgttgtgtggcctgttcctgaaaacattgaaatcactgtaacactttttaaggatcctcatgcggaagaatttgaagacaaagagtggacatttgtcatagaaaatgaatccccttctggtcgaaggaaagctcttgctactagcagcatcaatatgaaacagtatgcaagccctatgccaactcagactgatgtcaagttaaaattcaagccat

SEQ ID NO: 129302 - DNA, 586 bp, Homo sapiens
  Payload ID: 5292
  Gene Symbol: EHBP1
  Gene Name: EH domain binding protein 1
  ENST ID: ENST00000426940
  CDS Start-End: 463-586
aacatctgactctccctccccaaagagagactccagcgagagactggggatttggaggtccaagtcatggcagaactgggttgcttgctaggacacaaggttagcatgcccctgtagcagcaatgtgagaatcagaaaaggtgactgtgcatctcaagaagccgaatcaaaaagccaagccaaccacctaaccagtgattttcaaggcaaccagataaactggtggtagtttggaccagaagaagccgaaggaagtcttctaaggcacatagctggcaacctggaataaaaaatccctatcgtggtgttgttgtgtggcctgttcctgaaaacattgaaatcactgtaacactttttaaggatcctcatgcggaagaatttgaagacaaagagtggacatttgtcatagaaaatgaatccccttctggtcgaaggaaagctcttgctactagcagcatcaatatgaaacagtatgcaagccctatgccaactcagactgatgtcaagttaaaattcaagccattatctaaaaaagttgtatctgccgctcttcagttttcattatcttgcatttttctgagggaag

SEQ ID NO: 129303 - DNA, 329 bp, Homo sapiens
  Payload ID: 5292
  Gene Symbol: EHBP1
  Gene Name: EH domain binding protein 1
  ENST ID: ENST00000454124
  CDS Start-End: 1-329
acttggagaaagaaaaattagagaattccagatccttagaatgcagatcagatccagaatctcctatcaaaaaaacaagtttatctcctacttctaaacttggatactcatatagtagagatctagaccttgctaagaaaaaacatgcttccctgaggcagacggagtctgatccagatgctgatagaaccactttaaatcatgcagatcattcatcaaaaatagtccagcagcaagatgaagagcgacgtcggcagctgagagagagagctcgtcagctaatagcagaagctcgatctggagtgaagatgtcagaacttcccagctat

SEQ ID NO: 129304 - DNA, 539 bp, Homo sapiens
  Payload ID: 5292
  Gene Symbol: EHBP1
  Gene Name: EH domain binding protein 1
  ENST ID: ENST00000449820
  CDS Start-End: 255-539
aacatctgactctccctccccaaagagagactccagcgagagactggggatttggaggtccaagtcatggcagaactgggttgcttgctaggacacaaggttagcatgcccctgtagcagcaatgtgagaatcagaaaaggtgactgtgcatctcaagaagccgaatcaaaaagccaagccaaccacctaaccagtgattttcaaggaatccccttctggtcgaaggaaagctcttgctactagcagcatcaatatgaaacagtatgcaagccctatgccaactcagactgatgtcaagttaaaattcaagccattatctaaaaaagttgtatctgccgctcttcagttttcattatcttgcatttttctgagggaaggaaaagccacagatgaagacatgcaaagtttggctagtttgatgagtatgaagcaggctgacattggcaatttagatgacttcgaagaagataatgaagatgatgatgagaacagagtgaaccaagaagaaaaggcagctaaaattacagaaattgtaaac

SEQ ID NO: 129305 - DNA, 460 bp, Homo sapiens
  Payload ID: 5292
  Gene Symbol: EHBP1
  Gene Name: EH domain binding protein 1
  ENST ID: ENST00000444311
  CDS Start-End: 1-460
ccgattattggaaccttctgatatgacggagtctgatccagatgctgatagaaccactttaaatcatgcagatcattcatcaaaaatagtccagcatcgattgttatctagacaagaagaacttaaggaaagagcaagagttctgcttgagcaagcaagaagagatgcagccttaaaggcggggaataagcacaataccaacacagccaccccattctgcaacaggcagctaagtgatcagcaagatgaagagcgacgtcggcagctgagagagagagctcgtcagctaatagcagaagctcgatctggagtgaagatgtcagaacttcccagctatggtgaaatggctgcagaaaagttgaaagaaaggtcaaaggcatctggagatgaaaatgataatattgagatagatactaacgaggagatccctgaaggctttgttgtaggaggtggagatgaa

SEQ ID NO: 129306 - DNA, 5076 bp, Homo sapiens
  Payload ID: 5292
  Gene Symbol: EHBP1
  Gene Name: EH domain binding protein 1
  Uniprot ID: Q8NDI1
  ENST ID: ENST00000431489
  CDS Start-End: 607-4089
gatgatggtggcggaggagaaaggcgggggagggggtgctgggcgctgagcggtggctctggcagggcttggtagggtgggggacggtcgcggggcgatctgtcagggagggggtgggcgtgaggggcgccgtccgcctgaggggctgcagatcccggctaccgcgagcgccgtggctggcttggctgttccatgtggctccggcggggatggaggactcggtggcggcggcggctgctgctgcggcggcgacggaggagcggctatgagaagggaacggggccagactcagcccgacagcgggattagagccctccagaatacccatcatatagcccctgaggtggcatggtgatgtctccatgagggaaccccttcccactcatcctgtcacgtatatcatagtgttcttgactgggccattcatctaagatgggatttaccctgtgaaacagggagaagacttatggaccccaagcatcatttcgagttgtagttgagtttttaaaagacatacatgcaaagttcctttgctttggaccctctgcattattaaagctgctgtattgctaacccagaactgctccagtgtcttgactgatcatcatggcttcagtttggaagagactgcagcgtgtgggaaaacatgcatccaagttccagtttgtggcctcctaccaggagctcatggttgagtgtacgaagaaatggcaaccagataaactggtggtagtttggaccagaagaagccgaaggaagtcttctaaggcacatagctggcaacctggaataaaaaatccctatcgtggtgttgttgtgtggcctgttcctgaaaacattgaaatcactgtaacactttttaaggatcctcatgcggaagaatttgaagacaaagagtggacatttgtcatagaaaatgaatccccttctggtcgaaggaaagctcttgctactagcagcatcaatatgaaacagtatgcaagccctatgccaactcagactgatgtcaagttaaaattcaagccattatctaaaaaagttgtatctgccgctcttcagttttcattatcttgcatttttctgagggaaggaaaagccacagatgaagacatgcaaagtttggctagtttgatgagtatgaagcaggctgacattggcaatttagatgacttcgaagaagataatgaagatgatgatgagaacagagtgaaccaagaagaaaaggcagctaaaattacagagcttatcaacaaacttaactttttggatgaagcagaaaaggacttggccaccgtgaattcaaatccatttgatgatcctgatgctgcagaattaaatccatttggagatcctgactcagaagaacctatcactgaaacagcttcacctagaaaaacagaagactctttttataataacagctataatccctttaaagaggtgcagactccacagtatttgaacccattcgatgagccagaagcatttgtgaccataaaggattctcctccccagtctacaaaaagaaaaaatataagacctgtggatatgagcaagtacctctatgctgatagttctaaaactgaagaagaagaattggatgaatcaaatcctttttatgaacctaaatcaactcctcctccaaataatttggtaaatcctgttcaagaactagaaactgaaaggcgagtgaaaagaaaggccccggctccaccagtcctctcaccaaaaacaggagtattaaatgaaaacacagtttctgcaggaaaagatctctctacttctcctaagccaagccctataccaagtcctgttttggggcgaaagccaaatgctagtcagtctttgcttgtatggtgtaaagaagttacaaagaactaccgaggagtaaaaatcaccaattttactacatcgtggagaaatggtttatctttttgtgcaatattacaccactttagaccagatttaattgactacaagtctctgaatcctcaagatattaaagagaacaacaaaaaggcatacgatggatttgccagcataggaatttcccgattattggaaccttctgatatggtattattagcaattcctgataaactgactgttatgacttatctctatcaaataagggcacatttcagtggccaagaactaaatgtcgttcagatagaggaaaacagcagtaaaagcacatataaagttggaaactatgaaacagatacaaacagttctgttgatcaagaaaaattctatgcagagcttagtgatctgaagcgggagcctgaactacaacagcctatcagcggagcagtagacttcttatcacaggatgactctgtatttgtaaatgatagcggggttggagagtcagaaagtgagcatcaaactcctgatgatcaccttagtccaagcacagcctccccttactgtcgcaggactaaaagtgacacagaaccccagaagtctcagcagagctctggaaggacttcaggatctgatgaccctggaatatgttccaatacagattcaacccaagcacaggttttgttaggcaaaaagagactattgaaagctgagactttagaattgagtgacttatatgttagtgataagaagaaggatatgtctccaccctttatttgtgaggagacagatgaacaaaagcttcaaactctagacatcggtagtaacttggagaaagaaaaattagagaattccagatccttagaatgcagatcagatccagaatctcctatcaaaaaaacaagtttatctcctacttctaaacttggatactcatatagtagagatctagaccttgctaagaaaaaacatgcttccctgaggcagacggagtctgatccagatgctgatagaaccactttaaatcatgcagatcattcatcaaaaatagtccagcatcgattgttatctagacaagaagaacttaaggaaagagcaagagttctgcttgagcaagcaagaagagatgcagccttaaaggcggggaataagcacaataccaacacagccaccccattctgcaacaggcagctaagtgatcagcaagatgaagagcgacgtcggcagctgagagagagagctcgtcagctaatagcagaagctcgatctggagtgaagatgtcagaacttcccagctatggtgaaatggctgcagaaaagttgaaagaaaggtcaaaggcatctggagaacaaaacagtaagttggtggacttgaagctgaagaagctcctagaagttcagccacaggtggcaaattcaccctccagtgctgcccagaaagctgtaactgagagctcagagcaggacatgaaaagtggcacagaagatctccggactgaacgattacaaaaaacaacagaacgttttagaaatcctgttgtgttcagcaaagattctacagtcagaaaaactcaacttcagtctttcagccaatatattgagaatagaccagagatgaaaaggcagagatcaatacaggaagatacaaagaaaggaaatgaggagaaggcagcgataactgaaactcagaggaagccatcagaagatgaagtgcttaataaagggttcaaagacaccagtcagtatgtagtaggagaattggcagcactagagaatgagcaaaagcaaattgacacccgtgccgcgctggtggagaagcgccttcgctatctcatggacacaggaaggaacacagaagaagaagaagctatgatgcaggaatggtttatgttagttaataagaaaaatgccttaataaggagaatgaatcagctctctcttctggaaaaagaacatgatttagaacgacggtatgagctgctgaaccgggaattgagggcaatgctagccattgaagactggcagaagaccgaggcccagaagcgacgcgaacagcttctgctagatgagctggtggccctggtgaacaagcgcgatgcgctcgtcagggacctggacgcgcaggagaagcaggccgaagaagaagatgagcatttggagcgaactctggagcaaaacaaaggcaagatggccaagaaagaggagaaatgtgttcttcagtagccatcagatcagaaagaatctctcccaacattttagagtcttgcttcccaaaccagaaaaagtcagactcattgttgatttaaaacttttaacattttgtttggctggattgtactactttacctctactttaccaccaccacccttttcctccctcctttccaaataatatacagaactccaaaatagcttcatttaaggatttttttgtgagttaacaatttccttgaaatcctgtgaaatagatttgcacagacaccttgtgagtgattggtattggaggtgttcaagaaactgttcgaaaaagaacaaaaacacttccctcgttattttctctcattttttgatgagaggaaaatttgaaacattattcttgttgttgttggtaatagcataatgacagtgggaggggtacaaggggataagaaaaatgtcatgatttttttccggtcctgccacatgtaacacttactctgttacctaaattttatagttagatcatatccaatctacttattaaactgtgttctatttaccagtggagtttttctgcagtggttgcgtttcactgtaaggataatggagttcctctcctctgctttcctcagaggatggtcctttaacatagccagaaacaagccctgtggtttgaaggtgagctgtgaggatgggactaattgatatgcaccagtttacaaagacagtcttatcatccgagaatacaccatctttttctctggataattatttcttacatcatgcttgattcctacattttgttgggtctcaacattggctcacgaatgctgttaatatttattctgtattgataaaaagtctgtcttgccactacaagtaaatcccccatttaatattttcttctttagcatagcactgtcattttttgtgaaaatggttatgtttatttattacaatactgagtcatatataaattttcaataaaagcagaaactttcttaccttaaa

SEQ ID NO: 129307 - DNA, 581 bp, Homo sapiens
  Payload ID: 5292
  Gene Symbol: EHBP1
  Gene Name: EH domain binding protein 1
  ENST ID: ENST00000427809
  CDS Start-End: 349-581
acgcgcggggcctggccaatggcggcggggcggtggaggttgagctgccgtggccctccagaatacccatcatatagcccctgaggtggcatggtgatgtctccatgagggaaccccttcccactcatcctgtcacgtatatcatagtgttcttgactgggccattcatctaagatgggatttaccctgtgaaacagggagaagacttatggaccccaagcatcatttcgagttgtagttgagtttttaaaagacatacatgcaaagttcctttgctttggaccctctgcattattaaagctgctgtattgctaacccagaactgctccagtgtcttgactgatcatcatggcttcagtttggaagagactgcagcgtgtgggaaaacatgcatccaagttccagtttgtggcctcctaccaggagctcatggttgagtgtacgaagaaatggcaaccagataaactggtggtagtttggaccagaagaagccgaaggaagtcttctaaggcacatagctggcaacctggaataaaaaatccctatcgtggtgttgttgtgtggcctgttcctgaaaacat

SEQ ID NO: 129308 - DNA, 5185 bp, Homo sapiens
  Payload ID: 5293
  Gene Symbol: EHBP1L1
  Gene Name: EH domain binding protein 1-like 1
  Uniprot ID: Q8N3D4
  ENST ID: ENST00000309295
  CDS Start-End: 266-4837
cgggggtgcggctccaggaaacggcgcgctcccagctccgcgctcgccacccgacgcgccccaggcgaccccgcagactcagccagaccaccctgcgggccccagcggcggcagcggagagcgcggtcccgggtcggagcctgggacacctccgcacggacggggcgggcggcgcggacaggccatggggacccgggccgggccagcggtggcgggccagcgggagccccgggcctgagaagtgggcggcggggtggcgggggccatgacctcggtgtggaagcgcctgcagcgcgtgggcaagcgggcggccaagttccagttcgtggcctgttaccacgagctagtgttggagtgcaccaagaaatggcagccagataagctggtggtggtatggacccgtcggaaccgacgcatctgctccaaggcccacagctggcagccgggcatccagaacccataccggggcaccgtggtgtggatggtacctgagaatgtggacatctctgtgaccctctacagggacccccacgtggaccagtatgaggccaaagagtggacatttattattgaaaatgagtctaaggggcagcggaaggtgctggccacggccgaggtggacctggcccgccatgcagggcccgtgcctgtccaagtcccagtgaggctgcggctgaagccaaagtcagtgaaggtggtgcaggctgagctgagcctcactctttccggggtgctgctgcgggagggccgtgccacggacgatgacatgcagagtctcgcaagcctcatgagtgtgaagcctagtgatgtgggcaacttggatgactttgctgagagtgatgaagatgaggctcatggcccaggagccccggaggcccgggctcgagtcccccagccagatccctctcgagagctgaagacgctttgtgaggaggaggaggaaggccaaggacgaccccagcaggcagttgccagcccttctaatgctgaggataccagcccagcccctgtgagtgctcctgcacccccagccagaacctcccgaggccaggggtcagaacgagctaatgaagcggggggccaggtaggccctgaggccccaaggcccccggaaacctcaccagagatgaggtcttcaaggcagccagcccaggacacggcccccaccccagcccctcggctccggaaaggctctgatgccctccggcccccagtcccccagggggaagatgaggtccccaaagcctcaggggctcctccagcaggattgggctctgctagggagacccaggcccaggcatgccctcaggaagggacagaagcccatggagctaggctgggcccgagcattgaggataaaggttctggagacccttttggaaggcagagactcaaggctgaagagatggacactgaggacaggccagaggccagtggggtggacactgagccaaggtcaggaggcagagaggcaaacactaagaggtcaggagtcagagctggggaggctgaagagagttcagcagtttgtcaagtggatgctgagcagaggtcaaaggtgagacatgtggacactaagggaccagaggcgacaggggtgatgcctgaggcaagatgcagggggacccctgaggctcctccaaggggctctcaggggaggctgggagtcaggaccagggatgaggctccctcaggcctgagcctgcccccagcggagcctgcagggcactctgggcaacttggtgacctcgagggggccagggctgctgcaggccaggagagagagggtgcagaagtgaggggtggagcacctggtattgaggggacaggcctggagcagggcccttctgttggagcaataagcaccaggccccaggtgagcagctggcagggggccctgttatcaactgcccagggggcaatatccaggggtctgggaggctgggaggcagaagctgggggttcaggggacctggaaacagagactgaggtggtagggttggaggtgctgggaacccaggagaaagaagttgaggggtcagggttcccagagactaggacactagaaattgagatattgggggccttggagaaagaagcagcaagatcaagggtcctggagtcagaggttgctgggacagcacagtgtgagggactggagacccaggaaacagaggtgggggtcatagagaccccagggacagagactgaggtattggggacccagaaaacagaagctgggggttcaggagttttgcagacaagaactacgatagcagagactgaggtactggtgacccaggagatatctggggatttagggccactgaagatagaagatacaatacagtctgagatgctggggacccaggagacagaggtggaagcttctagggtaccagagtcagaggctgaggggacagaagctaaaatattagggacccaggagataacagctagggattcaggggtcagagagatagaagcagagatagcagagtctgacatattggtagcccaggagatagaggtgggacttttgggggttctgggaatagagactggggcagcagaaggtgcgatattggggacccaagagatagcatctagggattcaggggtcccagggttagaagctgatacaacagggatccaggtgaaagaggttgggggttcagaggttccagagatagcgactgggacagcagaaactgagatattggggacccaagagatagcatctaggagttcaggggtcccagggctagaatctgaggtagctggggcccaggagacagaggtcgggggttcagggatctcagggcccgaggctggaatggcagaggcccgagtactgatgacccgtaagacagaaattatagttccagaggctgagaaggaagaggctcagacttcgggggtccaggaagcagagactagagttgggagtgctctcaaatatgaggctttaagggccccagtcactcagccaagagttttaggatcccaggaagcaaaagcagagatttcaggagtacaagggtcagagactcaagttctgagagtccaggaggcagaggctggggtttgggggatgtcagagggcaaatctggggcttggggggcccaggaagcagagatgaaggttttagagtctccagagaacaaatctggtacttttaaggcccaggaagcggaggctggggtcttgggaaatgagaaggggaaagaagctgagggaagcctcacagaggccagcctgcctgaagcacaggtggccagtggggcaggggctggggcgcccagggcctcttccccagagaaggctgaagaggacaggaggctgccgggcagccaggcaccacctgccctggtcagctccagccagtccctgctggagtggtgccaggaagtcaccactggctaccgtggcgtccgcatcaccaacttcaccacatcctggcgcaacggcttggccttctgtgccatcctgcaccgattctacccagacaagattgactatgcctcgctagacccactcaacatcaagcagaacaacaagcaggccttcgatggcttcgcggctctgggcgtgtcgcggctgctggagcccgcggacatggtgctactgtcggtgcccgacaagctcatcgtcatgacgtacctgtgccagatccgcgccttctgcaccgggcaggagctgcagctggtacaactggagggcggcggcggcgccggcacgtaccgcgtgggcagcgcccagcccagcccgcccgacgacctggacgccggaggcctggcgcagcggctgcgcggtcacggggccgaggggccccaggagcccaaggaggccgcagaccgcgcagacggggcggccccgggggtggcctccaggaacgcggtcgcgggccgcgcctccaaggacggcggggccgaggccccccgagagtcgcgacccgcggaggtcccggccgaggggctggtgaacggggcgggggcaccgggcggcggcggcgtgaggctgcgacggccctcggtcaacggggagcccgggtcggtgcccccgccccgcgcgcacggctccttctcccacgtgcgcgacgcggacctgctcaagaagaggcgctcgcggctgcggaacagcagctcgttctcgatggacgatccggacgcgggagccatgggagctgcggctgcagaaggccaggcccctgaccccagccctgccccaggcccacccacagctgcagactctcaacagccccctggtgggagttccccctcggaggaaccacccccaagcccaggggaggaggctgggctgcaacggttccaggacacaagtcagtacgtgtgtgcagagctgcaggccctggaacaggagcagaggcagatagatgggcgggcggctgaggtggagatgcagctgaggagcctcatggagtcaggtgccaacaagctgcaggaggaggtgctgatccaggagtggttcaccctggtcaacaagaagaacgctctcatccggaggcaggaccagctgcagctgctcatggaggagcaggacttggagcgaaggttcgagctgctgagccgcgagctgcgggccatgctggccatcgaagactggcagaaaacgtccgctcagcagcaccgagagcagctcctactggaggagctggtgtcgctggtgaaccagcgcgatgagctagtccgggacctggaccacaaggagcggatcgccctggaggaggacgagcgcctggagcgcggcctggaacagcggcgccgcaagctgagccggcagttgagccggcgggagcgctgcgtgctgagctgaggccgccggcccgggtggcccataacttctcgcgtccccggcgtccgccgccgccccgggcctgcgctgcggacgacccggccgtcccggaggccgcgcgcgtgtccgctaggggccgccggcgcccttccccgtacagggcagggcggatccccgaccccacgggcggggcggccgccgtatttatttgtcaccgagggtgtgtgcgcgctcgcggcgggtgcggggtcctccccgacggcacggccgggccggcggcctcggggagagggatgcctgggcactaccgccccgcgctggcttgccctcctgttctccagagcaataaagttggacgagactacccca

SEQ ID NO: 129309 - DNA, 2267 bp, Homo sapiens
  Payload ID: 5293
  Gene Symbol: EHBP1L1
  Gene Name: EH domain binding protein 1-like 1
  ENST ID: ENST00000533237
  CDS Start-End: 258-2267
cggctccaggaaacggcgcgctcccagctccgcgctcgccacccgacgcgccccaggcgaccccgcagactcagccagaccaccctgcgggccccagcggcggcagcggagagcgcggtcccgggtcggagcctgggacacctccgcacggacggggcgggcggcgcggacaggccatggggacccgggccgggccagcggtggcgggccagcgggagccccgggcctgagaagtgggcggcggggtggcgggggccatgacctcggtgtggaagcgcctgcagcgcgtgggcaagcgggcggccaagttccagttcgtggcctgttaccacgagctagtgttggagtgcaccaagaaatggcagccagataagctggtggtggtatggacccgtcggaaccgacgcatctgctccaaggcccacagctggcagccgggcatccagaacccataccggggcaccgtggtgtggatggtacctgagaatgtggacatctctgtgaccctctacagggacccccacgtggaccagtatgaggccaaagagtggacatttattattgaaaatgagtctaaggggcagcggaaggtgctggccacggccgaggtggacctggcccgccatgcagggcccgtgcctgtccaagtcccagtgaggctgcggctgaagccaaagtcagtgaaggtggtgcaggctgagctgagcctcactctttccggggtgctgctgcgggagggccgtgccacggacgatgacatgcagagtctcgcaagcctcatgagtgtgaagcctagtgatgtgggcaacttggatgactttgctgagagtgatgaagatgaggctcatggcccaggagccccggaggcccgggctcgagtcccccagccagatccctctcgagagctgaagacgctttgtgaggaggaggaggaaggccaaggacgaccccagcaggcagttgccagcccttctaatgctgaggataccagcccagcccctgtgagtgctcctgcacccccagccagaacctcccgaggccaggggtcagaacgagctaatgaagcggggggccaggtaggccctgaggccccaaggcccccggaaacctcaccagagatgaggtcttcaaggcagccagcccaggacacggcccccaccccagcccctcggctccggaaaggctctgatgccctccggcccccagtcccccagggggaagatgaggtccccaaagcctcaggggctcctccagcaggattgggctctgctagggagacccaggcccaggcatgccctcaggaagggacagaagcccatggagctaggctgggcccgagcattgaggataaaggttctggagacccttttggaaggcagagactcaaggctgaagagatggacactgaggacaggccagaggccagtggggtggacactgagccaaggtcaggaggcagagaggcaaacactaagaggtcaggagtcagagctggggaggctgaagagagttcagcagtttgtcaagtggatgctgagcagaggtcaaaggtgagacatgtggacactaagggaccagaggcgacaggggtgatgcctgaggcaccacctgccctggtcagctccagccagtccctgctggagtggtgccaggaagtcaccactggctaccgtggcgtccgcatcaccaacttcaccacatcctggcgcaacggcttggccttctgtgccatcctgcaccgattctacccagacaagattgactatgcctcgctagacccactcaacatcaagcagaacaacaagcaggccttcgatggcttcgcggctctgggcgtgtcgcggctgctggagcccgcggacatggtgctactgtcggtgcccgacaagctcatcgtcatgacgtacctgtgccagatccgcgccttctgcaccgggcaggagctgcagctggtacaactggagggcggcggcggcgccggcacgtaccgcgtgggcagcgcccagcccagcccgcccgacgacctggacgccggaggcctggcgcagcggctgcgcggtcacggggccgaggggccccaggagcccaaggaggccgcagaccgcgcagacggggcggccccgggggtggcctccaggaacgcggtcgcgggccgcgcctccaaggacggcggggccgaggccccccgagagtcgcgacccgcggaggtcccggccgaggggctggtgaacggggcgggggcaccgggcggcggcggcgtgaggctg

SEQ ID NO: 129310 - DNA, 793 bp, Homo sapiens
  Payload ID: 5293
  Gene Symbol: EHBP1L1
  Gene Name: EH domain binding protein 1-like 1
  ENST ID: ENST00000533465
  CDS Start-End: 1-793
agtcagagctggggaggctgaagagagttcagcagtttgtcaagtggatgctgagcagaggtcaaaggcccaggaagcggaggctggggtcttgggaaatgagaaggggaaagaagctgagggaagcctcacagaggccagcctgcctgaagcacaggtggccagtggggcaggggctggggcgcccagggcctcttccccagagaaggctgaagaggacaggaggctgccgggcagccaggcaccacctgccctggtcagctccagccagtccctgctggagtggtgccaggaagtcaccactggctaccgtggcgtccgcatcaccaacttcaccacatcctggcgcaacggcttggccttctgtgccatcctgcaccgattctacccagacaagattgactatgcctcgctagacccactcaacatcaagcagaacaacaagcaggccttcgatggcttcgcggctctgggcgtgtcgcggctgctggagcccgcggacatggtgctactgtcggtgcccgacaagctcatcgtcatgacgtacctgtgccagatccgcgccttctgcaccgggcaggagctgcagctggtacaactggagggcggcggcggcgccggcacgtaccgcgtgggcagcgcccagcccagcccgcccgacgacctggacgccggaggcctggcgcagcggctgcgcggtcacggggccgaggggccccaggagcccaaggaggccgcagaccgcgcagacggggcggccccgggggtggcctccaggaacgcggtcgcgggc

SEQ ID NO: 129311 - DNA, 1643 bp, Homo sapiens
  Payload ID: 5293
  Gene Symbol: EHBP1L1
  Gene Name: EH domain binding protein 1-like 1
  ENST ID: ENST00000634639
  CDS Start-End: 242-1643
cgcgctcccagctccgcgctcgccacccgacgcgccccaggcgaccccgcagactcagccagaccaccctgcgggccccagcggcggcagcggagagcgcggtcccgggtcggagcctgggacacctccgcacggacggggcgggcggcgcggacaggccatggggacccgggccgggccagcggtggcgggccagcgggagccccgggcctgagaagtgggcggcggggtggcgggggccatgacctcggtgtggaagcgcctgcagcgcgtgggcaagcgggcggccaagttccagttcgtggcctgttaccacgagctagtgttggagtgcaccaagaaatggcagccagataagctggtggtggtatggacccgtcggaaccgacgcatctgctccaaggcccacagctggcagccgggcatccagaacccataccggggcaccgtggtgtggatggtacctgagaatgtggacatctctgtgaccctctacagggacccccacgtggaccagtatgaggccaaagagtggacatttattattgaaaatgagtctaaggggcagcggaaggtgctggccacggccgaggtggacctggcccgccatgcagggcccgtgcctgtccaagtcccagtgaggctgcggctgaagccaaagtcagtgaaggtggtgcaggctgagctgagcctcactctttccggggtgctgctgcgggagggccgtgccacggacgatgacatgcagagtctcgcaagcctcatgagtgtgaagcctagtgatgtgggcaacttggatgactttgctgagagtgatgaagatgaggctcatggcccaggagccccggaggcccgggctcgagtcccccagccaggccggggcggtgccctgaggccagggcgtttcccagatccctctcgagagctgaagacgctttgtgaggaggaggaggaaggccaaggacgaccccagcaggcagttgccagcccttctaatgctgaggataccagcccagcccctgcaccacctgccctggtcagctccagccagtccctgctggagtggtgccaggaagtcaccactggctaccgtggcgtccgcatcaccaacttcaccacatcctggcgcaacggcttggccttctgtgccatcctgcaccgattctacccagacaagattgactatgcctcgctagacccactcaacatcaagcagaacaacaagcaggccttcgatggcttcgcggctctgggcgtgtcgcggctgctggagcccgcggacatggtgctactgtcggtgcccgacaagctcatcgtcatgacgtacctgtgccagatccgcgccttctgcaccgggcaggagctgcagctggtacaactggagggcggcggcggcgccggcacgtaccgcgtgggcagcgcccagcccagcccgcccgacgacctggacgccggaggcctggcgcagcggctgcgcggtcacggggccgaggggccccaggagcccaaggaggccgcagaccgcgcagacggggcggccccgggggtggcctccaggaacgcggtcgcgggccgcgcctccaaggacggcggggccgaggccccccgagagtcgcgacccgcggaggtcccggccgaggggc

SEQ ID NO: 129312 - DNA, 4551 bp, Homo sapiens
  Payload ID: 5294
  Gene Symbol: EHD1
  Gene Name: EH-domain containing 1
  Uniprot ID: Q9H4M9
  ENST ID: ENST00000320631
  CDS Start-End: 256-1860
ccctaccgcccccaattccgccctgcccccgccgcggcggcgctagccgccactgagggaccgaccctataaaggccgctccgcgaggggtgcgcagcattcggcagagggcgcttcgacgggctgggctgtgcgcctgcgcagtgtgggtcgctcccgattccctgccccggccggccccgcctcggctccgcaccctcgccccgctctcagccgccgctctgccccgcagcagccagccccgtgtccggcagtatgttcagctgggtcagcaaggatgcccgccgcaagaaggagccggagctcttccagacggtggctgaggggctgcggcagctgtacgcgcagaagctgctacccctggaggagcactaccgcttccacgagttccactcgcccgcgctggaggacgctgacttcgacaacaagcctatggtgctcctcgtggggcagtacagcacgggcaagaccaccttcatccgacacctgatcgagcaggacttcccggggatgcgcatcgggcccgagcccaccaccgactccttcatcgccgtcatgcacggccccactgagggcgtggtgccgggcaacgcgctcgtggtggacccgcggcgccccttccgcaagctcaacgcgtttggcaacgctttcctcaacaggttcatgtgtgcccagctgcccaaccccgtcctggacagcatcagcatcatcgacacccccgggatcctgtctggagagaagcagcggatcagcagaggctatgactttgcagccgtcctggagtggttcgcggagcgtgtggaccgcatcatcctgctcttcgacgcccacaagctggacatctccgatgagttctcggaagtgatcaaggctctgaagaaccatgaggacaagatccgcgtggtgctgaacaaggcagaccagatcgagacgcagcagctgatgcgggtgtacggggccctcatgtggtccctgggcaagatcatcaacacccccgaggtggtcagggtctacatcggctccttctggtcccacccgctcctcatccccgacaaccgcaagctctttgaggccgaggagcaggacctcttcaaggacatccagtcactgccccgaaacgccgccctcaggaagctcaatgacctgatcaagcgggcacggctggccaaggttcacgcctacatcatcagctccctcaagaaagagatgcccaatgtctttggtaaagagagcaaaaagaaagagctggtgaacaacctcggagagatctaccagaagattgagcgcgagcaccagatctcccctggggacttcccgagcctccgcaagatgcaggaactcctgcagacccaggacttcagcaagttccaggcgctgaagcccaagctgctggacacggtggatgacatgctggccaacgacatcgcgcggctgatggtgatggtgcggcaggaggagtccctgatgccttcccaggtggtcaagggcggcgcctttgacggcaccatgaacgggccgttcgggcacggctacggcgagggggccggcgagggcatcgacgacgtggagtgggtggtgggcaaggacaagcccacctacgacgagatcttctacacgctgtcccctgtcaacggcaagatcacgggcgccaacgccaagaaggagatggtgaagtccaagctccccaacaccgtgctagggaagatctggaagctggccgacgtggacaaggacgggctgctggacgacgaggagttcgcgctggccaaccacctcatcaaggtcaagctggagggccacgagctgcccgccgacctgcccccgcacctggtgccgccctccaagcgcagacatgagtgatggcgcccggccccgcacctgccatttgcacgcccggccgggaggcagagacggggggaggggaagcctcaccatttctcaaggtccataaagactgagcggatgtttcctcgcctctcgaaaaggaaaaccaccatctttcttttaaggctgttcctgggcctggcgggggaggcaggggtgagaggatggaattgtgtgcacaagaactgtggctattttaatatataacgttagaggctgcgttctttgtcgccgcctcccctgtgtgccagccctgtgtgcacggcctctgccccccggcctttgctgtggctggagctggacagtgcagcgactgcgaccgtgggggagccaggtcgcccttttggcagctgctaggctgaggctgcatggacaggaacaccaggcaccctccgtgtgcttctgagctgaggttgcttcacgggaccgtggcttccttcctcacctggctctgcctcccccgtgctctcgggcgaagtgggttcttgtgccttcccctcccgggcccaggctccccgtgcgcgggccctgccctttcctcccgcgccccaccggctccgacgcgcaaccccgctcagcagtcacagaagcagggcccagccaccttggtctttttttgggagttcaggggagtaggagaatgtcttccagaaaaatacataagctagtttctgttctgtaaagtgatatctttcatacttgaccaaagttcccaataacttcccaaccactgttcaaaagctgtgatttttgtctccccttcccaccctccagccaaggagcagccctgcccagggggcattaggtgtgggtacccggggagcaccccgttcctggaccccagtgttgcatttcctggctgaggaagggtggtcatcccagctcctgccctaccctctcacttaactggagctttgggacgcaccctccacagtgggaggtggtggtgggtggcggtggcggggcctcacgacagcttggtgctggtaagaggaagcccgtggttctggctaggctctcatgtccagacagcggggaccaggggaaaacccagccccttctgtaatcccccttcatttcctaccttccttcctcctctgtttagcaaaggagggcagctcacttggatgtccttacaacgcccctggcccccaggttgagcaataagaaaccagaaccttgcggcccagtggcccgggccagttcaggccgcctccccctcctctgcctggggccattgagcccagcctccagggcccgggcgcgtttgcaggccagtggccactgtccgggctgtgatggcaccaaggcaggtggagcaccaggtaccacacagctgggcttcccaccaggctttcccgcgggggtctcagggagcttctccccagcgctgctcggagtctgcaggaactggccttgttctccttagcccgtcactccatacagtattaggtgaggatggatgcgggcgctgtccttgccgggaagtcactgttgaagttgcagtggcttgttcacacctgtgggaagagaagtgaagactttctccttgcattaaaaagtctgaactgtgcgaaagcttcgggtgcttccttgtcttttccaggggcagcagtcctgggccatcctcccctggtgtctgagggggtgatgccagcagggacagagtggcaaggcagccggggcaaggtgaccaaccctgcccagtcctgctctgctgggcagtagctgccccctcctactaagagggccaggcctgtagggaaaagggtttctggggtgatgcccccttccctgagcaaggtgggagctgagcagttcacttggggtggggaggggggaaacagttgggaggatgttgatagctgaggcctaggctggcacccctcagccacagacggatgagtgggcacctgcaggccctcggcactgggtggcatcaagtaaacaagggtttctgggctttggagccagactggctccttgctagccccaaggacggtttaagtacagggaagccgggcctctgaagacaaagcagatagcctgtgacaaacatgcaactaagggtggggccagtcaggcccaggtgatgtcacagatgggggactgtttataccagcagagggaagggtgactgattagtgacccttcataaaagggtgcagacttgaggtgccatgggtagaggctgctccagcccctctggcagaaggcaggacagaaacaagttcctgagggtttcagggacccagttgtgtgctccgagcctagctggtgtggtggtgtctggtcctatgaccagcacttgaggtgccagtggatgcttcagttgctgcagggctggccggccctccctgcgtcactcagctgccacctgtgggcattcaccctgtgccaggtggagctgcgctgtcacgatctgaggaagttcatgttcccccatttcacagagggagagtccgagactgaggactgccgaaataacaaaggtggtagaagcagatgcaaaccaggccgtccaactccagcgtgctttccatcaggttactaatccaaagcacacactaagaggaaaaaacggtagatccccccaaccccacccttagactgcagctgtactcagggctgagagacccacattaaaggttaaatgctgtcactcca

SEQ ID NO: 129313 - DNA, 3618 bp, Homo sapiens
  Payload ID: 5294
  Gene Symbol: EHD1
  Gene Name: EH-domain containing 1
  Uniprot ID: Q9H4M9
  ENST ID: ENST00000359393
  CDS Start-End: 412-2016
aaaggggtctgtgtgtggccggggaggatggcgggggagtgagccccatggaacagccaggaactgataaaagatgaggggacaaagacagtgtgtgtctgggaagctgggctgagaggaggaggtgccgccgcctgggggtactccgatgcttccggggattccgagccagctggaggaccgcacgtggcgaacggcgggcgcggcgcgtagtcagggaaccagggtgcctgactgggtgtctcgtggagccatcccgcgggggtgtgggggggccacggtgccggaaggcgcgcggcccagaggccgtctccgccgaacgcccgctcctcgccttcctaaccgcagcactttcgcgagcctccctacgaggggcggggcgaaacagcagccagccccgtgtccggcagtatgttcagctgggtcagcaaggatgcccgccgcaagaaggagccggagctcttccagacggtggctgaggggctgcggcagctgtacgcgcagaagctgctacccctggaggagcactaccgcttccacgagttccactcgcccgcgctggaggacgctgacttcgacaacaagcctatggtgctcctcgtggggcagtacagcacgggcaagaccaccttcatccgacacctgatcgagcaggacttcccggggatgcgcatcgggcccgagcccaccaccgactccttcatcgccgtcatgcacggccccactgagggcgtggtgccgggcaacgcgctcgtggtggacccgcggcgccccttccgcaagctcaacgcgtttggcaacgctttcctcaacaggttcatgtgtgcccagctgcccaaccccgtcctggacagcatcagcatcatcgacacccccgggatcctgtctggagagaagcagcggatcagcagaggctatgactttgcagccgtcctggagtggttcgcggagcgtgtggaccgcatcatcctgctcttcgacgcccacaagctggacatctccgatgagttctcggaagtgatcaaggctctgaagaaccatgaggacaagatccgcgtggtgctgaacaaggcagaccagatcgagacgcagcagctgatgcgggtgtacggggccctcatgtggtccctgggcaagatcatcaacacccccgaggtggtcagggtctacatcggctccttctggtcccacccgctcctcatccccgacaaccgcaagctctttgaggccgaggagcaggacctcttcaaggacatccagtcactgccccgaaacgccgccctcaggaagctcaatgacctgatcaagcgggcacggctggccaaggttcacgcctacatcatcagctccctcaagaaagagatgcccaatgtctttggtaaagagagcaaaaagaaagagctggtgaacaacctcggagagatctaccagaagattgagcgcgagcaccagatctcccctggggacttcccgagcctccgcaagatgcaggaactcctgcagacccaggacttcagcaagttccaggcgctgaagcccaagctgctggacacggtggatgacatgctggccaacgacatcgcgcggctgatggtgatggtgcggcaggaggagtccctgatgccttcccaggtggtcaagggcggcgcctttgacggcaccatgaacgggccgttcgggcacggctacggcgagggggccggcgagggcatcgacgacgtggagtgggtggtgggcaaggacaagcccacctacgacgagatcttctacacgctgtcccctgtcaacggcaagatcacgggcgccaacgccaagaaggagatggtgaagtccaagctccccaacaccgtgctagggaagatctggaagctggccgacgtggacaaggacgggctgctggacgacgaggagttcgcgctggccaaccacctcatcaaggtcaagctggagggccacgagctgcccgccgacctgcccccgcacctggtgccgccctccaagcgcagacatgagtgatggcgcccggccccgcacctgccatttgcacgcccggccgggaggcagagacggggggaggggaagcctcaccatttctcaaggtccataaagactgagcggatgtttcctcgcctctcgaaaaggaaaaccaccatctttcttttaaggctgttcctgggcctggcgggggaggcaggggtgagaggatggaattgtgtgcacaagaactgtggctattttaatatataacgttagaggctgcgttctttgtcgccgcctcccctgtgtgccagccctgtgtgcacggcctctgccccccggcctttgctgtggctggagctggacagtgcagcgactgcgaccgtgggggagccaggtcgcccttttggcagctgctaggctgaggctgcatggacaggaacaccaggcaccctccgtgtgcttctgagctgaggttgcttcacgggaccgtggcttccttcctcacctggctctgcctcccccgtgctctcgggcgaagtgggttcttgtgccttcccctcccgggcccaggctccccgtgcgcgggccctgccctttcctcccgcgccccaccggctccgacgcgcaaccccgctcagcagtcacagaagcagggcccagccaccttggtctttttttgggagttcaggggagtaggagaatgtcttccagaaaaatacataagctagtttctgttctgtaaagtgatatctttcatacttgaccaaagttcccaataacttcccaaccactgttcaaaagctgtgatttttgtctccccttcccaccctccagccaaggagcagccctgcccagggggcattaggtgtgggtacccggggagcaccccgttcctggaccccagtgttgcatttcctggctgaggaagggtggtcatcccagctcctgccctaccctctcacttaactggagctttgggacgcaccctccacagtgggaggtggtggtgggtggcggtggcggggcctcacgacagcttggtgctggtaagaggaagcccgtggttctggctaggctctcatgtccagacagcggggaccaggggaaaacccagccccttctgtaatcccccttcatttcctaccttccttcctcctctgtttagcaaaggagggcagctcacttggatgtccttacaacgcccctggcccccaggttgagcaataagaaaccagaaccttgcggcccagtggcccgggccagttcaggccgcctccccctcctctgcctggggccattgagcccagcctccagggcccgggcgcgtttgcaggccagtggccactgtccgggctgtgatggcaccaaggcaggtggagcaccaggtaccacacagctgggcttcccaccaggctttcccgcgggggtctcagggagcttctccccagcgctgctcggagtctgcaggaactggccttgttctccttagcccgtcactccatacagtattaggtgaggatggatgcgggcgctgtccttgccgggaagtcactgttgaagttgcagtggcttgttcacacctgtgggaagagaagtgaagactttctccttgcattaaaaagtctgaactgtgcgaaa

SEQ ID NO: 129314 - DNA, 1015 bp, Homo sapiens
  Payload ID: 5294
  Gene Symbol: EHD1
  Gene Name: EH-domain containing 1
  ENST ID: ENST00000421510
  CDS Start-End: 98-1015
gggccctgccccttcccagagtaaacccactgggggtctaagagtgggcgttgtcggctcccccagcttctgtcctccccagaatcttccagggttcatgtgtgcccagctgcccaaccccgtcctggacagcatcagcatcatcgacacccccgggatcctgtctggagagaagcagcggatcagcagaggctatgactttgcagccgtcctggagtggttcgcggagcgtgtggaccgcatcatcctgctcttcgacgcccacaagctggacatctccgatgagttctcggaagtgatcaaggctctgaagaaccatgaggacaagatccgcgtggtgctgaacaaggcagaccagatcgagacgcagcagctgatgcgggtgtacggggccctcatgtggtccctgggcaagatcatcaacacccccgaggtggtcagggtctacatcggctccttctggtcccacccgctcctcatccccgacaaccgcaagctctttgaggccgaggagcaggacctcttcaaggacatccagtcactgccccgaaacgccgccctcaggaagctcaatgacctgatcaagcgggcacggctggccaaggttcacgcctacatcatcagctccctcaagaaagagatgcccaatgtctttggtaaagagagcaaaaagaaagagctggtgaacaacctcggagagatctaccagaagattgagcgcgagcaccagatctcccctggggacttcccgagcctccgcaagatgcaggaactcctgcagacccaggacttcagcaagttccaggcgctgaagcccaagctgctggacacggtggatgacatgctggccaacgacatcgcgcggctgatggtgatggtgcggcaggaggagtccctgatgccttcccaggtggtcaagggcggcgcctttgacggcaccatgaacgggccgttcgggcacggctacggcgagggggccggcgagggcatcgacgacgtggagtgggtggtgggc

SEQ ID NO: 129315 - DNA, 546 bp, Homo sapiens
  Payload ID: 5294
  Gene Symbol: EHD1
  Gene Name: EH-domain containing 1
  ENST ID: ENST00000455148
  CDS Start-End: 61-546
agagtcctcccgtctgttggaaaggcagcttcaagtctgtgtcctacagataatgggttcatgtgtgcccagctgcccaaccccgtcctggacagcatcagcatcatcgacacccccgggatcctgtctggagagaagcagcggatcagcagaggctatgactttgcagccgtcctggagtggttcgcggagcgtgtggaccgcatcatcctgctcttcgacgcccacaagctggacatctccgatgagttctcggaagtgatcaaggctctgaagaaccatgaggacaagatccgcgtggtgctgaacaaggcagaccagatcgagacgcagcagctgatgcgggtgtacggggccctcatgtggtccctgggcaagatcatcaacacccccgaggtggtcagggtctacatcggctccttctggtcccacccgctcctcatccccgacaaccgcaagctctttgaggccgaggagcaggacctcttcaaggacatccagtcactgccccgaaacgccgccctcaggaagctcaatgacctgatc

SEQ ID NO: 129316 - DNA, 534 bp, Homo sapiens
  Payload ID: 5294
  Gene Symbol: EHD1
  Gene Name: EH-domain containing 1
  ENST ID: ENST00000457202
  CDS Start-End: 90-534
agattgaccgtacgccagcctcagagagagaaggcccaggcggggaggagtaaagcctccctgggagagccagccccgtgtccggcagtatgttcagctgggtcagcaaggatgcccgccgcaagaaggagccggagctcttccagacggtggctgaggggctgcggcagctgtacgcgcagaagctgctacccctggaggagcactaccgcttccacgagttccactcgcccgcgctggaggacgctgacttcgacaacaagcctatggtgctcctcgtggggcagtacagcacgggcaagaccaccttcatccgacacctgatcgagcaggacttcccggggatgcgcatcgggcccgagcccaccaccgactccttcatcgccgtcatgcacggccccactgagggcgtggtgccgggcaacgcgctcgtggtggacccgcggcgccccttccgcaagctcaacgcgtttggcaacgctttcctcaacaggttcatgtgtgcccagctgcccaaccccgtcctggacagca

SEQ ID NO: 129317 - DNA, 557 bp, Homo sapiens
  Payload ID: 5294
  Gene Symbol: EHD1
  Gene Name: EH-domain containing 1
  ENST ID: ENST00000411683
  CDS Start-End: 123-557
gattctcaccagcctggacagccaaaggggtctgtgtgtggccggggaggatggcgggggagtgagccccatggaacagccaggaactggtaaggggagcagccagccccgtgtccggcagtatgttcagctgggtcagcaaggatgcccgccgcaagaaggagccggagctcttccagacggtggctgaggggctgcggcagctgtacgcgcagaagctgctacccctggaggagcactaccgcttccacgagttccactcgcccgcgctggaggacgctgacttcgacaacaagcctatggtgctcctcgtggggcagtacagcacgggcaagaccaccttcatccgacacctgatcgagcaggacttcccggggatgcgcatcgggcccgagcccaccaccgactccttcatcgccgtcatgcacggccccactgagggcgtggtgccgggcaacgcgctcgtggtggacccgcggcgccccttccgcaagctcaacgcgtttggcaacgctttcctcaacaggttcatgtgtgcccagctgcccaaccccgtc

SEQ ID NO: 129318 - DNA, 1191 bp, Homo sapiens
  Payload ID: 5294
  Gene Symbol: EHD1
  Gene Name: EH-domain containing 1
  ENST ID: ENST00000433803
  CDS Start-End: 70-1191
attctcaccagcctggacagccaaaggggtctgtgtgtggccggggaggatggcgggggagtgagccccatggaacagccaggaactgcagccagccccgtgtccggcagtatgttcagctgggtcagcaaggatgcccgccgcaagaaggagccggagctcttccagacggtggctgaggggctgcggcagctgtacgcgcagaagctgctacccctggaggagcactaccgcttccacgagttccactcgcccgcgctggaggacgctgacttcgacaacaagcctatggtgctcctcgtggggcagtacagcacgggcaagaccaccttcatccgacacctgatcgagcaggacttcccggggatgcgcatcgggcccgagcccaccaccgactccttcatcgccgtcatgcacggccccactgagggcgtggtgccgggcaacgcgctcgtggtggacccgcggcgccccttccgcaagctcaacgcgtttggcaacgctttcctcaacaggttcatgtgtgcccagctgcccaaccccgtcctggacagcatcagcatcatcgacacccccgggatcctgtctggagagaagcagcggatcagcagaggctatgactttgcagccgtcctggagtggttcgcggagcgtgtggaccgcatcatcctgctcttcgacgcccacaagctggacatctccgatgagttctcggaagtgatcaaggctctgaagaaccatgaggacaagatccgcgtggtgctgaacaaggcagaccagatcgagacgcagcagctgatgcgggtgtacggggccctcatgtggtccctgggcaagatcatcaacacccccgaggtggtcagggtctacatcggctccttctggtcccacccgctcctcatccccgacaaccgcaagctctttgaggccgaggagcaggacctcttcaaggacatccagtcactgccccgaaacgccgccctcaggaagctcaatgacctgatcaagcgggcacggctggccaaggttcacgcctacatcatcagctccctcaagaaagagatgcccaatgtctttggtaaagagagcaaaaagaaagagctggtgaacaacctcggagagatctaccagaagattgagcgcgagcaccagatctcccctggggacttcccgagcctccgcaagatgcag

SEQ ID NO: 129319 - DNA, 3336 bp, Homo sapiens
  Payload ID: 5294
  Gene Symbol: EHD1
  Gene Name: EH-domain containing 1
  ENST ID: ENST00000621096
  CDS Start-End: 84-1730
atcacccactgaagattctcaccagcctggacagccaaaggggtctgtgtgtggccggggaggatggcgggggagtgagccccatggaacagccaggaactgcagccagccccgtgtccggcagtatgttcagctgggtcagcaaggatgcccgccgcaagaaggagccggagctcttccagacggtggctgaggggctgcggcagctgtacgcgcagaagctgctacccctggaggagcactaccgcttccacgagttccactcgcccgcgctggaggacgctgacttcgacaacaagcctatggtgctcctcgtggggcagtacagcacgggcaagaccaccttcatccgacacctgatcgagcaggacttcccggggatgcgcatcgggcccgagcccaccaccgactccttcatcgccgtcatgcacggccccactgagggcgtggtgccgggcaacgcgctcgtggtggacccgcggcgccccttccgcaagctcaacgcgtttggcaacgctttcctcaacaggttcatgtgtgcccagctgcccaaccccgtcctggacagcatcagcatcatcgacacccccgggatcctgtctggagagaagcagcggatcagcagaggctatgactttgcagccgtcctggagtggttcgcggagcgtgtggaccgcatcatcctgctcttcgacgcccacaagctggacatctccgatgagttctcggaagtgatcaaggctctgaagaaccatgaggacaagatccgcgtggtgctgaacaaggcagaccagatcgagacgcagcagctgatgcgggtgtacggggccctcatgtggtccctgggcaagatcatcaacacccccgaggtggtcagggtctacatcggctccttctggtcccacccgctcctcatccccgacaaccgcaagctctttgaggccgaggagcaggacctcttcaaggacatccagtcactgccccgaaacgccgccctcaggaagctcaatgacctgatcaagcgggcacggctggccaaggttcacgcctacatcatcagctccctcaagaaagagatgcccaatgtctttggtaaagagagcaaaaagaaagagctggtgaacaacctcggagagatctaccagaagattgagcgcgagcaccagatctcccctggggacttcccgagcctccgcaagatgcaggaactcctgcagacccaggacttcagcaagttccaggcgctgaagcccaagctgctggacacggtggatgacatgctggccaacgacatcgcgcggctgatggtgatggtgcggcaggaggagtccctgatgccttcccaggtggtcaagggcggcgcctttgacggcaccatgaacgggccgttcgggcacggctacggcgagggggccggcgagggcatcgacgacgtggagtgggtggtgggcaaggacaagcccacctacgacgagatcttctacacgctgtcccctgtcaacggcaagatcacgggcgccaacgccaagaaggagatggtgaagtccaagctccccaacaccgtgctagggaagatctggaagctggccgacgtggacaaggacgggctgctggacgacgaggagttcgcgctggccaaccacctcatcaaggtcaagctggagggccacgagctgcccgccgacctgcccccgcacctggtgccgccctccaagcgcagacatgagtgatggcgcccggccccgcacctgccatttgcacgcccggccgggaggcagagacggggggaggggaagcctcaccatttctcaaggtccataaagactgagcggatgtttcctcgcctctcgaaaaggaaaaccaccatctttcttttaaggctgttcctgggcctggcgggggaggcaggggtgagaggatggaattgtgtgcacaagaactgtggctattttaatatataacgttagaggctgcgttctttgtcgccgcctcccctgtgtgccagccctgtgtgcacggcctctgccccccggcctttgctgtggctggagctggacagtgcagcgactgcgaccgtgggggagccaggtcgcccttttggcagctgctaggctgaggctgcatggacaggaacaccaggcaccctccgtgtgcttctgagctgaggttgcttcacgggaccgtggcttccttcctcacctggctctgcctcccccgtgctctcgggcgaagtgggttcttgtgccttcccctcccgggcccaggctccccgtgcgcgggccctgccctttcctcccgcgccccaccggctccgacgcgcaaccccgctcagcagtcacagaagcagggcccagccaccttggtctttttttgggagttcaggggagtaggagaatgtcttccagaaaaatacataagctagtttctgttctgtaaagtgatatctttcatacttgaccaaagttcccaataacttcccaaccactgttcaaaagctgtgatttttgtctccccttcccaccctccagccaaggagcagccctgcccagggggcattaggtgtgggtacccggggagcaccccgttcctggaccccagtgttgcatttcctggctgaggaagggtggtcatcccagctcctgccctaccctctcacttaactggagctttgggacgcaccctccacagtgggaggtggtggtgggtggcggtggcggggcctcacgacagcttggtgctggtaagaggaagcccgtggttctggctaggctctcatgtccagacagcggggaccaggggaaaacccagccccttctgtaatcccccttcatttcctaccttccttcctcctctgtttagcaaaggagggcagctcacttggatgtccttacaacgcccctggcccccaggttgagcaataagaaaccagaaccttgcggcccagtggcccgggccagttcaggccgcctccccctcctctgcctggggccattgagcccagcctccagggcccgggcgcgtttgcaggccagtggccactgtccgggctgtgatggcaccaaggcaggtggagcaccaggtaccacacagctgggcttcccaccaggctttcccgcgggggtctcagggagcttctccccagcgctgctcggagtctgcaggaactggccttgttctccttagcccgtcactccatacagtattaggtgaggatggatgcgggcgctgtccttgccgggaagtcactgttgaagttgcagtggcttgttcacacctgtgggaagagaagtgaagactttctccttgcattaaaaagtctgaactgtgcgaaagctt

SEQ ID NO: 129320 - DNA, 3585 bp, Homo sapiens
  Payload ID: 5295
  Gene Symbol: EHD2
  Gene Name: EH-domain containing 2
  Uniprot ID: Q9NZN4
  ENST ID: ENST00000263277
  CDS Start-End: 252-1883
gttttgaggggggcgcctcgtcccgcccctccctcctgtcctccctcccgtcctccccgctccgggccccacccggctcagacggctccggacgggaccgcgagcacaggccgctccgcgggcgcttcggatcctcgcgggaccccaccctctcccagcctgcccagcccgctgcagccgccagcgcgccccgtcggcagctctccatctgcacgtctctccgtgaaccccgtgagcggtgtgcagccaccatgttcagctggctgaagcggggcggggcacggggccagcagcccgaggccatccgcacggtgacctcggccctcaaggagctgtaccgcacgaagctgctgccgctggaggagcactaccgctttggggccttccactcgccggccctggaggacgcagacttcgacggcaagcccatggtgctggtggccggccagtacagcacgggcaagaccagcttcatccagtacctgctggagcaggaggtgcccggctcccgcgtggggcctgagcccaccaccgactgctttgtggccgtcatgcacggggacactgagggcaccgtgcccggcaacgccctcgtcgtggacccggacaagcccttccgcaaactcaaccctttcggaaacaccttcctcaacaggttcatgtgtgcccagctccctaatcaggtcctggagagcatcagcatcatcgacaccccgggtatcctgtcgggtgccaagcagagagtgagccgcggctacgacttcccggccgtgctgcgctggttcgcggagcgcgtggacctcatcatcctgctctttgatgcgcacaagctggagatctcggacgagttctcagaggccatcggcgcgttgcggggccatgaggacaagatccgcgtggtgctcaacaaggccgacatggtggagacgcagcagctgatgcgcgtctacggcgcgctcatgtgggcgctgggcaaggtggtgggcacgcccgaggtgctgcgcgtctacatcggctccttctggtcccagcccctcctcgtgcccgacaaccggcgcctcttcgagctggaggagcaggacctcttccgcgacatccagggcctgccccggcacgcagccttgcgcaagctcaacgacctggtgaagagggcccggctggtgcgagttcacgcttacatcatcagctacctgaagaaggagatgccctctgtgtttgggaaggagaacaagaagaagcagctgatcctcaaactgcccgtcatctttgcgaagattcagctggaacatcacatctcccctggggactttcctgattgccagaaaatgcaggagctgctgatggcgcacgacttcaccaagtttcactcgctgaagccgaagctgctagaggcactggacgagatgctgacgcacgacatcgccaagctcatgcccctgctgcggcaggaggagctggagagcaccgaggtgggcgtgcaggggggcgcttttgagggcacccacatgggcccgtttgtggagcggggacctgacgaggccatggaggacggcgaggagggctcggacgacgaggccgagtgggtggtgaccaaggacaagtccaaatacgacgagatcttctacaacctggcgcctgccgacggcaagctgagcggctccaaggccaagacctggatggtggggaccaagctccccaactcagtgctggggcgcatctggaagctcagcgatgtggaccgcgacggcatgctggatgatgaggagttcgcgctggccagccacctcatcgaggccaagctggaaggccacgggctgcccgccaacctgccccgtcgcctggtgccaccctccaagcgacgccacaagggctccgccgagtgagccggcccccctcccatggccctgctgtggctccccagctccagtcggctgcacgcacacccctgctccggctcacacacgccctgcctgccctccctgcccagctgtaaggaccgggggtctccctcctcactaccgccagacaccccggtggaagcatttagaggggaccacgggagggacaaggcttctctgtccgcccttcacacctccagcctcacgttcacttaggcacatcacacacacactggcacacgcaggcatccatccatccgtcattcattcaaatatttattgagcacctactatgtgcccagccctgttctaggcactgggcattaccatagagaacaaaatagacaaatacatctgccctcatggaaggtgacgttcccaggagagggcacctacacagtcacgcaaacacacactaattcctggcagggcccccagcccctcccctggctgagcagccctgtggctgaaatgactagcagataaacagacccccttctgctccgcttcctcctgcccagccaggcaacaccctcaaccggctccatcacatcctcaggtctcgggaccatggggggctcagaggggagacacacctactgcttcctcagatgggcccctccgcagccccttcccttgctcggggaaagcccccaattctgcccacacccatttatttccttccttccttccttcttttctttccttccttccttcttttttgtttttgcccccaattctgcccatacccatttctttctttccttccttccttcttttttgtttttgcccccagttctgtccacaccccttccctttcctgtcctgtcctttctttcttttttgatagaatcttgctctgtcgcccaggctggagtgcagtggtgagatctcagctcactgcaacctccacctcctgggttgaagtgattctcgtgcctcagcctcctgagtagctgggactgcaggcacgcgccaccacgcccagctaatttttgtatttgagtagagacggggtttcaccatgttggccaggctggtctcgaactccgcatctcaggtgatctgctcgccttggcctcccaaagtgatgggattacaggcatgagccaccgtgcccggcttcacacccatttctttaaaaaggatcccgtagcaggcagaaaagccccttccatcctgctcctctgatactgtgcccccttggagatatttccgtcctccacccacgtgtctgtggctggaactgcccagcctgctcctggccccctggaagcctccccacagctggtaatctggacttaaggattgctgggccaccgcctctctgcctaccaccattccatatttaagtggagcccctacgtagaaaggccccggggctttattttagtctccttttcagggatgtcgtgggcgggggagggggttcttggtgctacagccctctccccacccctaaagggacgccgacgctgtttgctgccttcaccacatattagtgcttgaccctggcaggggaccccatggaaaagatggggaagagcaaaatacatggagacgacgcaccctccaggatgctcgctgggattcccacgcccaccactgtcccccaccccatggctgggaggggcctctgaacggaacagtgtccccacagagcgaataaagccaaggcttcttccca

SEQ ID NO: 129321 - DNA, 1766 bp, Homo sapiens
  Payload ID: 5295
  Gene Symbol: EHD2
  Gene Name: EH-domain containing 2
  Uniprot ID: Q9NZN4
  ENST ID: ENST00000538399
  CDS Start-End: 122-1345
agacggctccggacgggaccgcgagcacaggccgctccgcgggcgcttcggatcctcgcgggaccccaccctctcccagcctgcccagcccgctgcagccgccagcgcgccccgtcggttcatgtgtgcccagctccctaatcaggtcctggagagcatcagcatcatcgacaccccgggtatcctgtcgggtgccaagcagagagtgagccgcggctacgacttcccggccgtgctgcgctggttcgcggagcgcgtggacctcatcatcctgctctttgatgcgcacaagctggagatctcggacgagttctcagaggccatcggcgcgttgcggggccatgaggacaagatccgcgtggtgctcaacaaggccgacatggtggagacgcagcagctgatgcgcgtctacggcgcgctcatgtgggcgctgggcaaggtggtgggcacgcccgaggtgctgcgcgtctacatcggctccttctggtcccagcccctcctcgtgcccgacaaccggcgcctcttcgagctggaggagcaggacctcttccgcgacatccagggcctgccccggcacgcagccttgcgcaagctcaacgacctggtgaagagggcccggctggtgcgagttcacgcttacatcatcagctacctgaagaaggagatgccctctgtgtttgggaaggagaacaagaagaagcagctgatcctcaaactgcccgtcatctttgcgaagattcagctggaacatcacatctcccctggggactttcctgattgccagaaaatgcaggagctgctgatggcgcacgacttcaccaagtttcactcgctgaagccgaagctgctagaggcactggacgagatgctgacgcacgacatcgccaagctcatgcccctgctgcggcaggaggagctggagagcaccgaggtgggcgtgcaggggggcgcttttgagggcacccacatgggcccgtttgtggagcggggacctgacgaggccatggaggacggcgaggagggctcggacgacgaggccgagtgggtggtgaccaaggacaagtccaaatacgacgagatcttctacaacctggcgcctgccgacggcaagctgagcggctccaaggccaagacctggatggtggggaccaagctccccaactcagtgctggggcgcatctggaagctcagcgatgtggaccgcgacggcatgctggatgatgaggagttcgcgctggccagccacctcatcgaggccaagctggaaggccacgggctgcccgccaacctgccccgtcgcctggtgccaccctccaagcgacgccacaagggctccgccgagtgagccggcccccctcccatggccctgctgtggctccccagctccagtcggctgcacgcacacccctgctccggctcacacacgccctgcctgccctccctgcccagctgtaaggaccgggggtctccctcctcactaccgccagacaccccggtggaagcatttagaggggaccacgggagggacaaggcttctctgtccgcccttcacacctccagcctcacgttcacttaggcacatcacacacacactggcacacgcaggcatccatccatccgtcattcattcaaatatttattgagcacctactatgtgcccagccctgttctaggcactgggcattaccatagagaacaaaatagacaaatacatctgccctcatggaaggtgacgttcccaggagagggcacctacacagtcacgc

SEQ ID NO: 129322 - DNA, 538 bp, Homo sapiens
  Payload ID: 5295
  Gene Symbol: EHD2
  Gene Name: EH-domain containing 2
  ENST ID: ENST00000596225
  CDS Start-End: 1-93
aagagggcccggctggtgcgagtgagtagtcctgagggctgggcgcgcattcttggaggaggtttcctcggtcctctcctaccagtgctgtgagtccctgacttatcagggcccaggttcacgcttacatcatcagctacctgaagaaggagatgccctctgtgtttgggaaggagaacaagaagaagcagctgatcctcaaactgcccgtcatctttgcgaagattcagctggaacatcacatctcccctggggactttcctgattgccagaaaatgcaggagctgctgatggcgcacgacttcaccaagtttcactcgctgaagccgaagctgctagaggcactggacgagatgctgacgcacgacatcgccaagctcatgcccctgctgcggcaggaggagctggagagcaccgaggtgggcgtgcaggggggcgcttttgagggcacccacatgggcccgtttgtggagcggggacctgacgaggccatggaggacggcgaggagggctcggacgacgaggccgagtgggtggt

SEQ ID NO: 129323 - DNA, 4636 bp, Homo sapiens
  Payload ID: 5296
  Gene Symbol: EHD3
  Gene Name: EH-domain containing 3
  Uniprot ID: Q9NZN3
  ENST ID: ENST00000322054
  CDS Start-End: 286-1893
aactttaattgccaagatttcacccctcctcctcaagcccagattatttatcctccctccggcctgggctgctggatgcagcagcggctgggcttggtcccaggagcagggagagtgcgctcccggccctcctagccgcgtgcccgggccatggtgcggctgagccccgcgcttgggtgaggcggcggcgcggctcggagcccggcggaccggtcctacgggacatcttcccctgaggaggagtcttcccctggggctgcgtgccgggggcgagcggcggccgcgatgttcagctggctgggtacggacgaccgccggaggaaggaccccgaggttttccagacggtgagtgaggggctcaagaaactctacaagagcaagctgctgcccttggaagagcattaccgcttccacgagttccactcgcccgccctggaggatgccgacttcgacaacaagcccatggttctgctggtgggccagtactccactgggaagaccaccttcatcaggtacctgctggaacaggacttcccaggcatgaggattgggcctgagcccaccacagactccttcattgcggtgatgcagggagacatggaggggatcatccctgggaacgccctggtggtggatcccaagaaacccttcaggaaactcaacgcctttggcaacgccttcttgaacaggttcgtgtgtgcccagctacctaaccctgtgctggagagcatcagcgtcatcgacacaccagggatcctctctggggagaagcagaggatcagccgggggtatgactttgcagctgtccttgagtggtttgccgagcgggttgaccgcatcattctgctcttcgatgcccacaaactggacatctctgatgagttctcagaagtcatcaaagccctcaagaaccacgaggacaagatgcgagtggtgctgaacaaagctgaccagatcgagacgcagcagctgatgcgggtgtacggggccctcatgtggtccttggggaagatcgtgaacaccccagaggtgatccgggtctacatcggctccttctggtcccaccccctcctcatccctgacaaccggaagctctttgaggctgaggaacaggacctattcagggacatccagagtctgccccgaaatgctgccctgcgcaagctcaacgacctcatcaaaagggccaggctggccaaggtccacgcctacatcatcagctctctgaagaaggagatgccctcggtgttcgggaaggacaacaagaagaaggagctggtcaacaacctggccgagatctatggccggatcgagcgggagcaccagatctcacctggggacttccccaatctgaagaggatgcaggaccagctgcaggcccaggactttagcaagttccagccgctgaagagcaagctgctggaggtagtggacgacatgctggcccatgacattgcccagctcatggtgctagtgcgccaggaggagtcacagcggcccatccagatggtgaagggcggagcgttcgagggcaccctgcacggcccctttgggcatggctatggggagggggctggagaaggtatcgatgatgctgagtgggtggtggccagggacaagcccatgtacgacgagatcttctacaccctgtcaccggtggatggcaagatcacaggcgctaatgccaagaaggagatggtgcgctccaagctgcccaacagtgtgctgggcaagatctggaagctggccgacattgacaaggatggcatgctggacgacgacgagtttgcactggccaaccacctcatcaaagtcaagctggaggggcacgagctgcccaacgagctgcctgcccacctcctgcccccgtccaagaggaaagttgccgagtgatggggtggggggacattcagacgggcagtgttagaggaggagatgggagcggtgactacacacacacacacacacacacacacacacacaaacatgcacacacacatatgcatatcttgacattgctctgtaggtgagagaggaccatgacgcccatgtttgcagctgatacttgtttgggcacacctccaagttctcgggattagaaggacaagagcactcccaggccccagagtctaagcctaagtctctatcgctcttcccctctcctcggccactccccagataccagacctgaggcaattcacttgccagcacagatggccaacccacctccagattccccagtgcttccacacccgggctctgagcaaatggaaaagacttttcatttagtagacaattcacttctttttctgtgcttcccctatctgctttggcttcctaataagaaatccattcaagagctaggagatctgagggcaggcgggcagctgcagggaggagaggtgagaaaggaagcgtcttctagagacattggcccaggagctctgttctttcctaatctaagcctctgtcttcttcggcaaaccttgctttgaactctgccagtatttcattttaaagaatcccagagcgggagagagaagagaaaaaaattgataagagtgaggaaattgtcctgtagtctattgaaaaccagtcaaggtggttttagttcatagattttgttagatgttctttccacctggcctatgatgtttagatgttcatacttgactcacatttacccagcccctcctgcgtaccaggagctgtgttaggcactttatatacattattctatgtggccctcactgatgccccagggaagtatgcattagccttcccattttgcagttgaggaggctgagtagcctcagaagggtttaggcgaccttctgaaactcacagaagtcacgtgatggagagaggattcaaagccagggcctcagaccctcacacacttgtctgtgctatgatgtatgcaggatcccagcattgatacccaatgacaaactatggagaacaagcaaagtatgcaggccccctgcagcctcccaggacaggctggcaagggaggagggccggccagcatttggtggcccatcagtctggccatctgtcacgtcacagaagcaaaccgtgccttctggctctgcgccccatattcccagcatcatagacatccaacagcaccagcaggagagtgggctagcctgctggatgctgttcgtgcctgtccctgctctgcctcccacccagttgcctgaatcatcccagctcagatgcagccactgtctcttgtcaagtgggacctcatactattctcagaaggctaacttgagaggtttggggccttgttccccagagggtccccagggactctgcagtgtccttggcaaatccccactgtactcaatgccctacattctcttctgtggtctctcccctggcttgcttcatggccactgaaccaatcactttgtatgctatgctcctactgtgatggaaaacaaaatgagtataacttattttatatccatattcagactatatagagaatattctatgcatctatgacgtgcttactactgcagtgcatttgtcattagtcttcatgttaatacagtacatttattctttggtacctgcctggccacagagcatcattcaatggaggctgagggagaagggctgggttcttacttggagttcctggtgaaatctttggctggaaagggctcactggggccacccaatggccagcatccacaaccagcttcccagtgggctggagtttgtctaggctcagtgaccaacccaggcacagctggtggagccaccgctccctgctcctctggagtgaagatgttccctaagcccctgggcttccttctgcaaatacacatttctctttcacatgaaatgaagggcagacaaaggccaggcaaagaggtctcacctgctctggagaaaacccttgagtgccgagtgcaggttagggaccatttctcaactccacacctttcttcaagctgaaggagaaatgggaaggaaatagcagaggtaggtgaagttcctgtctttttattttataggaaagggagatgtctgttatcccctttcttcactgccactggacacacatgccactttcctgcccttctacatatgctgcctctcttccctctctccatcttgaagtctccacccaggagagacctgtgaggtgtgggaattccatgtttgcacagctcccatctccctggaaagaggaactgatgtttgaggggacagatgtgggtcactttccctggcagtgccctctagccttgctgccttggctttctgaccccttccaggcttcaggggcctgggagatctcatgcctcagcccaggaaacatttaatagggaaagcagagacatgtcatgtcagccccacagacaagaatttctagagcacttgtcctgttgttccttgccccgacattactcagtctgggccatggaatccatccaataaacacagcaacaccctatgctactgaccaagcaaagcttgcccctggtaccaaagagctaaatcatgaccaaagtgtgacatgaatgtaactgaaatgcgggttagttgctcaatgtatgcaaagtcccacggacaagagtaaagtctgataccaataaagtgaatgtattccaaa

SEQ ID NO: 129324 - DNA, 2281 bp, Homo sapiens
  Payload ID: 5296
  Gene Symbol: EHD3
  Gene Name: EH-domain containing 3
  ENST ID: ENST00000541626
  CDS Start-End: 45-1685
agtcttcccctggggctgcgtgccgggggcgagcggcggccgcgatgttcagctggctgggtacggacgaccgccggaggaaggaccccgaggttttccagacggtgagtgaggggctcaagaaactctacaagagcaagctgctgcccttggaagagcattaccgcttccacgagttccactcgcccgccctggaggatgccgacttcgacaacaagcccatggttctgctggtgggccagtactccactgggaagaccaccttcatcaggtacctgctggaacaggacttcccaggcatgaggattgggcctgagcccaccacagactccttcattgcggtgatgcagggagacatggaggggatcatccctgggaacgccctggtggtggatcccaagaaacccttcaggaaactcaacgcctttggcaacgccttcttgaacaggttcgtgtgtgcccagctacctaaccctgtgctggagagcatcagcgtcatcgacacaccagggatcctctctggggagaagcagaggatcagccgggggtatgactttgcagctgtccttgagtggtttgccgagcgggttgaccgcatcattctgctcttcgatgcccacaaactggacatctctgatgagttctcagaagtcatcaaagccctcaagaaccacgaggacaagatgcgagtggtgctgaacaaagctgaccagatcgagacgcagcagctgatgcgggtgtacggggccctcatgtggtccttggggaagatcgtgaacaccccagaggtgatccgggtctacatcggctccttctggtcccaccccctcctcatccctgacaaccggaagctctttgaggctgaggaacaggacctattcagggacatccagagtctgccccgaaatgctgccctgcgcaagctcaacgacctcatcaaaagggccaggctggccaaggtccacgcctacatcatcagctctctgaagaaggagatgccctcggtgttcgggaaggacaacaagaagaaggagctggtcaacaacctggccgagatctatggccggatcgagcgggagcaccagatctcacctggggacttccccaatctgaagaggatgcaggaccagctgcaggcccaggactttagcaagttccagccgctgaagagcaagctgctggaggtagtggacgacatgctggcccatgacattgcccagctcatggtgctagtgcgccaggaggagtcacagcggcccatccagatggtgaagggcggagcgttcgagggcaccctgcacggcccctttgggcatggctatggggagggggctggagaaggtatcgatgatgctgagtgggtggtggccagggacaagcccatgtacgacgagatcttctacaccctgtcaccggtggatggcaagatcacaggcgctaatgccaagaaggagatggtgcgctccaagctgcccaacagtgtgctgggcaagatctggaagctggccgacattgacaaggatggcatgctggacgacgacgagtttgcactggccaaccacctcatcaaagtcaagctggaggggcacgagctgcccaacgagctgcctgcccacctcctgccccgtccaagaggaaagttgccgagtgatggggtggggggacattcagacgggcagtgttagaggaggagatgggagcggtgactacacacacacacacacacacacacacacacacaaacatgcacacacacatatgcatatcttgacattgctctgtaggtgagagaggaccatgacgcccatgtttgcagctgatacttgtttgggcacacctccaagttctcgggattagaaggacaagagcactcccaggccccagagtctaagcctaagtctctatcgctcttcccctctcctcggccactccccagataccagacctgaggcaattcacttgccagcacagatggccaacccacctccagattccccagtgcttccacacccgggctctgagcaaatggaaaagacttttcatttagtagacaattcacttctttttctgtgcttcccctatctgctttggcttcctaataagaaatccattcaagagctaggagatctgagggcaggcgggcagctgcagggaggagaggtgagaaaggaagcgtcttctagagacattggcccaggagctctgttctttcctaatctaagcctctgtcttcttcggcaaaccttgctttgaactctgccagtatttcattttaaagaat

SEQ ID NO: 129325 - DNA, 6416 bp, Homo sapiens
  Payload ID: 5297
  Gene Symbol: EHD4
  Gene Name: EH-domain containing 4
  Uniprot ID: Q9H223
  ENST ID: ENST00000220325
  CDS Start-End: 85-1710
ccagcgcggccggggcggctcagtgcgagccggggagagtcgaacccggagcagggtcccatccgagcgtggactggcggcaggatgttcagctggatggggcggcaggcgggcgggcgcgaacgcgctggcggcgcggacgcggtgcagacggtgacgggcgggctgcgctcgctctacctgcgcaaggtgctgccgctggaggaggcgtaccgcttccacgagttccactcgcctgcgctggaggacgccgacttcgagaacaagcccatgatcctgctggtgggccagtacagcaccggcaagaccaccttcatcagatacctactggagcaggatttcccaggcatgaggattggtccggagcccaccacagactccttcatcgccgtgatgtatggagagactgagggcagcaccccagggaatgctttagtcgtggaccccaaaaagccgtttagaaagctcagtcgctttggaaacgctttcctgaatcgattcatgtgctcacagctccccaatcaggtcctgaagagcatcagcgtcatcgacagccccggcatcctttctggggagaagcagcgcatcagccgaggctatgacttctgccaggtcctgcagtggtttgccgagagggtggacaggatcatcctgctctttgacgctcacaagctggacatctcagatgaattctcagaggccatcaaggccttccggggccaggacgacaagatccgtgtcgtgctgaacaaggccgaccaagtggacacgcagcagctgatgcgggtctacggggccctcatgtggtccctaggcaaggtcatcaacacgcccgaggtactgcgcgtctacattggctccttctgggcgcagcccctgcagaacacggacaaccgccggctcttcgaggctgaggcccaggacctctttagagacatccagagcctcccccagaaggcagcggtgcgcaagctcaacgacctcatcaagcgagcgaggctggccaaggtgcatgcctacatcatcagctacctgaagaaggagatgccaagtgtatttggaaaggaaaacaagaagagagagcttatcagcaggctaccggaaatctacattcagctacagcgagaataccagatttctgcaggggacttccctgaggtcaaggctatgcaggaacagcttgagaactatgacttcaccaaattccactcgctgaagcccaagctgatcgaggcagtggacaacatgctgagcaacaagatctcgcccctcatgaacctcatcagccaggaggagacgagcacgcccacgcagctggtgcagggcggcgccttcgatggcaccaccgagggccccttcaaccagggctacggggagggtgccaaggagggcgccgacgaggaggagtgggtcgtggccaaagacaagcccgtctacgacgagctcttctacactctgtcgcccatcaatggcaagatatcaggtgtcaacgccaagaaggagatggtgacctccaagctgcccaacagcgtcctgggcaagatctggaagctggccgactgcgactgcgacggcatgcttgatgaggaggagttcgcgctggccaagcacctcatcaagatcaagctcgacggctacgagctgcccagcagcctgcccccccacctcgtgcccccctcgcacaggaagtccctgcccaaggccgactgaggggtgggctgcagaacggggtgggaactgggggacctgggcctcaggcctgctccaccactgactcaccgaatgaccttgggcaaggcactgccctctctgtgccttggtttccccatctgtagaatggggagggtggacactggaaactagatgacttctttcacctccaaaattcccttagtttctatgaaaatattgggggtaggggggtggattaggagattgaagggttgagaagaaagagaaattgtccaaagagtcctcagaacctgcctggagaaatgcgcatgggggtgggcctggtaagtcccaggaaccacaggaagtgagctaaggctcacccagagcagctgggtctccaggctgcctgggctttttgtcctcatgaacaactctggagcagctgtctgtccctcagagggcacctggaggcagcaaagattatcttatttattttattttgttttctgctatatttagagtggcaaaaaaatagagcagagggtttctgctgtctccagactgtctaccaaagagaaggcgacagatgcctcctgggtttggaagggggatgcactgtggatctgccatccattctgcagtctccagcagagcaggcagtcaggccccagcgtgcctccatcccagtgccccgatgaccatctggtcagccctcccaacctcccttccagggggcttaccagcaaagccatattcggctaggaatttggaattcacaacctttattaacccctggcaaaacttcccgtttgcatgtcaaatcacattgaagcctgaaaattagcttttcttactggtttttccaataagtaatagcaaagcccacttatcatacttaaactacagtaaagaaaagaggtggttctctgcagtgatcgtttagtgtggccctcaaacattaaatatcccgaggtctccttggtgggtggcaggatttaaattcaatcaaatcctgtcctagtgtgtgcagtgtcttcggccctgtggacacaggtgaatgagggaccagccctgccctgggctgttgagaagagatcagtccacccagagttagacattgtttttgtagaaaacaggcatttattatgtctagggttttgtgttttttttttttccttacaggataaaagcctttatacagaaacaaaatggaacctttcatataaaaccttttctttaaaggctgtgtggttcgtatcatgaatgcccatcacgaggcaggattcgggcacatacctgtacttctgctccagagtgtgcgctccccaaatcccctgagtaaacctctctggactgctgctcagacacctgcgtcaggtggaggtgcctccccctctgtgggcaccagcttggggaggtaggtgacttttccttgcaaatctccctgcctcatctccagaaaattgcatacctgcatggcctctctgcattatttatgcaggaagagacacgaaacagcaatggccacatggtatgggggcctgctggcaccagaagtgaatgaaatcagaaccgtcccactgagtcttccaaaaggcacataattttttttttctgtcacctgcctttggtgacagggtcaaaggcacagattgaagagaaaatcttgatttgggagaagcatttatatccagatgcctacccttacactccctagcttactttctacataatttagttttaagagcaggaaatgcataacatggtttttagtcttaacaagcacttaaattcattagacgcatagaaaagaaccatttattattttattatttttatttttattttgagaggaagtctctgtcacccaggctggagtgcagtggcgcaatctcagttcactgcaacctccgcctcccaggttcaagtgattcccctgcctcagcctcccaagtagctgggactacaggcacccgccaccacgcccggctaatttttgtattttagtagagatggggttttaccatgttggtcaatatggtctcgatctcctgacctcgtgatctacccacctcggcctcccaaagtgctgtaacctaagcagacagttctgtgaatgcgtgaggaccacctgaagtctgcagccacggtggaggtcaccaaagggtgaactgagagagaagagggaattcacttgcccaaaggtttacagatgcccaggcaaactgatttttccatccagaattatcttgttctttaactctcctcaattgtcatatataaacatgaatttatatacatgtgtgtcacatgagtatgtcgttttaaaacaacgtgtacatatgtaagttttgtctggatacagaaagctgctttagagggcagcaggttgaggtctctgatttctccgtggaggaaaacctctcaggcactgtgatctccctacctctgcgctctcaggtgggagaggcgtcaggcagcggagtcctttccctgctggcacctggtaatgttcttggagagaaaggaaaaaaaaaggaaatcatttggccacttttcttaatatcctcttacatgcagtcattcatcaagaaaagttgactggaaaagaaaacactagaaaatatgagggatggcgaccaagtgaggacttgtatcttcccaggaccagtacaaagttctgtgaatgtgtccacaccaccagctgtctccctaccccacacggcagggcggcagggccgaccctggggcctgctcaccatcaccgttgcccttcctgcaccaccccaattttcaaagaacctcttccacagagtgtttatgtataggagagagggtggaagtacctaaactctagaactacaacatctaagaagctgaggccctgttttctacacagcatatggtatcgcataacacaaaccttccggtcttgagtttaaagggaaaatgaaaactccagcctattgctcccacagtctgcttccaagttgtcagcctgccagtgagggtctcctgaccccgtttgtagagaaacactgcactaagacttgggaatctccccagctcccagggaggggtggcacacaacagccttccaacctgcttccgcctcctgctccagccctgcagcgtctgtcaattcatttctcaactcaccgcacttggatggcctgggggcagggttgctcttctgggggagggtcattcattcagttggcttttggctttcctttctccgggctgggcctggttctcttttgaacacttgtcgtgctgcagcaagagcatctttggatttggggctgtggagctgtggttcacccgcgggagtcacagccgcggcctggacctttccacctcgcaccctcgctcaccctccttcatgatgcctggaggatgcctgagacaattgccttgaagatgaggaaagtgtttcactgtttattttctccatgggatgtagcaggcaagcatgcttaggacagaaaaccactgagtttactcaggtaaatgcgggcctaatacaagagtattgggttccaatgttggttaaccaatgcagttaatacgcaatgcttctattttttttctttttgtaatcttatttagaagtttcaaacaaaaagacatagtctgctgatcaataaacatggagctgccctctcccactggctcattttccagtggctgcgtgctggcctctcggagcagagtgtggatccctggatccaggttgaaccgggggagaagagttagggagagggtgtgcctgtgagccccaactcttcctgtggagagaaacccaaaatgcagccgcttcagaaggaaagcggccccatcaggtggggacagaagagggtaggcagcagaggccaggtctgtggacaaaagccccacttcagagtggttggaagccaggacaggagggactcatggaggtgaccgcttcacaggagtcctttctccagtcgtgctagggaggagcccctgcctgtccagcactgcccctgcctcttgctgtaccttgccagtgtgccctccccccgcccactaccatagtaggcatctggcttttcccaccaacccatctacctttttggtggtccagacctacagtctccttgcagagcactcctcctcccaccctcacttcaagtgaggtttggatgagattgaccacatccccttggtcacaaatattggctcaggaatggacatgtggccctgttcaagcctatgagagccaggacccccagacttatgttagaactcttgagagagatactctgtcttctctgaaccttgcagtatatagaaatgagcctattgatgcaacaatataaatggcactgagaggggtgtccagagctgctggggtcaggggagggaggtcagcctggcagaagccatcttgtggagcatgaaaatgaaagagaccttgagaaaggccagaggaatccaggcctgtggtgacaacatttgagctgctggatcaaacctcacctgaagtccttcctattcctactagatatttttttccactgtgtgggccaatgcattccctttatactgtgtaagccaggcatggtggctcacacctataatcccagcaatgcaggaggctgaagtgggaagatcgttgaggccaggagttcaagaccagcctgggcaacctaagaagaccctgtctctaaaaaagaattaaatataaataaataaataataaaaatataatgttt

SEQ ID NO: 129326 - DNA, 1982 bp, Homo sapiens
  Payload ID: 5297
  Gene Symbol: EHD4
  Gene Name: EH-domain containing 4
  ENST ID: ENST00000612090
  CDS Start-End: 52-1674
ggagagtcgaacccggagcagggtcccatccgagcgtggactggcggcaggatgttcagctggatggggcggcaggcgggcgggcgcgaacgcgctggcggcgcggacgcggtgcagacggtgacgggcgggctgcgctcgctctacctgcgcaaggtgctgccgctggaggaggcgtaccgcttccacgagttccactcgcctgcgctggaggacgccgacttcgagaacaagcccatgatcctgctggtgggccagtacagcaccggcaagaccaccttcatcagatacctactggagcaggatttcccaggcatgaggattggtccggagcccaccacagactccttcatcgccgtgatgtatggagagactgagggcagcaccccagggaatgctttagtcgtggaccccaaaaagccgtttagaaagctcagtcgctttggaaacgctttcctgaatcgattcatgtgctcacagctccccaatcaggtcctgaagagcatcagcgtcatcgacagccccggcatcctttctggggagaagcagcgcatcagccgaggctatgacttctgccaggtcctgcagtggtttgccgagagggtggacaggatcatcctgctctttgacgctcacaagctggacatctcagatgaattctcagaggccatcaaggccttccggggccaggacgacaagatccgtgtcgtgctgaacaaggccgaccaagtggacacgcagcagctgatgcgggtctacggggccctcatgtggtccctaggcaaggtcatcaacacgcccgaggtactgcgcgtctacattggctccttctgggcgcagcccctgcagaacacggacaaccgccggctcttcgaggctgaggcccaggacctctttagagacatccagagcctcccccagaaggcagcggtgcgcaagctcaacgacctcatcaagcgagcgaggctggccaaggtgcatgcctacatcatcagctacctgaagaaggagatgccaagtgtatttggaaaggaaaacaagaagagagagcttatcagcaggctaccggaaatctacattcagctacagcgagaataccagatttctgcaggggacttccctgaggtcaaggctatgcaggaacagcttgagaactatgacttcaccaaattccactcgctgaagcccaagctgatcgaggcagtggacaacatgctgagcaacaagatctcgcccctcatgaacctcatcagccaggaggagacgagcacgcccacgcagctggtgcagggcggcgccttcgatggcaccccgagggccccttcaaccagggctacggggagggtgccaaggggcgccgacgaggaggagtgggtcgtggccaaagacaagcccgtctacgacgagctcttctacactctgtcgcccatcaatggcaagatatcaggtgtcaacgccaagaaggagatggtgacctccaagctgcccaacagcgtcctgggcaagatctggaagctggccgactgcgactgcgacggcatgcttgatgaggaggagttcgcgctggccaagcacctcatcaagatcaagctcgacggctacgagctgcccagcagcctgcccccccacctcgtgcccccctcgcacaggaagtccctgcccaaggccgactgaggggtgggctgcagaacggggtgggaactgggggacctgggcctcaggcctgctccaccactgactcaccgaatgaccttgggcaaggcactgccctctctgtgccttggtttccccatctgtagaatggggagggtggacactggaaactagatgacttctttcacctccaaaattcccttagtttctatgaaaatattgggggtaggggggtggattaggagattgaagggttgagaagaaagagaaattgtccaaagagtcctcagaacctgcctggagaaatgcgcatgggggtgggcctggta

SEQ ID NO: 129327 - DNA, 2235 bp, Homo sapiens
  Payload ID: 5298
  Gene Symbol: ELAC1
  Gene Name: elaC ribonuclease Z 1
  Uniprot ID: Q9H777
  ENST ID: ENST00000269466
  CDS Start-End: 108-1199
ggcgcacttccgcccgggcgcattgtagccccgcggacagctgggccagggtgcgggcctgcgcctccctcggctcctggcgcgggcctcggggagaggggtggaagatgtctatggatgtgacattcctggggacgggtgcagcatacccatctccaacccggggtgcctctgctgtggtccttcggtgtgaaggcgagtgctggctctttgactgtggggagggaacacagacacagcttatgaaaagccaacttaaagcagggagaattaccaagatcttcatcacacaccttcatggagaccatttctttggccttcctgggctcctctgcacaatcagcctgcagagtggctccatggtgtccaaacagcctattgaaatctatggccctgtagggcttcgggactttatctggcgaaccatggaactctctcacacggagctggtcttccattatgtggttcatgaactggttcctacagcagatcaatgtcctgcagaagaactaaaagaatttgcgcatgtgaatagagcagacagtcctcccaaagaggaacaaggaagaactatcctgttagactcagaagaaaactcataccttctgtttgatgatgaacaatttgttgtaaaagcatttcgcctctttcacagaattccctcatttgggttttcagtcgtggaaaagaaacgcccaggtaaactcaatgcacagaaacttaaagaccttggtgttccaccaggtcctgcctatgggaagctgaaaaatggaatttctgttgttctggaaaatggggttacaatttctccccaagatgtcttaaaaaagcctattgttggaagaaaaatctgcatattgggtgactgctctggggttgtgggtgatggaggagtaaaactgtgctttgaagcagacctgttgatccacgaagcaaccctggatgatgcccagatggacaaagcaaaggagcatggccacagcacaccacagatggcagcaacatttgcaaagttgtgccgtgcaaagaggctggttctgactcacttcagtcagaggtacaaaccagttgccttggccagagaaggagaaacagatggcattgcagaactaaaaaagcaagctgaatcagtgttagatctccaagaagtgactctagcagaagattttatggtgataagcattccaatcaagaaatgaaaccagtgttcctgagtgcacactgacatgtctgtgaatatgttactgaacctatagtccagtttttttatttcttgttttagtctgaaattatttgggccctaataatcctaaaaagaatggagctgcattgatgaattggctcagtatttaaagggagcaaactttttgataataaatctttttaagagaaaaaaaacccagcatcctttttgaagtccagatttgtcaaaatgatagactattcagttatacatcttattttgtgctactaccacagatagccaatattccatgcagtcctgggcttagcttctgcccagctttattgctgctattggcaaagagcacaggactcagccctcgtggctaaaaatggtattttggcagtttgtattgaatctgtttgtgttattaacagaagagggagaaatgtcatgagacgttggacaggcaggattgatgatagcatgaccatagctttgctggaatactgaatgcagggtttggctaggtgtttattttaacattttattaaactttctatttgggtcttaacccatggttctcagctggggtgacactgctcctctagaagcaggtttgaaattatgggtatgttttcttgtcacagtgactgagtacggtggtggtagtggtggtactactactactggtatttagtcagcagggataagggatgttagctgtcctgcaaagttttggtcagtcatatacaataaagaatcatctcaccccgaaatgcaaattgcaggcccattgagatacacagcaagttagtttatactcttgatgtgaatatagtttaccaaaattagtgacataatgagtggaattactaggtaagtcaaatcctaaagagtgaatgtgttagaattgcagtgtcataccaaataacattcaaaagaaatgagccattaagtgaagcttatgaacctggaggtaaaaaatgcttatctgttaaactgaggtttcattgacgtgtccctattaataaacgttatttgccccacaa

SEQ ID NO: 129328 - DNA, 975 bp, Homo sapiens
  Payload ID: 5298
  Gene Symbol: ELAC1
  Gene Name: elaC ribonuclease Z 1
  ENST ID: ENST00000591429
  CDS Start-End: 76-747
gcggacagctgggccagggtgcgggcctgcgcctccctcggctcctggcgcgggcctcggggagaggggtggaagatgtctatggatgtgacattcctggggacgggtgcagcatacccatctccaacccggggtgcctctgctgtggtccttcggtgtgaaggcgagtgctggctctttgactgtggggagggaacacagacacagcttatgaaaagccaacttaaagcagggagaattaccaagatcttcatcacacaccttcatggagaccatttctttggccttcctgggctcctctgcacaatcagcctgcagagtggctccatggtgtccaaacagcctattgaaatctatggccctgtagggcttcgggactttatctggcgaaccatggaactctctcacacggagctggtcttccattatgtggttcatgaactggttcctacagcagatcaatgtcctgcagaagaactaaaagaatttgcgcatgtgaatagagcagacagtcctcccaaagaggaacaaggaagaactatcctgttagactcagaagaaaactcataccttctgtttgatgatgaacaatttgttgtaaaagcatttcgcctctttcacagaattccctcatttgggttttcagtcgtggaaaagaaacgcccaggtaaactcaatgcacagaaacttaaagaccttggtaagtgtttttttgttttttgttttttcccgccttctcatcaatagggctcctgttgactgaagctataagaaatgtcatagtaaggccaggagttgtggctcacgcctgtaatcctagcactttgggaggccgaggtgggaggatcacttgagttcgggagttcaagaccagcctgggcaacatggcgaaaccccatctctactaaaaatacaaaaagtaactgggtgtggtgtcatgtgcctgtagtcccagctacttggggggctgaggca

SEQ ID NO: 129329 - DNA, 694 bp, Homo sapiens
  Payload ID: 5298
  Gene Symbol: ELAC1
  Gene Name: elaC ribonuclease Z 1
  ENST ID: ENST00000588577
  CDS Start-End: 133-399
agcggccgcgcgggacccggccggcggcgcacttccgcccgggcgcattgtagccccgcggacagctgggccagggtgcgggcctgcgcctccctcggctcctggcgcgggcctcggggagaggggtggaagatgtctatggatgtgacattcctggggacgggtgcagcatacccatctccaacccggggtgcctctgctgtggtccttcggtgtgaaggcgagtgctggctctttgactgtggggagggaacacagacacagcttatgaaaagccaacttaaagcagaattccctcatttgggttttcagtcgtggaaaagaaacgcccaggtaaactcaatgcacagaaacttaaagaccttggtgttccaccaggtcctgcctatgggaagctgaaaaatggaatttctgttgttctggaaaatggggttacaatttctccccaagatgtcttaaaaaagcctattgttggaagaaaaatctgcatattgggtgactgctctggggttgtgggtgatggaggagtaaaactgtgctttgaagcagacctgttgatccacgaagcaaccctggatgatgcccagatggacaaagcaaaggagcatggccacagcacaccacagatggcagcaacatttgcaaagttgtgccgtgcaaagaggctggttctgactcacttcagtcagaggta

SEQ ID NO: 129330 - DNA, 3148 bp, Homo sapiens
  Payload ID: 5299
  Gene Symbol: ELAC2
  Gene Name: elaC ribonuclease Z 2
  Uniprot ID: Q9BQ52
  ENST ID: ENST00000338034
  CDS Start-End: 241-2721
agaactaggggcggggccgcttgagacgctctagtattcctctactctatggccactgtcaattgacaagtcccgagcggtaaagctcctttctattggatgagcagcctcgcgtaggcgggaagctcggtgcacggcgcgctgattggctggatccgccatgcggagcggctaggtggtgcacgggaaacgcgggcgtaggtgaccggcggctttctcagttttggtggagacgggcgcatgtgggcgctttgctcgctgctgcggtccgcggccggacgcaccatgtcgcagggacgcaccatatcgcaggcacccgcccgccgcgagcggccgcgcaaggacccgctgcggcacctgcgcacgcgagagaagcgcggaccgtcggggtgctccggcggcccaaacaccgtgtacctgcaggtggtggcagcgggtagccgggactcgggcgccgcgctctacgtcttctccgagttcaaccggtatctcttcaactgtggagaaggcgttcagagactcatgcaggagcacaagttaaaggttgctcgcctggacaacatattcctgacacgaatgcactggtctaatgttgggggcttaagtggaatgattcttactttaaaggaaaccgggcttccaaagtgtgtactttctggacctccacaactggaaaaatacctcgaagcaatcaaaatattttctggtccattgaaaggaatagaactggctgtgcggccccactctgccccagaatacgaggatgaaaccatgacagtttaccagatccccatacacagtgaacagaggaggggaaagcaccaaccatggcagagtccagaaaggcctctcagcaggctcagtccagagcgatcttcagactccgagtcgaatgaaaatgagccacaccttccacatggtgttagccagagaagaggggtcagggactcttccctggtcgtagctttcatctgtaagcttcacttaaagagaggaaacttcttggtgctcaaagcaaaggagatgggcctcccagttgggacagctgccatcgctcccatcattgctgctgtcaaggacgggaaaagcatcactcatgaaggaagagagattttggctgaagagctgtgtactcctccagatcctggtgctgcttttgtggtggtagaatgtccagatgaaagcttcattcaacccatctgtgagaatgccacctttcagaggtaccaaggaaaggcagatgcccccgtggccttggtggttcacatggccccagcatctgtgcttgtggacagcaggtaccagcagtggatggagaggtttgggcctgacacccagcacttggtcctgaatgagaactgtgcctcagttcacaaccttcgcagccacaagattcaaacccagctcaacctcatccacccggacatcttccccctgctcaccagtttccgctgtaagaaggagggccccaccctcagtgtgcccatggttcagggtgaatgcctcctcaagtaccagctccgtcccaggagggagtggcagagggatgccattattacttgcaatcctgaggaattcatagttgaggcgctgcagcttcccaacttccagcagagcgtgcaggagtacaggaggagtgcgcaggacggcccagccccagcagagaaaagaagtcagtacccagaaatcatcttccttggaacagggtctgccatcccgatgaagattcgaaatgtcagtgccacacttgtcaacataagccccgacacgtctctgctactggactgtggtgagggcacatttgggcagctgtgccgtcattacggagaccaggtggacagggtcctgggcaccctggctgctgtgtttgtgtcccacctgcacgcagatcaccacacgggcttgccaagtatcttgctgcagagagaacgcgccttggcatctttgggaaagccgcttcaccctttgctggtggttgcccccaaccagctcaaagcctggctccagcagtaccacaaccagtgccaggaggtcctgcaccacatcagtatgattcctgccaaatgccttcaggaaggggctgagatctccagtcctgcagtggaaagattgatcagttcgctgttgcgaacatgtgatttggaagagtttcagacctgtctggtgcggcactgcaagcatgcgtttggctgtgcgctggtgcacacctctggctggaaagtggtctattccggggacaccatgccctgcgaggctctggtccggatggggaaagatgccaccctcctgatacatgaagccaccctggaagatggtttggaagaggaagcagtggaaaagacacacagcacaacgtcccaagccatcagcgtggggatgcggatgaacgcggagttcattatgctgaaccacttcagccagcgctatgccaaggtccccctcttcagccccaacttcagcgagaaagtgggagttgcctttgaccacatgaaggtctgctttggagactttccaacaatgcccaagctgattcccccactgaaagccctgtttgctggcgacatcgaggagatggaggagcgcagggagaagcgggagctgcggcaggtgcgggcggccctcctgtccagggagctggcaggcggcctggaggatggggagcctcagcagaagcgggcccacacagaggagccacaggccaagaaggtcagagcccagtgaagatctgggagaccctgaactcagaaggctgtgtgtcttctgccccacgcacgcacccgtatctgccctccttgctggtagaagctgaagagcacggtcccccaggaggcagctcaggataggtggtatggagctgtgccgaggcttgggctcccacataagcactagtctatagatgcctcttaggactggtgcctggcacagccgcgggccaggaggctgccacacggaagcaagcagatgaactaatttcatttcaaggcagtttttaaagaagtcttggaaacagacggcggcacctttcctctaatccagcaaagtgattccctgcacaccagagacaagcagagtaacaggatcagtgggtctaagtgtccgagacttaacgaaaatagtatttcagctgcaataaagattgagtttgcaa

SEQ ID NO: 129331 - DNA, 2924 bp, Homo sapiens
  Payload ID: 5299
  Gene Symbol: ELAC2
  Gene Name: elaC ribonuclease Z 2
  ENST ID: ENST00000395962
  CDS Start-End: 75-2498
agcggctaggtggtgcacgggaaacgcgggcgtaggtgaccggcggctttctcagttttggtggagacgggcgcatgtgggcgctttgctcgctgctgcggtccgcggccggacgcaccatgtcgcagggacgcaccatatcgcaggcacccgcccgccgcgagcggccgcgcaaggacccgctgcggcacctgcgcacgcgagagaagcgcggaccgtcggggtgctccggcggcccaaacaccgtgtacctgcaggtggtggcagcgggtagccgggactcgggcgttcagagactcatgcaggagcacaagttaaaggttgctcgcctggacaacatattcctgacacgaatgcactggtctaatgttgggggcttaagtggaatgattcttactttaaaggaaaccgggcttccaaagtgtgtactttctggacctccacaactggaaaaatacctcgaagcaatcaaaatattttctggtccattgaaaggaatagaactggctgtgcggccccactctgccccagaatacgaggatgaaaccatgacagtttaccagatccccatacacagtgaacagaggaggggaaagcaccaaccatggcagagtccagaaaggcctctcagcaggctcagtccagagcgatcttcagactccgagtcgaatgaaaatgagccacaccttccacatggtgttagccagagaagaggggtcagggactcttccctggtcgtagctttcatctgtaagcttcacttaaagagaggaaacttcttggtgctcaaagcaaaggagatgggcctcccagttgggacagctgccatcgctcccatcattgctgctgtcaaggacgggaaaagcatcactcatgaaggaagagagattttggctgaagagctgtgtactcctccagatcctggtgctgcttttgtggtggtagaatgtccagatgaaagcttcattcaacccatctgtgagaatgccacctttcagaggtaccaaggaaaggcagatgcccccgtggccttggtggttcacatggccccagcatctgtgcttgtggacagcaggtaccagcagtggatggagaggtttgggcctgacacccagcacttggtcctgaatgagaactgtgcctcagttcacaaccttcgcagccacaagattcaaacccagctcaacctcatccacccggacatcttccccctgctcaccagtttccgctgtaagaaggagggccccaccctcagtgtgcccatggttcagggtgaatgcctcctcaagtaccagctccgtcccaggagggagtggcagagggatgccattattacttgcaatcctgaggaattcatagttgaggcgctgcagcttcccaacttccagcagagcgtgcaggagtacaggaggagtgcgcaggacggcccagccccagcagagaaaagaagtcagtacccagaaatcatcttccttggaacagggtctgccatcccgatgaagattcgaaatgtcagtgccacacttgtcaacataagccccgacacgtctctgctactggactgtggtgagggcacatttgggcagctgtgccgtcattacggagaccaggtggacagggtcctgggcaccctggctgctgtgtttgtgtcccacctgcacgcagatcaccacacgggcttgccaagtatcttgctgcagagagaacgcgccttggcatctttgggaaagccgcttcaccctttgctggtggttgcccccaaccagctcaaagcctggctccagcagtaccacaaccagtgccaggaggtcctgcaccacatcagtatgattcctgccaaatgccttcaggaaggggctgagatctccagtcctgcagtggaaagattgatcagttcgctgttgcgaacatgtgatttggaagagtttcagacctgtctggtgcggcactgcaagcatgcgtttggctgtgcgctggtgcacacctctggctggaaagtggtctattccggggacaccatgccctgcgaggctctggtccggatggggaaagatgccaccctcctgatacatgaagccaccctggaagatggtttggaagaggaagcagtggaaaagacacacagcacaacgtcccaagccatcagcgtggggatgcggatgaacgcggagttcattatgctgaaccacttcagccagcgctatgccaaggtccccctcttcagccccaacttcagcgagaaagtgggagttgcctttgaccacatgaaggtctgctttggagactttccaacaatgcccaagctgattcccccactgaaagccctgtttgctggcgacatcgaggagatggaggagcgcagggagaagcgggagctgcggcaggtgcgggcggccctcctgtccagggagctggcaggcggcctggaggatggggagcctcagcagaagcgggcccacacagaggagccacaggccaagaaggtcagagcccagtgaagatctgggagaccctgaactcagaaggctgtgtgtcttctgccccacgcacgcacccgtatctgccctccttgctggtagaagctgaagagcacggtcccccaggaggcagctcaggataggtggtatggagctgtgccgaggcttgggctcccacataagcactagtctatagatgcctcttaggactggtgcctggcacagccgcgggccaggaggctgccacacggaagcaagcagatgaactaatttcatttcaaggcagtttttaaagaagtcttggaaacagacggcggcacctttcctctaatccagcaaagtgattccctgcacaccagagacaagcagagtaacaggatcagtgggtctaagtgtccgagacttaacgaaaatagtatttcagctgcaataaagattgagtttgca

SEQ ID NO: 129332 - DNA, 2671 bp, Homo sapiens
  Payload ID: 5299
  Gene Symbol: ELAC2
  Gene Name: elaC ribonuclease Z 2
  Uniprot ID: Q9BQ52
  ENST ID: ENST00000426905
  CDS Start-End: 53-2413
aacgcgggcgtaggtgaccggcggctttctcagttttggtggagacgggcgcatgtgggcgctttgctcgctgctgcggtccgcggccggacgcaccatgtcgcagggacgcaccatatcgcaggcacccgcccgccgcgagcggccgcgcaaggacccgctgcggcacctgcgcacgcgagagaagcgcggaccgtcggggtgctccggcggcccaaacaccgtgtacctgcaggtggtggcagcgggtagccgggactcgggcgccgcgctctacgtcttctccgagttcaaccggtatctcttcaactgtggagaaggcgttcagagactcatgcaggagcacaagttaaaggttgctcgcctggacaacatattcctgacacgaatgcactggtctaatgttgggggcttaagtggaatgattcttactttaaaggaaaccgggcttccaaagtgtgtactttctggacctccacaactggaaaaatacctcgaagcaatcaaaatattttctggtccattgaaaggaatagaactggctgtgcggccccactctgccccagaatacgaggatgaaaccatgacagtttaccagatccccatacacagtgttagccagagaagaggggtcagggactcttccctggtcgtagctttcatctgtaagcttcacttaaagagaggaaacttcttggtgctcaaagcaaaggagatgggcctcccagttgggacagctgccatcgctcccatcattgctgctgtcaaggacgggaaaagcatcactcatgaaggaagagagattttggctgaagagctgtgtactcctccagatcctggtgctgcttttgtggtggtagaatgtccagatgaaagcttcattcaacccatctgtgagaatgccacctttcagaggtaccaaggaaaggcagatgcccccgtggccttggtggttcacatggccccagcatctgtgcttgtggacagcaggtaccagcagtggatggagaggtttgggcctgacacccagcacttggtcctgaatgagaactgtgcctcagttcacaaccttcgcagccacaagattcaaacccagctcaacctcatccacccggacatcttccccctgctcaccagtttccgctgtaagaaggagggccccaccctcagtgtgcccatggttcagggtgaatgcctcctcaagtaccagctccgtcccaggagggagtggcagagggatgccattattacttgcaatcctgaggaattcatagttgaggcgctgcagcttcccaacttccagcagagcgtgcaggagtacaggaggagtgcgcaggacggcccagccccagcagagaaaagaagtcagtacccagaaatcatcttccttggaacagggtctgccatcccgatgaagattcgaaatgtcagtgccacacttgtcaacataagccccgacacgtctctgctactggactgtggtgagggcacatttgggcagctgtgccgtcattacggagaccaggtggacagggtcctgggcaccctggctgctgtgtttgtgtcccacctgcacgcagatcaccacacgggcttgccaagtatcttgctgcagagagaacgcgccttggcatctttgggaaagccgcttcaccctttgctggtggttgcccccaaccagctcaaagcctggctccagcagtaccacaaccagtgccaggaggtcctgcaccacatcagtatgattcctgccaaatgccttcaggaaggggctgagatctccagtcctgcagtggaaagattgatcagttcgctgttgcgaacatgtgatttggaagagtttcagacctgtctggtgcggcactgcaagcatgcgtttggctgtgcgctggtgcacacctctggctggaaagtggtctattccggggacaccatgccctgcgaggctctggtccggatggggaaagatgccaccctcctgatacatgaagccaccctggaagatggtttggaagaggaagcagtggaaaagacacacagcacaacgtcccaagccatcagcgtggggatgcggatgaacgcggagttcattatgctgaaccacttcagccagcgctatgccaaggtccccctcttcagccccaacttcagcgagaaagtgggagttgcctttgaccacatgaaggtctgctttggagactttccaacaatgcccaagctgattcccccactgaaagccctgtttgctggcgacatcgaggagatggaggagcgcagggagaagcgggagctgcggcaggtgcgggcggccctcctgtccagggagctggcaggcggcctggaggatggggagcctcagcagaagcgggcccacacagaggagccacaggccaagaaggtcagagcccagtgaagatctgggagaccctgaactcagaaggctgtgtgtcttctgccccacgcacgcacccgtatctgccctccttgctggtagaagctgaagagcacggtcccccaggaggcagctcaggataggtggtatggagctgtgccgaggcttgggctcccacataagcactagtctatagatgcctcttaggactggtgcctggcacagccgcgggccaggaggctgccacacggaagcaagcagatgaactaatttcatttc

SEQ ID NO: 129333 - DNA, 858 bp, Homo sapiens
  Payload ID: 5299
  Gene Symbol: ELAC2
  Gene Name: elaC ribonuclease Z 2
  ENST ID: ENST00000446899
  CDS Start-End: 1-858
tccacatggtgttagccagagaagaggggtcagggactcttccctggtcgtagctttcatctgtaagcttcacttaaagagaggaaacttcttggtgctcaaagcaaaggagatgggcctcccagttgggacagctgccatcgctcccatcattgctgctgtcaaggacgggaaaagcatcactcatgaaggaagagaggttttgcagattttggctgaagagctgtgtactcctccagatcctggtgctgcttttgtggtggtagaatgtccagatgaaagcttcattcaacccatctgtgagaatgccacctttcagaggtaccaaggaaaggcagatgcccccgtggccttggtggttcacatggccccagcatctgtgcttgtggacagcaggtaccagcagtggatggagaggtttgggcctgacacccagcacttggtcctgaatgagaactgtgcctcagttcacaaccttcgcagccacaagattcaaacccagctcaacctcatccacccggacatcttccccctgctcaccagtttccgctgtaagaaggagggccccaccctcagtgtgcccatggttcagggtgaatgcctcctcaagtaccagctccgtcccaggagggagtggcagagggatgccattattacttgcaatcctgaggaattcatagttgaggcgctgcagcttcccaacttccagcagagcgtgcaggagtacaggaggagtgcgcaggacggcccagccccagcagagaaaagaagtcagtacccagaaatcatcttccttggaacagggtctgccatcccgatgaagattcgaaatgtcagtgccacacttgtcaacataag

SEQ ID NO: 129334 - DNA, 581 bp, Homo sapiens
  Payload ID: 5299
  Gene Symbol: ELAC2
  Gene Name: elaC ribonuclease Z 2
  ENST ID: ENST00000581499
  CDS Start-End: 185-581
atcggggcacctcccagggcttcggcttccctgcttcacacatgtggttcactgttgcgggggttcgtggagttatggtgggtgggaaatccgagattctttgcatccatgtgatttctgcggatctgtgaagaacttcaggcctgggtatctcttcaactgtggagaaggcgttcagagactcatgcaggagcacaagttaaaggttgctcgcctggacaacatattcctgacacgaatgcactggtctaatgttgggggcttaagtggaatgattcttactttaaaggaaaccgggcttccaaagtgtgtactttctggacctccacaactggaaaaatacctcgaagcaatcaaaatattttctggtccattgaaaggaatagaactggctgtgcggccccactctgccccagaatacgaggatgaaaccatgacagtttaccagatccccatacacagtgaacagaggaggggaaagcaccaaccatggcagagtccagaaaggcctctcagcaggctcagtccagagcgatcttcagactccgagtcgaatgaaaatgagccacaccttccacatg

SEQ ID NO: 129335 - DNA, 579 bp, Homo sapiens
  Payload ID: 5299
  Gene Symbol: ELAC2
  Gene Name: elaC ribonuclease Z 2
  ENST ID: ENST00000580504
  CDS Start-End: 136-579
agtgcggcgcagcctctgagcatcggggcacctcccagggcttcggcttccctgcttcacacatgtggttcactgttgcgggggttcgtggagttatggtatctcttcaactgtggagaaggcgttcagagactcatgcaggagcacaagttaaaggttgctcgcctggacaacatattcctgacacgaatgcactggtctaatgttgggggcttaagtggaatgattcttactttaaaggaaaccgggcttccaaagtgtgtactttctggacctccacaactggaaaaatacctcgaagcaatcaaaatattttctggtccattgaaaggaatagaactggctgtgcggccccactctgccccagaatacgaggatgaaaccatgacagtttaccagatccccatacacagtgttagccagagaagaggggtcagggactcttccctggtcgtagctttcatctcttcacttaaagagaggaaacttcttggtgctcaaagcaaaggagatgggcctcccagttgggacagctgccatcgctcccatcattgctgctgtcaaggacgggaaaagcat

SEQ ID NO: 129336 - DNA, 2087 bp, Homo sapiens
  Payload ID: 5299
  Gene Symbol: ELAC2
  Gene Name: elaC ribonuclease Z 2
  ENST ID: ENST00000584650
  CDS Start-End: 1-1880
aaaccatgacagtttaccagatccccatacacagtgaacagaggaggggaaagcaccaaccatggcagagtccagaaaggcctctcagcaggctcagtccagagcgatcttcagactccgagtcgaatgaaaatgagccacaccttccacatggtgttagccagagaagaggggtcagggactcttccctggtcgtagctttcatctgtaagcttcacttaaagagaggaaacttcttggtgctcaaagcaaaggagatgggcctcccagttgggacagctgccatcgctcccatcattgctgctgtcaaggacgggaaaagcatcactcatgaaggaagagagattttggctgaagagctgtgtactcctccagatcctggtgctgcttttgtggtggtagaatgtccagatgaaagcttcattcaacccatctgtgagaatgccacctttcagaggtaccagcagtggatggagaggtttgggcctgacacccagcacttggtcctgaatgagaactgtgcctcagttcacaaccttcgcagccacaagattcaaacccagctcaacctcatccacccggacatcttccccctgctcaccagtttccgctgtaagaaggagggccccaccctcagtgtgcccatggttcagggtgaatgcctcctcaagtaccagctccgtcccaggagggagtggcagagggatgccattattacttgcaatcctgaggaattcatagttgaggcgctgcagcttcccaacttccagcagagcgtgcaggagtacaggaggagtgcgcaggacggcccagccccagcagagaaaagaagtcagtacccagaaatcatcttccttggaacagggtctgccatcccgatgaagattcgaaatgtcagtgccacacttgtcaacataagccccgacacgtctctgctactggactgtggtgagggcacatttgggcagctgtgccgtcattacggagaccaggtggacagggtcctgggcaccctggctgctgtgtttgtgtcccacctgcacgcagatcaccacacgggcttgccaagtatcttgctgcagagagaacgcgccttggcatctttgggaaagccgcttcaccctttgctggtggttgcccccaaccagctcaaagcctggctccagcagtaccacaaccagtgccaggaggtcctgcaccacatcagtatgattcctgccaaatgccttcaggaaggggctgagatctccagtcctgcagtggaaagattgatcagttcgctgttgcgaacatgtgatttggaagagtttcagacctgtctggtgcggcactgcaagcatgcgtttggctgtgcgctggtgcacacctctggctggaaagtggtctattccggggacaccatgccctgcgaggctctggtccggatggggaaagatgccaccctcctgatacatgaagccaccctggaagatggtttggaagaggaagcagtggaaaagacacacagcacaacgtcccaagccatcagcgtggggatgcggatgaacgcggagttcattatgctgaaccacttcagccagcgctatgccaaggtccccctcttcagccccaacttcagcgagaaagtgggagttgcctttgaccacatgaaggtctgctttggagactttccaacaatgcccaagctgattcccccactgaaagccctgtttgctggcgacatcgaggagatggaggagcgcagggagaagcgggagctgcggcaggtgcgggcggccctcctgtccagggagctggcaggcggcctggaggatggggagcctcagcagaagcgggcccacacagaggagccacaggccaagaaggtcagagcccagtgaagatctgggagaccctgaactcagaaggctgtgtgtcttctgccccacgcacgcacccgtatctgccctccttgctggtagaagctgaagagcacggtcccccaggaggcagctcaggataggtggtatggagctgtgccgaggcttgggctcccacataagcactagtctatagatgcctcttaggactggtgcctggcacagccg

SEQ ID NO: 129337 - DNA, 428 bp, Homo sapiens
  Payload ID: 5299
  Gene Symbol: ELAC2
  Gene Name: elaC ribonuclease Z 2
  ENST ID: ENST00000476042
  CDS Start-End: 1-137
cccccgtggccttggtggttcacatggccccagcatctgtgcttgtggacagcaggtaccagcagtggatggagaggtatggagcccagcccagcggcacttggggtttgggcctgacacccagcacttggtcctgaatgagaactgtgcctcagttcacaaccttcgcagccacaagattcaaacccagctcaacctcatccacccggacatcttccccctgctcaccagtttccgctgtaagaaggagggccccaccctcagtgtgcccatggttcagggtgaatgcctcctcaagtaccagctccgtcccaggagggagtggcagagggatgccattattacttgcaatcctgaggaattcatagttgaggcgctgcagcttcccaacttccagcagagcgtgcaggagtacaggaggagtgcgc

SEQ ID NO: 129338 - DNA, 479 bp, Homo sapiens
  Payload ID: 5299
  Gene Symbol: ELAC2
  Gene Name: elaC ribonuclease Z 2
  ENST ID: ENST00000583371
  CDS Start-End: 113-479
aagctcggtgcacggcgcgctgattggctggatccgccatgcggagcggctaggtggtgcacgggaaacgcgggcgtatctcttcaactgtggagaaggcgttcagagactcatgcaggagcacaagttaaaggttgctcgcctggacaacatattcctgacacgaatgcactggtctaatgttgggggcttaagtggaatgattcttactttaaaggaaaccgggcttccaaagtgtgtactttctggacctccacaactggaaaaatacctcgaagcaatcaaaatattttctggtccattgaaaggaatagaactggctgtgcggccccactctgccccagaatacgaggatgaaaccatgacagtttaccagatccccatacacagtgaacagaggaggggaaagcaccaaccatggcagagtccagaaaggcctctcagcaggctcagtccagagcgatcttcagactccgagt

SEQ ID NO: 129339 - DNA, 866 bp, Homo sapiens
  Payload ID: 5299
  Gene Symbol: ELAC2
  Gene Name: elaC ribonuclease Z 2
  ENST ID: ENST00000609101
  CDS Start-End: 140-866
cccgtcccgctgggccctcagtgcggcgcagcctctgagcatcggggcacctcccagggcttcggcttccctgcttcacacatgtggttcactgttgcgggggtatctcttcaactgtggagaaggcgttcagagactcatgcaggagcacaagttaaaggttgctcgcctggacaacatattcctgacacgaatgcactggtctaatgttgggggcttaagtggaatgattcttactttaaaggaaaccgggcttccaaagtgtgtactttctggacctccacaactggaaaaatacctcgaagcaatcaaaatattttctggtccattgaaaggaatagaactggctgtgcggccccactctgccccagaatacgaggatgaaaccatgacagtttaccagatccccatacacagtgaacagaggaggggaaagcaccaaccatggcagagtccagaaaggcctctcagcaggctcagtccagagcgatcttcagactccgagtcgaatgaaaatgagccacaccttccacatggtgttagccagagaagaggggtcagggactcttccctggtcgtagctttcatctgtaagcttcacttaaagagaggaaacttcttggtgctcaaagcaaaggagatgggcctcccagttgggacagctgccatcgctcccatcattgctgctgtcaaggacgggaaaagcatcactcatgaaggaagagagattttggctgaagagctgtgtactcctccagatcctggtgctgcttttgtggtggtagaatgtccagatgaaagcttcattcaacccatctgtgagaatgccacctttcagaggtaccaaggaaaggcagatgcccccg

SEQ ID NO: 129340 - DNA, 588 bp, Homo sapiens
  Payload ID: 5299
  Gene Symbol: ELAC2
  Gene Name: elaC ribonuclease Z 2
  ENST ID: ENST00000609757
  CDS Start-End: 216-588
gttgcgggggttcgtggagttatggtgggtgggaaatccgagattctttgcatccatgtgatttctgcggatctgtgaagaacttcaggcctgggtctgagcgtccttttcccaacccttgggccccggcctggctgtcagcactttcggagctccaccctcttccgtgcaccccaaggtatctcttcaactgtggagaaggcgttcagagactcatgcaggagcacaagttaaaggttgctcgcctggacaacatattcctgacacgaatgcactggtctaatgttgggggcttaagtggaatgattcttactttaaaggaaaccgggcttccaaagtgtgtactttctggacctccacaactggaaaaatacctcgaagcaatcaaaatattttctggtccattgaaaggaatagaactggctgtgcggccccactctgccccagaatacgaggatgaaaccatgacagtttaccagatccccatacacagtgaacagaggaggggaaagcaccaaccatggcagagtccagaaaggcctctcagcaggctcagtccagagcgatcttcagactccgagtcgaatg

SEQ ID NO: 129341 - DNA, 579 bp, Homo sapiens
  Payload ID: 5299
  Gene Symbol: ELAC2
  Gene Name: elaC ribonuclease Z 2
  ENST ID: ENST00000578071
  CDS Start-End: 20-496
ttttggtggagacgggcgcatgtgggcgctttgctcgctgctgcggtccgcggccggacgcaccatgtcgcagggacgcaccatatcgcaggcacccgcccgccgcgagcggccgcgcaaggacccgctgcggcacctgcgcacgcgagagaagcgcggaccgtcggggtgctccggcggcccaaacaccgtgtacctgcaggtggtggcagcgggtagccgggactcgggcgccgcgctctacgtcttctccgagttcaaccggtatctcttcaactgtggagaaggcgttcagagactcatgcaggagcacaagttaaaggttgctcgcctggacaacatattcctgacacgaatgcactggtctaatgttgggggcttaagtggaatgattcttactttaaaggaaaccgggcttccaaagtgtgtactttctggacctccacaactgctgtgcggccccactctgccccagaatacgaggatgaaaccatgacagtttaccagatccccatacacagtgaacagaggaggggaaagcaccaaccatggcagagtccagaaaggcctctcagcagg

SEQ ID NO: 129342 - DNA, 920 bp, Homo sapiens
  Payload ID: 5300
  Gene Symbol: ELANE
  Gene Name: elastase, neutrophil expressed
  Uniprot ID: P08246
  ENST ID: ENST00000263621
  CDS Start-End: 39-842
gcacggaggggcagagaccccggagccccagccccaccatgaccctcggccgccgactcgcgtgtcttttcctcgcctgtgtcctgccggccttgctgctggggggcaccgcgctggcctcggagattgtggggggccggcgagcgcggccccacgcgtggcccttcatggtgtccctgcagctgcgcggaggccacttctgcggcgccaccctgattgcgcccaacttcgtcatgtcggccgcgcactgcgtggcgaatgtaaacgtccgcgcggtgcgggtggtcctgggagcccataacctctcgcggcgggagcccacccggcaggtgttcgccgtgcagcgcatcttcgaaaacggctacgaccccgtaaacttgctcaacgacatcgtgattctccagctcaacgggtcggccaccatcaacgccaacgtgcaggtggcccagctgccggctcagggacgccgcctgggcaacggggtgcagtgcctggccatgggctggggccttctgggcaggaaccgtgggatcgccagcgtcctgcaggagctcaacgtgacggtggtgacgtccctctgccgtcgcagcaacgtctgcactctcgtgaggggccggcaggccggcgtctgtttcggggactccggcagccccttggtctgcaacgggctaatccacggaattgcctccttcgtccggggaggctgcgcctcagggctctaccccgatgcctttgccccggtggcacagtttgtaaactggatcgactctatcatccaacgctccgaggacaacccctgtccccacccccgggacccggacccggccagcaggacccactgagaagggctgcccgggtcacctcagctgcccacacccacactctccagcatctggcacaataaacattctctgttttgt

SEQ ID NO: 129343 - DNA, 1028 bp, Homo sapiens
  Payload ID: 5300
  Gene Symbol: ELANE
  Gene Name: elastase, neutrophil expressed
  Uniprot ID: P08246
  ENST ID: ENST00000590230
  CDS Start-End: 142-945
tgaccgtgagcctgggtgaaagggagaggaagtggagggcgctggccggccgtggggcaatgcaacggcctcccagcacagggctataagaggagccgggcgggcacggaggggcagagaccccggagccccagccccaccatgaccctcggccgccgactcgcgtgtcttttcctcgcctgtgtcctgccggccttgctgctggggggcaccgcgctggcctcggagattgtggggggccggcgagcgcggccccacgcgtggcccttcatggtgtccctgcagctgcgcggaggccacttctgcggcgccaccctgattgcgcccaacttcgtcatgtcggccgcgcactgcgtggcgaatgtaaacgtccgcgcggtgcgggtggtcctgggagcccataacctctcgcggcgggagcccacccggcaggtgttcgccgtgcagcgcatcttcgaaaacggctacgaccccgtaaacttgctcaacgacatcgtgattctccagctcaacgggtcggccaccatcaacgccaacgtgcaggtggcccagctgccggctcagggacgccgcctgggcaacggggtgcagtgcctggccatgggctggggccttctgggcaggaaccgtgggatcgccagcgtcctgcaggagctcaacgtgacggtggtgacgtccctctgccgtcgcagcaacgtctgcactctcgtgaggggccggcaggccggcgtctgtttcggggactccggcagccccttggtctgcaacgggctaatccacggaattgcctccttcgtccggggaggctgcgcctcagggctctaccccgatgcctttgccccggtggcacagtttgtaaactggatcgactctatcatccaacgctccgaggacaacccctgtccccacccccgggacccggacccggccagcaggacccactgagaagggctgcccgggtcacctcagctgcccacacccacactctccagcatctggcacaataaacattctctgttttgtagaat

SEQ ID NO: 129344 - DNA, 920 bp, Homo sapiens; identical to SEQ ID NO: 129342
  Payload ID: 5300
  Gene Symbol: ELANE
  Gene Name: elastase, neutrophil expressed
  Uniprot ID: P08246
  ENST ID: ENST00000615489
  CDS Start-End: 39-842

SEQ ID NO: 129345 - DNA, 1028 bp, Homo sapiens; identical to SEQ ID NO: 129343
  Payload ID: 5300
  Gene Symbol: ELANE
  Gene Name: elastase, neutrophil expressed
  Uniprot ID: P08246
  ENST ID: ENST00000632488
  CDS Start-End: 142-945

SEQ ID NO: 129346 - DNA, 3781 bp, Homo sapiens
  Payload ID: 5301
  Gene Symbol: ELN
  Gene Name: elastin
  Uniprot ID: P15502
  ENST ID: ENST00000252034
  CDS Start-End: 400-2574
cctcccttctgcttcctctcccgagggctgtcctggcagaggcccccctcgctctttctggcgggaacagggccagcagcgaaagaacagtcgcagagggaaagcgggaaagagatgggggaaagtgtgtgtgtgtgagtgtgtgcttgtgtgcatgtgtgtgcgtgtgtgtgtcaaggaaaaaagctcgcagtccagcagcccgggcctgggaggcttgtgagccgggcctttcgtaattgtcccctccccgcggccccctcccccaggcctcccccctctcccgccctcccgcccgccctctctccctccctctttccctcacagccgacgaggcaacaattaggctttggggataaaacgaggtgcggagagcgggctggggcatttctccccgagatggcgggtctgacggcggcggccccgcggcccggagtcctcctgctcctgctgtccatcctccacccctctcggcctggaggggtccctggggccattcctggtggagttcctggaggagtcttttatccaggggctggtctcggagcccttggaggaggagcgctggggcctggaggcaaacctcttaagccagttcccggagggcttgcgggtgctggccttggggcagggctcggcgccttccccgcagttacctttccgggggctctggtgcctggtggagtggctgacgctgctgcagcctataaagctgctaaggctggcgctgggcttggtggtgtcccaggagttggtggcttaggagtgtctgcaggtgcggtggttcctcagcctggagccggagtgaagcctgggaaagtgccgggtgtggggctgccaggtgtatacccaggtggcgtgctcccaggagctcggttccccggtgtgggggtgctccctggagttcccactggagcaggagttaagcccaaggctccaggtgtaggtggagcttttgctggaatcccaggagttggaccctttgggggaccgcaacctggagtcccactggggtatcccatcaaggcccccaagctgcctggtggctatggactgccctacaccacagggaaactgccctatggctatgggcccggaggagtggctggtgcagcgggcaaggctggttacccaacagggacaggggttggcccccaggcagcagcagcagcggcagctaaagcagcagcaaagttcggtgctggagcagccggagtcctccctggtgttggaggggctggtgttcctggcgtgcctggggcaattcctggaattggaggcatcgcaggcgttgggactccagctgcagctgcagctgcagcagcagccgctaaggcagccaagtatggagctgctgcaggcttagtgcctggtgggccaggctttggcccgggagtagttggtgtcccaggagctggcgttccaggtgttggtgtcccaggagctgggattccagttgtcccaggtgctgggatcccaggtgctgcggttccaggggttgtgtcaccagaagcagctgctaaggcagctgcaaaggcagccaaatacggggccaggcccggagtcggagttggaggcattcctacttacggggttggagctgggggctttcccggctttggtgtcggagtcggaggtatccctggagtcgcaggtgtccctggtgtcggaggtgttcccggagtcggaggtgtcccgggagttggcatttcccccgaagctcaggcagcagctgccgccaaggctgccaagtacggagtggggaccccagcagctgcagctgctaaagcagccgccaaagccgcccagtttgggttagttcctggtgtcggcgtggctcctggagttggcgtggctcctggtgtcggtgtggctcctggagttggcttggctcctggagttggcgtggctcctggagttggtgtggctcctggcgttggcgtggctcccggcattggccctggtggagttgcagctgcagcaaaatccgctgccaaggtggctgccaaagcccagctccgagctgcagctgggcttggtgctggcatccctggacttggagttggtgtcggcgtccctggacttggagttggtgctggtgttcctggacttggagttggtgctggtgttcctggcttcggggcagtacctggagccctggctgccgctaaagcagccaaatatggagcagcagtgcctggggtccttggagggctcggggctctcggtggagtaggcatcccaggcggtgtggtgggagccggacccgccgccgccgctgccgcagccaaagctgctgccaaagccgcccagtttggcctagtgggagccgctgggctcggaggactcggagtcggagggcttggagttccaggtgttgggggccttggaggtatacctccagctgcagccgctaaagcagctaaatacggtgctgctggccttggaggtgtcctagggggtgccgggcagttcccacttggaggagtggcagcaagacctggcttcggattgtctcccattttcccaggtggggcctgcctggggaaagcttgtggccggaagagaaaatgagcttcctaggacccctgactcacgacctcatcaacgttggtgctactgcttggtggagaatgtaaaccctttgtaaccccatcccatgcccctccgactccccaccccaggagggaacgggcaggccgggcggccttgcagatccacagggcaaggaaacaagaggggagcggccaagtgccccgaccaggaggccccctacttcagaggcaagggccatgtggtcctggccccccaccccatcccttcccacctaggagctccccctccacacagcctccatctccaggggaacttggtgctacacgctggtgctcttatcttcctggggggagggaggagggaagggtggcccctcggggaaccccctacctggggctcctctaaagatggtgcagacacttcctgggcagtcccagctccccctgcccaccaggacccaccgttggctgccatccagttggtacccaagcacctgaagcctcaaagctggattcgctctagcatccctcctctcctgggtccacttggccgtctcctccccaccgatcgctgttccccacatctggggcgcttttgggttggaaaaccaccccacactgggaatagccaccttgcccttgtagaatccatccgcccatccgtccattcatccatcggtccgtccatccatgtccccagttgaccgcccggcaccactagctggctgggtgcacccaccatcaacctggttgacctgtcatggccgcctgtgccctgcctccacccccatcctacactcccccagggcgtgcggggctgtgcagactggggtgccaggcatctcctccccacccggggtgtccccacatgcagtactgtataccccccatccctccctcggtccactgaacttcagagcagttcccattcctgccccgcccatctttttgtgtctcgctgtgatagatcaataaatattttattttttgtcctggatatttggggattatttttgattgttgatattctcttttggttttattgttgtggttcattgaaaaaaaaagataatttttttttctgatccggggagctgtatccccagtagaaaaaacattttaatcactctaatataactctggatgaaacacacctttttttttaataagaaaagagaattaactgcttcagaaatgactaataaatgaaaaacctttaaaggaaa

SEQ ID NO: 129347 - DNA, 2274 bp, Homo sapiens
  Payload ID: 5301
  Gene Symbol: ELN
  Gene Name: elastin
  Uniprot ID: P15502
  ENST ID: ENST00000320399
  CDS Start-End: 1-2274
atggcgggtctgacggcggcggccccgcggcccggagtcctcctgctcctgctgtccatcctccacccctctcggcctggaggggtccctggggccattcctggtggagttcctggaggagtcttttatccaggggctggtctcggagcccttggaggaggagcgctggggcctggaggcaaacctcttaagccagttcccggagggcttgcgggtgctggccttggggcagggctcggcgccttccccgcagttacctttccgggggctctggtgcctggtggagtggctgacgctgctgcagcctataaagctgctaaggctggcgctgggcttggtggtgtcccaggagttggtggcttaggagtgtctgcaggtgcggtggttcctcagcctggagccggagtgaagcctgggaaagtgccgggtgtggggctgccaggtgtatacccaggtggcgtgctcccaggagctcggttccccggtgtgggggtgctccctggagttcccactggagcaggagttaagcccaaggctccaggtgtaggtggagcttttgctggaatcccaggagttggaccctttgggggaccgcaacctggagtcccactggggtatcccatcaaggcccccaagctgcctggtggctatggactgccctacaccacagggaaactgccctatggctatgggcccggaggagtggctggtgcagcgggcaaggctggttacccaacagggacaggggttggcccccaggcagcagcagcagcggcagctaaagcagcagcaaagttcggtgctggagcagccggagtcctccctggtgttggaggggctggtgttcctggcgtgcctggggcaattcctggaattggaggcatcgcaggcgttgggactccagctgcagctgcagctgcagcagcagccgctaaggcagccaagtatggagctgctgcaggcttagtgcctggtgggccaggctttggcccgggagtagttggtgtcccaggagctggcgttccaggtgttggtgtcccaggagctgggattccagttgtcccaggtgctgggatcccaggtgctgcggttccaggggttgtgtcaccagaagcagctgctaaggcagctgcaaaggcagccaaatacggggccaggcccggagtcggagttggaggcattcctacttacggggttggagctgggggctttcccggctttggtgtcggagtcggaggtatccctggagtcgcaggtgtccctggtgtcggaggtgttcccggagtcggaggtgtcccgggagttggcatttcccccgaagctcaggcagcagctgccgccaaggctgccaagtacggagtggggaccccagcagctgcagctgctaaagcagccgccaaagccgcccagtttgggttagttcctggtgtcggcgtggctcctggagttggcgtggctcctggtgtcggtgtggctcctggagttggcttggctcctggagttggcgtggctcctggagttggtgtggctcctggcgttggcgtggctcccggcattggccctggtggagttgcagctgcagcaaaatccgctgccaaggtggctgccaaagcccagctccgagctgcagctgggcttggtgctggcatccctggacttggagttggtgtcggcgtccctggacttggagttggtgctggtgttcctggacttggagttggtgctggtgttcctggcttcggggcaggtgcagatgagggagttaggcggagcctgtcccctgagctcagggaaggagatccctcctcctctcagcacctccccagcaccccctcatcacccagggtacctggagccctggctgccgctaaagcagccaaatatggagcagcagtgcctggggtccttggagggctcggggctctcggtggagtaggcatcccaggcggtgtggtgggagccggacccgccgccgccgctgccgcagccaaagctgctgccaaagccgcccagtttggcctagtgggagccgctgggctcggaggactcggagtcggagggcttggagttccaggtgttgggggccttggaggtatacctccagctgcagccgctaaagcagctaaatacggtgctgctggccttggaggtgtcctagggggtgccgggcagttcccacttggaggagtggcagcaagacctggcttcggattgtctcccattttcccaggtggggcctgcctggggaaagcttgtggccggaagagaaaatga

SEQ ID NO: 129348 - DNA, 2991 bp, Homo sapiens
  Payload ID: 5301
  Gene Symbol: ELN
  Gene Name: elastin
  ENST ID: ENST00000320492
  CDS Start-End: 83-2014
tccctcacagccgacgaggcaacaattaggctttggggataaaacgaggtgcggagagcgggctggggcatttctccccgagatggcgggtctgacggcggcggccccgcggcccggagtcctcctgctcctgctgtccatcctccacccctctcggcctggaggggtccctggggccattcctggtggagttcctggaggagtcttttatccaggggctggtctcggagcccttggaggaggagcgctggggcctggaggcaaacctcttaagccagggctcggcgccttccccgcagttacctttccgggggctctggtgcctggtggagtggctgacgctgctgcagcctataaagctgctaaggctggcgctgggcttggtggtgtcccaggagttggtggcttaggagtgtctgcaggtgcggtggttcctcagcctggagccggagtgaagcctgggaaagtgccgggtgtggggctgccaggtgtatacccaggtggcgtgctcccaggagctcggttccccggtgtgggggtgctccctggagttcccactggagcaggagttaagcccaaggctccaggagttggaccctttgggggaccgcaacctggagtcccactggggtatcccatcaaggcccccaagctgcctggctatgggcccggaggagtggctggtgcagcgggcaaggctggttacccaacagggacaggggttggcccccaggcagcagcagcagcggcagctaaagcagcagcaaagttcggtgctggagcagccggagtcctccctggtgttggaggggctggtgttcctggcgtgcctggggcaattcctggaattggaggcatcgcaggcgttgggactccagctgcagctgcagctgcagcagcagccgctaaggcagccaagtatggagctgctgcaggcttagtgcctggtgggccaggctttggcccgggagtagttggtgtcccaggagctggcgttccaggtgttggtgtcccaggagctgggattccagttgtcccaggtgctgggatcccaggtgctgcggttccaggggttgtgtcaccagaagcagctgctaaggcagctgcaaaggcagccaaatacggggccaggcccggagtcggagttggaggcattcctacttacggggttggagctgggggctttcccggctttggtgtcggagtcggagccgaagctcaggcagcagctgccgccaaggctgccaagtacgggttagttcctggtgtcggcgtggctcctggagttggcgtggctcctggtgtcggtgtggctcctggagttggcttggctcctggagttggcgtggctcctggagttggtgtggctcctggcgttggcgtggctcccggcattggccctggtggagttgcagctgcagcaaaatccgctgccaaggtggctgccaaagcccagctccgagctgcagctgggcttggtgctggcatccctggacttggagttggtgtcggcgtccctggacttggagttggtgctggtgttcctggacttggagttggtgctggtgttcctggcttcggggcagtacctggagccctggctgccgctaaagcagccaaatatggagcagcagtgcctggggtccttggagggctcggggctctcggtggagtaggcatcccaggcggtgtggtgggagccggacccgccgccgccgctgccgcagccaaagctgctgccaaagccgcccagtttggcctagtgggagccgctgggctcggaggactcggagtcggagggcttggagttccaggtgttgggggccttggaggtatacctccagctgcagccgctaaagcagctaaatacggtgctgctggccttggaggtgtcctagggggtgccgggcagttcccacttggaggagtggcagcaagacctggcttcggattgtctcccattttcccaggtggggcctgcctggggaaagcttgtggccggaagagaaaatgagcttcctaggacccctgactcacgacctcatcaacgttggtgctactgcttggtggagaatgtaaaccctttgtaaccccatcccatgcccctccgactccccaccccaggagggaacgggcaggccgggcggccttgcagatccacagggcaaggaaacaagaggggagcggccaagtgccccgaccaggaggccccctacttcagaggcaagggccatgtggtcctggccccccaccccatcccttcccacctaggagctccccctccacacagcctccatctccaggggaacttggtgctacacgctggtgctcttatcttcctggggggagggaggagggaagggtggcccctcggggaaccccctacctggggctcctctaaagatggtgcagacacttcctgggcagtcccagctccccctgcccaccaggacccaccgttggctgccatccagttggtacccaagcacctgaagcctcaaagctggattcgctctagcatccctcctctcctgggtccacttggccgtctcctccccaccgatcgctgttccccacatctggggcgcttttgggttggaaaaccaccccacactgggaatagccaccttgcccttgtagaatccatccgcccatccgtccattcatccatcggtccgtccatccatgtccccagttgaccgcccggcaccactagctggctgggtgcacccaccatcaacctggttgacctgtcatggccgcctgtgccctgcctccacccccatcctacactcccccagggcgtgcggggctgtgcagactggggtgccaggcatctcctccccacccggggtgtccccacatgcagtactgtataccccccatccctccctcggtccactgaacttcagagcagttcccattcctgccccgcccatctttttgtgtctcgctgtgatagatcaataaatattttattttttgtcctgg

SEQ ID NO: 129349 - DNA, 3361 bp, Homo sapiens
  Payload ID: 5301
  Gene Symbol: ELN
  Gene Name: elastin
  Uniprot ID: P15502
  ENST ID: ENST00000357036
  CDS Start-End: 19-2154
ggggcatttctccccgagatggcgggtctgacggcggcggccccgcggcccggagtcctcctgctcctgctgtccatcctccacccctctcggcctggaggggtccctggggccattcctggtggagttcctggaggagtcttttatccaggggctggtctcggagcccttggaggaggagcgctggggcctggaggcaaacctcttaagccagttcccggagggcttgcgggtgctggccttggggcagggctcggcgccttccccgcagttacctttccgggggctctggtgcctggtggagtggctgacgctgctgcagcctataaagctgctaaggctggcgctgggcttggtggtgtcccaggagttggtggcttaggagtgtctgcagccccttctgtgccaggtgcggtggttcctcagcctggagccggagtgaagcctgggaaagtgccgggtgtggggctgccaggtgtatacccaggtggcgtgctcccaggagctcggttccccggtgtgggggtgctccctggagttcccactggagcaggagttaagcccaaggctccaggtgtaggtggagcttttgctggaatcccaggagttggaccctttgggggaccgcaacctggagtcccactggggtatcccatcaaggcccccaagctgcctggtggctatggactgccctacaccacagggaaactgccctatggctatgggcccggaggagtggctggtgcagcgggcaaggctggttacccaacagggacaggggttggcccccaggcagcagcagcagcggcagctaaagcagcagcaaagttcggtgctggagcagccggagtcctccctggtgttggaggggctggtgttcctggcgtgcctggggcaattcctggaattggaggcatcgcaggcgttgggactccagctgcagctgcagctgcagcagcagccgctaaggcagccaagtatggagctgctgcaggcttagtgcctggtgggccaggctttggcccgggagtagttggtgtcccaggagctggcgttccaggtgttggtgtcccaggagctgggattccagttgtcccaggtgctgggatcccaggtgctgcggttccaggggttgtgtcaccagaagcagctgctaaggcagctgcaaaggcagccaaatacggggccaggcccggagtcggagttggaggcattcctacttacggggttggagctgggggctttcccggctttggtgtcggagtcggaggtatccctggagtcgcaggtgtccctggtgtcggaggtgttcccggagtcggaggtgtcccgggagttggcatttcccccgaagctcaggcagcagctgccgccaaggctgccaagtacggagtggggaccccagcagctgcagctgctaaagcagccgccaaagccgcccagtttgggttagttcctggtgtcggcgtggctcctggagttggcgtggctcctggtgtcggtgtggctcctggagttggcttggctcctggagttggcgtggctcctggagttggtgtggctcctggcgttggcgtggctcccggcattggccctggtggagttgcagctgcagcaaaatccgctgccaaggtggctgccaaagcccagctccgagctgcagctgggcttggtgctggcatccctggacttggagttggtgtcggcgtccctggacttggagttggtgctggtgttcctggacttggagttggtgctggtgttcctggcttcggggcagtacctggagccctggctgccgctaaagcagccaaatatggagcagcagtgcctggggtccttggagggctcggggctctcggtggagtaggcatcccaggcggtgtggtgggagccggacccgccgccgccgctgccgcagccaaagctgctgccaaagccgcccagtttggcctagtgggagccgctgggctcggaggactcggagtcggagggcttggagttccaggtgttgggggccttggaggtatacctccagctgcagccgctaaagcagctaaatacggagtggcagcaagacctggcttcggattgtctcccattttcccaggtggggcctgcctggggaaagcttgtggccggaagagaaaatgagcttcctaggacccctgactcacgacctcatcaacgttggtgctactgcttggtggagaatgtaaaccctttgtaaccccatcccatgcccctccgactccccaccccaggagggaacgggcaggccgggcggccttgcagatccacagggcaaggaaacaagaggggagcggccaagtgccccgaccaggaggccccctacttcagaggcaagggccatgtggtcctggccccccaccccatcccttcccacctaggagctccccctccacacagcctccatctccaggggaacttggtgctacacgctggtgctcttatcttcctggggggagggaggagggaagggtggcccctcggggaaccccctacctggggctcctctaaagatggtgcagacacttcctgggcagtcccagctccccctgcccaccaggacccaccgttggctgccatccagttggtacccaagcacctgaagcctcaaagctggattcgctctagcatccctcctctcctgggtccacttggccgtctcctccccaccgatcgctgttccccacatctggggcgcttttgggttggaaaaccaccccacactgggaatagccaccttgcccttgtagaatccatccgcccatccgtccattcatccatcggtccgtccatccatgtccccagttgaccgcccggcaccactagctggctgggtgcacccaccatcaacctggttgacctgtcatggccgcctgtgccctgcctccacccccatcctacactcccccagggcgtgcggggctgtgcagactggggtgccaggcatctcctccccacccggggtgtccccacatgcagtactgtataccccccatccctccctcggtccactgaacttcagagcagttcccattcctgccccgcccatctttttgtgtctcgctgtgatagatcaataaatattttattttttgtcctggatatttggggattatttttgattgttgatattctcttttggttttattgttgtggttcattgaaaaaaaaagataatttttttttctgatccggggagctgtatccccagtagaaaaaacattttaatcactctaatataactctggatgaaacacacctttttttttaataagaaaagagaattaactgcttcagaaatgactaataaatgaaaaacctttaaaggaaa

SEQ ID NO: 129350 - DNA, 3967 bp, Homo sapiens
  Payload ID: 5301
  Gene Symbol: ELN
  Gene Name: elastin
  ENST ID: ENST00000358929
  CDS Start-End: 400-2760
cctcccttctgcttcctctcccgagggctgtcctggcagaggcccccctcgctctttctggcgggaacagggccagcagcgaaagaacagtcgcagagggaaagcgggaaagagatgggggaaagtgtgtgtgtgtgagtgtgtgcttgtgtgcatgtgtgtgcgtgtgtgtgtcaaggaaaaaagctcgcagtccagcagcccgggcctgggaggcttgtgagccgggcctttcgtaattgtcccctccccgcggccccctcccccaggcctcccccctctcccgccctcccgcccgccctctctccctccctctttccctcacagccgacgaggcaacaattaggctttggggataaaacgaggtgcggagagcgggctggggcatttctccccgagatggcgggtctgacggcggcggccccgcggcccggagtcctcctgctcctgctgtccatcctccacccctctcggcctggaggggtccctggggccattcctggtggagttcctggaggagtcttttatccaggggctggtctcggagcccttggaggaggagcgctggggcctggaggcaaacctcttaagccagttcccggagggcttgcgggtgctggccttggggcagggctcggcgccttccccgcagttacctttccgggggctctggtgcctggtggagtggctgacgctgctgcagcctataaagctgctaaggctggcgctgggcttggtggtgtcccaggagttggtggcttaggagtgtctgcaggtgcggtggttcctcagcctggagccggagtgaagcctgggaaagtgccgggtgtggggctgccaggtgtatacccaggtggcgtgctcccaggagctcggttccccggtgtgggggtgctccctggagttcccactggagcaggagttaagcccaaggctccaggtgtaggtggagcttttgctggaatcccaggagttggaccctttgggggaccgcaacctggagtcccactggggtatcccatcaaggcccccaagctgcctggtggctatggactgccctacaccacagggaaactgccctatggctatgggcccggaggagtggctggtgcagcgggcaaggctggttacccaacagggacaggggttggcccccaggcagcagcagcagcggcagctaaagcagcagcaaagttcggtgctggagcagccggagtcctccctggtgttggaggggctggtgttcctggcgtgcctggggcaattcctggaattggaggcatcgcaggcgttgggactccagctgcagctgcagctgcagcagcagccgctaaggcagccaagtatggagctgctgcaggcttagtgcctggtgggccaggctttggcccgggagtagttggtgtcccaggagctggcgttccaggtgttggtgtcccaggagctgggattccagttgtcccaggtgctgggatcccaggtgctgcggttccaggggttgtgtcaccagaagcagctgctaaggcagctgcaaaggcagccaaatacggggccaggcccggagtcggagttggaggcattcctacttacggggttggagctgggggctttcccggctttggtgtcggagtcggaggtatccctggagtcgcaggtgtccctggtgtcggaggtgttcccggagtcggaggtgtcccgggagttggcatttcccccgaagctcaggcagcagctgccgccaaggctgccaagtacggtgctgcaggagcaggagtgctgggtgggctagtgccaggtgccccaggcgcagtcccaggtgtgccgggcacgggaggagtgccaggagtggggaccccagcagctgcagctgctaaagcagccgccaaagccgcccagtttgggttagttcctggtgtcggcgtggctcctggagttggcgtggctcctggtgtcggtgtggctcctggagttggcttggctcctggagttggcgtggctcctggagttggtgtggctcctggcgttggcgtggctcccggcattggccctggtggagttgcagctgcagcaaaatccgctgccaaggtggctgccaaagcccagctccgagctgcagctgggcttggtgctggcatccctggacttggagttggtgtcggcgtccctggacttggagttggtgctggtgttcctggacttggagttggtgctggtgttcctggcttcggggcaggtgcagatgagggagttaggcggagcctgtcccctgagctcagggaaggagatccctcctcctctcagcacctccccagcaccccctcatcacccagggtacctggagccctggctgccgctaaagcagccaaatatggagcagcagtgcctggggtccttggagggctcggggctctcggtggagtaggcatcccaggcggtgtggtgggagccggacccgccgccgccgctgccgcagccaaagctgctgccaaagccgcccagtttggcctagtgggagccgctgggctcggaggactcggagtcggagggcttggagttccaggtgttgggggccttggaggtatacctccagctgcagccgctaaagcagctaaatacggtgctgctggccttggaggtgtcctagggggtgccgggcagttcccacttggaggagtggcagcaagacctggcttcggattgtctcccattttcccaggtggggcctgcctggggaaagcttgtggccggaagagaaaatgagcttcctaggacccctgactcacgacctcatcaacgttggtgctactgcttggtggagaatgtaaaccctttgtaaccccatcccatgcccctccgactccccaccccaggagggaacgggcaggccgggcggccttgcagatccacagggcaaggaaacaagaggggagcggccaagtgccccgaccaggaggccccctacttcagaggcaagggccatgtggtcctggccccccaccccatcccttcccacctaggagctccccctccacacagcctccatctccaggggaacttggtgctacacgctggtgctcttatcttcctggggggagggaggagggaagggtggcccctcggggaaccccctacctggggctcctctaaagatggtgcagacacttcctgggcagtcccagctccccctgcccaccaggacccaccgttggctgccatccagttggtacccaagcacctgaagcctcaaagctggattcgctctagcatccctcctctcctgggtccacttggccgtctcctccccaccgatcgctgttccccacatctggggcgcttttgggttggaaaaccaccccacactgggaatagccaccttgcccttgtagaatccatccgcccatccgtccattcatccatcggtccgtccatccatgtccccagttgaccgcccggcaccactagctggctgggtgcacccaccatcaacctggttgacctgtcatggccgcctgtgccctgcctccacccccatcctacactcccccagggcgtgcggggctgtgcagactggggtgccaggcatctcctccccacccggggtgtccccacatgcagtactgtataccccccatccctccctcggtccactgaacttcagagcagttcccattcctgccccgcccatctttttgtgtctcgctgtgatagatcaataaatattttattttttgtcctggatatttggggattatttttgattgttgatattctcttttggttttattgttgtggttcattgaaaaaaaaagataatttttttttctgatccggggagctgtatccccagtagaaaaaacattttaatcactctaatataactctggatgaaacacacctttttttttaataagaaaagagaattaactgcttcagaaatgactaataaatgaaaaacctttaaaggaaa

SEQ ID NO: 129351 - DNA, 2703 bp, Homo sapiens
  Payload ID: 5301
  Gene Symbol: ELN
  Gene Name: elastin
  Uniprot ID: P15502
  ENST ID: ENST00000380553
  CDS Start-End: 14-1726
atttctccccgagatggcgggtctgacggcggcggccccgcggcccggagtcctcctgctcctgctgtccatcctccacccctctcggcctggaggggtccctggggccattcctggtggagttcctggaggagtcttttatccaggggctggtctcggagcccttggaggaggagcgctggggcctggaggcaaacctcttaagccagttcccggagggcttgcgggtgctggccttggggcaggtgtaggtggagcttttgctggaatcccaggagttggaccctttgggggaccgcaacctggagtcccactggggtatcccatcaaggcccccaagctgcctggctatgggcccggaggagtggctggtgcagcgggcaaggctggttacccaacagggacaggggttggcccccaggcagcagcagcagcggcagctaaagcagcagcaaagttcggtgctggagcagccggagtcctccctggtgttggaggggctggtgttcctggcgtgcctggggcaattcctggaattggaggcatcgcaggcgttgggactccagctgcagctgcagctgcagcagcagccgctaaggcagccaagtatggagctgctgcaggcttagtgcctggtgggccaggctttggcccgggagtagttggtgtcccaggagctggcgttccaggtgttggtgtcccaggagctgggattccagttgtcccaggtgctgggatcccaggtgctgcggttccaggggttgtgtcaccagaagcagctgctaaggcagctgcaaaggcagccaaatacggggccaggcccggagtcggagttggaggcattcctacttacggggttggagctgggggctttcccggctttggtgtcggagtcggaggtatccctggagtcgcaggtgtccctggtgtcggaggtgttcccggagtcggaggtgtcccgggagttggcatttcccccgaagctcaggcagcagctgccgccaaggctgccaagtacgggttagttcctggtgtcggcgtggctcctggagttggcgtggctcctggtgtcggtgtggctcctggagttggcttggctcctggagttggcgtggctcctggagttggtgtggctcctggcgttggcgtggctcccggcattggccctggtggagttgcagctgcagcaaaatccgctgccaaggtggctgccaaagcccagctccgagctgcagctgggcttggtgctggcatccctggacttggagttggtgtcggcgtccctggacttggagttggtgctggtgttcctggacttggagttggtgctggtgttcctggcttcggggcagtacctggagccctggctgccgctaaagcagccaaatatggagcagcagtgcctggggtccttggagggctcggggctctcggtggagtaggcatcccaggcggtgtggtgggagccggacccgccgccgccgctgccgcagccaaagctgctgccaaagccgcccagtttggcctagtgggagccgctgggctcggaggactcggagtcggagggcttggagttccaggtgttgggggccttggaggtatacctccagctgcagccgctaaagcagctaaatacggagtggcagcaagacctggcttcggattgtctcccattttcccaggtggggcctgcctggggaaagcttgtggccggaagagaaaatgagcttcctaggacccctgactcacgacctcatcaacgttggtgctactgcttggtggagaatgtaaaccctttgtaaccccatcccatgcccctccgactccccaccccaggagggaacgggcaggccgggcggccttgcagatccacagggcaaggaaacaagaggggagcggccaagtgccccgaccaggaggccccctacttcagaggcaagggccatgtggtcctggccccccaccccatcccttcccacctaggagctccccctccacacagcctccatctccaggggaacttggtgctacacgctggtgctcttatcttcctggggggagggaggagggaagggtggcccctcggggaaccccctacctggggctcctctaaagatggtgcagacacttcctgggcagtcccagctccccctgcccaccaggacccaccgttggctgccatccagttggtacccaagcacctgaagcctcaaagctggattcgctctagcatccctcctctcctgggtccacttggccgtctcctccccaccgatcgctgttccccacatctggggcgcttttgggttggaaaaccaccccacactgggaatagccaccttgcccttgtagaatccatccgcccatccgtccattcatccatcggtccgtccatccatgtccccagttgaccgcccggcaccactagctggctgggtgcacccaccatcaacctggttgacctgtcatggccgcctgtgccctgcctccacccccatcctacactcccccagggcgtgcggggctgtgcagactggggtgccaggcatctcctccccacccggggtgtccccacatgcagtactgtataccccccatccctccctcggtccactgaacttcagagcagttcccattcctgccccgcccatctttttgtgtctcgctgtgatagatcaataaatattttattttttgtcctgg

SEQ ID NO: 129352 - DNA, 2240 bp, Homo sapiens
  Payload ID: 5301
  Gene Symbol: ELN
  Gene Name: elastin
  Uniprot ID: P15502
  ENST ID: ENST00000380562
  CDS Start-End: 48-2240
gggataaaacgaggtgcggagagcgggctggggcatttctccccgagatggcgggtctgacggcggcggccccgcggcccggagtcctcctgctcctgctgtccatcctccacccctctcggcctggaggggtccctggggccattcctggtggagttcctggaggagtcttttatccaggggctggtctcggagcccttggaggaggagcgctggggcctggaggcaaacctcttaagccagttcccggagggcttgcgggtgctggccttggggcagggctcggcgccttccccgcagttacctttccgggggctctggtgcctggtggagtggctgacgctgctgcagcctataaagctgctaaggctggcgctgggcttggtggtgtcccaggagttggtggcttaggagtgtctgcaggtgcggtggttcctcagcctggagccggagtgaagcctgggaaagtgccgggtgtggggctgccaggtgtatacccaggtggcgtgctcccaggagctcggttccccggtgtgggggtgctccctggagttcccactggagcaggagttaagcccaaggctccaggtgtaggtggagcttttgctggaatcccaggagttggaccctttgggggaccgcaacctggagtcccactggggtatcccatcaaggcccccaagctgcctggtggctatggactgccctacaccacagggaaactgccctatggctatgggcccggaggagtggctggtgcagcgggcaaggctggttacccaacagggacaggggttggcccccaggcagcagcagcagcggcagctaaagcagcagcaaagttcggtgctggagcagccggagtcctccctggtgttggaggggctggtgttcctggcgtgcctggggcaattcctggaattggaggcatcgcaggcgttgggactccagctgcagctgcagctgcagcagcagccgctaaggcagccaagtatggagctgctgcaggcttagtgcctggtgggccaggctttggcccgggagtagttggtgtcccaggagctggcgttccaggtgttggtgtcccaggagctgggattccagttgtcccaggtgctgggatcccaggtgctgcggttccaggggttgtgtcaccagaagcagctgctaaggcagctgcaaaggcagccaaatacggggccaggcccggagtcggagttggaggcattcctacttacggggttggagctgggggctttcccggctttggtgtcggagtcggaggtatccctggagtcgcaggtgtccctggtgtcggaggtgttcccggagtcggaggtgtcccgggagttggcatttcccccgaagctcaggcagcagctgccgccaaggctgccaagtacggagtggggaccccagcagctgcagctgctaaagcagccgccaaagccgcccagtttgctcttctcaatcttgcagggttagttcctggtgtcggcgtggctcctggagttggcgtggctcctggtgtcggtgtggctcctggagttggcttggctcctggagttggcgtggctcctggagttggtgtggctcctggcgttggcgtggctcccggcattggccctggtggagttgcagctgcagcaaaatccgctgccaaggtggctgccaaagcccagctccgagctgcagctgggcttggtgctggcatccctggacttggagttggtgtcggcgtccctggacttggagttggtgctggtgttcctggacttggagttggtgctggtgttcctggcttcggggcagtacctggagccctggctgccgctaaagcagccaaatatggagcagcagtgcctggggtccttggagggctcggggctctcggtggagtaggcatcccaggcggtgtggtgggagccggacccgccgccgccgctgccgcagccaaagctgctgccaaagccgcccagtttggcctagtgggagccgctgggctcggaggactcggagtcggagggcttggagttccaggtgttgggggccttggaggtatacctccagctgcagccgctaaagcagctaaatacggtgctgctggccttggaggtgtcctagggggtgccgggcagttcccacttggaggagtggcagcaagacctggcttcggattgtctcccattttcccaggtggggcctgcctggggaaagcttgtggccggaagagaaaatga

SEQ ID NO: 129353 - DNA, 3043 bp, Homo sapiens
  Payload ID: 5301
  Gene Symbol: ELN
  Gene Name: elastin
  Uniprot ID: P15502
  ENST ID: ENST00000380575
  CDS Start-End: 32-2065
cggagagcgggctggggcatttctccccgagatggcgggtctgacggcggcggccccgcggcccggagtcctcctgctcctgctgtccatcctccacccctctcggcctggaggggtccctggggccattcctggtggagttcctggaggagtcttttatccagcgctggggcctggaggcaaacctcttaagccagttcccggagggcttgcgggtgctggccttggggcagggctcggcgccttccccgcagttacctttccgggggctctggtgcctggtggagtggctgacgctgctgcagcctataaagctgctaaggctggcgctgggcttggtggtgtcccaggagttggtggcttaggagtgtctgcaggtgcggtggttcctcagcctggagccggagtgaagcctgggaaagtgccgggtgtggggctgccaggtgtatacccaggtggcgtgctcccaggagctcggttccccggtgtgggggtgctccctggagttcccactggagcaggagttaagcccaaggctccaggtgtaggtggagcttttgctggaatcccaggagttggaccctttgggggaccgcaacctggagtcccactggggtatcccatcaaggcccccaagctgcctggtggctatggactgccctacaccacagggaaactgccctatggctatgggcccggaggagtggctggtgcagcgggcaaggctggttacccaacagggacaggggttggcccccaggcagcagcagcagcggcagctaaagcagcagcaaagttcggtgctggagcagccggagtcctccctggtgttggaggggctggtgttcctggcgtgcctggggcaattcctggaattggaggcatcgcaggcgttgggactccagctgcagctgcagctgcagcagcagccgctaaggcagccaagtatggagctgctgcaggcttagtgcctggtgggccaggctttggcccgggagtagttggtgtcccaggagctggcgttccaggtgttggtgtcccaggagctgggattccagttgtcccaggtgctgggatcccaggtgctgcggttccaggggttgtgtcaccagaagcagctgctaaggcagctgcaaaggcagccaaatacggggccaggcccggagtcggagttggaggcattcctacttacggggttggagctgggggctttcccggctttggtgtcggagtcggaggtatccctggagtcgcaggtgtccctggtgtcggaggtgttcccggagtcggaggtgtcccgggagttggcatttcccccgaagctcaggcagcagctgccgccaaggctgccaagtacgggttagttcctggtgtcggcgtggctcctggagttggcgtggctcctggtgtcggtgtggctcctggagttggcttggctcctggagttggcgtggctcctggagttggtgtggctcctggcgttggcgtggctcccggcattggccctggtggagttgcagctgcagcaaaatccgctgccaaggtggctgccaaagcccagctccgagctgcagctgggcttggtgctggcatccctggacttggagttggtgtcggcgtccctggacttggagttggtgctggtgttcctggacttggagttggtgctggtgttcctggcttcggggcagtacctggagccctggctgccgctaaagcagccaaatatggagcagcagtgcctggggtccttggagggctcggggctctcggtggagtaggcatcccaggcggtgtggtgggagccggacccgccgccgccgctgccgcagccaaagctgctgccaaagccgcccagtttggcctagtgggagccgctgggctcggaggactcggagtcggagggcttggagttccaggtgttgggggccttggaggtatacctccagctgcagccgctaaagcagctaaatacggagtggcagcaagacctggcttcggattgtctcccattttcccaggtggggcctgcctggggaaagcttgtggccggaagagaaaatgagcttcctaggacccctgactcacgacctcatcaacgttggtgctactgcttggtggagaatgtaaaccctttgtaaccccatcccatgcccctccgactccccaccccaggagggaacgggcaggccgggcggccttgcagatccacagggcaaggaaacaagaggggagcggccaagtgccccgaccaggaggccccctacttcagaggcaagggccatgtggtcctggccccccaccccatcccttcccacctaggagctccccctccacacagcctccatctccaggggaacttggtgctacacgctggtgctcttatcttcctggggggagggaggagggaagggtggcccctcggggaaccccctacctggggctcctctaaagatggtgcagacacttcctgggcagtcccagctccccctgcccaccaggacccaccgttggctgccatccagttggtacccaagcacctgaagcctcaaagctggattcgctctagcatccctcctctcctgggtccacttggccgtctcctccccaccgatcgctgttccccacatctggggcgcttttgggttggaaaaccaccccacactgggaatagccaccttgcccttgtagaatccatccgcccatccgtccattcatccatcggtccgtccatccatgtccccagttgaccgcccggcaccactagctggctgggtgcacccaccatcaacctggttgacctgtcatggccgcctgtgccctgcctccacccccatcctacactcccccagggcgtgcggggctgtgcagactggggtgccaggcatctcctccccacccggggtgtccccacatgcagtactgtataccccccatccctccctcggtccactgaacttcagagcagttcccattcctgccccgcccatctttttgtgtctcgctgtgatagatcaataaatattttattttttgtcctgga

SEQ ID NO: 129354 - DNA, 3109 bp, Homo sapiens
  Payload ID: 5301
  Gene Symbol: ELN
  Gene Name: elastin
  Uniprot ID: P15502
  ENST ID: ENST00000380576
  CDS Start-End: 14-2131
atttctccccgagatggcgggtctgacggcggcggccccgcggcccggagtcctcctgctcctgctgtccatcctccacccctctcggcctggaggggtccctggggccattcctggtggagttcctggaggagtcttttatccaggggctggtctcggagcccttggaggaggagcgctggggcctggaggcaaacctcttaagccagttcccggagggcttgcgggtgctggccttggggcagggctcggcgccttccccgcagttacctttccgggggctctggtgcctggtggagtggctgacgctgctgcagcctataaagctgctaaggctggcgctgggcttggtggtgtcccaggagttggtggcttaggagtgtctgcaggtgcggtggttcctcagcctggagccggagtgaagcctgggaaagtgccgggtgtggggctgccaggtgtatacccaggtggcgtgctcccaggagctcggttccccggtgtgggggtgctccctggagttcccactggagcaggagttaagcccaaggctccaggtgtaggtggagcttttgctggaatcccaggagttggaccctttgggggaccgcaacctggagtcccactggggtatcccatcaaggcccccaagctgcctggtggctatggactgccctacaccacagggaaactgccctatggctatgggcccggaggagtggctggtgcagcgggcaaggctggttacccaacagggacaggggttggcccccaggcagcagcagcagcggcagctaaagcagcagcaaagttcggtgctggagcagccggagtcctccctggtgttggaggggctggtgttcctggcgtgcctggggcaattcctggaattggaggcatcgcaggcgttgggactccagctgcagctgcagctgcagcagcagccgctaaggcagccaagtatggagctgctgcaggcttagtgcctggtgggccaggctttggcccgggagtagttggtgtcccaggagctggcgttccaggtgttggtgtcccaggagctgggattccagttgtcccaggtgctgggatcccaggtgctgcggttccaggggttgtgtcaccagaagcagctgctaaggcagctgcaaaggcagccaaatacggggccaggcccggagtcggagttggaggcattcctacttacggggttggagctgggggctttcccggctttggtgtcggagtcggaggtatccctggagtcgcaggtgtccctggtgtcggaggtgttcccggagtcggaggtgtcccgggagttggcatttcccccgaagctcaggcagcagctgccgccaaggctgccaagtacgggttagttcctggtgtcggcgtggctcctggagttggcgtggctcctggtgtcggtgtggctcctggagttggcttggctcctggagttggcgtggctcctggagttggtgtggctcctggcgttggcgtggctcccggcattggccctggtggagttgcagctgcagcaaaatccgctgccaaggtggctgccaaagcccagctccgagctgcagctgggcttggtgctggcatccctggacttggagttggtgtcggcgtccctggacttggagttggtgctggtgttcctggacttggagttggtgctggtgttcctggcttcggggcagtacctggagccctggctgccgctaaagcagccaaatatggagcagcagtgcctggggtccttggagggctcggggctctcggtggagtaggcatcccaggcggtgtggtgggagccggacccgccgccgccgctgccgcagccaaagctgctgccaaagccgcccagtttggcctagtgggagccgctgggctcggaggactcggagtcggagggcttggagttccaggtgttgggggccttggaggtatacctccagctgcagccgctaaagcagctaaatacggtgctgctggccttggaggtgtcctagggggtgccgggcagttcccacttggaggagtggcagcaagacctggcttcggattgtctcccattttcccaggtggggcctgcctggggaaagcttgtggccggaagagaaaatgagcttcctaggacccctgactcacgacctcatcaacgttggtgctactgcttggtggagaatgtaaaccctttgtaaccccatcccatgcccctccgactccccaccccaggagggaacgggcaggccgggcggccttgcagatccacagggcaaggaaacaagaggggagcggccaagtgccccgaccaggaggccccctacttcagaggcaagggccatgtggtcctggccccccaccccatcccttcccacctaggagctccccctccacacagcctccatctccaggggaacttggtgctacacgctggtgctcttatcttcctggggggagggaggagggaagggtggcccctcggggaaccccctacctggggctcctctaaagatggtgcagacacttcctgggcagtcccagctccccctgcccaccaggacccaccgttggctgccatccagttggtacccaagcacctgaagcctcaaagctggattcgctctagcatccctcctctcctgggtccacttggccgtctcctccccaccgatcgctgttccccacatctggggcgcttttgggttggaaaaccaccccacactgggaatagccaccttgcccttgtagaatccatccgcccatccgtccattcatccatcggtccgtccatccatgtccccagttgaccgcccggcaccactagctggctgggtgcacccaccatcaacctggttgacctgtcatggccgcctgtgccctgcctccacccccatcctacactcccccagggcgtgcggggctgtgcagactggggtgccaggcatctcctccccacccggggtgtccccacatgcagtactgtataccccccatccctccctcggtccactgaacttcagagcagttcccattcctgccccgcccatctttttgtgtctcgctgtgatagatcaataaatattttattttttgtcctgga

SEQ ID NO: 129355 - DNA, 3214 bp, Homo sapiens
  Payload ID: 5301
  Gene Symbol: ELN
  Gene Name: elastin
  Uniprot ID: P15502
  ENST ID: ENST00000380584
  CDS Start-End: 31-2007
ggagagcgggctggggcatttctccccgagatggcgggtctgacggcggcggccccgcggcccggagtcctcctgctcctgctgtccatcctccacccctctcggcctggaggggtccctggggccattcctggtggagttcctggaggagtcttttatccaggggctggtctcggagcccttggaggaggagcgctggggcctggaggcaaacctcttaagccagttcccggagggcttgcgggtgctggccttggggcagggctcggcgccttccccgcagttacctttccgggggctctggtgcctggtggagtggctgacgctgctgcagcctataaagctgctaaggctggcgctgggcttggtggtgtcccaggagttggtggcttaggagtgtctgcaggtgcggtggttcctcagcctggagccggagtgaagcctgggaaagtgccgggtgtggggctgccaggtgtatacccaggtggcgtgctcccaggagctcggttccccggtgtgggggtgctccctggagttcccactggagcaggagttaagcccaaggctccaggtgtaggtggagcttttgctggaatcccaggagttggaccctttgggggaccgcaacctggagtcccactggggtatcccatcaaggcccccaagctgcctggctatgggcccggaggagtggctggtgcagcgggcaaggctggttacccaacagggacaggggttggcccccaggcagcagcagcagcggcagctaaagcagcagcaaagttcggtgctggagcagccggagtcctccctggtgttggaggggctggtgttcctggcgtgcctggggcaattcctggaattggaggcatcgcaggcgttgggactccagctgcagctgcagctgcagcagcagccgctaaggcagccaagtatggagctgctgcaggcttagtgcctggtgggccaggctttggcccgggagtagttggtgtcccaggagctggcgttccaggtgttggtgtcccaggagctgggattccagttgtcccaggtgctgggatcccaggtgctgcggttccaggggttgtgtcaccagaagcagctgctaaggcagctgcaaaggcagccaaatacggggccaggcccggagtcggagttggaggcattcctacttacggggttggagctgggggctttcccggctttggtgtcggagtcggaggtatccctggagtcgcaggtgtccctggtgtcggaggtgttcccggagtcggaggtgtcccgggagttggcatttcccccgaagctcaggcagcagctgccgccaaggctgccaagtacgggttagttcctggtgtcggcgtggctcctggagttggcgtggctcctggtgtcggtgtggctcctggagttggcttggctcctggagttggcgtggctcctggagttggtgtggctcctggcgttggcgtggctcccggcattggccctggtggagttgcaggagctgcagctgggcttggtgctggcatccctggacttggagttggtgtcggcgtccctggacttggagttggtgctggtgttcctggacttggagttggtgctggtgttcctggcttcggggcagtacctggagccctggctgccgctaaagcagccaaatatggagcagcagtgcctggggtccttggagggctcggggctctcggtggagtaggcatcccaggcggtgtggtgggagccggacccgccgccgccgctgccgcagccaaagctgctgccaaagccgcccagtttggcctagtgggagccgctgggctcggaggactcggagtcggagggcttggagttccaggtgttgggggccttggaggtatacctccagctgcagccgctaaagcagctaaatacggagtggcagcaagacctggcttcggattgtctcccattttcccaggtggggcctgcctggggaaagcttgtggccggaagagaaaatgagcttcctaggacccctgactcacgacctcatcaacgttggtgctactgcttggtggagaatgtaaaccctttgtaaccccatcccatgcccctccgactccccaccccaggagggaacgggcaggccgggcggccttgcagatccacagggcaaggaaacaagaggggagcggccaagtgccccgaccaggaggccccctacttcagaggcaagggccatgtggtcctggccccccaccccatcccttcccacctaggagctccccctccacacagcctccatctccaggggaacttggtgctacacgctggtgctcttatcttcctggggggagggaggagggaagggtggcccctcggggaaccccctacctggggctcctctaaagatggtgcagacacttcctgggcagtcccagctccccctgcccaccaggacccaccgttggctgccatccagttggtacccaagcacctgaagcctcaaagctggattcgctctagcatccctcctctcctgggtccacttggccgtctcctccccaccgatcgctgttccccacatctggggcgcttttgggttggaaaaccaccccacactgggaatagccaccttgcccttgtagaatccatccgcccatccgtccattcatccatcggtccgtccatccatgtccccagttgaccgcccggcaccactagctggctgggtgcacccaccatcaacctggttgacctgtcatggccgcctgtgccctgcctccacccccatcctacactcccccagggcgtgcggggctgtgcagactggggtgccaggcatctcctccccacccggggtgtccccacatgcagtactgtataccccccatccctccctcggtccactgaacttcagagcagttcccattcctgccccgcccatctttttgtgtctcgctgtgatagatcaataaatattttattttttgtcctggatatttggggattatttttgattgttgatattctcttttggttttattgttgtggttcattgaaaaaaaaagataatttttttttctgatccggggagctgtatccccagtagaaaaaacattttaatcactctaatataactctggatgaaacacacctttttttttaataagaaaagagaattaactgcttcagaaatgactaataaatgaaaaacctttaaaggaaa

SEQ ID NO: 129356 - DNA, 563 bp, Homo sapiens
  Payload ID: 5301
  Gene Symbol: ELN
  Gene Name: elastin
  ENST ID: ENST00000438880
  CDS Start-End: 60-563
aattaggctttggggataaaacgaggtgcggagagcgggctggggcatttctccccgagatggcgggtctgacggcggcggccccgcggcccggagtcctcctgctcctgctgtccatcctccacccctctcggcctggaggggtccctggggccattcctggtggagttcctggaggagtcttttatccaggggctggtctcggagcccttggaggaggagcgctggggcctggaggcaaacctcttaagccaggagttggaccctttgggggaccgcaacctggagtcccactggggtatcccatcaaggcccccaagctgcctggctatgggcccggaggagtggctggtgcagcgggcaaggctggttacccaacagggacaggggttggcccccaggcagcagcagcagcggcagctaaagcagcagcaaagttcggtgctggagcagccggagtcctccctggtgttggaggggctggtgttcctggcgtgcctggggcaattcctggaattggaggcatcgcaggcgttgggactccagctgcagctgcagctgca

SEQ ID NO: 129357 - DNA, 2583 bp, Homo sapiens
  Payload ID: 5301
  Gene Symbol: ELN
  Gene Name: elastin
  ENST ID: ENST00000445912
  CDS Start-End: 400-2520
cctcccttctgcttcctctcccgagggctgtcctggcagaggcccccctcgctctttctggcgggaacagggccagcagcgaaagaacagtcgcagagggaaagcgggaaagagatgggggaaagtgtgtgtgtgtgagtgtgtgcttgtgtgcatgtgtgtgcgtgtgtgtgtcaaggaaaaaagctcgcagtccagcagcccgggcctgggaggcttgtgagccgggcctttcgtaattgtcccctccccgcggccccctcccccaggcctcccccctctcccgccctcccgcccgccctctctccctccctctttccctcacagccgacgaggcaacaattaggctttggggataaaacgaggtgcggagagcgggctggggcatttctccccgagatggcgggtctgacggcggcggccccgcggcccggagtcctcctgctcctgctgtccatcctccacccctctcggcctggaggggtccctggggccattcctggtggagttcctggaggagtcttttatccaggggctggtctcggagcccttggaggaggagcgctggggcctggaggcaaacctcttaagccagttcccggagggcttgcgggtgctggccttggggcagggctcggcgccttccccgcagttacctttccgggggctctggtgcctggtggagtggctgacgctgctgcagcctataaagctgctaaggctggcgctgggcttggtggtgtcccaggagttggtggcttaggagtgtctgcaggtgcggtggttcctcagcctggagccggagtgaagcctgggaaagtgccgggtgtggggctgccaggtgtatacccaggtggcgtgctcccaggagctcggttccccggtgtgggggtgctccctggagttcccactggagcaggagttaagcccaaggctccaggtgtaggtggagcttttgctggaatcccaggagttggaccctttgggggaccgcaacctggagtcccactggggtatcccatcaaggcccccaagctgcctggtggctatggactgccctacaccacagggaaactgccctatggctatgggcccggaggagtggctggtgcagcgggcaaggctggttacccaacagggacaggggttggcccccaggcagcagcagcagcggcagctaaagcagcagcaaagttcggtgctggagcagccggagtcctccctggtgttggaggggctggtgttcctggcgtgcctggggcaattcctggaattggaggcatcgcaggcgttgggactccagctgcagctgcagctgcagcagcagccgctaaggcagccaagtatggagctgctgcaggcttagtgcctggtgggccaggctttggcccgggagtagttggtgtcccaggagctggcgttccaggtgttggtgtcccaggagctgggattccagttgtcccaggtgctgggatcccaggtgctgcggttccaggggttgtgtcaccagaagcagctgctaaggcagctgcaaaggcagccaaatacggggccaggcccggagtcggagttggaggcattcctacttacggggttggagctgggggctttcccggctttggtgtcggagtcggaggtatccctggagtcgcaggtgtccctggtgtcggaggtgttcccggagtcggaggtgtcccgggagttggcatttcccccgaagctcaggcagcagctgccgccaaggctgccaagtacggagtggggaccccagcagctgcagctgctaaagcagccgccaaagccgcccagtttgggttagttcctggtgtcggcgtggctcctggagttggcgtggctcctggtgtcggtgtggctcctggagttggcttggctcctggagttggcgtggctcctggagttggtgtggctcctggcgttggcgtggctcccggcattggccctggtggagttgcagctgcagcaaaatccgctgccaaggtggctgccaaagcccagctccgagctgcagctgggcttggtgctggcatccctggacttggagttggtgtcggcgtccctggacttggagttggtgctggtgttcctggacttggagttggtgctggtgttcctggcttcggggcagtacctggagccctggctgccgctaaagcagccaaatatggagcagcagtgcctggggtccttggagggctcggggctctcggtggagtaggcatcccaggcggtgtggtgggagccggacccgccgccgccgctgccgcagccaaagctgctgccaaagccgcccagtttggcctagtgggagccgctgggctcggaggactcggagtcggagggcttggagttccaggtgttgggggccttggaggtatacctccagctgcagccgctaaagcagctaaatacggagtggcagcaagacctggcttcggattgtctcccattttcccaggtggggcctgcctggggaaagcttgtggccggaagagaaaatgagcttcctaggacccctgactcacgacctcatcaacgttggtgctactgcttggtggagaatgt

SEQ ID NO: 129358 - DNA, 3298 bp, Homo sapiens
  Payload ID: 5301
  Gene Symbol: ELN
  Gene Name: elastin
  Uniprot ID: P15502
  ENST ID: ENST00000429192
  CDS Start-End: 16-2094
gcatttctccccgagatggcgggtctgacggcggcggccccgcggcccggagtcctcctgctcctgctgtccatcctccacccctctcggcctggaggggtccctggggccattcctggtggagttcctggaggagtcttttatccaggggctggtctcggagcccttggaggaggagcgctggggcctggaggcaaacctcttaagccagttcccggagggcttgcgggtgctggccttggggcagggctcggcgccttccccgcagttacctttccgggggctctggtgcctggtggagtggctgacgctgctgcagcctataaagctgctaaggctggcgctgggcttggtggtgtcccaggagttggtggcttaggagtgtctgcagccccttctgtgccaggtgcggtggttcctcagcctggagccggagtgaagcctgggaaagtgccgggtgtggggctgccaggtgtatacccaggtggcgtgctcccaggagctcggttccccggtgtgggggtgctccctggagttcccactggagcaggagttaagcccaaggctccaggtgtaggtggagcttttgctggaatcccaggagttggaccctttgggggaccgcaacctggagtcccactggggtatcccatcaaggcccccaagctgcctggtggctatggactgccctacaccacagggaaactgccctatggctatgggcccggaggagtggctggtgcagcgggcaaggctggttacccaacagggacaggggttggcccccaggcagcagcagcagcggcagctaaagcagcagcaaagttcggtgctggagcagccggagtcctccctggtgttggaggggctggtgttcctggcgtgcctggggcaattcctggaattggaggcatcgcaggcgttgggactccagctgcagctgcagctgcagcagcagccgctaaggcagccaagtatggagctgctgcaggcttagtgcctggtgggccaggctttggcccgggagtagttggtgtcccaggagctggcgttccaggtgttggtgtcccaggagctgggattccagttgtcccaggtgctgggatcccaggtgctgcggttccaggggttgtgtcaccagaagcagctgctaaggcagctgcaaaggcagccaaatacggggccaggcccggagtcggagttggaggcattcctacttacggggttggagctgggggctttcccggctttggtgtcggagtcggaggtatccctggagtcgcaggtgtccctggtgtcggaggtgttcccggagtcggaggtgtcccgggagttggcatttcccccgaagctcaggcagcagctgccgccaaggctgccaagtacgggttagttcctggtgtcggcgtggctcctggagttggcgtggctcctggtgtcggtgtggctcctggagttggcttggctcctggagttggcgtggctcctggagttggtgtggctcctggcgttggcgtggctcccggcattggccctggtggagttgcagctgcagcaaaatccgctgccaaggtggctgccaaagcccagctccgagctgcagctgggcttggtgctggcatccctggacttggagttggtgtcggcgtccctggacttggagttggtgctggtgttcctggacttggagttggtgctggtgttcctggcttcggggcagtacctggagccctggctgccgctaaagcagccaaatatggagcagcagtgcctggggtccttggagggctcggggctctcggtggagtaggcatcccaggcggtgtggtgggagccggacccgccgccgccgctgccgcagccaaagctgctgccaaagccgcccagtttggcctagtgggagccgctgggctcggaggactcggagtcggagggcttggagttccaggtgttgggggccttggaggtatacctccagctgcagccgctaaagcagctaaatacggagtggcagcaagacctggcttcggattgtctcccattttcccaggtggggcctgcctggggaaagcttgtggccggaagagaaaatgagcttcctaggacccctgactcacgacctcatcaacgttggtgctactgcttggtggagaatgtaaaccctttgtaaccccatcccatgcccctccgactccccaccccaggagggaacgggcaggccgggcggccttgcagatccacagggcaaggaaacaagaggggagcggccaagtgccccgaccaggaggccccctacttcagaggcaagggccatgtggtcctggccccccaccccatcccttcccacctaggagctccccctccacacagcctccatctccaggggaacttggtgctacacgctggtgctcttatcttcctggggggagggaggagggaagggtggcccctcggggaaccccctacctggggctcctctaaagatggtgcagacacttcctgggcagtcccagctccccctgcccaccaggacccaccgttggctgccatccagttggtacccaagcacctgaagcctcaaagctggattcgctctagcatccctcctctcctgggtccacttggccgtctcctccccaccgatcgctgttccccacatctggggcgcttttgggttggaaaaccaccccacactgggaatagccaccttgcccttgtagaatccatccgcccatccgtccattcatccatcggtccgtccatccatgtccccagttgaccgcccggcaccactagctggctgggtgcacccaccatcaacctggttgacctgtcatggccgcctgtgccctgcctccacccccatcctacactcccccagggcgtgcggggctgtgcagactggggtgccaggcatctcctccccacccggggtgtccccacatgcagtactgtataccccccatccctccctcggtccactgaacttcagagcagttcccattcctgccccgcccatctttttgtgtctcgctgtgatagatcaataaatattttattttttgtcctggatatttggggattatttttgattgttgatattctcttttggttttattgttgtggttcattgaaaaaaaaagataatttttttttctgatccggggagctgtatccccagtagaaaaaacattttaatcactctaatataactctggatgaaacacacctttttttttaataagaaaagagaattaactgcttcagaaatgactaataaatgaaaaacctttaaagg

SEQ ID NO: 129359 - DNA, 3139 bp, Homo sapiens
  Payload ID: 5301
  Gene Symbol: ELN
  Gene Name: elastin
  ENST ID: ENST00000414324
  CDS Start-End: 60-2162
aattaggctttggggataaaacgaggtgcggagagcgggctggggcatttctccccgagatggcgggtctgacggcggcggccccgcggcccggagtcctcctgctcctgctgtccatcctccacccctctcggcctggaggggtccctggggccattcctggtggagttcctggaggagtcttttatccagcgctggggcctggaggcaaacctcttaagccagttcccggagggcttgcgggtgctggccttggggcagggctcggcgccttccccgcagttacctttccgggggctctggtgcctggtggagtggctgacgctgctgcagcctataaagctgctaaggctggcgctgggcttggtggtgtcccaggagttggtggcttaggagtgtctgcagccccttctgtgccaggtgcggtggttcctcagcctggagccggagtgaagcctgggaaagtgccgggtgtggggctgccaggtgtatacccaggtggcgtgctcccaggagctcggttccccggtgtgggggtgctccctggagttcccactggagcaggagttaagcccaaggctccaggtgtaggtggagcttttgctggaatcccaggagttggaccctttgggggaccgcaacctggagtcccactggggtatcccatcaaggcccccaagctgcctggtggctatggactgccctacaccacagggaaactgccctatggctatgggcccggaggagtggctggtgcagcgggcaaggctggttacccaacagggacaggggttggcccccaggcagcagcagcagcggcagctaaagcagcagcaaagttcggtgctggagcagccggagtcctccctggtgttggaggggctggtgttcctggcgtgcctggggcaattcctggaattggaggcatcgcaggcgttgggactccagctgcagctgcagctgcagcagcagccgctaaggcagccaagtatggagctgctgcaggcttagtgcctggtgggccaggctttggcccgggagtagttggtgtcccaggagctggcgttccaggtgttggtgtcccaggagctgggattccagttgtcccaggtgctgggatcccaggtgctgcggttccaggggttgtgtcaccagaagcagctgctaaggcagctgcaaaggcagccaaatacggggccaggcccggagtcggagttggaggcattcctacttacggggttggagctgggggctttcccggctttggtgtcggagtcggaggtatccctggagtcgcaggtgtccctggtgtcggaggtgttcccggagtcggaggtgtcccgggagttggcatttcccccgaagctcaggcagcagctgccgccaaggctgccaagtacgggttagttcctggtgtcggcgtggctcctggagttggcgtggctcctggtgtcggtgtggctcctggagttggcttggctcctggagttggcgtggctcctggagttggtgtggctcctggcgttggcgtggctcccggcattggccctggtggagttgcagctgcagcaaaatccgctgccaaggtggctgccaaagcccagctccgagctgcagctgggcttggtgctggcatccctggacttggagttggtgtcggcgtccctggacttggagttggtgctggtgttcctggacttggagttggtgctggtgttcctggcttcggggcagtacctggagccctggctgccgctaaagcagccaaatatggagcagcagtgcctggggtccttggagggctcggggctctcggtggagtaggcatcccaggcggtgtggtgggagccggacccgccgccgccgctgccgcagccaaagctgctgccaaagccgcccagtttggcctagtgggagccgctgggctcggaggactcggagtcggagggcttggagttccaggtgttgggggccttggaggtatacctccagctgcagccgctaaagcagctaaatacggtgctgctggccttggaggtgtcctagggggtgccgggcagttcccacttggaggagtggcagcaagacctggcttcggattgtctcccattttcccaggtggggcctgcctggggaaagcttgtggccggaagagaaaatgagcttcctaggacccctgactcacgacctcatcaacgttggtgctactgcttggtggagaatgtaaaccctttgtaaccccatcccatgcccctccgactccccaccccaggagggaacgggcaggccgggcggccttgcagatccacagggcaaggaaacaagaggggagcggccaagtgccccgaccaggaggccccctacttcagaggcaagggccatgtggtcctggccccccaccccatcccttcccacctaggagctccccctccacacagcctccatctccaggggaacttggtgctacacgctggtgctcttatcttcctggggggagggaggagggaagggtggcccctcggggaaccccctacctggggctcctctaaagatggtgcagacacttcctgggcagtcccagctccccctgcccaccaggacccaccgttggctgccatccagttggtacccaagcacctgaagcctcaaagctggattcgctctagcatccctcctctcctgggtccacttggccgtctcctccccaccgatcgctgttccccacatctggggcgcttttgggttggaaaaccaccccacactgggaatagccaccttgcccttgtagaatccatccgcccatccgtccattcatccatcggtccgtccatccatgtccccagttgaccgcccggcaccactagctggctgggtgcacccaccatcaacctggttgacctgtcatggccgcctgtgccctgcctccacccccatcctacactcccccagggcgtgcggggctgtgcagactggggtgccaggcatctcctccccacccggggtgtccccacatgcagtactgtataccccccatccctccctcggtccactgaacttcagagcagttcccattcctgccccgcccatctttttgtgtctcgctgtgatagatcaataaatattttattttttgtcctgg

SEQ ID NO: 129360 - DNA, 542 bp, Homo sapiens
  Payload ID: 5301
  Gene Symbol: ELN
  Gene Name: elastin
  ENST ID: ENST00000431562
  CDS Start-End: 88-542
ctctttccctcacagccgacgaggcaacaattaggctttggggataaaacgaggtgcggagagcgggctggggcatttctccccgagatggcgggtctgacggcggcggccccgcggcccggagtcctcctgctcctgctgtccatcctccacccctctcggcctggaggggtccctggggccattcctggtggagttcctggaggagtcttttatccagcgctggggcctggaggcaaacctcttaagccagggctcggcgccttccccgcagttacctttccgggggctctggtgcctggtggagtggctgacgctgctgcagcctataaagctgctaaggctggcgctgggcttggtggtgtcccaggagttggtggcttaggagtgtctgcaggtgcggtggttcctcagcctggagccggagtgaagcctgggaaagtgccgggtgtggggctgccaggtgtatacccaggtggcgtgctcccaggagctcggttccccggtgtgggggtgctccctggagttcccactggagcagg

SEQ ID NO: 129361 - DNA, 512 bp, Homo sapiens
  Payload ID: 5301
  Gene Symbol: ELN
  Gene Name: elastin
  ENST ID: ENST00000428787
  CDS Start-End: 13-512
tttctccccgagatggcgggtctgacggcggcggccccgcggcccggagtcctcctgctcctgctgtccatcctccacccctctcggcctggaggggtccctggggccattcctggtggagttcctggaggagtcttttatccaggggctggtctcggagcccttggaggaggagcgctggggcctggaggcaaacctcttaagccagttcccggagggcttgcgggtgctggccttggggcagggctcggcgccttccccgcagttacctttccgggggctctggtgcctggtggagtggctgacgctgctgcagcctataaagctgctaaggctggagttggaccctttgggggaccgcaacctggagtcccactggggtatcccatcaaggcccccaagctgcctggtggctatggactgccctacaccacagggaaactgccctatggctatgggcccggaggagtggctggtgcagcgggcaaggctggttacccaacagggacagg

SEQ ID NO: 129362 - DNA, 3147 bp, Homo sapiens
  Payload ID: 5301
  Gene Symbol: ELN
  Gene Name: elastin
  ENST ID: ENST00000458204
  CDS Start-End: 26-2170
gcgggctggggcatttctccccgagatggcgggtctgacggcggcggccccgcggcccggagtcctcctgctcctgctgtccatcctccacccctctcggcctggaggggtccctggggccattcctggtggagttcctggaggagtcttttatccagcgctggggcctggaggcaaacctcttaagccagttcccggagggcttgcgggtgctggccttggggcagggctcggcgccttccccgcagttacctttccgggggctctggtgcctggtggagtggctgacgctgctgcagcctataaagctgctaaggctggcgctgggcttggtggtgtcccaggagttggtggcttaggagtgtctgcaggtgcggtggttcctcagcctggagccggagtgaagcctgggaaagtgccgggtgtggggctgccaggtgtatacccaggtggcgtgctcccaggagctcggttccccggtgtgggggtgctccctggagttcccactggagcaggagttaagcccaaggctccaggtgtaggtggagcttttgctggaatcccaggagttggaccctttgggggaccgcaacctggagtcccactggggtatcccatcaaggcccccaagctgcctggtggctatggactgccctacaccacagggaaactgccctatggctatgggcccggaggagtggctggtgcagcgggcaaggctggttacccaacagggacaggggttggcccccaggcagcagcagcagcggcagctaaagcagcagcaaagttcggtgctggagcagccggagtcctccctggtgttggaggggctggtgttcctggcgtgcctggggcaattcctggaattggaggcatcgcaggcgttgggactccagctgcagctgcagctgcagcagcagccgctaaggcagccaagtatggagctgctgcaggcttagtgcctggtgggccaggctttggcccgggagtagttggtgtcccaggagctggcgttccaggtgttggtgtcccaggagctgggattccagttgtcccaggtgctgggatcccaggtgctgcggttccaggggttgtgtcaccagaagcagctgctaaggcagctgcaaaggcagccaaatacggggccaggcccggagtcggagttggaggcattcctacttacggggttggagctgggggctttcccggctttggtgtcggagtcggaggtatccctggagtcgcaggtgtccctggtgtcggaggtgttcccggagtcggaggtgtcccgggagttggcatttcccccgaagctcaggcagcagctgccgccaaggctgccaagtacggagtggggaccccagcagctgcagctgctaaagcagccgccaaagccgcccagtttgggttagttcctggtgtcggcgtggctcctggagttggcgtggctcctggtgtcggtgtggctcctggagttggcttggctcctggagttggcgtggctcctggagttggtgtggctcctggcgttggcgtggctcccggcattggccctggtggagttgcagctgcagcaaaatccgctgccaaggtggctgccaaagcccagctccgagctgcagctgggcttggtgctggcatccctggacttggagttggtgtcggcgtccctggacttggagttggtgctggtgttcctggacttggagttggtgctggtgttcctggcttcggggcagtacctggagccctggctgccgctaaagcagccaaatatggagcagcagtgcctggggtccttggagggctcggggctctcggtggagtaggcatcccaggcggtgtggtgggagccggacccgccgccgccgctgccgcagccaaagctgctgccaaagccgcccagtttggcctagtgggagccgctgggctcggaggactcggagtcggagggcttggagttccaggtgttgggggccttggaggtatacctccagctgcagccgctaaagcagctaaatacggtgctgctggccttggaggtgtcctagggggtgccgggcagttcccacttggaggagtggcagcaagacctggcttcggattgtctcccattttcccaggtggggcctgcctggggaaagcttgtggccggaagagaaaatgagcttcctaggacccctgactcacgacctcatcaacgttggtgctactgcttggtggagaatgtaaaccctttgtaaccccatcccatgcccctccgactccccaccccaggagggaacgggcaggccgggcggccttgcagatccacagggcaaggaaacaagaggggagcggccaagtgccccgaccaggaggccccctacttcagaggcaagggccatgtggtcctggccccccaccccatcccttcccacctaggagctccccctccacacagcctccatctccaggggaacttggtgctacacgctggtgctcttatcttcctggggggagggaggagggaagggtggcccctcggggaaccccctacctggggctcctctaaagatggtgcagacacttcctgggcagtcccagctccccctgcccaccaggacccaccgttggctgccatccagttggtacccaagcacctgaagcctcaaagctggattcgctctagcatccctcctctcctgggtccacttggccgtctcctccccaccgatcgctgttccccacatctggggcgcttttgggttggaaaaccaccccacactgggaatagccaccttgcccttgtagaatccatccgcccatccgtccattcatccatcggtccgtccatccatgtccccagttgaccgcccggcaccactagctggctgggtgcacccaccatcaacctggttgacctgtcatggccgcctgtgccctgcctccacccccatcctacactcccccagggcgtgcggggctgtgcagactggggtgccaggcatctcctccccacccggggtgtccccacatgcagtactgtataccccccatccctccctcggtccactgaacttcagagcagttcccattcctgccccgcccatctttttgtgtctcgctgtgatagatcaataaatattttattttttgtcctgg

SEQ ID NO: 129363 - DNA, 542 bp, Homo sapiens
  Payload ID: 5301
  Gene Symbol: ELN
  Gene Name: elastin
  ENST ID: ENST00000442310
  CDS Start-End: 14-542
atttctccccgagatggcgggtctgacggcggcggccccgcggcccggagtcctcctgctcctgctgtccatcctccacccctctcggcctggaggggtccctggggccattcctggtggagttcctggaggagtcttttatccaggggctggtctcggagcccttggaggaggagcgctggggcctggaggcaaacctcttaagccagttcccggagggcttgcgggtgctggccttggggcagggctcggcgccttccccgcagttacctttccgggggctctggtgcctggtggagtggctgacgctgctgcagcctataaagctgctaaggctggcgctgggcttggtggtgtcccaggagttggtggcttaggagtgtctgcaggtgcggtggttcctcagcctggagccggagtgaagcctgggaaagtgccgggtgtaggtggagcttttgctggaatcccaggagttggaccctttgggggaccgcaacctggagtcccactggggtatcccatcaaggcccccaagctgcctg

SEQ ID NO: 129364 - DNA, 714 bp, Homo sapiens
  Payload ID: 5301
  Gene Symbol: ELN
  Gene Name: elastin
  ENST ID: ENST00000416107
  CDS Start-End: 14-220
atttctccccgagatggcgggtctgacggcggcggccccgcggcccggagtcctcctgctcctgctgtccatcctccacccctctcggcctggaggggtccctggggccattcctggtggagttcctggaggagtcttttatccaggtaacgtacatgaaacttccacacacccaggtcatgcggatgatgctgatgtccataatagatgcacattttgacactacagaaggtaggaacattgacacgcctaccagaagtcacacccacttaaaaatgcaattaacaagacattgatttacagctattaagagcatacaggctggacatggtggcttatgcctgtaatctcaacactctgggaggcagagaaacaaggattgcttgaggccaggagtttcagaccagcctggacaacatagggctggtctcggagcccttggaggaggagcgctggggcctggaggcaaacctcttaagccagttcccggagggcttgcgggtgctggccttggggcagggctcggcgccttccccgcagttacctttccgggggctctggtgcctggtggagtggctgacgctgctgcagcctataaagctgctaaggctggcgctgggcttggtggtgtcccaggagttggtggcttaggagtgtctgcaggtgcggtggttcctcagcctggagccggagtgaagcctgggaaagtgccgg

SEQ ID NO: 129365 - DNA, 962 bp, Homo sapiens
  Payload ID: 5301
  Gene Symbol: ELN
  Gene Name: elastin
  ENST ID: ENST00000438906
  CDS Start-End: 80-962
ctcacagccgacgaggcaacaattaggctttggggataaaacgaggtgcggagagcgggctggggcatttctccccgagatggcgggtctgacggcggcggccccgcggcccggagtcctcctgctcctgctgtccatcctccacccctctcggcctggaggggtccctggggccattcctggtggagttcctggaggagtcttttatccaggggctggtctcggagcccttggaggaggagcgctggggcctggaggcaaacctcttaagccagggctcggcgccttccccgcagttacctttccgggggctctggtgcctggtggagtggctgacgctgctgcagcctataaagctgctaaggctggcgctgggcttggtggtgtcccaggagttggtggcttaggagtgtctgcaggtgcggtggttcctcagcctggagccggagtgaagcctgggaaagtgccgggtgtggggctgccaggtgtatacccaggtggcgtgctcccaggagctcggttccccggtgtgggggtgctccctggagttcccactggagcaggagttaagcccaaggctccaggagttggaccctttgggggaccgcaacctggagtcccactggggtatcccatcaaggcccccaagctgcctggtggctatggactgccctacaccacagggaaactgccctatggctatgggcccggaggagtggctggtgcagcgggcaaggctggttacccaacagggacaggggttggcccccaggcagcagcagcagcggcagctaaagcagcagcaaagttcggtgctggagcagccggagtcctccctggtgttggaggggctggtgttcctggcgtgcctggggcaattcctggaattggaggcatcgcaggcgttgggactccagctgcagctgcagctgcagcagcagccgctaaggcagccaagtatg

SEQ ID NO: 129366 - DNA, 658 bp, Homo sapiens
  Payload ID: 5301
  Gene Symbol: ELN
  Gene Name: elastin
  ENST ID: ENST00000417091
  CDS Start-End: 16-658
gcatttctccccgagatggcgggtctgacggcggcggccccgcggcccggagtcctcctgctcctgctgtccatcctccacccctctcggcctggaggggtccctggggccattcctggtggagttcctggaggagtcttttatccaggggctggtctcggagcccttggaggaggagcgctggggcctggaggcaaacctcttaagccagttcccggagggcttgcgggtgctggccttggggcagggctcggcgccttccccgcagttacctttccgggggctctggtgcctggtggagtggctgacgctgctgcagcctataaagctgctaaggctggcgctgggcttggtggtgtcccaggagttggtggcttaggagtgtctgcaggtgcggtggttcctcagcctggagccggagtgaagcctgggaaagtgccgggtgtggggctgccaggtgtatacccaggtggcgtgctcccaggagttggaccctttgggggaccgcaacctggagtcccactggggtatcccatcaaggcccccaagctgcctggtggctatggactgccctacaccacagggaaactgccctatggctatgggcccggaggagtggctggtgcagcgggcaaggctggttacccaacagggacag

SEQ ID NO: 129367 - DNA, 489 bp, Homo sapiens
  Payload ID: 5301
  Gene Symbol: ELN
  Gene Name: elastin
  ENST ID: ENST00000419398
  CDS Start-End: 1-183
gttacctttccgggggctctggtgcctggtggagtggctgacgctgctgcagcctataaagctgctaaggctggcgctgggcttggtggtgtcccaggagttggtggcttaggagtgtctgcaggtgcggtggttcctcagcctggagccggagtgaagcctgggaaagtgccggccctttaggaagtgacttcaggttaaacaaaagactgcctgagtctacgcagcagggagggacatctggaagctgttagccagaggtgggctggcccagccatgtaaacaggctccaggagacggagataaatccacacaccgaagagtttgcagatgacttccgaaactcgtgggaggagggttgtggccaccccacgtctgtccctggctgcccctgtcgggcacagaggctgtgtggggctgccaggtgtatacccaggtggcgtgctcccaggagctcggttccccggtgtgggggtgctccctggagtt

SEQ ID NO: 129368 - DNA, 3452 bp, Homo sapiens
  Payload ID: 5301
  Gene Symbol: ELN
  Gene Name: elastin
  ENST ID: ENST00000621115
  CDS Start-End: 400-2253
cctcccttctgcttcctctcccgagggctgtcctggcagaggcccccctcgctctttctggcgggaacagggccagcagcgaaagaacagtcgcagagggaaagcgggaaagagatgggggaaagtgtgtgtgtgtgagtgtgtgcttgtgtgcatgtgtgtgcgtgtgtgtgtcaaggaaaaaagctcgcagtccagcagcccgggcctgggaggcttgtgagccgggcctttcgtaattgtcccctccccgcggccccctcccccaggcctcccccctctcccgccctcccgcccgccctctctccctccctctttccctcacagccgacgaggcaacaattaggctttggggataaaacgaggtgcggagagcgggctggggcatttctccccgagatggcgggtctgacggcggcggccccgcggcccggagtcctcctgctcctgctgtccatcctccacccctctcggcctggaggggtccctggggccattcctggtggagttcctggaggagtcttttatccagcgctggggcctggaggcaaacctcttaagccagttcccggagggcttgcgggtgctggccttggggcagggctcggcgccttccccgcagttacctttccgggggctctggtgcctggtggagtggctgacgctgctgcagcctataaagctgctaaggctggcgctgggcttggtggtgtcccaggagttggtggcttaggagtgtctgcaggtgcggtggttcctcagcctggagccggagtgaagcctgggaaagtgccgggtgtggggctgccaggtgtatacccaggtggcgtgctcccaggagttggaccctttgggggaccgcaacctggagtcccactggggtatcccatcaaggcccccaagctgcctggtggctatggactgccctacaccacagggaaactgccctatggctatgggcccggaggagtggctggtgcagcgggcaaggctggttacccaacagggacaggggttggcccccaggcagcagcagcagcggcagctaaagcagcagcaaagttcggtgctggagcagccggagtcctccctggtgttggaggggctggtgttcctggcgtgcctggggcaattcctggaattggaggcatcgcaggcgttgggactccagctgcagctgcagctgcagcagcagccgctaaggcagccaagtatggagctgctgcaggcttagtgcctggtgggccaggctttggcccgggagtagttggtgtcccaggagctggcgttccaggtgttggtgtcccaggagctgggattccagttgtcccaggtgctgggatcccaggtgctgcggttccaggggttgtgtcaccagaagcagctgctaaggcagctgcaaaggcagccaaatacggggccaggcccggagtcggagttggaggcattcctacttacggggttggagctgggggctttcccggctttggtgtcggagtcggagccgaagctcaggcagcagctgccgccaaggctgccaagtacgggttagttcctggtgtcggcgtggctcctggagttggcgtggctcctggtgtcggtgtggctcctggagttggcttggctcctggagttggcgtggctcctggagttggtgtggctcctggcgttggcgtggctcccggcattggccctggtggagttgcagctgcagcaaaatccgctgccaaggtggctgccaaagcccagctccgagctgcagctgggcttggtgctggcatccctggacttggagttggtgtcggcgtccctggacttggagttggtgctggtgttcctggacttggagttggtgctggtgttcctggcttcggggcagtacctggagccctggctgccgctaaagcagccaaatatggagcagcagtgcctggggtccttggagggctcggggctctcggtggagtaggcatcccaggcggtgtggtgggagccggacccgccgccgccgctgccgcagccaaagctgctgccaaagccgcccagtttggcctagtgggagccgctgggctcggaggactcggagtcggagggcttggagttccaggtgttgggggccttggaggtatacctccagctgcagccgctaaagcagctaaatacggagtggcagcaagacctggcttcggattgtctcccattttcccaggtggggcctgcctggggaaagcttgtggccggaagagaaaatgagcttcctaggacccctgactcacgacctcatcaacgttggtgctactgcttggtggagaatgtaaaccctttgtaaccccatcccatgcccctccgactccccaccccaggagggaacgggcaggccgggcggccttgcagatccacagggcaaggaaacaagaggggagcggccaagtgccccgaccaggaggccccctacttcagaggcaagggccatgtggtcctggccccccaccccatcccttcccacctaggagctccccctccacacagcctccatctccaggggaacttggtgctacacgctggtgctcttatcttcctggggggagggaggagggaagggtggcccctcggggaaccccctacctggggctcctctaaagatggtgcagacacttcctgggcagtcccagctccccctgcccaccaggacccaccgttggctgccatccagttggtacccaagcacctgaagcctcaaagctggattcgctctagcatccctcctctcctgggtccacttggccgtctcctccccaccgatcgctgttccccacatctggggcgcttttgggttggaaaaccaccccacactgggaatagccaccttgcccttgtagaatccatccgcccatccgtccattcatccatcggtccgtccatccatgtccccagttgaccgcccggcaccactagctggctgggtgcacccaccatcaacctggttgacctgtcatggccgcctgtgccctgcctccacccccatcctacactcccccagggcgtgcggggctgtgcagactggggtgccaggcatctcctccccacccggggtgtccccacatgcagtactgtataccccccatccctccctcggtccactgaacttcagagcagttcccattcctgccccgcccatctttttgtgtctcgctgtgatagatcaataaatattttattttttgtcctggatatttggggattatttttgattgttgatattctcttttggttttattgttgtggttcattgaaaaaaaaagataatttttttttctgatccggggagctgtatccccagtagaaaaaacattttaatcactctaatataactctggatgaaacacacctttttttttaataagaaaagagaattaactgcttcagaaatgactaataaatgaaaaaccttt

SEQ ID NO: 129369 - DNA, 3943 bp, Homo sapiens
  Payload ID: 5302
  Gene Symbol: EMILIN1
  Gene Name: elastin microfibril interfacer 1
  ENST ID: ENST00000380320
  CDS Start-End: 500-3550
gggaggggagccagcagggaggaggaggccagggcccgccccacagccactctcgcgcctccgaacagccacaggggcaaagccctgtcacccccaggatccggtcatcagggaaagaggacagggagaccagaagagggccagctgggacgagggggcggacgcccaggaggcaacttctgagacgcagctcctgagaggggcagggaccaggcgcgggaggccagagggggcacagagaacaaaccccctcagaagtgaagaggagagcggaaggaaccgagaggggacggacaggagctgaggaggaaagaggaggggagaggggtcaggccaggcagccaaggagaagacgtgtggccgggggctatcagaaggaaactgggacggacgggccgggctcgggctgtcctgtggagcagcagcatccccggggccggcagaggcgccagtggctgggcgggatgagtctctgagggccactgtggagcgccccgccatggccccccgcaccctctggagctgctacctctgctgcctgctgacggcagctgcaggggccgccagctaccctcctcgaggtttcagcctctacacaggttccagtggggccctcagccccggggggccccaggcccagattgccccccggccagccagccgccacaggaactggtgtgcctacgtggtgacccggacagtgagctgtgtccttgaggatggagtggagacatatgtcaagtaccagccttgtgcctggggccagccccagtgtccccaaagcatcatgtaccgccgcttcctccgccctcgctaccgtgtggcctacaagacagtgaccgacatggagtggaggtgctgtcagggttatgggggcgatgactgtgctgagagtcccgctccagcgctggggcctgcgtcttccacaccacggcccctggcccggcctgcccgccccaacctctctggctccagtgcaggcagccccctcagtggactggggggagaaggtcctggggagtcagagaaggtgcagcagctggaggaacaggtgcagagcctgaccaaggagctgcaaggcctgcggggcgtcctgcaaggactgagcgggcgcctggcagaggatgtgcagagggctgtggagacggccttcaacgggaggcagcagccagctgacgcggctgcccgccctggggtgcatgaaaccctcaatgagatccagcaccagctgcagctcctggacacccgcgtctccacccacgaccaggagctgggtcacctcaacaaccatcatggcggcagcagcagcagtgggggcagcagggccccagccccagcctcagcccctccgggccccagtgaggagctgctgcggcagctggagcagcggttgcaggagtcctgctccgtgtgcctggccgggctagatggcttccgccggcagcagcaggaggacagggagcggctgcgagcgatggagaagctgctggcctcggtggaggagcggcaacggcacctcgcagggctggcggtgggccgcaggccccctcaggaatgctgctctccagagctgggccggcgactggcagagctggagcgcaggctggatgtcgtggccggctcagtgacagtgctgagtgggcggcgaggcacagagctgggaggagccgcggggcagggaggccaccccccaggctacaccagcttggcctcccgcctgtctcgcctggaggaccgcttcaactccaccctgggcccttcggaggagcaggaggagagctggcctggggctcctggggggctgagccactggctgcctgctgcccggggccgactagagcagttgggggggctgctggccaatgtgagcggggagctgggggggcggttggatctgttggaggagcaggtggcaggggccatgcaggcatgcgggcagctctgctctggggcccctggggagcaggactctcaagtcagcgagatcctcagtgccttggagcgcagggtgctggacagtgaggggcagctgcggctggtgggctccggcctgcacacggtggaagcagcgggggaggcccggcaggccacgctggagggattacaagaggttgtgggccggctccaggatcgtgtggatgcccaggatgagacagctgcagagttcacactacggctgaatctcactgcggcccggctaggccaactggaggggctgctgcaggcccatggggatgagggctgtggggcctgtggcggagtccaagaggaactaggccgccttcgggatggtgtggagcgctgctcctgccccctgttgcctcctcggggtcctggggctggtccaggtgttgggggcccaagccgtgggcccctggacggcttcagcgtgtttgggggcagctcaggctcagccctgcaggccctgcaaggagagctctctgaggttattctcagcttcagctccctcaatgactcactgaatgagctccagaccactgtggagggccagggcgctgatctggctgacctgggggcaaccaaggaccgtatcatttctgagattaacaggctgcagcaggaggccacagagcatgctacagagagtgaagagcgcttccgaggcctagaggagggacaagcacaggccggccagtgccccagcttagaggggcgattgggccgtcttgagggtgtctgtgaacggttggacactgtggctgggggactgcagggcctgcgcgagggcctttccagacacgtggctgggctctgggctgggctccgggaaaccaacaccaccagccagatgcaggcagccctgctggagaagctggtcgggggacaggcgggcctgggcaggcggctgggtgcccttaacagctccctgcagctcctggaggaccgtctgcaccagctcagcctgaaggacctcactgggcctgcaggagaggctgggcccccagggcctcctgggctgcagggacccccaggccctgctggacctccaggatcaccaggcaaggacgggcaagagggccccatcgggccaccaggtcctcaaggtgaacagggagtggagggggcaccagcagcccctgtgccccaagtggcattttcagctgctctgagtttgccccggtctgaaccaggcacggtccccttcgacagagtcctgctcaatgatggaggctattatgatccagagacaggcgtgttcacagcgccactggctggacgctacttgctgagcgcggtgctgactgggcaccggcacgagaaagtggaggccgtgctgtcccgctccaaccagggcgtggcccgcgtagactccggtggctacgagcctgagggcctggagaataagccggtggccgagagccagcccagcccgggcaccctgggcgtcttcagcctcatcctgccgctgcaggccggggacacggtctgcgtcgacctggtcatggggcagctggcgcactcggaggagccgctcaccatcttcagcggggccctgctctatggggacccagagcttgaacacgcgtagactggggtcccgcccgacgtgtctacgtcggctgaagagacagcgggggcggcgggctcctggggtctcgcctgagacggggcacctagccctgggcgagcgccgcacccgggcccgcagcggcaccgcgcccagagcggcctctccccacgcccggggcgcgccggctcagggaggctcggggccgcccatgcagacttttggcctggcgcgatcccccaagaacccctccagggccggcctgcggaggagccgatcctcgcaccctccgctccctccactggccctccaggtcgattccctgggctccaggctcccccgcgcgggcgccgcccaccgccatactaaacgatcgaggaataaagacacttggtttttctaaaaaaaactaaa

SEQ ID NO: 129370 - DNA, 1431 bp, Homo sapiens
  Payload ID: 5302
  Gene Symbol: EMILIN1
  Gene Name: elastin microfibril interfacer 1
  ENST ID: ENST00000433140
  CDS Start-End: 1-1043
tggctgacctgggggcaaccaaggaccgtatcatttctgagattaacaggctgcagcaggaggccacagagcatgctacagagagtgaagagcgcttccgaggcctagaggagggacaagcacaggccggccagtgccccagcttagaggggcgattgggccgtcttgagggtgtctgtgaacggttggacactgtggctgggggactgcagggcctgcgcgagggcctttccagacacgtggctgggctctgggctgggctccgggaaaccaacaccaccagccagatgcaggcagccctgctggagaagctggtcgggggacaggcgggcctgggcaggcggctgggtgcccttaacagctccctgcagctcctggaggaccgtctgcaccagctcagcctgaaggacctcactggtgaggggacaaaagggcctgcaggagaggctgggcccccagggcctcctgggctgcagggacccccaggccctgctggacctccaggatcaccaggcaaggacgggcaagagggccccatcgggccaccaggtcctcaaggtgaacagggagtggagggggcaccagcagcccctgtgccccaagtggcattttcagctgctctgagtttgccccggtctgaaccaggcacggtccccttcgacagagtcctgctcaatgatggaggctattatgatccagagacaggcgtgttcacagcgccactggctggacgctacttgctgagcgcggtgctgactgggcaccggcacgagaaagtggaggccgtgctgtcccgctccaaccagggcgtggcccgcgtagactccggtggctacgagcctgagggcctggagaataagccggtggccgagagccagcccagcccgggcaccctgggcgtcttcagcctcatcctgccgctgcaggccggggacacggtctgcgtcgacctggtcatggggcagctggcgcactcggaggagccgctcaccatcttcagcggggccctgctctatggggacccagagcttgaacacgcgtagactggggtcccgcccgacgtgtctacgtcggctgaagagacagcgggggcggcgggctcctggggtctcgcctgagacggggcacctagccctgggcgagcgccgcacccgggcccgcagcggcaccgcgcccagagcggcctctccccacgcccggggcgcgccggctcagggaggctcggggccgcccatgcagacttttggcctggcgcgatcccccaagaacccctccagggccggcctgcggaggagccgatcctcgcaccctccgctccctccactggccctccaggtcgattccctgggctccaggctcccccgcgcgggcgccgcccaccgccatactaaacgatcgaggaataaagacacttggtttttctaaaaaaaa

SEQ ID NO: 129371 - DNA, 5910 bp, Homo sapiens
  Payload ID: 5303
  Gene Symbol: EMILIN2
  Gene Name: elastin microfibril interfacer 2
  Uniprot ID: Q9BXX0
  ENST ID: ENST00000254528
  CDS Start-End: 160-3321
ccggagggggcggccgcggagcactggttggagcgccgcgaagcgcccgagcctcttgccttcgcgggcggcgccctggccgccggcagccttgtggccggtgccccgatccgccgcgctccggacccgggcaggcggggcgcgcccgctgcgcgcgggatgtggcagcccagacggccctggccccgcgtgccctggcgctgggcgctggcgctgctggccctggttggcgcggggctgtgccacgccggcccgcagcccgggtatcccgcgcggcccagcgccaggaacaagaactggtgcgcctacatcgtgaacaagaatgtgagctgctccgtgctggagggaagtgagagttttattcaggctcagtacaactgtgcctggaaccagatgccctgtccgtcggcgctggtgtatcgagtgaacttcagacctagatatgtcactaggtataagacagtgacacagttggaatggaggtgctgtcctggctttagagggggagattgccaagaaggtcccaaagaccccgtgaagaccctccgccccacgccggctcggcctcgaaacagcttgaagaaagccacagataatgaacccagccaattctcagagcccaggaagactttgtccccaactggtacagcacaaccaagctggggggtagatccaaaagaggggcctcaggaacttcaggaaaagaagatacaggtgctagaggagaaggttcttcgactcacaaggacggttcttgacctccagtcttcccttgctggagtgagtgaaaatctcaaacatgccactcaggatgatgccagtagaacacgggcaccagggctcagcagccagcaccccaagcctgacaccactgttagtggagacacagaaacgggccagagtcctggtgtcttcaacactaaggaatctggcatgaaggacatcaagtctgaattggctgaagtcaaagatactctaaagaacaaaagtgacaagctggaagagctggatggaaaagtgaagggctacgaagggcagctcagacagctccaggaagcagctcagggcccgacggtgaccatgacaaccaacgaactctaccaagcctatgtggacagtaagatcgacgccctgagagaggagctcatggagggcatggacagaaagctggctgacctgaaaaactcatgtgagtacaagctcactggcctccagcagcagtgtgatgactatgggagcagctacctgggagtgatagagctcataggggagaaggaaacaagcctgagaaaagaaataaataacctccgagcccggctacaggagccttcagcccaggcaaattgctgcgacagtgaaaagaatggtgacattggtcaacagatcaagacattggaccagaaaatcgagagagttgctgaagccaccagaatgctgaatggaagactggacaatgagtttgaccgccttatagttccagagccagatgtggattttgatgcaaaatggaatgaactcgatgcaaggatcaatgtgacggagaagaacgctgaagaacattgcttttacattgaggaaacccttcggggcgccattaatggagaggtgggtgacttgaagcagcttgttgatcagaaaatacagtctctggaagaccgtctggggagcgttctcctacagatgaccaataacactggtgcagagctcagtcccccaggggcagcagccctgccaggagtgtcagggtcaggagatgaacgggtcatgatggaattaaaccacctgaaggacaaagttcaagttgttgaagacatttgcctgctgaacatccagggaaagcctcatgggatggaaggtgccttgccaaacagggaagaccgcgcagtacgcgacagcctgcaccttttgaaatctctcaacgacacgatgcacaggaagtttcaagaaaccgaacaaaccatccagaaacttcaacaggattttagttttctttattctcaattaaaccacacagaaaatgatgtgactcatcttcaaaaggaaatgagcaattgtagagcaggtgaaaacgctggcatgggtaggttcactaaggtgggtgagcaagaaaggacagtggacaccctgccgtccccccagcaccccgtggctcattgctgcagtcagctggaggagaggtggcagaggttgcagagccaggtcatctcggagctggatgcttgtaaggaatgcacgcagggggtccagagggaggtctccatggtggagggcagggtgtctcatatggagaaaacttgcagcaagctggactctatctcaggaaatcttcagaggatcaaggaggggctcaacaagcatgtcagcagcctgtggaactgtgtcaggcagatgaacggaacgctcaggtcgcattccagagacatttctggcctgaagaattcagtccagcagttctacagccacgtcttccagatttctactgatttgcaagatctggtcaaatttcagccatcagcaaaggcgccctcgcccccgccgcccgcagaggccccgaaggagccgctgcagcccgagcccgccccgccgaggcccagcggccccgcaaccgcagaggaccctgggcgacggcccgtcctgccccagcggccccccgaggagaggccgccccagccgccaggctccaccggggtcatcgcggagacgggccaggccgggccccccgcaggcgcaggcgtgtctgggcggggtctgccgcggggcgtggacggccagaccgggagcggcaccgtccccggcgcagaaggcttcgcgggcgcaccaggatacccgaagtcacctcctgtagcttccccaggagctccggtgccttctctggtgtctttttctgcggggctcacccagaagcctttccccagtgatgggggcgttgtcctctttaacaaagtgctggtgaacgacggggatgtttacaaccccagcaccggggtcttcacggctccttatgatgggcgctacctgatcacggccaccctcacccccgagagagacgcctacgtggaagcagtgctgtcggtctccaacgccagcgtggcccagctgcataccgctgggtacaggagagagttcctggaataccaccgccctccaggagctttgcatacctgcgggggcccgggggcattccacctcatcgtgcacctgaaggcgggagatgcagtcaacgtcgtggtgactgggggcaagctggctcacacagactttgatgaaatgtactccacatttagtggggttttcttatatcctttcctttcccacctctaaggtggctggggagatgtcaggggaaagatagatagttgtaaaaactctaaagctttaatatattcggtttgtatgtaatggaagcacggggctagagtttccacataggccccaacataaaggccttccctcgctgttgaggccaccatgccttactgcatccagccaggctgcagggagtgaggcacacggtgaacatggccactgacttttctgccactctaactggacaactggaagacttggaaaggcctccacctgtatctacactctgagggccctggactgggcctgagcttgccacagaggctccgtctgactgtgggctgggaggagggaggcaggggagagccggtcacggtggctggtctttactgcagggcagcactgtggccagctgtctgtctttacactgcatgcagaagtttaaacactgaagtgccgaagtggcccgtgccgccgcacagagaccccgactttagtttgggctgttccacgcttggctcaccattgccgcctgggacttaacctgctcaggcgggccttcgcccagctgcaaatagggatgcgttagagactgttcccaaagcttgttgggctccttaaatggcatgtacaatttaagtgcaaagacagggagtgtcaataaagatggaaagccatttccagttaacttttgttaatttaagtgtggtcccttacagatcgggagttgttgctaaaaagcaaactgaagaaatgttttgtttcaaaaagggctacagaaagtaaccttgagtaaaattaatctcagctacaaaactgttacccctccgcatccaagctatacacttgggttttgtttctggcttgtgaagacggaccagatgtgcacggaggtcaaggccccatgtcatctgcagctggagcggctcctctggggatgctgcactcagatcccacagcagctgcccaggctaacttgatccctgctgcttcactgcaccaatctccagcagacacagctcgccgagctcttgggtttctaagcagcaggaagctcaacctaacgctggccacacgctgacagctgagcccatctgagaacacggcatcttcacacagcgagacgcctccactgaggggaggcccgggagtatcaatctgtcaccagtggccacggagacctctcagcacccttagttcaaggtagtctctgtggatcaggttggtaacacctactggttaatcaagtcccactggggaaaggtttggacggtagaatcaagagctgcagtttccttggcccacaagatgctcttatgctgtaaaaaaaatgctttaagaattgtttgcaaatgaatttacagggtggccactggacacttcagagttccttatttactccccccgccacagctaggaagaccagcaagaactaaaggtttgccgttttactatttaaaatgtggacctctttgtccaggagcgggagggagaatggcatctcaccccattacaacagctggggaactggctaaagagagctgtcagagagtatccttggctgtcctaggaatgactcatggaaagcgccccagtgcagcagtgttttcaggaaaacccagtgggcacgcgccatcgccctctcctctcctctcacgctccttttgaaaagaccgcactcggcgcccaaggggacgtgctcaagagctgcaggggcagggcccaggcaaaaggtgggtgatgactacctgctgctttccctactccgtagatgggtctggaacatcgggtaaaacccagtcctcctctcagtgcatctctactcaccaacaatggtgaatctcagctctgtgtattcaagacaggcaaaacagaatatgcctcattatggctggagcgtgcctctactttgagataaagctggatgacaggtggatcctggcccacttaggagacatctttagaaagggaaaggctgtctttttgtacaggtagtagaacaacaaggtcagctgagcttaaggctgtggggttcgaagcagcccttcaagaagtcatcacccctgaagtagtgcctgcgagtcagtcagaggcataccaaaccctgagacagaatcaggcacaagttcacaacttttttttttttttggggggagacagtcctactctgtcgcccaggctggagtgcagtagcgcgatctcagctcactgcaacctccgcctcccgggttcaagcaattctcctacctcagcctcccgagtagcggggactacaggtgcatgccgccacgcccggttaattttttgtattttagtagagatggggtttcaccgtgttgcccaggctggtcgcgaactcctgagctcagccaatccgcccacctcggcctcccaaagtgctgggattacaggtatgagccaccacgcccagccaagttcacaacttctgatatcaagttgttgctgagaaaaggtcaggacacttcttaagtagagaaggactgtgacatcccctccaaacctccatgtaacactaacaaatggcctcatttacacgattaaaaacaaaatggtatcgtcaataaatgcaaaccttaaactgca

SEQ ID NO: 129372 - DNA, 3796 bp, Homo sapiens
  Payload ID: 5304
  Gene Symbol: EMILIN3
  Gene Name: elastin microfibril interfacer 3
  Uniprot ID: Q9NT22
  ENST ID: ENST00000332312
  CDS Start-End: 194-2494
gcgccggccactccgcgggacgcagccgccgcgaagcgccaggcggccgggccagcgagctcgggggccgaaggggaccccgggaccctcggggcgggacccgggccgaccagcggcgggggcggcgcggcgctgcaggcggacacccggcggggggcaccgcgcggggccgggcagaggcgcgggggccgctatgggccgccgccgcctgctcgtctggctgtgcgccgtcgcggcgctgctctcgggggcgcaggccaggggcaccccgctcctggcgcggcctgcgccgcccggtgcctcccgctacagtctctacacgacgggatggcgcccgcggctgcgcccggggccgcacaaggccctctgtgcctatgtggtgcacaggaatgtgacctgcatcctacaggagggagcggagagctacgtaaaggctgaataccggcagtgtagatgggggcccaagtgccccgggacagtcacgtaccgcacagtactcagacccaaatacaaggttggctacaagacagtgacagacctcgcctggcgttgctgtcccggcttcactgggaaacgctgccctgagcacctcacggaccatggggctgcctcaccccagctggagcctgagcctcagattccttcagggcagctggacccaggccccaggcccccttcctacagcagagcagcccccagccctcatggaaggaaaggcccagggctgtttggtgagcggctggaacgcctggagggtgatgtccagcgcctggctcaaacatatggtaccctcagtggcctggtggctagccacgaggatcccaacaggatgactggtggccccagggctcctgctgtccctgtgggctttggggtcatccctgaggggcttgtgggcccaggagacagagccagagggccactaacacctcccttagacgagatcctaagcaaggtgacagaggtgagcaacactcttcagaccaaggtgcagcttctagacaaggtgcatgggctggcacttggccatgaggcccacctgcagcggctgcgggaagccccaccatccccgctcacctccctggccctgctggaggagtacgtggaccgacggctgcaccgactctgggggagcctgctggatggctttgagcagaagctgcaaggcgtccagagtgagtgtgacctgcgggtgcaggaggtacggcggcaatgtgaggagggtcaggccgccagccggaggctgcaccagagccttgatggccgggagctggccctgcgccaggagctgtcacagctgggcagccagctgcagggcctgagcgtgtctggcaggggcagctgctgtgggcaactagccttgatcaatgcccgtatggatggccttgagagggccctgcaggcagtcaccgagacccaaaggggccccggtgccccggccggggatgagcttacgaggctctctgctgccatgctcgagggaggtgtggacgggctgcttgagggtctggagacgctcaatgggacagagggtggagcaaggggatgctgtctgaggttggacatgggggggtggggagtgggcggctttgggaccatgctggaagagcgcgtgcagagcctcgaggagcgcctagcaacattggctggggagctaagccatgacagcgcctctccgggcaggtcagctcggccccttgtacagacagagctggctgtgctagagcaacggttggtctcactggagacttcgtgcaccccgagcaccacctcagccatcctggacagcctcgtggcagaggtgaaggcctggcagagccggagcgaggccctcctacgccaggtggccagccacgcagcactgctccagcagctcaatggcactgtggccgaggtccagggacagctggcagaagggacgggcagctcacttcaaggcgagatcactctgctcaaggtcaatctgaactcagtgagcaagtcgctcacaggcctcagtgactctgtcagccagtactctgatgccttcttggctgccaacacgtccctggatgagcgggaacgcaaggtggaagccgaagtccaggccatccaggagcaggtcagcagccaaggctccaggcttcaggctggccacaggcaggtcctgaacctgcgtggggagctggagcaactcaaggctggtgtggccaaggtggccagtgggctgagccgctgccaggacacagcccagaaacttcagcacacagtgggacactttgaccagcgggtggcacaagtggagggtgcgtgcaggaggctgggcctgctggccgcgggcctggacagcttgcccactgagccactgaggcccagagagggcctgtggagccatgtggaccagctgaatcgtacgctggcccagcacacgcaggacattgcccgcctccgggatgacctactggactgccaggcccagctggctgagcaggtgcggccagggcaagccaactagacaggctggccaggacccaacccctagatcccaccaactcggggaacatcaccccagagcccagccttatccagcagcgccttccagccttccctggctagcccaaatggcactaaggaggccactgagggaatcctccacgtggctgtcccagccaccaaaacccatgcacagtgctgcagaaactggacagttccggacagcggtcaaggcaaggatgtcatgcttgaaggccagggtagacttgagagagttcacattccactgtcagcaaatcagtgtctggacagccagctgcagggcctgagcatggctggcaggggcagctgctgtggcaaactggccttgatcagtgtccgtatgtaaggccttgagaggaccctgcaggcagtcagcaccagcctcagcaactgtgcagagacctacaggcccacagccagtggcctgtccgcattgccctgtgcccacaagcaacagtccacagcccttggtggcttctgttccttgtcccctcggcttctcttcgcagccatcaggactaggtttgtgcaggaaggtgatgcccactggaactctcctcacacctggcagcttcatggatgttgtatctgaactaaggaccagaggctgccagatgtttctggctcctcacgtgtccttcaggacagaacagaagcacaaagactcagccaagagttctctttattccctttgatcctcccccaaggtgagggcttaggcagctgtagaaccccaggaaagaacggaatccaggcaatctgtttagagaccccccactccaaatttatccttttcctttccttcccctaagatgtttccagggccctctggtgcccacactgtcctcttccttccacttgggggtggggaaatccttcctgcgaggtcagggcatttctctacaaagtggcctgaatgaggccaggccctgagaaggagccaccagctggaggaaaggggctccaagccttgcttttaacacccctgcaaaacccccaccctcccaagatgttcacaaaaggtgagaaattcaggtacgaaaccatcaatggacaacttgaaaatgcatgttcctcaggcctatgcagttcccagagactcttgacaccggtctctgctgaggctcccagcctcagtttcccccacagcagcacgggccccactgtgctgctcttcaggtccccacagccctgcctttggttcctggacatttggtattctgccctccactctggtactatcagagtagggcaggctctggattaaagcttttagccggtc

SEQ ID NO: 129373 - DNA, 3763 bp, Homo sapiens
  Payload ID: 5305
  Gene Symbol: ELAVL2
  Gene Name: ELAV like neuron-specific RNA binding protein 2
  Uniprot ID: Q12926
  ENST ID: ENST00000223951
  CDS Start-End: 270-1310
agtccgaactctgggcgggaacactggtgggggcggcggaggttgtgcccgcgaagttcctagagctcagcccgttgcggcgggagtagagagaattgggcgcctcgggaggtggcaccgcccctcccgtgggcacaagcaggttgggggcggcgggagccgagcggggacagtcgcgcctggcagcgtgcacgggcgtggacgtgcccgggtgcggccgcgtgtagcgcaagaaggaaactgttgagacgcagcaggtaattgctgccatggaaacacaactgtctaatgggccaacttgcaataacacagccaatggtccaaccaccataaacaacaactgttcgtcaccagttgactctgggaacacagaagacagcaagaccaacttaatagtcaactaccttcctcagaacatgacacaggaggaactaaagagtctctttgggagcattggtgaaatagagtcctgtaagcttgtaagagacaaaataacagggcagagcttgggatatggctttgtgaactacattgaccccaaggatgcagagaaagctatcaacaccctgaatggattgagacttcaaaccaaaacaataaaagtttcctatgctcgcccaagttcagcttctatcagagatgcaaatttatatgtcagcggacttccaaaaacaatgacccagaaggagttggaacagcttttttcacaatatggacgcattattacttctcgtattcttgtcgaccaggtcactggcatatcaaggggtgtagggtttattcgatttgacaagcgaattgaggcagaagaagctatcaaaggcctaaatggccagaaacctcccggtgccacggagccaatcactgtaaagtttgctaataacccaagccaaaaaaccaatcaggccatcctttcccagctgtaccagtctccaaacagaaggtatccaggaccgctagctcagcaggcacagcgttttaggttttctccaatgaccattgacggaatgaccagtttggctggaattaatatccctgggcaccctggaacagggtggtgtatatttgtgtacaacctggctcctgacgcagatgagagtatcctgtggcaaatgtttgggccttttggagctgtcaccaatgtgaaggtcatccgtgactttaacaccaataaatgcaaaggttttggatttgtgactatgacaaactatgatgaggctgccatggcgatagctagcctcaatggataccgtctgggagacagagtactgcaggtctcctttaagacaaacaaaacgcacaaagcctaatgagctcttgtcctcagtccatttatatatgaaaactatacaacaaaggcaagttaagagaaactttatacattagtaaatgtctttgtaagtcagtgttgagatggggataaaatgactacttagcatcctaagaaatatgtgagattttttattgctagtatttgaattaaaacttcttaaatatcttttatgtttgaatatggacaagaggtacagggtttttacctgtcacattgcattctattgccttctttgaagaaggtggaccttttaaagtgtttcagctaagggaagacatttcttttctttttacataactgccttgaacctgtgagtaaatattgaggctttgtgttgtaattcttcagttggttgtgtcttttttttcccccctttttttcctttttctgattagctttgtgtttggtttacatttaaagcattgctgttatgtctgtttaagaaaagtattttgaagtttacatttttatttatgaagtttaaaacagtatttattttgtaattatgatttgggttggggaagggggggctacattataaacgcttattgtaagaatactggagaacttttcgtaaagcagtaccttgccaaagagataagagcctctttgatgtgggtttaaaaaaagcatctatttttataaaaaagaaaatttggagaaactttttactggtcctggaacaaatattttgacttgaatactttgagaaatctcttcatatgacacctagtgagcttttaaaatttaccaggaaatttgcagcggttggaaaatttagaaagatttatggtgtagaaaatacttttgagatctttgtatgaaaggagtagaatcaatggggggaaacactgctggtttcatttttgtaatcaccagtggagcgtctgatcatcctggttattatgtgataggtggctcacattgatttgtgattttgaaacaaataaaaaaaatttacaaaagaatatataagagcaggcaagaaatttaaattaccgagagatgggggaaaaaatctgttcttcctaaagaaatcccttcagatagagctcatggtgtttagtgatgtacttgcagtattgtttgaagaattgttttgtcttaaggaaaaaagacgttgcacatgatttgtactgcagcaaatcagcaaaagtgatctgagttggatatatttgaaggtattttgaaagttacgttcaaggctaacacctgagctttgtgtaatgtaaataagaccttgtgtttatgaacctttcagctaatttaattttttttcccttacatgccaagtgatgttcaggttttgaatgtttttgtatcagttttttcctttgtaaatggcattaacattgttacttgaggtcttgcttaatcacttttgttgtcctgaggacttgaatttacagtgcatcagatttgttgcaaattttgtctgtagatagtctagcttcagctgtttatggtgatgctacattttggtttataaatatgtttgtggtataaaaaaatgagtataaccataggttttgaacaaatttccttacatttttcatacaaaaatcataaatatctgtatgctattgaaatttaactttgtatgatgcttaaaaaccactatttggggaaataataaaataagtctttaccatgtatgaaagaaattttaaaaaatacaaaatattttctgattagcatctagcttataataaattttcaaaaaagctgaaggcaaaaatgccttcatcaggatgcactgagaactatatagttacgtcctgctttttgtataaactgagatgctcacatgcttccccttagaacaggcaatgtgctatgcataacatagttgtacattatctttgcggttgctttgagttttattttttattatttaaaattgtagttataaaatttttcagtatagtacagtacatatactgtgaggcgcgtgctaaagtgaataagcgagttttcatgctgacccactcaatgctattcagaaatcaattggcttagcactttctcatatccttaggtgcatttagattgccagagttaaccttctgcgtttaaaaaaagaaaaacactaaaaaataaaatacatgtatatacttaaaaaaaaataataaggtttccctcaagggaaaacagcagctacatgcttctttcctatactactgtagcaaaccaaggcattgatgagagggcatgcaaattgtgcttcactttacagtgttttatcagagcacttaataaaatgtaaggctggtatttatttgaagttgtacagtatgacttaattcacatctgttggaatagaaaatatattctgttgagtatttaagaggctgtacatgttttcttttgtgtttggattctttgtactttttcatgttcagtacatcaataaacaaagttgaagggaaa

SEQ ID NO: 129374 - DNA, 3691 bp, Homo sapiens
  Payload ID: 5305
  Gene Symbol: ELAVL2
  Gene Name: ELAV like neuron-specific RNA binding protein 2
  ENST ID: ENST00000380110
  CDS Start-End: 69-1238
gcccgggtgcggccgcgtgtagcgcaagaaggaaactgttgagacgcagacggcaactccaaactaacatggcagtcagactgtgtgatgtggcttctctgcttagaagtggttcgtgggcagcagagccttggaccgggcaggtaattgctgccatggaaacacaactgtctaatgggccaacttgcaataacacagccaatggtccaaccaccataaacaacaactgttcgtcaccagttgactctgggaacacagaagacagcaagaccaacttaatagtcaactaccttcctcagaacatgacacaggaggaactaaagagtctctttgggagcattggtgaaatagagtcctgtaagcttgtaagagacaaaataacagggcagagcttgggatatggctttgtgaactacattgaccccaaggatgcagagaaagctatcaacaccctgaatggattgagacttcaaaccaaaacaataaaagtttcctatgctcgcccaagttcagcttctatcagagatgcaaatttatatgtcagcggacttccaaaaacaatgacccagaaggagttggaacagcttttttcacaatatggacgcattattacttctcgtattcttgtcgaccaggtcactggcatatcaaggggtgtagggtttattcgatttgacaagcgaattgaggcagaagaagctatcaaaggcctaaatggccagaaacctcccggtgccacggagccaatcactgtaaagtttgctaataacccaagccaaaaaaccaatcaggccatcctttcccagctgtaccagtctccaaacagaaggtatccaggaccgctagctcagcaggcacagcgttttaggttggacaatctgctcaatatggcttatggagtaaagagcaggttttctccaatgaccattgacggaatgaccagtttggctggaattaatatccctgggcaccctggaacagggtggtgtatatttgtgtacaacctggctcctgacgcagatgagagtatcctgtggcaaatgtttgggccttttggagctgtcaccaatgtgaaggtcatccgtgactttaacaccaataaatgcaaaggttttggatttgtgactatgacaaactatgatgaggctgccatggcgatagctagcctcaatggataccgtctgggagacagagtactgcaggtctcctttaagacaaacaaaacgcacaaagcctaatgagctcttgtcctcagtccatttatatatgaaaactatacaacaaaggcaagttaagagaaactttatacattagtaaatgtctttgtaagtcagtgttgagatggggataaaatgactacttagcatcctaagaaatatgtgagattttttattgctagtatttgaattaaaacttcttaaatatcttttatgtttgaatatggacaagaggtacagggtttttacctgtcacattgcattctattgccttctttgaagaaggtggaccttttaaagtgtttcagctaagggaagacatttcttttctttttacataactgccttgaacctgtgagtaaatattgaggctttgtgttgtaattcttcagttggttgtgtcttttttttcccccctttttttcctttttctgattagctttgtgtttggtttacatttaaagcattgctgttatgtctgtttaagaaaagtattttgaagtttacatttttatttatgaagtttaaaacagtatttattttgtaattatgatttgggttggggaagggggggctacattataaacgcttattgtaagaatactggagaacttttcgtaaagcagtaccttgccaaagagataagagcctctttgatgtgggtttaaaaaaagcatctatttttataaaaaagaaaatttggagaaactttttactggtcctggaacaaatattttgacttgaatactttgagaaatctcttcatatgacacctagtgagcttttaaaatttaccaggaaatttgcagcggttggaaaatttagaaagatttatggtgtagaaaatacttttgagatctttgtatgaaaggagtagaatcaatggggggaaacactgctggtttcatttttgtaatcaccagtggagcgtctgatcatcctggttattatgtgataggtggctcacattgatttgtgattttgaaacaaataaaaaaaatttacaaaagaatatataagagcaggcaagaaatttaaattaccgagagatgggggaaaaaatctgttcttcctaaagaaatcccttcagatagagctcatggtgtttagtgatgtacttgcagtattgtttgaagaattgttttgtcttaaggaaaaaagacgttgcacatgatttgtactgcagcaaatcagcaaaagtgatctgagttggatatatttgaaggtattttgaaagttacgttcaaggctaacacctgagctttgtgtaatgtaaataagaccttgtgtttatgaacctttcagctaatttaattttttttcccttacatgccaagtgatgttcaggttttgaatgtttttgtatcagttttttcctttgtaaatggcattaacattgttacttgaggtcttgcttaatcacttttgttgtcctgaggacttgaatttacagtgcatcagatttgttgcaaattttgtctgtagatagtctagcttcagctgtttatggtgatgctacattttggtttataaatatgtttgtggtataaaaaaatgagtataaccataggttttgaacaaatttccttacatttttcatacaaaaatcataaatatctgtatgctattgaaatttaactttgtatgatgcttaaaaaccactatttggggaaataataaaataagtctttaccatgtatgaaagaaattttaaaaaatacaaaatattttctgattagcatctagcttataataaattttcaaaaaagctgaaggcaaaaatgccttcatcaggatgcactgagaactatatagttacgtcctgctttttgtataaactgagatgctcacatgcttccccttagaacaggcaatgtgctatgcataacatagttgtacattatctttgcggttgctttgagttttattttttattatttaaaattgtagttataaaatttttcagtatagtacagtacatatactgtgaggcgcgtgctaaagtgaataagcgagttttcatgctgacccactcaatgctattcagaaatcaattggcttagcactttctcatatccttaggtgcatttagattgccagagttaaccttctgcgtttaaaaaaagaaaaacactaaaaaataaaatacatgtatatacttaaaaaaaaataataaggtttccctcaagggaaaacagcagctacatgcttctttcctatactactgtagcaaaccaaggcattgatgagagggcatgcaaattgtgcttcactttacagtgttttatcagagcacttaataaaatgtaaggctggtatttatttgaagttgtacagtatgacttaattcacatctgttggaatagaaaatatattctgttgagtatttaagaggctgtacatgttttcttttgtgtttggattctttgtactttttcatgttcagtacatcaataaacaaagttgaagggaaa

SEQ ID NO: 129375 - DNA, 2370 bp, Homo sapiens
  Payload ID: 5305
  Gene Symbol: ELAVL2
  Gene Name: ELAV like neuron-specific RNA binding protein 2
  Uniprot ID: Q12926
  ENST ID: ENST00000380117
  CDS Start-End: 545-1624
gagcctggcagagcagctgcacacacggcagtgcggaggcagagaaggggttggtgatacggtgctataaatctgtggtccagtccacctcccttttaagacgtcctcccccctatttctgttcttagttagagatgcagcagcttactcctgtagcgacctactaaaaagcaacaaggagaaagacatcgtctttttgaaaaaacgttctttcgtctcttttctttgttccttggtttgtttttcttgcccctttttgtttagttgaacggcaataggagggtagtctctccgtctttttaaactcttttttaagtttcccctcccctttcatattttttttcgccatttcttttagcattggactttggggtcgaaagcgtttctttttatttgcttcttttaagccgagcacagtttaggtttcgtgctgtcttaagagaactatccagcagcttcttgctcatccttattgggagaactgcaccgttactttaaaaacacacatacacaaaaaccttaagggagaaaggtaattgctgccatggaaacacaactgtctaatgggccaacttgcaataacacagccaatggtccaaccaccataaacaacaactgttcgtcaccagttgactctgggaacacagaagacagcaagaccaacttaatagtcaactaccttcctcagaacatgacacaggaggaactaaagagtctctttgggagcattggtgaaatagagtcctgtaagcttgtaagagacaaaataacagggcagagcttgggatatggctttgtgaactacattgaccccaaggatgcagagaaagctatcaacaccctgaatggattgagacttcaaaccaaaacaataaaagtttcctatgctcgcccaagttcagcttctatcagagatgcaaatttatatgtcagcggacttccaaaaacaatgacccagaaggagttggaacagcttttttcacaatatggacgcattattacttctcgtattcttgtcgaccaggtcactggcatatcaaggggtgtagggtttattcgatttgacaagcgaattgaggcagaagaagctatcaaaggcctaaatggccagaaacctcccggtgccacggagccaatcactgtaaagtttgctaataacccaagccaaaaaaccaatcaggccatcctttcccagctgtaccagtctccaaacagaaggtatccaggaccgctagctcagcaggcacagcgttttaggttggacaatctgctcaatatggcttatggagtaaagaggttttctccaatgaccattgacggaatgaccagtttggctggaattaatatccctgggcaccctggaacagggtggtgtatatttgtgtacaacctggctcctgacgcagatgagagtatcctgtggcaaatgtttgggccttttggagctgtcaccaatgtgaaggtcatccgtgactttaacaccaataaatgcaaaggttttggatttgtgactatgacaaactatgatgaggctgccatggcgatagctagcctcaatggataccgtctgggagacagagtactgcaggtctcctttaagacaaacaaaacgcacaaagcctaatgagctcttgtcctcagtccatttatatatgaaaactatacaacaaaggcaagttaagagaaactttatacattagtaaatgtctttgtaagtcagtgttgagatggggataaaatgactacttagcatcctaagaaatatgtgagattttttattgctagtatttgaattaaaacttcttaaatatcttttatgtttgaatatggacaagaggtacagggtttttacctgtcacattgcattctattgccttctttgaagaaggtggaccttttaaagtgtttcagctaagggaagacatttcttttctttttacataactgccttgaacctgtgagtaaatattgaggctttgtgttgtaattcttcagttggttgtgtcttttttttcccccctttttttcctttttctgattagctttgtgtttggtttacatttaaagcattgctgttatgtctgtttaagaaaagtattttgaagtttacatttttatttatgaagtttaaaacagtatttattttgtaattatgatttgggttggggaagggggggctacattataaacgcttattgtaagaatactggagaacttttcgtaaagcagtaccttgccaaagagataagagcctctttgatgtgggtttaaaaaaagcatctatttttataaaaaagaaaatttggagaaactttttactggtcctggaacaaatattttgacttgaatactttgagaaatctcttcata

SEQ ID NO: 129376 - DNA, 3805 bp, Homo sapiens
  Payload ID: 5305
  Gene Symbol: ELAVL2
  Gene Name: ELAV like neuron-specific RNA binding protein 2
  Uniprot ID: Q12926
  ENST ID: ENST00000397312
  CDS Start-End: 276-1355
caataggagggtagtctctccgtctttttaaactcttttttaagtttcccctcccctttcatattttttttcgccatttcttttagcattggactttggggtcgaaagcgtttctttttatttgcttcttttaagccgagcacagtttaggtttcgtgctgtcttaagagaactatccagcagcttcttgctcatccttattgggagaactgcaccgttactttaaaaacacacatacacaaaaaccttaagggagaaagcaggtaattgctgccatggaaacacaactgtctaatgggccaacttgcaataacacagccaatggtccaaccaccataaacaacaactgttcgtcaccagttgactctgggaacacagaagacagcaagaccaacttaatagtcaactaccttcctcagaacatgacacaggaggaactaaagagtctctttgggagcattggtgaaatagagtcctgtaagcttgtaagagacaaaataacagggcagagcttgggatatggctttgtgaactacattgaccccaaggatgcagagaaagctatcaacaccctgaatggattgagacttcaaaccaaaacaataaaagtttcctatgctcgcccaagttcagcttctatcagagatgcaaatttatatgtcagcggacttccaaaaacaatgacccagaaggagttggaacagcttttttcacaatatggacgcattattacttctcgtattcttgtcgaccaggtcactggcatatcaaggggtgtagggtttattcgatttgacaagcgaattgaggcagaagaagctatcaaaggcctaaatggccagaaacctcccggtgccacggagccaatcactgtaaagtttgctaataacccaagccaaaaaaccaatcaggccatcctttcccagctgtaccagtctccaaacagaaggtatccaggaccgctagctcagcaggcacagcgttttaggttggacaatctgctcaatatggcttatggagtaaagaggttttctccaatgaccattgacggaatgaccagtttggctggaattaatatccctgggcaccctggaacagggtggtgtatatttgtgtacaacctggctcctgacgcagatgagagtatcctgtggcaaatgtttgggccttttggagctgtcaccaatgtgaaggtcatccgtgactttaacaccaataaatgcaaaggttttggatttgtgactatgacaaactatgatgaggctgccatggcgatagctagcctcaatggataccgtctgggagacagagtactgcaggtctcctttaagacaaacaaaacgcacaaagcctaatgagctcttgtcctcagtccatttatatatgaaaactatacaacaaaggcaagttaagagaaactttatacattagtaaatgtctttgtaagtcagtgttgagatggggataaaatgactacttagcatcctaagaaatatgtgagattttttattgctagtatttgaattaaaacttcttaaatatcttttatgtttgaatatggacaagaggtacagggtttttacctgtcacattgcattctattgccttctttgaagaaggtggaccttttaaagtgtttcagctaagggaagacatttcttttctttttacataactgccttgaacctgtgagtaaatattgaggctttgtgttgtaattcttcagttggttgtgtcttttttttcccccctttttttcctttttctgattagctttgtgtttggtttacatttaaagcattgctgttatgtctgtttaagaaaagtattttgaagtttacatttttatttatgaagtttaaaacagtatttattttgtaattatgatttgggttggggaagggggggctacattataaacgcttattgtaagaatactggagaacttttcgtaaagcagtaccttgccaaagagataagagcctctttgatgtgggtttaaaaaaagcatctatttttataaaaaagaaaatttggagaaactttttactggtcctggaacaaatattttgacttgaatactttgagaaatctcttcatatgacacctagtgagcttttaaaatttaccaggaaatttgcagcggttggaaaatttagaaagatttatggtgtagaaaatacttttgagatctttgtatgaaaggagtagaatcaatggggggaaacactgctggtttcatttttgtaatcaccagtggagcgtctgatcatcctggttattatgtgataggtggctcacattgatttgtgattttgaaacaaataaaaaaaatttacaaaagaatatataagagcaggcaagaaatttaaattaccgagagatgggggaaaaaatctgttcttcctaaagaaatcccttcagatagagctcatggtgtttagtgatgtacttgcagtattgtttgaagaattgttttgtcttaaggaaaaaagacgttgcacatgatttgtactgcagcaaatcagcaaaagtgatctgagttggatatatttgaaggtattttgaaagttacgttcaaggctaacacctgagctttgtgtaatgtaaataagaccttgtgtttatgaacctttcagctaatttaattttttttcccttacatgccaagtgatgttcaggttttgaatgtttttgtatcagttttttcctttgtaaatggcattaacattgttacttgaggtcttgcttaatcacttttgttgtcctgaggacttgaatttacagtgcatcagatttgttgcaaattttgtctgtagatagtctagcttcagctgtttatggtgatgctacattttggtttataaatatgtttgtggtataaaaaaatgagtataaccataggttttgaacaaatttccttacatttttcatacaaaaatcataaatatctgtatgctattgaaatttaactttgtatgatgcttaaaaaccactatttggggaaataataaaataagtctttaccatgtatgaaagaaattttaaaaaatacaaaatattttctgattagcatctagcttataataaattttcaaaaaagctgaaggcaaaaatgccttcatcaggatgcactgagaactatatagttacgtcctgctttttgtataaactgagatgctcacatgcttccccttagaacaggcaatgtgctatgcataacatagttgtacattatctttgcggttgctttgagttttattttttattatttaaaattgtagttataaaatttttcagtatagtacagtacatatactgtgaggcgcgtgctaaagtgaataagcgagttttcatgctgacccactcaatgctattcagaaatcaattggcttagcactttctcatatccttaggtgcatttagattgccagagttaaccttctgcgtttaaaaaaagaaaaacactaaaaaataaaatacatgtatatacttaaaaaaaaataataaggtttccctcaagggaaaacagcagctacatgcttctttcctatactactgtagcaaaccaaggcattgatgagagggcatgcaaattgtgcttcactttacagtgttttatcagagcacttaataaaatgtaaggctggtatttatttgaagttgtacagtatgacttaattcacatctgttggaatagaaaatatattctgttgagtatttaagaggctgtacatgttttcttttgtgtttggattctttgtactttttcatgttcagtacatcaataaacaaagttgaaggg

SEQ ID NO: 129377 - DNA, 777 bp, Homo sapiens
  Payload ID: 5305
  Gene Symbol: ELAVL2
  Gene Name: ELAV like neuron-specific RNA binding protein 2
  ENST ID: ENST00000423281
  CDS Start-End: 506-777
ggctcacgcctgtaatcccagcacattgggaggccgaggttggcagatcagttgaagccaggagttcgagacgagcctggccaacgtggcgaaaccctgtctctactaaaaatacaaaaaaatagctgggtgtggtgatgcatgcctgtaatcccagctacttgggaggccgaggcagaagaatcgcttgaacccaggaggtggaagttgcagtgatccgagatcatgcccactgccatccagtctggatgacagagagagagaccttgcctcaaaagaagaaagatttgaattaatggtttgaaaattcttagaacacttgaccacagggcagagcttgggatatggctttgtgaactacattgaccccaaggatgcagagaaagctatcaacaccctgaatggattgagacttcaaaccaaaacaataaaagtttcctatgctcgcccaagttcagcttctatcagagatgcaaatttatatgtcagcggacttccaaaaacaatgacccagaaggagttggaacagcttttttcacaatatggacgcattattacttctcgtattcttgtcgaccaggtcactggcatatcaaggggtgtagggtttattcgatttgacaagcgaattgaggcagaagaagctatcaaaggcctaaatggccagaaacctcccggtgccacggagccaatcactgtaaagtttgctaataacccaagccaaaaaaccaatcaggccatcctttcccagctgtaccagtctccaaacagaaggta

SEQ ID NO: 129378 - DNA, 723 bp, Homo sapiens
  Payload ID: 5305
  Gene Symbol: ELAVL2
  Gene Name: ELAV like neuron-specific RNA binding protein 2
  ENST ID: ENST00000440102
  CDS Start-End: 155-723
gctttcttcccttgcctttgaagactttctgcaggccctggaattgcctttgttcctctgtctgcccactttgccagtgtgaagcaggttttcatgggattctactggggtaaaccaaaagcagcagaaaaagtgtgaacaggtaattgctgccatggaaacacaactgtctaatgggccaacttgcaataacacagccaatggtccaaccaccataaacaacaactgttcgtcaccagttgactctgggaacacagaagacagcaagaccaacttaatagtcaactaccttcctcagaacatgacacaggaggaactaaagagtctctttgggagcattggtgaaatagagtcctgtaagcttgtaagagacaaaataacagggcagagcttgggatatggctttgtgaactacattgaccccaaggatgcagagaaagctatcaacaccctgaatggattgagacttcaaaccaaaacaataaaagtttcctatgctcgcccaagttcagcttctatcagagatgcaaatttatatgtcagcggacttccaaaaacaatgacccagaaggagttggaacagcttttttcacaatatggacgcattattacttctcgtattcttgtcgaccaggtcactggcatatcaaggggtgtagggtttattcgatttgacaagcgaattgaggcagaagaagctatcaaaggcctaaatggccagaa

SEQ ID NO: 129379 - DNA, 3789 bp, Homo sapiens
  Payload ID: 5305
  Gene Symbol: ELAVL2
  Gene Name: ELAV like neuron-specific RNA binding protein 2
  Uniprot ID: Q12926
  ENST ID: ENST00000544538
  CDS Start-End: 260-1339
acaaacggcgggaccgcggcgcctgggcgtcactgaggcagtagccggccgggtgaggagggcggttgccggcgcggcgcggcgcggcgcgggtggggcgggggttccgccggcttccagtcccctttcccgccgccgccgccgccaccgcctctccgcggagctcgccccgagcgactcctccgcggcagtgctgacggccagcggcacgagccgtagtagctgcagcttcgagtcacagcagcaggtaattgctgccatggaaacacaactgtctaatgggccaacttgcaataacacagccaatggtccaaccaccataaacaacaactgttcgtcaccagttgactctgggaacacagaagacagcaagaccaacttaatagtcaactaccttcctcagaacatgacacaggaggaactaaagagtctctttgggagcattggtgaaatagagtcctgtaagcttgtaagagacaaaataacagggcagagcttgggatatggctttgtgaactacattgaccccaaggatgcagagaaagctatcaacaccctgaatggattgagacttcaaaccaaaacaataaaagtttcctatgctcgcccaagttcagcttctatcagagatgcaaatttatatgtcagcggacttccaaaaacaatgacccagaaggagttggaacagcttttttcacaatatggacgcattattacttctcgtattcttgtcgaccaggtcactggcatatcaaggggtgtagggtttattcgatttgacaagcgaattgaggcagaagaagctatcaaaggcctaaatggccagaaacctcccggtgccacggagccaatcactgtaaagtttgctaataacccaagccaaaaaaccaatcaggccatcctttcccagctgtaccagtctccaaacagaaggtatccaggaccgctagctcagcaggcacagcgttttaggttggacaatctgctcaatatggcttatggagtaaagaggttttctccaatgaccattgacggaatgaccagtttggctggaattaatatccctgggcaccctggaacagggtggtgtatatttgtgtacaacctggctcctgacgcagatgagagtatcctgtggcaaatgtttgggccttttggagctgtcaccaatgtgaaggtcatccgtgactttaacaccaataaatgcaaaggttttggatttgtgactatgacaaactatgatgaggctgccatggcgatagctagcctcaatggataccgtctgggagacagagtactgcaggtctcctttaagacaaacaaaacgcacaaagcctaatgagctcttgtcctcagtccatttatatatgaaaactatacaacaaaggcaagttaagagaaactttatacattagtaaatgtctttgtaagtcagtgttgagatggggataaaatgactacttagcatcctaagaaatatgtgagattttttattgctagtatttgaattaaaacttcttaaatatcttttatgtttgaatatggacaagaggtacagggtttttacctgtcacattgcattctattgccttctttgaagaaggtggaccttttaaagtgtttcagctaagggaagacatttcttttctttttacataactgccttgaacctgtgagtaaatattgaggctttgtgttgtaattcttcagttggttgtgtcttttttttcccccctttttttcctttttctgattagctttgtgtttggtttacatttaaagcattgctgttatgtctgtttaagaaaagtattttgaagtttacatttttatttatgaagtttaaaacagtatttattttgtaattatgatttgggttggggaagggggggctacattataaacgcttattgtaagaatactggagaacttttcgtaaagcagtaccttgccaaagagataagagcctctttgatgtgggtttaaaaaaagcatctatttttataaaaaagaaaatttggagaaactttttactggtcctggaacaaatattttgacttgaatactttgagaaatctcttcatatgacacctagtgagcttttaaaatttaccaggaaatttgcagcggttggaaaatttagaaagatttatggtgtagaaaatacttttgagatctttgtatgaaaggagtagaatcaatggggggaaacactgctggtttcatttttgtaatcaccagtggagcgtctgatcatcctggttattatgtgataggtggctcacattgatttgtgattttgaaacaaataaaaaaaatttacaaaagaatatataagagcaggcaagaaatttaaattaccgagagatgggggaaaaaatctgttcttcctaaagaaatcccttcagatagagctcatggtgtttagtgatgtacttgcagtattgtttgaagaattgttttgtcttaaggaaaaaagacgttgcacatgatttgtactgcagcaaatcagcaaaagtgatctgagttggatatatttgaaggtattttgaaagttacgttcaaggctaacacctgagctttgtgtaatgtaaataagaccttgtgtttatgaacctttcagctaatttaattttttttcccttacatgccaagtgatgttcaggttttgaatgtttttgtatcagttttttcctttgtaaatggcattaacattgttacttgaggtcttgcttaatcacttttgttgtcctgaggacttgaatttacagtgcatcagatttgttgcaaattttgtctgtagatagtctagcttcagctgtttatggtgatgctacattttggtttataaatatgtttgtggtataaaaaaatgagtataaccataggttttgaacaaatttccttacatttttcatacaaaaatcataaatatctgtatgctattgaaatttaactttgtatgatgcttaaaaaccactatttggggaaataataaaataagtctttaccatgtatgaaagaaattttaaaaaatacaaaatattttctgattagcatctagcttataataaattttcaaaaaagctgaaggcaaaaatgccttcatcaggatgcactgagaactatatagttacgtcctgctttttgtataaactgagatgctcacatgcttccccttagaacaggcaatgtgctatgcataacatagttgtacattatctttgcggttgctttgagttttattttttattatttaaaattgtagttataaaatttttcagtatagtacagtacatatactgtgaggcgcgtgctaaagtgaataagcgagttttcatgctgacccactcaatgctattcagaaatcaattggcttagcactttctcatatccttaggtgcatttagattgccagagttaaccttctgcgtttaaaaaaagaaaaacactaaaaaataaaatacatgtatatacttaaaaaaaaataataaggtttccctcaagggaaaacagcagctacatgcttctttcctatactactgtagcaaaccaaggcattgatgagagggcatgcaaattgtgcttcactttacagtgttttatcagagcacttaataaaatgtaaggctggtatttatttgaagttgtacagtatgacttaattcacatctgttggaatagaaaatatattctgttgagtatttaagaggctgtacatgttttcttttgtgtttggattctttgtactttttcatgttcagtacatcaataaacaaagttgaaggg

SEQ ID NO: 129380 - DNA, 4729 bp, Homo sapiens
  Payload ID: 5306
  Gene Symbol: ELAVL3
  Gene Name: ELAV like neuron-specific RNA binding protein 3
  Uniprot ID: Q14576
  ENST ID: ENST00000359227
  CDS Start-End: 426-1529
cgcagcgcgggccggagggagggagggagggtgggcgaggggagaggacttgaacacacgggaccggacaggaccgaccgaggggcggcggcgaaaggcagagcgccgcgatctctgtcgggaagcgcaacctccccgggccccgcggggccgcgcagggggcgtcctcaaccccgcgcccgctccctctttccatcccctgccgcccgcaggccaccccggggcccggccatccgcgcgcgcatccccgggttcgggcccgtccctggccctcgagggagccgccgccttcatcgccacatctgcagcggccgcaccagaggccgcccgggcgggaccccagcgtgagcatcgggcgcccccctaggagtgcaccacccccggagcccccctcaacacggaccgcgcccgccgggcacacaagaatggtcactcagatactgggggccatggagtctcaggtgggggggggcccggccggcccggccctgcccaacgggccactccttggtacaaatggagccactgacgacagcaagaccaacctcatcgtcaactacctgccccagaacatgacccaggatgagttcaagagtctcttcggcagcattggcgacatcgagtcctgcaagttggttcgggacaagatcacagggcagagccttggctacgggtttgtgaactattctgaccccaatgatgcagacaaagccatcaacaccctcaacggcctcaaattacagacgaagaccatcaaggtgtcctatgccagacccagttcagcatccatccgggatgctaacctgtacgtcagcgggctccccaagaccatgagccagaaagagatggagcagctcttctcccagtacggccgcatcatcacgtcccgcatcctggtggaccaggtcacaggtgtctctcggggtgtgggattcatccgctttgacaagaggattgaggccgaagaggctatcaaaggactgaatgggcagaagccgctgggcgcagctgagcccatcacagtcaagttcgcgaacaacccaagtcagaagacggggcaggcgctgctcacccacctctaccagtcatccgcccggcgctacgcaggccccctacaccatcagacccagcgtttccggctggacaatttgctcaacatggcctacggcgtcaagagtcccctgtcgctcatcgccaggttctcgccgatcgccatcgatggtatgagcggcctggcgggcgtgggcctgtcggggggcgcggcgggcgccggctggtgcatcttcgtgtacaacctgtcaccggaggcagacgagagcgtgctgtggcagctgttcgggccttttggggcagtcaccaacgtcaaggtcatccgtgatttcaccaccaacaagtgcaagggtttcggcttcgtgaccatgaccaactatgacgaggcggccatggccatcgccagcctgaacggctatcgcctgggcgagcgcgtgctgcaggtctccttcaagaccagcaaacagcacaaggcgtgagcccaccccgcctgccctcccaccccctccccgggcagcagagagagagagagagaaagagagagagagagagagaaggggcccaagagagacagcacaggcagccccacggacgacgcgagggccccacgtccctgcggaagccacagggtgagcactctggggtgggagggtctgcagggaattgggggggtgcccggggatcccccgccccatcctcctgcccccaccccaggctgggctgttcactctctcgtcttggtttggttcatggtgaaggtttttgtttcttttttcggctaaaaagaatgcagagatgtgcccccacccccaccctcgaccacccccgatgggatggcttggggggctccagggggtgccctcccagacccccttgcccaggcctccccagcacctaggtggggcctggggtaggaggaacaggtttaaaaatccccaaaaaagcgaaccgtgaggaggggtgtgggcacccccggcccagtgccccctggtggaatgcgggggagcaggcagtggggctggaagcagaaacaaaatgaaaaaaaaaggggggtgggaggggaagaaaaactctatttttgtaaaaagggaaaaagacctcgtggagaatttttactggggattcttgaacttgaaaaaaaaaaacacaaaaaaagacaaaaaaaaaaaaagaaaatattttggcaggttatgtttaccaactggggcgggggtggggggggcccagggagcagggcttaggggctagcagcccacggggccacacagagaaacaaccacgcagacagtcacaccacggggacacacggacagacgcagacggacacagcgacatgccccagacacgttaagggactggttggccaaactcagacacgtggacagggatagacagaaagagacagaagctggggctacgtccatgtggacacagaccacagatgtgggcacacgaatccatccacctgtccacgtgcacacgtgaatgtagcgatagatatttggacatcaaatttggacaccaggtcacggagaaacacaaacaccacccaggaacacgcagacatatgcccatagcatcccacaggcccaggcaggaggtcccaccccagaccctgccccagacgctccctcaccctctcggccccctcgccctggcccccaggttctctgcagagatctctcctggacccccagcggtctccttggcgcccacgaacacaggcgtgcacacgcagcgcacatgcattgagacacacgatacctcgttccaccttggcgtcacggtgggctggaggcagcccccccccccacaacacttgaggccaaaggacacccctgtccccggggctcagcctccccctgggccgaggccttggcccacacagctgagggagaggcccagccctgagcctcccccaccaggactgggcctccccggcagcaagaccccggcactccccgccaggcccagggtggggtggatgggcccaaaggcccagccccacactcctttcccgtccacttgtcacctacctatcccctttcggtttgttgggtttttcgtctttccagattgcagtggacacagcccccgatctcgagccccggcccccggcttctgtctggacattgcatcgccctagttttctttctttaaaaaaaaaaaattccaacagaagccacaggccggagcccctgggagccctcgcaccgctccccaccccactcagcggccccatcggaactgagaattgcaaaacccccgactttagctatagttaagttgccttcccccggtgtccccacgtttggtgtctggctatggcgcccccatctgactgtccagctctctctcccccacccctcccggtgttgttattaaacgtctgtggagcttctgctgcaaggaacaaaaaagaaaaaaatcaaaaaagcgacaaaaaaacacaaacagaagaggaaaaaaaagcaacaaaaaaagaaaacacacagaagagatttaaaaaaaaaaaaggaaaaaaaaaaaagacataaactggcaccagttaactttcttgtacttttttgctgaatttagcttcttgtagttttaacttattgctatgttaactatttattctcctcgttgccctgtaaggacatccgtgtatatttctgttacttcatccggtttgcaagttaaaggaacgacaatgttctctttgtttctttaagttttgccgagacatggttatgcctaatttatttataaaaggggaagtggaatcattaaagtaataataattattaataacagtaatggtagccgagtggcacgcgggggcgtgtgctctgcgggacagtccccacggccagcgacgtccaggtcaccaatgggattctttttgctcttgtcttgagaattttttcagtcctatttagctggtgaaatccctagcttgttcttgatacacgaacctatttattctcgtggttttaagtcctccctgccctctctcctctcccctgcagcagggcagggacccctctcccctgctgtctcttggggctctctcccctccgccctctgcattcgggaacacgcacgtccgcgtgggaagcttgcagcagggcgtccgagcaataagggctgggtttgtcccccaccctggggggggccaggctccagagagggggcacctccccacacaccccccccccaccgaggcctaggcccctgccacccccaagactgggaggggacttctttttctaaaacacaaaactcagcccagccaggccccctccctggaggccagcccctccccgcagggggccaggccggggctcccaggcgagggggacttggggcttccacgtccctggggggcaggggccaggccaggggggagggggctcagcccctccacccctcccttcatcctgttatttattcggaaggtttcaaatcacgacagagtccatgttggaggtgataaaaaactgtaaaaaaaaaaaaaaaaaaaaagacaaaacaaaagacaaaaaaaaaaaaaaaacccaacaagaacacttcgcgttgcgtttagactatttattaccgggatcacaggcctggccgcggtaacagacttttacatggaattgtttaattatttgtacttttcatgccagaaaataaaagttcagaatcttaa

SEQ ID NO: 129381 - DNA, 1223 bp, Homo sapiens
  Payload ID: 5306
  Gene Symbol: ELAVL3
  Gene Name: ELAV like neuron-specific RNA binding protein 3
  Uniprot ID: Q14576
  ENST ID: ENST00000438662
  CDS Start-End: 18-1100
ccgccgggcacacaagaatggtcactcagatactgggggccatggagtctcaggtgggggggggcccggccggcccggccctgcccaacgggccactccttggtacaaatggagccactgacgacagcaagaccaacctcatcgtcaactacctgccccagaacatgacccaggatgagttcaagagtctcttcggcagcattggcgacatcgagtcctgcaagttggttcgggacaagatcacagggcagagccttggctacgggtttgtgaactattctgaccccaatgatgcagacaaagccatcaacaccctcaacggcctcaaattacagacgaagaccatcaaggtgtcctatgccagacccagttcagcatccatccgggatgctaacctgtacgtcagcgggctccccaagaccatgagccagaaagagatggagcagctcttctcccagtacggccgcatcatcacgtcccgcatcctggtggaccaggtcacaggtgtctctcggggtgtgggattcatccgctttgacaagaggattgaggccgaagaggctatcaaaggactgaatgggcagaagccgctgggcgcagctgagcccatcacagtcaagttcgcgaacaacccaagtcagaagacggggcaggcgctgctcacccacctctaccagtcatccgcccggcgctacgcaggccccctacaccatcagacccagcgtttccggctggacaatttgctcaacatggcctacggcgtcaagaggttctcgccgatcgccatcgatggtatgagcggcctggcgggcgtgggcctgtcggggggcgcggcgggcgccggctggtgcatcttcgtgtacaacctgtcaccggaggcagacgagagcgtgctgtggcagctgttcgggccttttggggcagtcaccaacgtcaaggtcatccgtgatttcaccaccaacaagtgcaagggtttcggcttcgtgaccatgaccaactatgacgaggcggccatggccatcgccagcctgaacggctatcgcctgggcgagcgcgtgctgcaggtctccttcaagaccagcaaacagcacaaggcgtgagcccaccccgcctgccctcccaccccctccccgggcagcagagagagagagagagaaagagagagagagagagagaaggggcccaagagagacagcacaggcagccccacggacgacgcgagg

SEQ ID NO: 129382 - DNA, 367 bp, Homo sapiens
  Payload ID: 5306
  Gene Symbol: ELAVL3
  Gene Name: ELAV like neuron-specific RNA binding protein 3
  ENST ID: ENST00000588853
  CDS Start-End: 90-367
accccagcgtgagcatcgggcgcccccctaggagtgcaccacccccggagcccccctcaacacggaccgcgcccgccgggcacacaagaatggtcactcagatactgggggccatggagtctcaggtgggggggggcccggccggcccggccctgcccaacgggccactccttggtacaaatggagccactgacgacagcaagaccaacctcatcgtcaactacctgccccagaacatgacccaggatgagttcaagagtctcttcggcagcattggcgacatcgagtcctgcaagttggttcgggacaagatcacagacaaagccatcaacaccctcaacggcctcaaattacagacgaagaccat

SEQ ID NO: 129383 - DNA, 1442 bp, Homo sapiens
  Payload ID: 5307
  Gene Symbol: ELAVL4
  Gene Name: ELAV like neuron-specific RNA binding protein 4
  ENST ID: ENST00000357083
  CDS Start-End: 13-1221
tgccggcgactgatgctgagatatctgcaacctttgggatgtgtgcatggtggcaaggggctgactgatatgagattacttcttttaagggaaattgtcattaatgagtcaagaaactgctcatttatgataattagcaccatggagcctcaggtgtcaaatggtccgacatccaatacaagcaatggaccctccagcaacaacagaaactgtccttctcccatgcaaacaggggcaaccacagatgacagcaaaaccaacctcatcgtcaactatttaccccagaatatgacccaagaagaattcaggagtctcttcgggagcattggtgaaatagaatcctgcaaacttgtgagagacaaaattacaggacagagtttagggtatggatttgttaactatattgatccaaaggatgcagagaaagccatcaacactttaaatggactcagactccagaccaaaaccataaaggtctcatatgcccgtccgagctctgcctcaatcagggatgctaacctctatgttagcggccttcccaaaaccatgacccagaaggaactggagcaacttttctcgcaatacggccgtatcatcacctcacgaatcctggttgatcaagtcacaggagtgtccagaggggtgggattcatccgctttgataagaggattgaggcagaagaagccatcaaagggctgaatggccagaagcccagcggtgctacggaaccgattactgtgaagtttgccaacaaccccagccagaagtccagccaggccctgctctcccagctctaccagtcccccaaccggcgctacccaggtccacttcaccaccaggctcagaggttcaggctggacaatttgcttaatatggcctatggcgtaaagaggttctccccaattaccattgatggaatgacaagccttgtgggaatgaacatccctggtcacacaggaactgggtggtgcatctttgtctacaacctgtcccccgattccgatgagagtgtcctctggcagctctttggcccctttggagcagtgaacaacgtaaaggtgattcgtgacttcaacaccaacaagtgcaagggattcggctttgtcaccatgaccaactatgatgaggcggccatggccatcgccagcctcaacgggtaccgcctgggagacagagtgttgcaagtttcctttaaaaccaacaaagcccacaagtcctgaatttcccattcttacttactaaaatatatatagaaatatatacgaacaaaacacacgcgcgcacacacacacatacacgaaagagagagaaacaaacttttcaaggcttatattcaaccatggactttataagccagtgttgcctaagtattaaaacattggattatcctgaggtgtaccaggaaaggattttataatgcttagaaaaaaagaaaaaaaaa

SEQ ID NO: 129384 - DNA, 2467 bp, Homo sapiens
  Payload ID: 5307
  Gene Symbol: ELAVL4
  Gene Name: ELAV like neuron-specific RNA binding protein 4
  ENST ID: ENST00000371819
  CDS Start-End: 236-1351
aaagagagtgatttatttgggcttcagtaaatgctgcatcttgtatttcaaagagtttcctgtcatgacctcataaaaaagaggaggcggcttgtatgtgtagcagtgcctggcgtgttgagttgttgcttccttctctgggcagcagctctgtaagaaggaatgtcagcttttacataacgttcctttccgcttttgacacactgtgtgagggtccatcttcttctgatcacagatggagtggaatggcttgaagatgataattagcaccatggagcctcaggtgtcaaatggtccgacatccaatacaagcaatggaccctccagcaacaacagaaactgtccttctcccatgcaaacaggggcaaccacagatgacagcaaaaccaacctcatcgtcaactatttaccccagaatatgacccaagaagaattcaggagtctcttcgggagcattggtgaaatagaatcctgcaaacttgtgagagacaaaattacaggacagagtttagggtatggatttgttaactatattgatccaaaggatgcagagaaagccatcaacactttaaatggactcagactccagaccaaaaccataaaggtctcatatgcccgtccgagctctgcctcaatcagggatgctaacctctatgttagcggccttcccaaaaccatgacccagaaggaactggagcaacttttctcgcaatacggccgtatcatcacctcacgaatcctggttgatcaagtcacaggagtgtccagaggggtgggattcatccgctttgataagaggattgaggcagaagaagccatcaaagggctgaatggccagaagcccagcggtgctacggaaccgattactgtgaagtttgccaacaaccccagccagaagtccagccaggccctgctctcccagctctaccagtcccccaaccggcgctacccaggtccacttcaccaccaggctcagaggttcaggctggacaatttgcttaatatggcctatggcgtaaagaggttctccccaattaccattgatggaatgacaagccttgtgggaatgaacatccctggtcacacaggaactgggtggtgcatctttgtctacaacctgtcccccgattccgatgagagtgtcctctggcagctctttggcccctttggagcagtgaacaacgtaaaggtgattcgtgacttcaacaccaacaagtgcaagggattcggctttgtcaccatgaccaactatgatgaggcggccatggccatcgccagcctcaacgggtaccgcctgggagacagagtgttgcaagtttcctttaaaaccaacaaagcccacaagtcctgaatttcccattcttacttactaaaatatatatagaaatatatacgaacaaaacacacgcgcgcacacacacacatacacgaaagagagagaaacaaacttttcaaggcttatattcaaccatggactttataagccagtgttgcctaagtattaaaacattggattatcctgaggtgtaccaggaaaggattttataatgcttagaaaaaaagaaaaaaaaaaaacaaaaaatacctttgatgcattgaatgttctttcatagctgtcgttgttgaatataatatacatagatagcgatgtgcagggatttttacccagccagctaactttactaccttccttgaaggtggatctttttaagatgaccattcgctcatttgaagaagaaaaacaaaaaacaaaaaaaataataaaaataaaacaatttttacaaagtaatgggattcaaagaaaggaaaaaaagatttttcttttttgtcaaaatatcgatccaatcagattggtaaaaacccccacacaaattaaagaggaataataaaaattgcaaaaataaaaaaaaacttttgcaaatttttttatttttccttctttcttttatatcatgtgaactaaaacagtcttctgttaggggatgggggcaagggggatacctgatgacattaacaatttaataacattaacattgttgccaaagaggtggtctctttgctgaaaatgggtttcaagaaaaatctatttttataaaatataaagaatttttacaagagaatctggatttgagaaaaaaatattttgactggctaatttaggggaaattgacaactttgtcgcgttcatactgcactggtaactttttagagatcaagatgtgtgttttaaactggattcgtagactgttttttgaaggatgggctataaacagatgatcttcatatcttttcatagcatgtaataataattaaaaaacaattattaattactaggggaaaggagtgttcgttctacccagggtaccacagttccccacagtcaaaacccaaaagcaaggagatgagttgaaagacagtttttctttaagtcatcagtatgggatgtcagcagaacaaaaattaaaaa

SEQ ID NO: 129385 - DNA, 3349 bp, Homo sapiens
  Payload ID: 5307
  Gene Symbol: ELAVL4
  Gene Name: ELAV like neuron-specific RNA binding protein 4
  ENST ID: ENST00000371821
  CDS Start-End: 316-1473
taaacctcgagaggcagctcctggatactgaacactgagatgggcagttgtgtttcgggggactgcgcagtcaaaacggcaaagagagtgatttatttgggcttcagtaaatgctgcatcttgtatttcaaagagtttcctgtcatgacctcataaaaaagaggaggcggcttgtatgtgtagcagtgcctggcgtgttgagttgttgcttccttctctgggcagcagctctgtaagaaggaatgtcagcttttacataacgttcctttccgcttttgacacactgtgtgagggtccatcttcttctgatcacagatggagtggaatggcttgaagatgataattagcaccatggagcctcaggtgtcaaatggtccgacatccaatacaagcaatggaccctccagcaacaacagaaactgtccttctcccatgcaaacaggggcaaccacagatgacagcaaaaccaacctcatcgtcaactatttaccccagaatatgacccaagaagaattcaggagtctcttcgggagcattggtgaaatagaatcctgcaaacttgtgagagacaaaattacaggacagagtttagggtatggatttgttaactatattgatccaaaggatgcagagaaagccatcaacactttaaatggactcagactccagaccaaaaccataaaggtctcatatgcccgtccgagctctgcctcaatcagggatgctaacctctatgttagcggccttcccaaaaccatgacccagaaggaactggagcaacttttctcgcaatacggccgtatcatcacctcacgaatcctggttgatcaagtcacaggagtgtccagaggggtgggattcatccgctttgataagaggattgaggcagaagaagccatcaaagggctgaatggccagaagcccagcggtgctacggaaccgattactgtgaagtttgccaacaaccccagccagaagtccagccaggccctgctctcccagctctaccagtcccccaaccggcgctacccaggtccacttcaccaccaggctcagaggttcaggctggacaatttgcttaatatggcctatggcgtaaagagactgatgtctggaccagtccccccttctgcttgtccccccaggttctccccaattaccattgatggaatgacaagccttgtgggaatgaacatccctggtcacacaggaactgggtggtgcatctttgtctacaacctgtcccccgattccgatgagagtgtcctctggcagctctttggcccctttggagcagtgaacaacgtaaaggtgattcgtgacttcaacaccaacaagtgcaagggattcggctttgtcaccatgaccaactatgatgaggcggccatggccatcgccagcctcaacgggtaccgcctgggagacagagtgttgcaagtttcctttaaaaccaacaaagcccacaagtcctgaatttcccattcttacttactaaaatatatatagaaatatatacgaacaaaacacacgcgcgcacacacacacatacacgaaagagagagaaacaaacttttcaaggcttatattcaaccatggactttataagccagtgttgcctaagtattaaaacattggattatcctgaggtgtaccaggaaaggattttataatgcttagaaaaaaagaaaaaaaaaaaacaaaaaatacctttgatgcattgaatgttctttcatagctgtcgttgttgaatataatatacatagatagcgatgtgcagggatttttacccagccagctaactttactaccttccttgaaggtggatctttttaagatgaccattcgctcatttgaagaagaaaaacaaaaaacaaaaaaaataataaaaataaaacaatttttacaaagtaatgggattcaaagaaaggaaaaaaagatttttcttttttgtcaaaatatcgatccaatcagattggtaaaaacccccacacaaattaaagaggaataataaaaattgcaaaaataaaaaaaaacttttgcaaatttttttatttttccttctttcttttatatcatgtgaactaaaacagtcttctgttaggggatgggggcaagggggatacctgatgacattaacaatttaataacattaacattgttgccaaagaggtggtctctttgctgaaaatgggtttcaagaaaaatctatttttataaaatataaagaatttttacaagagaatctggatttgagaaaaaaatattttgactggctaatttaggggaaattgacaactttgtcgcgttcatactgcactggtaactttttagagatcaagatgtgtgttttaaactggattcgtagactgttttttgaaggatgggctataaacagatgatcttcatatcttttcatagcatgtaataataattaaaaaacaattattaattactaggggaaaggagtgttcgttctacccagggtaccacagttccccacagtcaaaacccaaaagcaaggagatgagttgaaagacagtttttctttaagtcatcagtatgggatgtcagcagaacaaaaattaaaaagattaattttccttttgatctaaaacttccttagtttgagcagtaggtgctacaaaattatttacatatcttagtatcatagttaaatgtaatgtgtttaggagaggaaaacaaaagatacatttgctttaaattcattaagaaattttcaaattcactttgtagcccatgctgatagaattgggctgtgttggtacatttgaaacactgtttatgttgcttgaaacacttatttatttaatcgccgatgtgatgatgcctatggccgagatcaaatatagctagattggctagactacttatttgtttacttaaactatgggaagaagcatattattgtgtcattctgttgtgtgtgtatgtgtatatacaatataaatatatatatataaagttattttttctttgggttaatttattataagttgtaacacttggctagttttgtttgtatatgtcttaaaatgttttcttatgatatttaagtgacagttaaagaggtatcaaggtaacttgtgtagaactattctttgatatattgtcatgtttgttgtgaatattttttcttactgcacagtagaaaaataaaaacaactgagtctttattttaatgtaactcagattggggaaaacaaaacagagctaagggaacaaaatgactgagggagcactctcccacgtccagtgcactgatcattttagtatgtttgtgctttgtacggttatatatttaaaacgaaaacaaaacaaaaaaatacaa

SEQ ID NO: 129386 - DNA, 1591 bp, Homo sapiens
  Payload ID: 5307
  Gene Symbol: ELAVL4
  Gene Name: ELAV like neuron-specific RNA binding protein 4
  Uniprot ID: P26378
  ENST ID: ENST00000371823
  CDS Start-End: 225-1367
tagaatcgggggtttcagctcactgctccttttcttttttttctttctctcccccgcccacccccccaaaaataattgatttgctttacaatcatccacactgtgttttgtggatctttaattatatataacaatagtagtcattttaaatatatattctgaaatctttgcaaattttaacagaagagtcgaagctctgcgagacccaatatttgccaataagaatggttatgataattagcaccatggagcctcaggtgtcaaatggtccgacatccaatacaagcaatggaccctccagcaacaacagaaactgtccttctcccatgcaaacaggggcaaccacagatgacagcaaaaccaacctcatcgtcaactatttaccccagaatatgacccaagaagaattcaggagtctcttcgggagcattggtgaaatagaatcctgcaaacttgtgagagacaaaattacaggacagagtttagggtatggatttgttaactatattgatccaaaggatgcagagaaagccatcaacactttaaatggactcagactccagaccaaaaccataaaggtctcatatgcccgtccgagctctgcctcaatcagggatgctaacctctatgttagcggccttcccaaaaccatgacccagaaggaactggagcaacttttctcgcaatacggccgtatcatcacctcacgaatcctggttgatcaagtcacaggagtgtccagaggggtgggattcatccgctttgataagaggattgaggcagaagaagccatcaaagggctgaatggccagaagcccagcggtgctacggaaccgattactgtgaagtttgccaacaaccccagccagaagtccagccaggccctgctctcccagctctaccagtcccccaaccggcgctacccaggtccacttcaccaccaggctcagaggttcaggctggacaatttgcttaatatggcctatggcgtaaagagactgatgtctggaccagtccccccttctgcttgtccccccaggttctccccaattaccattgatggaatgacaagccttgtgggaatgaacatccctggtcacacaggaactgggtggtgcatctttgtctacaacctgtcccccgattccgatgagagtgtcctctggcagctctttggcccctttggagcagtgaacaacgtaaaggtgattcgtgacttcaacaccaacaagtgcaagggattcggctttgtcaccatgaccaactatgatgaggcggccatggccatcgccagcctcaacgggtaccgcctgggagacagagtgttgcaagtttcctttaaaaccaacaaagcccacaagtcctgaatttcccattcttacttactaaaatatatatagaaatatatacgaacaaaacacacgcgcgcacacacacacatacacgaaagagagagaaacaaacttttcaaggcttatattcaaccatggactttataagccagtgttgcctaagtattaaaacattggattatcctgaggtgtaccaggaaaggattttataatgcttagaaaaaaagaaaaaaaaaaaa

SEQ ID NO: 129387 - DNA, 3966 bp, Homo sapiens
  Payload ID: 5307
  Gene Symbol: ELAVL4
  Gene Name: ELAV like neuron-specific RNA binding protein 4
  Uniprot ID: P26378
  ENST ID: ENST00000371824
  CDS Start-End: 258-1358
caaggctctgttcagttgttcttatctacatcctagaatcgggggtttcagctcactgctccttttcttttttttctttctctcccccgcccacccccccaaaaataattgatttgctttacaatcatccacactgtgttttgtggatctttaattatatataacaatagtagtcattttaaatatatattctgaaatctttgcaaattttaacagaagagtcgaagctctgcgagacccaatatttgccaataagaatggttatgataattagcaccatggagcctcaggtgtcaaatggtccgacatccaatacaagcaatggaccctccagcaacaacagaaactgtccttctcccatgcaaacaggggcaaccacagatgacagcaaaaccaacctcatcgtcaactatttaccccagaatatgacccaagaagaattcaggagtctcttcgggagcattggtgaaatagaatcctgcaaacttgtgagagacaaaattacaggacagagtttagggtatggatttgttaactatattgatccaaaggatgcagagaaagccatcaacactttaaatggactcagactccagaccaaaaccataaaggtctcatatgcccgtccgagctctgcctcaatcagggatgctaacctctatgttagcggccttcccaaaaccatgacccagaaggaactggagcaacttttctcgcaatacggccgtatcatcacctcacgaatcctggttgatcaagtcacaggagtgtccagaggggtgggattcatccgctttgataagaggattgaggcagaagaagccatcaaagggctgaatggccagaagcccagcggtgctacggaaccgattactgtgaagtttgccaacaaccccagccagaagtccagccaggccctgctctcccagctctaccagtcccccaaccggcgctacccaggtccacttcaccaccaggctcagaggttcaggctggacaatttgcttaatatggcctatggcgtaaagaggttctccccaattaccattgatggaatgacaagccttgtgggaatgaacatccctggtcacacaggaactgggtggtgcatctttgtctacaacctgtcccccgattccgatgagagtgtcctctggcagctctttggcccctttggagcagtgaacaacgtaaaggtgattcgtgacttcaacaccaacaagtgcaagggattcggctttgtcaccatgaccaactatgatgaggcggccatggccatcgccagcctcaacgggtaccgcctgggagacagagtgttgcaagtttcctttaaaaccaacaaagcccacaagtcctgaatttcccattcttacttactaaaatatatatagaaatatatacgaacaaaacacacgcgcgcacacacacacatacacgaaagagagagaaacaaacttttcaaggcttatattcaaccatggactttataagccagtgttgcctaagtattaaaacattggattatcctgaggtgtaccaggaaaggattttataatgcttagaaaaaaagaaaaaaaaaaaacaaaaaatacctttgatgcattgaatgttctttcatagctgtcgttgttgaatataatatacatagatagcgatgtgcagggatttttacccagccagctaactttactaccttccttgaaggtggatctttttaagatgaccattcgctcatttgaagaagaaaaacaaaaaacaaaaaaaataataaaaataaaacaatttttacaaagtaatgggattcaaagaaaggaaaaaaagatttttcttttttgtcaaaatatcgatccaatcagattggtaaaaacccccacacaaattaaagaggaataataaaaattgcaaaaataaaaaaaaacttttgcaaatttttttatttttccttctttcttttatatcatgtgaactaaaacagtcttctgttaggggatgggggcaagggggatacctgatgacattaacaatttaataacattaacattgttgccaaagaggtggtctctttgctgaaaatgggtttcaagaaaaatctatttttataaaatataaagaatttttacaagagaatctggatttgagaaaaaaatattttgactggctaatttaggggaaattgacaactttgtcgcgttcatactgcactggtaactttttagagatcaagatgtgtgttttaaactggattcgtagactgttttttgaaggatgggctataaacagatgatcttcatatcttttcatagcatgtaataataattaaaaaacaattattaattactaggggaaaggagtgttcgttctacccagggtaccacagttccccacagtcaaaacccaaaagcaaggagatgagttgaaagacagtttttctttaagtcatcagtatgggatgtcagcagaacaaaaattaaaaagattaattttccttttgatctaaaacttccttagtttgagcagtaggtgctacaaaattatttacatatcttagtatcatagttaaatgtaatgtgtttaggagaggaaaacaaaagatacatttgctttaaattcattaagaaattttcaaattcactttgtagcccatgctgatagaattgggctgtgttggtacatttgaaacactgtttatgttgcttgaaacacttatttatttaatcgccgatgtgatgatgcctatggccgagatcaaatatagctagattggctagactacttatttgtttacttaaactatgggaagaagcatattattgtgtcattctgttgtgtgtgtatgtgtatatacaatataaatatatatatataaagttattttttctttgggttaatttattataagttgtaacacttggctagttttgtttgtatatgtcttaaaatgttttcttatgatatttaagtgacagttaaagaggtatcaaggtaacttgtgtagaactattctttgatatattgtcatgtttgttgtgaatattttttcttactgcacagtagaaaaataaaaacaactgagtctttattttaatgtaactcagattggggaaaacaaaacagagctaagggaacaaaatgactgagggagcactctcccacgtccagtgcactgatcattttagtatgtttgtgctttgtacggttatatatttaaaacgaaaacaaaacaaaaaaatacaagggttcatgctcttccctgggtaatagaaacagttactcgctatgcataatctagttgatagttaaatttgctattgcttttcttgtcttgttatataaaatcttttcaatacaagtttagtcttaatggtaataaaacgttatggttatttataacttgtgcttattttgtgcattttttcccatgctgaacccactaagtgcatgtagacaggactgttgttttcacactgaaaaggcaaactttgtagtagtcgttgtagtggtagacagataacgaataccaaggctgcatcatagactcctcctttaaattttttttctgtttttttttcctcttttcggttttggatataacaccagatttcagttcagagaacactcgttcaacattcagggaaagctttttacgtcacctgctatgaatgaacgtagtttgctggcaaagttttgatgcatttgctaagcattagtgggaaaggcatgccaaaatcttctctataatgtgttcaatcttgggggaaaaaaaaaggaaaaaaaatcttaggaccaggcagttgtatactttagttattaatgaatgacttcatgttaatcttgctagtttagatgatttccaagggaaagtattgtaaatgtttttttttcataatcttgttgtgtttgaattatttgtactttatctgtccagacaataaatgaaagtgtgtagaatggatttgacttcccaaa

SEQ ID NO: 129388 - DNA, 3775 bp, Homo sapiens
  Payload ID: 5307
  Gene Symbol: ELAVL4
  Gene Name: ELAV like neuron-specific RNA binding protein 4
  Uniprot ID: P26378
  ENST ID: ENST00000371827
  CDS Start-End: 83-1183
gtctgacttggagttttgtgctgttgcacgtgaatgctctggaactgccctaatcgactgaaaatgagccggctacagtcatatggaacagataattagcaccatggagcctcaggtgtcaaatggtccgacatccaatacaagcaatggaccctccagcaacaacagaaactgtccttctcccatgcaaacaggggcaaccacagatgacagcaaaaccaacctcatcgtcaactatttaccccagaatatgacccaagaagaattcaggagtctcttcgggagcattggtgaaatagaatcctgcaaacttgtgagagacaaaattacaggacagagtttagggtatggatttgttaactatattgatccaaaggatgcagagaaagccatcaacactttaaatggactcagactccagaccaaaaccataaaggtctcatatgcccgtccgagctctgcctcaatcagggatgctaacctctatgttagcggccttcccaaaaccatgacccagaaggaactggagcaacttttctcgcaatacggccgtatcatcacctcacgaatcctggttgatcaagtcacaggagtgtccagaggggtgggattcatccgctttgataagaggattgaggcagaagaagccatcaaagggctgaatggccagaagcccagcggtgctacggaaccgattactgtgaagtttgccaacaaccccagccagaagtccagccaggccctgctctcccagctctaccagtcccccaaccggcgctacccaggtccacttcaccaccaggctcagaggttcaggctggacaatttgcttaatatggcctatggcgtaaagaggttctccccaattaccattgatggaatgacaagccttgtgggaatgaacatccctggtcacacaggaactgggtggtgcatctttgtctacaacctgtcccccgattccgatgagagtgtcctctggcagctctttggcccctttggagcagtgaacaacgtaaaggtgattcgtgacttcaacaccaacaagtgcaagggattcggctttgtcaccatgaccaactatgatgaggcggccatggccatcgccagcctcaacgggtaccgcctgggagacagagtgttgcaagtttcctttaaaaccaacaaagcccacaagtcctgaatttcccattcttacttactaaaatatatatagaaatatatacgaacaaaacacacgcgcgcacacacacacatacacgaaagagagagaaacaaacttttcaaggcttatattcaaccatggactttataagccagtgttgcctaagtattaaaacattggattatcctgaggtgtaccaggaaaggattttataatgcttagaaaaaaagaaaaaaaaaaaacaaaaaatacctttgatgcattgaatgttctttcatagctgtcgttgttgaatataatatacatagatagcgatgtgcagggatttttacccagccagctaactttactaccttccttgaaggtggatctttttaagatgaccattcgctcatttgaagaagaaaaacaaaaaacaaaaaaaataataaaaataaaacaatttttacaaagtaatgggattcaaagaaaggaaaaaaagatttttcttttttgtcaaaatatcgatccaatcagattggtaaaaacccccacacaaattaaagaggaataataaaaattgcaaaaataaaaaaaaacttttgcaaatttttttatttttccttctttcttttatatcatgtgaactaaaacagtcttctgttaggggatgggggcaagggggatacctgatgacattaacaatttaataacattaacattgttgccaaagaggtggtctctttgctgaaaatgggtttcaagaaaaatctatttttataaaatataaagaatttttacaagagaatctggatttgagaaaaaaatattttgactggctaatttaggggaaattgacaactttgtcgcgttcatactgcactggtaactttttagagatcaagatgtgtgttttaaactggattcgtagactgttttttgaaggatgggctataaacagatgatcttcatatcttttcatagcatgtaataataattaaaaaacaattattaattactaggggaaaggagtgttcgttctacccagggtaccacagttccccacagtcaaaacccaaaagcaaggagatgagttgaaagacagtttttctttaagtcatcagtatgggatgtcagcagaacaaaaattaaaaagattaattttccttttgatctaaaacttccttagtttgagcagtaggtgctacaaaattatttacatatcttagtatcatagttaaatgtaatgtgtttaggagaggaaaacaaaagatacatttgctttaaattcattaagaaattttcaaattcactttgtagcccatgctgatagaattgggctgtgttggtacatttgaaacactgtttatgttgcttgaaacacttatttatttaatcgccgatgtgatgatgcctatggccgagatcaaatatagctagattggctagactacttatttgtttacttaaactatgggaagaagcatattattgtgtcattctgttgtgtgtgtatgtgtatatacaatataaatatatatatataaagttattttttctttgggttaatttattataagttgtaacacttggctagttttgtttgtatatgtcttaaaatgttttcttatgatatttaagtgacagttaaagaggtatcaaggtaacttgtgtagaactattctttgatatattgtcatgtttgttgtgaatattttttcttactgcacagtagaaaaataaaaacaactgagtctttattttaatgtaactcagattggggaaaacaaaacagagctaagggaacaaaatgactgagggagcactctcccacgtccagtgcactgatcattttagtatgtttgtgctttgtacggttatatatttaaaacgaaaacaaaacaaaaaaatacaagggttcatgctcttccctgggtaatagaaacagttactcgctatgcataatctagttgatagttaaatttgctattgcttttcttgtcttgttatataaaatcttttcaatacaagtttagtcttaatggtaataaaacgttatggttatttataacttgtgcttattttgtgcattttttcccatgctgaacccactaagtgcatgtagacaggactgttgttttcacactgaaaaggcaaactttgtagtagtcgttgtagtggtagacagataacgaataccaaggctgcatcatagactcctcctttaaattttttttctgtttttttttcctcttttcggttttggatataacaccagatttcagttcagagaacactcgttcaacattcagggaaagctttttacgtcacctgctatgaatgaacgtagtttgctggcaaagttttgatgcatttgctaagcattagtgggaaaggcatgccaaaatcttctctataatgtgttcaatcttgggggaaaaaaaaaggaaaaaaaatcttaggaccaggcagttgtatactttagttattaatgaatgacttcatgttaatcttgctagtttagatgatttccaagggaaagtattgtaaatgtttttttttcataatcttgttgtgtttgaattatttgtactttatctgtccagacaataaatgaaagtgtgtagaatg

SEQ ID NO: 129389 - DNA, 1951 bp, Homo sapiens
  Payload ID: 5307
  Gene Symbol: ELAVL4
  Gene Name: ELAV like neuron-specific RNA binding protein 4
  Uniprot ID: P26378
  ENST ID: ENST00000448907
  CDS Start-End: 152-1261
aggtgggcagggggtggcggcggcgacggtggcggagccgcagagcgagctagagagcgagagcggtgagactctgcggacgtcttcccgcccgccgcgctccgccccacccagcctccgcagcctcgggccggatcgcccggcggggaagatgcgcctcaagaaccagataattagcaccatggagcctcaggtgtcaaatggtccgacatccaatacaagcaatggaccctccagcaacaacagaaactgtccttctcccatgcaaacaggggcaaccacagatgacagcaaaaccaacctcatcgtcaactatttaccccagaatatgacccaagaagaattcaggagtctcttcgggagcattggtgaaatagaatcctgcaaacttgtgagagacaaaattacaggacagagtttagggtatggatttgttaactatattgatccaaaggatgcagagaaagccatcaacactttaaatggactcagactccagaccaaaaccataaaggtctcatatgcccgtccgagctctgcctcaatcagggatgctaacctctatgttagcggccttcccaaaaccatgacccagaaggaactggagcaacttttctcgcaatacggccgtatcatcacctcacgaatcctggttgatcaagtcacaggagtgtccagaggggtgggattcatccgctttgataagaggattgaggcagaagaagccatcaaagggctgaatggccagaagcccagcggtgctacggaaccgattactgtgaagtttgccaacaaccccagccagaagtccagccaggccctgctctcccagctctaccagtcccccaaccggcgctacccaggtccacttcaccaccaggctcagaggttcaggctggacaatttgcttaatatggcctatggcgtaaagaggttctccccaattaccattgatggaatgacaagccttgtgggaatgaacatccctggtcacacaggaactgggtggtgcatctttgtctacaacctgtcccccgattccgatgagagtgtcctctggcagctctttggcccctttggagcagtgaacaacgtaaaggtgattcgtgacttcaacaccaacaagtgcaagggattcggctttgtcaccatgaccaactatgatgaggcggccatggccatcgccagcctcaacgggtaccgcctgggagacagagtgttgcaagtttcctttaaaaccaacaaagcccacaagtcctgaatttcccattcttacttactaaaatatatatagaaatatatacgaacaaaacacacgcgcgcacacacacacatacacgaaagagagagaaacaaacttttcaaggcttatattcaaccatggactttataagccagtgttgcctaagtattaaaacattggattatcctgaggtgtaccaggaaaggattttataatgcttagaaaaaaagaaaaaaaaaaaacaaaaaatacctttgatgcattgaatgttctttcatagctgtcgttgttgaatataatatacatagatagcgatgtgcagggatttttacccagccagctaactttactaccttccttgaaggtggatctttttaagatgaccattcgctcatttgaagaagaaaaacaaaaaacaaaaaaaataataaaaataaaacaatttttacaaagtaatgggattcaaagaaaggaaaaaaagatttttcttttttgtcaaaatatcgatccaatcagattggtaaaaacccccacacaaattaaagaggaataataaaaattgcaaaaataaaaaaaaacttttgcaaatttttttatttttccttctttcttttatatcatgtgaactaaaacagtcttctgttaggggatgggggcaagggggatacctgatgacattaacaatttaataacattaacattgttgcc

SEQ ID NO: 129390 - DNA, 2312 bp, Homo sapiens
  Payload ID: 5308
  Gene Symbol: ELAVL1
  Gene Name: ELAV like RNA binding protein 1
  Uniprot ID: Q15717
  ENST ID: ENST00000351593
  CDS Start-End: 124-1104
ccgtcgccgccacctccgccgccgcttcgacccctgcagaggttcctgggccgccgccgcctcctcactggaccgggcagccccgggcccagccccctcccctccagatttttgaaaaatacaatgtctaatggttatgaagaccacatggccgaagactgcaggggtgacatcgggagaacgaatttgatcgtcaactacctccctcagaacatgacccaggatgagttacgaagcctgttcagcagcattggtgaagttgaatctgcaaaacttattcgggataaagtagcaggacacagcttgggctatggctttgtgaactacgtgaccgcgaaggatgcagagagagcgatcaacacgctgaacggcttgaggctccagtcaaaaaccattaaggtgtcgtatgctcgcccgagctcagaggtgatcaaagacgccaacttgtacatcagcgggctcccgcggaccatgacccagaaggacgtagaagacatgttctctcggtttgggcggatcatcaactcgcgggtcctcgtggatcagactacaggtttgtccagaggggttgcgtttatccggtttgacaaacggtcggaggcagaagaggcaattaccagtttcaatggtcataaacccccaggttcctctgagcccatcacagtgaagtttgcagccaaccccaaccagaacaaaaacgtggcactcctctcgcagctgtaccactcgccagcgcgacggttcggaggccccgttcaccaccaggcgcagagattcaggttctcccccatgggcgtcgatcacatgagcgggctctctggcgtcaacgtgccaggaaacgcctcctccggctggtgcattttcatctacaacctggggcaggatgccgacgaggggatcctctggcagatgtttgggccgtttggtgccgtcaccaatgtgaaagtgatccgcgacttcaacaccaacaagtgcaaagggtttggctttgtgaccatgacaaactatgaagaagccgcgatggccatagccagcctgaacggctaccgcctgggggacaaaatcttacaggtttccttcaaaaccaacaagtcccacaaataactcgctcatgcttttttttgtacggaatagataattaagagtgaaggagttgaaacttttcttgttagtgtacaactcattttgcgccaattttcacaagtgtttgtctttgtctgaatgagaagtgagaaggtttttatactctgggatgcaaccgacatgttcaaatgtttgaaatcccacaatgttagaccaatcttaagtttcgtaagttatttcctttaagatatatattaaacagaaatctaagtagaactgcattgactaaccagtccctctggatggtggtgaacctgaagcatgctttaacctctaagactgtctaacacgcgtttcattcaatgtctccacagactgggtagcaaaaaaatcaccttttagttttagtttttaatctaaagatgttagacagatgctgagtgtgcgttttctcaaccgcttcaacattgtaagcgatgtatgctttggttgacaggaagttccttttccaggcaggtcccgttgccacctcctgctcactcagtcccgggctctgccgagtggtcctgggaatggcggcgggcccgtccagcgtgggccaccactggggccgggggccacgggctgcatgctgggcgggccctccagagaaggacacaaacgtgtttcgtaagcccaggcaccaatgggaatggaccaaagagtttcagggaaactccagtatattccagagtcagatctaagctccaggcacgcctgaagatgtgttgctactctgacatcccgagtttctgtccacacattgcatgcacagcgccccacacattggatactgttgttcacgataatttctcccgttttccagagcatttaacatagcttggaggcgtaaaatggctctgtattttaataacacagaaacatttgagcattgtatttctcgcatcccttctcgtgagcgcttagacctttttctattttagtcggattttgttttggaattttgcttttgtatgaacactcagcagaaaagtacttacttcttgccagttatctattaaccaaaacctttgatttgtagttttaaagattaaccctcaaagttctcttcataactgccttgacattttgggttgttctgttctgttaattttcttttgcttttttgtgttttttgtttgtttttacttttgcatttaagaccattaaatttgattttgttttgctcg

SEQ ID NO: 129391 - DNA, 6015 bp, Homo sapiens
  Payload ID: 5308
  Gene Symbol: ELAVL1
  Gene Name: ELAV like RNA binding protein 1
  Uniprot ID: Q15717
  ENST ID: ENST00000407627
  CDS Start-End: 131-1111
ccgtcgccgccaccgccgccaccgctaccgaggccgagcggagccgttagcgccgcgccgccgccgcctcccgcccgccccggagcagccccgggcccgcccgcccgcatccagatttttgaaaaatacaatgtctaatggttatgaagaccacatggccgaagactgcaggggtgacatcgggagaacgaatttgatcgtcaactacctccctcagaacatgacccaggatgagttacgaagcctgttcagcagcattggtgaagttgaatctgcaaaacttattcgggataaagtagcaggacacagcttgggctatggctttgtgaactacgtgaccgcgaaggatgcagagagagcgatcaacacgctgaacggcttgaggctccagtcaaaaaccattaaggtgtcgtatgctcgcccgagctcagaggtgatcaaagacgccaacttgtacatcagcgggctcccgcggaccatgacccagaaggacgtagaagacatgttctctcggtttgggcggatcatcaactcgcgggtcctcgtggatcagactacaggtttgtccagaggggttgcgtttatccggtttgacaaacggtcggaggcagaagaggcaattaccagtttcaatggtcataaacccccaggttcctctgagcccatcacagtgaagtttgcagccaaccccaaccagaacaaaaacgtggcactcctctcgcagctgtaccactcgccagcgcgacggttcggaggccccgttcaccaccaggcgcagagattcaggttctcccccatgggcgtcgatcacatgagcgggctctctggcgtcaacgtgccaggaaacgcctcctccggctggtgcattttcatctacaacctggggcaggatgccgacgaggggatcctctggcagatgtttgggccgtttggtgccgtcaccaatgtgaaagtgatccgcgacttcaacaccaacaagtgcaaagggtttggctttgtgaccatgacaaactatgaagaagccgcgatggccatagccagcctgaacggctaccgcctgggggacaaaatcttacaggtttccttcaaaaccaacaagtcccacaaataactcgctcatgcttttttttgtacggaatagataattaagagtgaaggagttgaaacttttcttgttagtgtacaactcattttgcgccaattttcacaagtgtttgtctttgtctgaatgagaagtgagaaggtttttatactctgggatgcaaccgacatgttcaaatgtttgaaatcccacaatgttagaccaatcttaagtttcgtaagttatttcctttaagatatatattaaacagaaatctaagtagaactgcattgactaaccagtccctctggatggtggtgaacctgaagcatgctttaacctctaagactgtctaacacgcgtttcattcaatgtctccacagactgggtagcaaaaaaatcaccttttagttttagtttttaatctaaagatgttagacagatgctgagtgtgcgttttctcaaccgcttcaacattgtaagcgatgtatgctttggttgacaggaagttccttttccaggcaggtcccgttgccacctcctgctcactcagtcccgggctctgccgagtggtcctgggaatggcggcgggcccgtccagcgtgggccaccactggggccgggggccacgggctgcatgctgggcgggccctccagagaaggacacaaacgtgtttcgtaagcccaggcaccaatgggaatggaccaaagagtttcagggaaactccagtatattccagagtcagatctaagctccaggcacgcctgaagatgtgttgctactctgacatcccgagtttctgtccacacattgcatgcacagcgccccacacattggatactgttgttcacgataatttctcccgttttccagagcatttaacatagcttggaggcgtaaaatggctctgtattttaataacacagaaacatttgagcattgtatttctcgcatcccttctcgtgagcgcttagacctttttctattttagtcggattttgttttggaattttgcttttgtatgaacactcagcagaaaagtacttacttcttgccagttatctattaaccaaaacctttgatttgtagttttaaagattaaccctcaaagttctcttcataactgccttgacattttgggttgttctgttctgttaattttcttttgcttttttgtgttttttgtttgtttttacttttgcatttaagaccattaaatttgattttgttttgctcgaattttgttttgttttttattttaccttttctttctttttggctagggaaggtgcaggtggcccagcattcagggaggagtcgtaagatcttaagaaaccaatccttgcctcaagcaaaagcatttctgaatctgtgacgcaagaatgtgcagttacaggctggtggcttttaaaccaggagcccggaggaagggtgaaagagaaagcctgtgaaataggcagggccagatcacccaaaactcctcaggactgggatctggcgtttataaataactagtttacagagagaatcacaaacaggataacttagtaccagcagtttttaaccttgacgtgagactaaaacgtgaccgtaggctgttttttagttattgctctcatgagatgatggctgtatttatctgtttatttatacctatttatgtatttatttattgaagtgtgaaattgagcaataggcaggcaccaccgtccccagagcaggtcagcgtctcgagaggcccctggacaattgaggatgcccatcccctcccctttccctgatcttttactgaggggctgtgtgcgcgatccttgcaaattgatgatgttgccatccgtacccaggctgtgtctcataaaagtcggcctggtgccagagaggacctcctttctcccacagaatcccagatcctcaggaaaagccaaaaccgaggcccattgcccggattcgacacaaaagagggtccctgctctgttgcccgagagcagtctgcatcctgggaccagaatgctttcctggaaaaagaagcctttcaggtttccctgggccagcatcttctgatggaaggtgggagccaacacccttctgatggaaggtgggagccaacacccttctgatggaaggtgggagccaacacccttctgatggaaggtgggagccaacacccttctgatggaaggtgggagccaacacccttctgatggaaggcgggattcccgcttctgaaactccccctggagtctcactcccacacatgcccatagctagcattcaacagagaactctgtcttaagcttcaactgtgaaaatgatgacgggcttgtagcacctcagcttctttcctcgcccccttttatctgaatcctatcaattattctgatgctgggacaggtgagaagaaactgtgaagtatatgagcctttgaaagttccctgaagtttctcagttcaggaacattctcattgtatgtggtctccgctgtttgaacagccttctagctaaaaaattccaaagcctttatttgggagtcttagcttgcaagcttgtggaaggatttagcttaacaactgtcactcctgaaaagcaatctctgttccatcaaggttctagttgctggccctgtgtcctcaaagttcattacatcttatcaaggcctgtttgcaaaggggagatcccttttcttaaaaaaggctcaacccaaaagaaaccatttcttaaaaaattttacatagatcagttgtatttctatttagcaaaaatgagtgctctgcttttatttgggaatttcgatgaaaaagcgttcagagtagataatgttcatttatcaaaaatctggtttgggaaataccaaagaggctttgattgaattcccttttgacccgtgtgtaacttcctctggtagttagaccccaggcagctccgaatttgtgaacctgcttcctgatgaattctcccttgttcccccttggctctgccattatttcgttttcagtgtaatttgccaagccgcagttttctgtgctggctgtgcctctagtcgcagctctgtgactgattccctcccgggtgctgagtcccctccccggccaccatcctgcgtgaatatcctgaaattcatgggcttcctcgggggcccgcccgcaggtggtgctgggtgggttccgccaccttctcctggaaggtgagccttttcctggccaagggcagctgccttaacctctgagagtctgcgcttggccttagtcctggagacccagcctccagggactgaaccgtgctgctgttgggagccaagaccggccctttggagccggcagcccaggggtccctgctggatcagagaaatagaagcacccgaagacggttagtggcaattccttgacccggtttgcttccaaatgaaggccatttgtccaccaggcattgaaaagacatgacttacccagtccggcatcggacttgaaaaatcgaaattgacatcactcagctgttacatttcacatccgattcagcccccttttatttccatgtgcttttcgcagccttcctgtgttggatgaaagagaataagaattcagctgacaggaggcctctatcctgtccctccaccccaccctccacctcaatcccctcccatcttccccagacctacctcacctactaggacctgaggcagctccttagcagagacccctggggtttagctgactctgggggtcaggggttcctgtccccaaacttcgcaagacagccctgaagtcacaagtgctttcttttaagtggcattggcaattggcgtgtaatgatggcagtagaatctgaatctcggatcccaggcagggttcacatttccaaacctttttgatttcccctgacctctaatggctggatcctatttttctacaacctttcagtgacatcgttcaggtttctttcttggccatttaaaaaaacaaattttttttttctcacttgtaagtcaccgccagtacctaagttaggctaacggagactttgacaggactggatttttcttccaccagaagagaagccttttccgttggtttggggccacctctttgaccatgaccatgtgatgttccgtttacagtgacttgctttgggggaggggaggctctcttaaccgattcccatgttgtacagtagatggttagaccttttgtatattagtgtgttttaagttattgatttgttttatataaaataatttatttttcaggtgccatttttcattttaactttgtttttacatgggtttgttttcaataaagtctgacactggtgtccaaaagtcaacaataaaatgaatcccattgtgttcttttgaagatgcctatgtaacttttaagctttttaaattattttcagaaaaaaaaaaagaaaagcccttatcagttttccatcagcccattgcctttttattttttttttttaatccttgtgaataaatgttctttagtgttttaggaggaaaaagcaaacctagattttgataacccagaagacttcagattaataaagaagctttgaaagaagaccatttttcaaaattttagtgaagtgtgaatattttttgtcaatggctttctcaaagagaatgaaacttttgcaccattttcagagtttttatagagatgccaaattgatatatttacatgtaatggaaacatgaaaaagttttattaaacaattgttcatagctgtgtagacattttaattcagtttccaaagctctcaaaaaatcgtatttttgaagtacggagtgatgcggtttggggcgtggcttacagttccaacgactcaattgtcccgatactcagttctttctacaggtatcaggttcgtgttaaacgctgtatgttaactatgactggaattctgtgatattttggtaataaatgaagtgggatca

SEQ ID NO: 129392 - DNA, 856 bp, Homo sapiens
  Payload ID: 5308
  Gene Symbol: ELAVL1
  Gene Name: ELAV like RNA binding protein 1
  ENST ID: ENST00000593807
  CDS Start-End: 182-643
cgcgggccggagcgggtcgtgcgcgctgaggaggagccgctgccgccgtcgccgtcgccgccaccgccgccaccgctaccgaggccgagcggagccgttagcgccgcgccgccgccgcctcccgcccgccccggagcagccccgggcccgcccgcccgcatccagatttttgaaaaatacaatgtctaatggttatgaagaccacatggccgaagactgcaggggtgacatcgggagaacgaatttgatcgtcaactacctccctcagaacatgacccaggatgagttacgaagcctgttcagcagcattggtgaagttgaatctgcaaaacttattcgggataaagtagcaggacacagcttgggctatggctttgtgaactacgtgaccgcgaaggatgcagagagagcgatcaacacgctgaacggcttgaggctccagtcaaaaaccattaaggtgtcgtatgctcgcccgagctcagaggtgatcaaagacgccaacttgtacatcagcgggctcccgcggaccatgacccagaaggacgtagaagacatgttctctcggtttgggcggatcatcaactcgcgggtcctcgtggatcagactacagttattccgcaaacgaggacagcaccaaaatgagaagacgttggctttggtttgaggaggctgaggaggttctcccccatgggcgtcgatcacatgagcgggctctctggcgtcaacgtgccaggaaacgcctcctccggctggtgcattttcatctacaacctggggcaggatgccgacgaggggatcctctggcagatgtttgggccgtttggtgccgtcaccaatgtgaaagtgatccgcgac

SEQ ID NO: 129393 - DNA, 880 bp, Homo sapiens
  Payload ID: 5308
  Gene Symbol: ELAVL1
  Gene Name: ELAV like RNA binding protein 1
  ENST ID: ENST00000596154
  CDS Start-End: 1-402
ggcttgaggctccagtcaaaaaccattaaggtgtcgtatgctcgcccgagctcagaggtgatcaaagacgccaacttgtacatcagcgggctcccgcggaccatgacccagaaggacgtagaagacatgttctctcggtttgggcggatcatcaactcgcgggtcctcgtggatcagactacagaatcccagatcctcaggaaaagccaaaaccgaggcccattgcccggattcgacacaaaagagggtccctgctctgttgcccgagagcagtctgcatcctgggaccagaatgctttcctggaaaaagaagcctttcaggtttccctgggccagcatcttctgatggaaggtgggagccaacacccttctgatggaaggtgggagccaacacccttctgatggaaggtgggagccaacacccttctgatggaaggtgggagccaacacccttctgatggaaggtgggagccaacacccttctgatggaaggcgggattcccgcttctgaaactccccctggagtctcactcccacacatgcccatagctagcattcaacagagaactctgtcttaagcttcaactgtgaaaatgatgacgggcttgtagcacctcagcttctttcctcgcccccttttatctgaatcctatcaattattctgatgctgggacaggtgagaagaaactgtgaagtatatgagcctttgaaagttccctgaagtttctcagttcaggaacattctcattgtatgtggtctccgctgtttgaacagccttctagctaaaaaattccaaagcctttatttgggagtcttagcttgcaagcttgtggaaggatttagcttaacaactgtcactcctgaaaagcaatctctgtt

SEQ ID NO: 129394 - DNA, 1473 bp, Homo sapiens
  Payload ID: 5308
  Gene Symbol: ELAVL1
  Gene Name: ELAV like RNA binding protein 1
  Uniprot ID: Q15717
  ENST ID: ENST00000596459
  CDS Start-End: 169-1149
aagcccggaggtgggaacatcgcagtgttcagagaacatcgtgtgttcaaagaaccacgtgggttctttagggacaagaaggctgagatgggtagtggtggcaggagtgctcaggtgtccactgggcagagggcttggctgttaccctgcagatttttgaaaaatacaatgtctaatggttatgaagaccacatggccgaagactgcaggggtgacatcgggagaacgaatttgatcgtcaactacctccctcagaacatgacccaggatgagttacgaagcctgttcagcagcattggtgaagttgaatctgcaaaacttattcgggataaagtagcaggacacagcttgggctatggctttgtgaactacgtgaccgcgaaggatgcagagagagcgatcaacacgctgaacggcttgaggctccagtcaaaaaccattaaggtgtcgtatgctcgcccgagctcagaggtgatcaaagacgccaacttgtacatcagcgggctcccgcggaccatgacccagaaggacgtagaagacatgttctctcggtttgggcggatcatcaactcgcgggtcctcgtggatcagactacaggtttgtccagaggggttgcgtttatccggtttgacaaacggtcggaggcagaagaggcaattaccagtttcaatggtcataaacccccaggttcctctgagcccatcacagtgaagtttgcagccaaccccaaccagaacaaaaacgtggcactcctctcgcagctgtaccactcgccagcgcgacggttcggaggccccgttcaccaccaggcgcagagattcaggttctcccccatgggcgtcgatcacatgagcgggctctctggcgtcaacgtgccaggaaacgcctcctccggctggtgcattttcatctacaacctggggcaggatgccgacgaggggatcctctggcagatgtttgggccgtttggtgccgtcaccaatgtgaaagtgatccgcgacttcaacaccaacaagtgcaaagggtttggctttgtgaccatgacaaactatgaagaagccgcgatggccatagccagcctgaacggctaccgcctgggggacaaaatcttacaggtttccttcaaaaccaacaagtcccacaaataactcgctcatgcttttttttgtacggaatagataattaagagtgaaggagttgaaacttttcttgttagtgtacaactcattttgcgccaattttcacaagtgtttgtctttgtctgaatgagaagtgagaaggtttttatactctgggatgcaaccgacatgttcaaatgtttgaaatcccacaatgttagaccaatcttaagtttcgtaagttatttcctttaagatatatattaaacagaaatctaagtagaactgcattgactaaccagtccctctggatggtggtgaacctgaagcatgctttaacctctaagactgtct

SEQ ID NO: 129395 - DNA, 1289 bp, Homo sapiens
  Payload ID: 5309
  Gene Symbol: ETFA
  Gene Name: electron-transfer-flavoprotein, alpha polypeptide
  ENST ID: ENST00000267950
  CDS Start-End: 61-255
gcgccagttggccgggcacggggctgctgtaaggccgaggttgcggcggaagcggagaccatgttccgagcggcggctccggggcagctccggcgggcggcctcattgctacgatttcagagtaccctggtaatagctgagcatgcaaatgattccctagcacccattactttaaataccattactgcagccacacgccttggaggtgaagtgtcctgcttagtagctggaaccaaatgtgacaagaggaactgacaccattgattttggcaactcagaagcagttcaattacacacacatctgtgctggagcatctgccttcggaaagaaccttttgcccagagtagcagccaaacttgaggttgccccgatttctgacatcattgcaatcaagtcacctgacacatttgtgagaactatttatgcaggaaatgctctatgtacagtgaagtgtgatgagaaagtgaaagtgttttctgtccgtggaacatcctttgatgctgcagcaacaagtggcggtagtgccagttcagaaaaggcatcaagtacttcaccagtggaaatatcagagtggcttgaccagaaattaacaaaaagtgatcgaccagagctaacaggtgccaaagtggtggtatctggtggtcgaggcttgaagagtggagagaactttaagttgttatatgacttggcagatcaactacatgctgcagttggtgcttcccgtgctgctgttgatgctggctttgttcccaatgacatgcaagttggacagacgggaaaaatagtagcaccagaactttatattgctgttggaatatctggagccatccaacatttagctgggatgaaagacagcaagacaattgtggcaattaataaagacccagaagctccaattttccaagtggcagattatggaatagttgcagatttatttaaggtagttcctgaaatgactgagatattgaagaaaaaatgaatcaggatcatgccttaaaaagaaaacttttgttaaagtattccactgaaatcacagatatttgtgggtattataacaatcattggaaagcatggagagctacatttcataatttgagggaaaatttctaacagatgccagaatgcttgtttatgggattgctgtgtttccttttaattatttgtggttccaaacaattattgtttgaactttttaaattctgtactaaaatctataataaagcttttccacagctttaaaactatcagaaatatgcctagcctctagagaaaattgaagaaaaggagt

SEQ ID NO: 129396 - DNA, 1346 bp, Homo sapiens
  Payload ID: 5309
  Gene Symbol: ETFA
  Gene Name: electron-transfer-flavoprotein, alpha polypeptide
  Uniprot ID: P13804
  ENST ID: ENST00000433983
  CDS Start-End: 17-871
ggcggaagcggagaccatgttccgagcggcggctccggggcagctccggcgggcggtggcacaagatctctgtaaagtagcaggcatagcaaaagttctggtggctcagcatgatgtgtacaaaggcctacttccagaggaactgacaccattgattttggcaactcagaagcagttcaattacacacacatctgtgctggagcatctgccttcggaaagaaccttttgcccagagtagcagccaaacttgaggttgccccgatttctgacatcattgcaatcaagtcacctgacacatttgtgagaactatttatgcaggaaatgctctatgtacagtgaagtgtgatgagaaagtgaaagtgttttctgtccgtggaacatcctttgatgctgcagcaacaagtggcggtagtgccagttcagaaaaggcatcaagtacttcaccagtggaaatatcagagtggcttgaccagaaattaacaaaaagtgatcgaccagagctaacaggtgccaaagtggtggtatctggtggtcgaggcttgaagagtggagagaactttaagttgttatatgacttggcagatcaactacatgctgcagttggtgcttcccgtgctgctgttgatgctggctttgttcccaatgacatgcaagttggacagacgggaaaaatagtagcaccagaactttatattgctgttggaatatctggagccatccaacatttagctgggatgaaagacagcaagacaattgtggcaattaataaagacccagaagctccaattttccaagtggcagattatggaatagttgcagatttatttaaggtagttcctgaaatgactgagatattgaagaaaaaatgaatcaggatcatgccttaaaaagaaaacttttgttaaagtattccactgaaatcacagatatttgtgggtattataacaatcattggaaagcatggagagctacatttcataatttgagggaaaatttctaacagatgccagaatgcttgtttatgggattgctgtgtttccttttaattatttgtggttccaaacaattattgtttgaactttttaaattctgtactaaaatctataataaagcttttccacagctttaaaactatcagaaatatgcctagcctctagagaaaattgaagaaaaggagtaaaaattttgtttatttatttatttttttgcctttcttgttcatggagagctctatgttttaggaagattgtaaacatgattgtctccaccagcctaatcaacctactaatctcattgttgaagggcaaacttcataggagaaggtaactgaattggcaagtgcag

SEQ ID NO: 129397 - DNA, 792 bp, Homo sapiens
  Payload ID: 5309
  Gene Symbol: ETFA
  Gene Name: electron-transfer-flavoprotein, alpha polypeptide
  ENST ID: ENST00000559602
  CDS Start-End: 27-716
ccgaggttgcggcggaagcggagaccatgttccgagcggcggctccggggcagctccggcgggcgaaccttttgcccagagtagcagccaaacttgaggttgccccgatttctgacatcattgcaatcaagtcacctgacacatttgtgagaactatttatgcaggaaatgctctatgtacagtgaagtgtgatgagaaagtgaaagtgttttctgtccgtggaacatcctttgatgctgcagcaacaagtggcggtagtgccagttcagaaaaggcatcaagtacttcaccagtggaaatatcagagtggcttgaccagaaattaacaaaaagtgatcgaccagagctaacaggtgccaaagtggtggtatctggtggtcgaggcttgaagagtggagagaactttaagttgttatatgacttggcagatcaactacatgctgcagttggtgcttcccgtgctgctgttgatgctggctttgttcccaatgacatgcaagttggacagacgggaaaaatagtagcaccagaactttatattgctgttggaatatctggagccatccaacatttagctgggatgaaagacagcaagacaattgtggcaattaataaagacccagaagctccaattttccaagtggcagattatggaatagttgcagatttatttaaggtagttcctgaaatgactgagatattgaagaaaaaatgaatcaggatcatgccttaaaaagaaaacttttgttaaagtattccactgaaatcacagatatttgtgggtattataa

SEQ ID NO: 129398 - DNA, 2287 bp, Homo sapiens
  Payload ID: 5309
  Gene Symbol: ETFA
  Gene Name: electron-transfer-flavoprotein, alpha polypeptide
  Uniprot ID: P13804
  ENST ID: ENST00000557943
  CDS Start-End: 82-1083
attaggtgactggctgaggcggcgccagttggccgggcacggggctgctgtaaggccgaggttgcggcggaagcggagaccatgttccgagcggcggctccggggcagctccggcgggcggcctcattgctacgatttcagagtaccctggtaatagctgagcatgcaaatgattccctagcacccattactttaaataccattactgcagccacacgccttggaggtgaagtgtcctgcttagtagctggaaccaaatgtgacaaggtggcacaagatctctgtaaagtagcaggcatagcaaaagttctggtggctcagcatgatgtgtacaaaggcctacttccagaggaactgacaccattgattttggcaactcagaagcagttcaattacacacacatctgtgctggagcatctgccttcggaaagaaccttttgcccagagtagcagccaaacttgaggttgccccgatttctgacatcattgcaatcaagtcacctgacacatttgtgagaactatttatgcaggaaatgctctatgtacagtgaagtgtgatgagaaagtgaaagtgttttctgtccgtggaacatcctttgatgctgcagcaacaagtggcggtagtgccagttcagaaaaggcatcaagtacttcaccagtggaaatatcagagtggcttgaccagaaattaacaaaaagtgatcgaccagagctaacaggtgccaaagtggtggtatctggtggtcgaggcttgaagagtggagagaactttaagttgttatatgacttggcagatcaactacatgctgcagttggtgcttcccgtgctgctgttgatgctggctttgttcccaatgacatgcaagttggacagacgggaaaaatagtagcaccagaactttatattgctgttggaatatctggagccatccaacatttagctgggatgaaagacagcaagacaattgtggcaattaataaagacccagaagctccaattttccaagtggcagattatggaatagttgcagatttatttaaggtagttcctgaaatgactgagatattgaagaaaaaatgaatcaggatcatgccttaaaaagaaaacttttgttaaagtattccactgaaatcacagatatttgtgggtattataacaatcattggaaagcatggagagctacatttcataatttgagggaaaatttctaacagatgccagaatgcttgtttatgggattgctgtgtttccttttaattatttgtggttccaaacaattattgtttgaactttttaaattctgtactaaaatctataataaagcttttccacagctttaaaactatcagaaatatgcctagcctctagagaaaattgaagaaaaggagtaaaaattttgtttatttatttatttttttgcctttcttgttcatggagagctctatgttttaggaagattgtaaacatgattgtctccaccagcctaatcaacctactaatctcattgttgaagggcaaacttcataggagaaggtaactgaattggcaagtgcagagttaaaaaagcacggctataaagcatgaatattatcttaaacatactccagtcttcagaagaccatagctaatgtgacaaaagcagacctgacttaaacctgacccagctccatgtatttagttggcttaaggtaaatttcattttccgtttaattttaaggttttgtcagtttataggacttttgtctgtaaaggagggagagtggaggaggggctgctttgagacagcatggcctctgatgcaagcagatagtttgatgttattataaacattcaaaatcctgtgcagagaatgctctagcctttcttttgccttctgttggcttcttttgggctctcttaggaagcacccaggcctgtgtagtcacctctggcactctcattctgctgcccagggcacagctgaggtccaagagtgtcaccagggctgcagctggtgtggatgcaggcccaagagcagaggctggtgaggctttgaacaggcctgcaggaaggcgtgggtaggtaggtgagtagaacaaagagggctgccctcctgaatcagatctgcagaagtaggagtagtgacctggatcaagcagacagtagggaagagaagggaagtgataagtgatggaggtggctagagtgcctttgtgtgaccagcctggggcccttccccagctgactagtgaaccctttctgatttgtgtcacaatcagttgctataaaacacttttaaaagttg

SEQ ID NO: 129399 - DNA, 893 bp, Homo sapiens
  Payload ID: 5309
  Gene Symbol: ETFA
  Gene Name: electron-transfer-flavoprotein, alpha polypeptide
  ENST ID: ENST00000559386
  CDS Start-End: 26-893
cgaggttgcggcggaagcggagaccatgttccgagcggcggctccggggcagctccggcgggcggcctcattgctacgatttcagagtaccctggtaatagctgagcatgcaaatgattccctagcacccattactttaaataccattactgcagccacacgccttggaggtgaagtgtcctgcttagtagctggaaccaaatgtgacaaggtggcacaagatctctgtaaagtagcaggcatagcaaaagttctggtggctcagcatgatgtgtacaaaggcctacttccagaggaactgacaccattgattttggcaactcagaagcagttcaattacacacacatctgtgctggagcatctgccttcggaaagaaccttttgcccagagtagcagccaaacttgaggttgccccgatttctgacatcattgcaatcaagtcacctgacacatttgtgagaactatttatgcaggaaatgctctatgtacagtgaagtgtgatgagaaagtgaaagtgttttctgtccgtggaacatcctttgatgctgcagcaacaagtggcggtagtgccagttcagaaaaggcatcaagtacttcaccagtggaaatatcagagtggcttgaccagaaattaacaaaaagtgatcgaccagagctaacaggtgccaaagtggtggtatctggtgatggagtttcgctcttgttgcctaggctggagtgcaatggcacaatctctgctcaccgccacctccacctcccaggttcaagcgattctcctgcctcagcctcccgagtagctgggattacaggtcgaggcttgaagagtggagagaactttaagttgttatatgacttggcagatcaactacatgctgcagttggtgcttccc

SEQ ID NO: 129400 - DNA, 1054 bp, Homo sapiens
  Payload ID: 5309
  Gene Symbol: ETFA
  Gene Name: electron-transfer-flavoprotein, alpha polypeptide
  ENST ID: ENST00000560044
  CDS Start-End: 85-222
agcattaggtgactggctgaggcggcgccagttggccgggcacggggctgctgtaaggccgaggttgcggcggaagcggagaccatgttccgagcggcggctccggggcagctccggcgggcgagacggggtttccccatgttacccaggctggtctcgaactcttgtcctcaagtgatccacctgcctcggcctcccaaagtcctggaattacaggcctgagctaccgcacctggccttagacatcttttttcttgcctcattgctacgatttcagagtaccctggtaatagctgagcatgcaaatgattccctagcacccattactttaaataccattactgcagccacacgccttggaggtgaagtgtcctgcttagtagctggaaccaaatgtgacaaggtggcacaagatctctgtaaagtagcaggcatagcaaaagttctggtggctcagcatgatgtgtacaaaggcctacttccagaggaactgacaccattgattttggcaactcagaagcagttcaattacacacacatctgtgctggagcatctgccttcggaaagaaccttttgcccagagtagcagccaaacttgaggttgccccgatttctgacatcattgcaatcaagtcacctgacacatttgtgagaactatttatgcaggaaatgctctatgtacagtgaagtgtgatgagaaagtgaaagtgttttctgtccgtggaacatcctttgatgctgcagcaacaagtggcggtagtgccagttcagaaaaggcatcaagtacttcaccagtggaaatatcagagtggcttgaccagaaattaacaaaaagtgatcgaccagagctaacaggtgccaaagtggtggtatctggtggtcgaggcttgaagagtggagagaactttaagttgttatatgacttggcagatcaactacatgctgcagttggtgcttcccgtgctgctgttgatgctggctttgttcccaatgacatgcaagttggacagacgggaaaaatagtagcaccagaactttatattgctgttgga

SEQ ID NO: 129401 - DNA, 717 bp, Homo sapiens
  Payload ID: 5309
  Gene Symbol: ETFA
  Gene Name: electron-transfer-flavoprotein, alpha polypeptide
  ENST ID: ENST00000560345
  CDS Start-End: 1-717
ggcacaagatctctgtaaagtagcaggcatagcaaaagttctggtggctcagcatgatgtgtacaaaggcctacttccagaggaactgacaccattgattttggcaactcagaagcagttcaattacacacacatctgtgctggagcatctgccttcggaaagaaccttttgcccagagtagcagccaaacttgaggttgccccgatttctgacatcattgcaatcaagtcacctgacacatttgtgagaactatttatgcaggaaatgctctatgtacagtgaagtgtgatgagaaagtgaaagtgttttctgtccgtggaacatcctttgatgctgcagcaacaagtggcggtagtgccagttcagaaaaggcatcaagtacttcaccagtggaaatatcagagtggcttgaccagaaattaacaaaaagtgatcgaccagagctaacaggtgccaaagtggtggtatctggtgtagagacggaggttctgcatgttggtcaggctggtctcgaaatcctgacctcaggtgatccgcccacttcagcctcccaaagtgttgggattacaggtcgaggcttgaagagtggagagaactttaagttgttatatgacttggcagatcaactacatgctgcagttggtgcttcccgtgctgctgttgatgctggctttgttcccaatgacatgcaagttggacagacgggaaaaatagt

SEQ ID NO: 129402 - DNA, 942 bp, Homo sapiens
  Payload ID: 5309
  Gene Symbol: ETFA
  Gene Name: electron-transfer-flavoprotein, alpha polypeptide
  ENST ID: ENST00000560726
  CDS Start-End: 630-851
aggtgactggctgaggcggcgccagttggccgggcacggggctgctgtaaggccgaggttgcggcggaagcggagaccatgttccgagcggcggctccggggcagctccggcgggcgaggaactgacaccattgattttggcaactcagaagcagttcaattacacacacatctgtgctggagcatctgccttcggaaagaaccttttgcccagagtagcagccaaacttgaggttgccccgatttctgacatcattgcaatcaagtcacctgacacatttgtgagaactatttatgcaggaaatgctctatgtacagtgaagtgtgatgagaaagtgaaagtgttttctgtccgtggaacatcctttgatgctgcagcaacaagtggcggtagtgccagttcagaaaaggcatcaagtacttcaccagtggaaatatcagagtggcttgaccagaaattaacaaaaagtgatcgaccagagctaacaggtgccaaagtggtggtatctggtggtcgaggcttgaagagtggagagaactttaagttgttatatgacttggcagatcaactacatgctgcagttggtgcttcccgtgctgctgttgatgctggctttgttcccaatgacatgcaagttggacagacgggaaaaatagtagcaccagaactttatattgctgttggaatatctggagccatccaacatttagctgggatgaaagacagcaagacaattgtggcaattaataaagacccagaagctccaattttccaagtggcagattatggaatagttgcagatttatttaaggtagttcctgaaatgactgagatattgaagaaaaaatgaatcaggatcatgccttaaaaagaaaacttttgttaaagtattccactgaaatcacagatatttgtgggtattataacaatcattggaaagc

SEQ ID NO: 129403 - DNA, 917 bp, Homo sapiens
  Payload ID: 5309
  Gene Symbol: ETFA
  Gene Name: electron-transfer-flavoprotein, alpha polypeptide
  ENST ID: ENST00000560595
  CDS Start-End: 9-917
cggagaccatgttccgagcggcggctccggggcagctccggcgggcggcctcattgctacgatttcagagtaccctggtaatagctgagcatgcaaatgattccctagcacccattactttaaataccattactgcagccacacgccttggaggtgaagtgtcctgcttagtagctggaaccaaatgtgacaaggtggcacaagatctctgtaaagtagcaggcatagcaaaagttctggtggctcagcatgatgtgtacaaaggcctacttccagaggaactgacaccattgattttggcaactcagaagcagttcaattacacacacatctgtgctggagcatctgccttcggaaagaaccttttgcccagagtagcagccaaacttgaggttgccccgatttctgacatcattgcaatcaagtcacctgacacatttgtgagaactatttatgcaggaaatgctctatgtacagtgaagtgtgatgagaaagtgaaagtgttttctgtccgtggaacatcctttgatgctgcagcaacaagtggcggtagtgccagttcagaaaaggcatcaagtacttcaccagtggaaatatcagagtggcttgaccagaaattaacaaaaagtgatcgaccagagctaacaggtgccaaagtggtggtatctggtgttggtgcttcccgtgctgctgttgatgctggctttgttcccaatgacatgcaagttggacagacgggaaaaatagtagcaccagaactttatattgctgttggaatatctggagccatccaacatttagctgggatgaaagacagcaagacaattgtggcaattaataaagacccagaagctccaattttccaagtggcagattatggaatagttgcagatttatttaaggtagttcctgaaatg

SEQ ID NO: 129404 - DNA, 910 bp, Homo sapiens
  Payload ID: 5309
  Gene Symbol: ETFA
  Gene Name: electron-transfer-flavoprotein, alpha polypeptide
  ENST ID: ENST00000560899
  CDS Start-End: 578-697
ccgaggttgcggcggaagcggagaccatgttccgagcggcggctccggggcagctccggcgggcgaggaactgacaccattgattttggcaactcagaagcagttcaattacacacacatctgtgctggagcatctgccttcggaaagaaccttttgcccagagtagcagccaaacttgaggttgccccgatttctgacatcattgcaatcaagtcacctgacacatttgtgagaactatttatgcaggaaatgctctatgtacagtgaagtgtgatgagaaagtgaaagtgttttctgtccgtggaacatcctttgatgctgcagcaacaagtggcggtagtgccagttcagaaaaggcatcaagtacttcaccagtggaaatatcagagtggcttgaccagaaattaacaaaaagtgatcgaccagagctaacaggtgccaaagtggtggtatctggtggtcgaggcttgaagagtggagagaactttaagttgttatatgacttggcagatcaactacatgctgcagttggtgcttcccgtgctgctgttgatgctggctttgttcccaatgacatgcaagttggacagacgggaaaaatagtagcaccagaactttatattgctgttggaatatctggagccatccaacatttagctgggatgaaagacagcaagcatgtttctctggattagcagttacctggactataccatgttccaatcttagacattctggcatcttctgcacatctctctgaggaacccctctaagggaaatacacagatgttggatatcctgtagcctgtattttaagtcaggctacatcaaaatacttaatgtattttttaataccagctgttttcacaacatacaatgccagacaattgtggcaattaataaagacc

SEQ ID NO: 129405 - DNA, 633 bp, Homo sapiens
  Payload ID: 5309
  Gene Symbol: ETFA
  Gene Name: electron-transfer-flavoprotein, alpha polypeptide
  ENST ID: ENST00000560309
  CDS Start-End: 56-193
agttggccgggcacggggctgctgtaaggccgaggttgcggcggaagcggagaccatgttccgagcggcggctccggggcagctccggcgggcgagacggggtttccccatgttacccaggctggtctcgaactcttgtcctcaagtgatccacctgcctcggcctcccaaagtcctggaattacaggcctgagctaccgcacctggccttagacatcttttttcttgcctcattgctacgatttcagagtaccctggtaatagctgagcatgcaaatgattccctagcacccattactttaaataccattactgcagccacacgccttggaggtgaagtgtcctgcttagtagctggaaccaaatgtgacaagaggaactgacaccattgattttggcaactcagaagcagttcaattacacacacatctgtgctggagcatctgccttcggaaagaaccttttgcccagagtagcagccaaacttgaggttgccccgatttctgacatcattgcaatcaagtcacctgacacatttgtgagaactatttatgcaggaaatgctctatgtacagtgaagtgtgatgagaaagtgaaagtgttttctgtccgtggaacatcctttgatgctgc

SEQ ID NO: 129406 - DNA, 804 bp, Homo sapiens
  Payload ID: 5309
  Gene Symbol: ETFA
  Gene Name: electron-transfer-flavoprotein, alpha polypeptide
  ENST ID: ENST00000559973
  CDS Start-End: 1-763
ggcaactcagaagcagttcaattacacacacatctgtgctggagcatctgccttcggaaagaaccttttgcccagagtagcagccaaacttgaggttgccccgatttctgacatcattgcaatcaagtcacctgacacatttgtgagaactatttatgcaggaaatgctctatgtacagtgaagtgtgatgagaaagtgaaagtgttttctgtccgtggaacatcctttgatgctgcagcaacaagtggcggtagtgccagttcagaaaaggcatcaagtacttcaccagtggaaatatcagagtggcttgaccagaaattaacaaaaagtgatcgaccagagctaacaggtgccaaagtggtggtatctggtggtcgaggcttgaagagtggagagaactttaagttgttatatgacttggcagatcaactacatgctgcagttggtgcttcccgtgctgctgttgatgctggctttgttcccaatgacatgcaagttggacagacgggaaaaatagtagcaccagaactttatattgctgttggaatatctggagccatccaacatttagctgggatgaaagacagcaagacaattgtggcaattaataaagacccagaagctccaattttccaagtggcagattatggaatagttgcagatttatttaagcccccttggacagctctcctctgtccaagcagtcacaaagcagctctacactggaagctccagttgcagccactgcactgccacgactaagggtagttcctgaaatgactgagatattgaagaaaaaatga

SEQ ID NO: 129407 - DNA, 609 bp, Homo sapiens
  Payload ID: 5309
  Gene Symbol: ETFA
  Gene Name: electron-transfer-flavoprotein, alpha polypeptide
  ENST ID: ENST00000565910
  CDS Start-End: 1-141
gaactttatattgctgttggaatatctggagccatccaacatttagctgggatgaaagacagcaagttacctggactataccatgttccaatcttagacattctggcatcttctgcacatctctctgaggaacccctctaagggaaatacacagatgttggatatcctgtagcctgtattttaagtcaggctacatcaaaatacttaatgtattttttaataccagctgttttcacaacatacaatgccagacaattgtggcaattaataaagacccagaagctccaattttccaagtggcagattatggaatagttgcagatttatttaaggtagttcctgaaatgactgagatattgaagaaaaaatgaatcaggatcatgccttaaaaagaaaacttttgttaaagtattccactgaaatcacagatatttgtgggtattataacaatcattggaaagcatggagagctacatttcataatttgagggaaaatttctaacagatgccagaatgcttgtttatgggattgctgtgtttccttttaattatttgtggttccaaacaattattgtttgaactttttaaattctgtactaaaatctataa

SEQ ID NO: 129408 - DNA, 900 bp, Homo sapiens
  Payload ID: 5310
  Gene Symbol: ETFB
  Gene Name: electron-transfer-flavoprotein, beta polypeptide
  Uniprot ID: P38117
  ENST ID: ENST00000309244
  CDS Start-End: 93-860
gcagagaggggcgcggggggcgggggtggtggggcttctggactgagccgctgagggtgcgggctgaccctgtaagtggctgcggcgggaagatggcggagctgcgcgtgctcgtagctgtcaagagggtcatcgactacgccgtgaagatccgagtgaagcctgacaggaccggtgtggtcacggatggtgtgaagcactccatgaaccccttctgtgagatcgcggtggaggaggctgtgcggctcaaggagaagaagctggtgaaggaggtcatcgccgtcagctgtgggcctgcacagtgccaggagacgattcgtaccgccctggccatgggtgcagaccgaggtatccacgtggaggtgcccccagcagaagcagaacgcttgggtcccctgcaggtggctcgggtcctggccaagctggcagagaaggagaaggtggacctggtgctgctgggcaaacaggccatcgatgatgactgtaaccagacagggcagatgacagctggatttcttgactggccacagggcacattcgcctcccaggtgacgctggagggggacaagttgaaagtggagcgggagatcgatgggggcctggagaccctgcgcctgaagctgccagctgtggtgacagctgacctgaggctcaacgagccccgctacgccacgctgcccaacatcatgaaagccaagaagaagaagatcgaggtgatcaagcctggggacctgggtgtggacctgacctccaagctctctgtgatcagtgtggaggacccgccccagcgcacggccggcgtcaaggtggagaccactgaggacctggtggccaagctgaaggagattgggcggatttgagcccctcccagagatggcaataaaactgactctcaacatc

SEQ ID NO: 129409 - DNA, 3551 bp, Homo sapiens
  Payload ID: 5310
  Gene Symbol: ETFB
  Gene Name: electron-transfer-flavoprotein, beta polypeptide
  Uniprot ID: P38117
  ENST ID: ENST00000354232
  CDS Start-End: 2469-3509
gcgagagcccatctaaaaaaaaaaaaaaaagaaattagaaacagggtctttgcagatgtgattaaattaagcatcttgagatgggggcattatcctggattatttaggtgggccctgaatgccatctcaagagtccttataagagagagacagagggagactagacacgcagagagaggagaaggccacgtgaagacagagctgaggatgctggcattgaagataaagcgatgcagccacaagccagggagtgtcagcagaagctggaggaggcaagaaacgtgttcctcccggggcctgcagaccccttggtctcaccctggtgacactgactttggacttctggcctccagagctgtaagattctaagccaccaaatatatggtgatttgttacggcagccgagagaaactaataggagagtggttagtggttcacgctacaccctggtctacaccggaagcctctctccctggcacatgatggtgtccccaggatccagctcagagccaggcacacagtggggcccaggagagacaaaaatgatgtgcagaagcaaatgggtggggtttgccacccacctcccttacctcccttgtctgtttagcaaagaggtctttcatgctggtgttttccaaattaggttgtgaccatgtgtgatcatgacatccaggcagagggctggcatttttccgaaaaagggtagaaaatgtcagagtatggtgtgtgtgtaggcagggtcagtattggtcactgacccttacactgcagtggcatttgtgaaataggtcagggtcactggtcacgttgtctaaggtgttatccgagctcgtttcacaaccaagagaattaaagagcatagaccacccaaaaggtgaggttggagcgaaagtttaataagcaaaagaagaaagctctccacagaggagagggaagcccaagcgggttgccatttttacagttgattccaaaagctttttttttaaaaaattatttatttatttattttttattattatactttaagttttaggatacatgtgcacaacgtacaggtttgttacatgtgtttatatgtgccatgttggtgtgctgcacccagtaactcgtcctttagcattaggtatatctcctaatgctatccctcccccctccccccaccccacgacagtccccggtgtgtgatgttccccttcctgtgtccatgtgttctcattgttcaattcccacctatgagtgagaacatgcgttgtttggttttctgtccttgcgatagtttgctgagaatgatggtttccagcttcatccatgtccctacaaaggacatgaactcatcattgtttatggctgcatagtattccatggtgtatatgtgccacattttcttaatccagtctatcattgttggacatttgggttggttccaagtctttactattgtgaatagtgccgcaataaacatatgtgtgcatgtgtctttatagcagcatgatttataatcctttgggtatatacccagtaataggatggctgggtcaaatggtatttctagttctagatccctgaggaatcaccacaccgacttccacaatggttgaactagtttacagtcccaccaacagtgtaaaagtgttcctttttctccacatcctctccagcacctgttctttcctgactttttaatgatcgccgttctaactggtgtgagacggtatctcattgtgattttgatttgcatttctctgatggccagtgatgatgagcatttttcatgtgttttttggctgcataaatgtcttcttttgagaagtgtctattcatatccttcgcccactttttgatggggttgtttgtttttttcttgtacatttgtttgagttcattgtagattctggatattagccatttgtcagatgagtaggctgcaaaaattttctcccattctgtaggttgcctgttcactctgatggttaaactaaagagcttctgcacagcaaaagacaccaaaagcttttataagaaactcctttcatctctgtagctgtttgagtatcttatctgtaaagctatctgcataactctccgttatctatgtagttgtgggtacgtctttaggcaagcacaaagctccgcttctcttgtttctgtaaccgtgggtttgttttaggtaagctccgcccctccccgtgcaagttcccacagagaccaccatgtacgtgcctgaaaaggggagggaacttttcctgggagcctgtcagtcacgcaaagaacaaaaggcttctgtgctgggcagcttgagttttccccaggctgctctattgttgcctgtagctgtgatttttcaggcaggctgctcctctgaggaccacccttaactgtctacctaactggtttttccttttcttctcctcatttgtatttatgtatcagtgtattatgtatttatatacacttggagatacagtaaaatgtacctctcactgtgggttaccataaatactgtaaatttgagaaacactctttcaggcctgagaggagcagtgacaacagtagggatgatcaagtcagatgtccctggtacccaggaatggctggatgagagaaggagacagggtgacctgcccctgcctacaaactctaacccagttctgtccctggagctgtgtgaccccggacaaggccctgcccctttccaggctgtcgttgtcctcatccagcctgggagagggttggcgctgaggcccccaccttcttgcctgtttcctcctgaccccaccccttcccctcctgctgggcagatccgagtgaagcctgacaggaccggtgtggtcacggatggtgtgaagcactccatgaaccccttctgtgagatcgcggtggaggaggctgtgcggctcaaggagaagaagctggtgaaggaggtcatcgccgtcagctgtgggcctgcacagtgccaggagacgattcgtaccgccctggccatgggtgcagaccgaggtatccacgtggaggtgcccccagcagaagcagaacgcttgggtcccctgcaggtggctcgggtcctggccaagctggcagagaaggagaaggtggacctggtgctgctgggcaaacaggccatcgatgatgactgtaaccagacagggcagatgacagctggatttcttgactggccacagggcacattcgcctcccaggtgacgctggagggggacaagttgaaagtggagcgggagatcgatgggggcctggagaccctgcgcctgaagctgccagctgtggtgacagctgacctgaggctcaacgagccccgctacgccacgctgcccaacatcatgaaagccaagaagaagaagatcgaggtgatcaagcctggggacctgggtgtggacctgacctccaagctctctgtgatcagtgtggaggacccgccccagcgcacggccggcgtcaaggtggagaccactgaggacctggtggccaagctgaaggagattgggcggatttgagcccctcccagagatggcaataaaactgactctcaacatcta

SEQ ID NO: 129410 - DNA, 575 bp, Homo sapiens
  Payload ID: 5310
  Gene Symbol: ETFB
  Gene Name: electron-transfer-flavoprotein, beta polypeptide
  ENST ID: ENST00000596253
  CDS Start-End: 41-575
gagggtgcgggctgaccctgtaagtggctgcggcgggaagatggcggagctgcgcgtgctcgtagctgtcaagagggtcatcgactacgccgtgaagatccgagtgaagcctgacaggaccggtgtggtcacggatggtgtgaagcactccatgaaccccttctgtgagatcgcggtggaggaggctgtgcggctcaaggagaagaagctggtgaaggaggtcatcgccgtcagctgtgggcctgcacagtgccaggccatcgatgatgactgtaaccagacagggcagatgacagctggatttcttgactggccacagggcacattcgcctcccaggtgacgctggagggggacaagttgaaagtggagcgggagatcgatgggggcctggagaccctgcgcctgaagctgccagctgtggtgacagctgacctgaggctcaacgagccccgctacgccacgctgcccaacatcatgaaagccaagaagaagaagatcgaggtgatcaagcctggggacctgggtgtggacctgacctccaagctctctgtgatcagtgtggaggacccgcccc

SEQ ID NO: 129411 - DNA, 1903 bp, Homo sapiens
  Payload ID: 5311
  Gene Symbol: ETFDH
  Gene Name: electron-transferring-flavoprotein dehydrogenase
  Uniprot ID: Q16134
  ENST ID: ENST00000307738
  CDS Start-End: 119-1831
agagttcttgctttccggcaggtgatggcgccccccgcggcctagaggtccagcgcccgccgcgagcagcggacagtcctcctgttgtgtccgaccgagagtcctggtgactttgaacatgctggtgccgctagccaagctgtcctgcctgggagtgaacatggaaaggtttgcagaagaagcagatgttgtaatagttggtgcaggccctgcagggctctctgcagctgttcgtctaaaacagttggctgtggcacatgaaaaggacatccgtgtgtgtctagtggagaaagctgcccagataggagctcatactctctcaggggcttgccttgatccaggtgcttttaaagaactcttcccagactggaaagagaagggggctccacttaacactcctgtaacagaagacagatttggaattttaacagagaaatacagaattcctgtgccaattcttccagggcttccaatgaataatcatggcaattacattgtacgcttgggacatttagtgagctggatgggcgaacaagcagaagcccttggtgttgaagtataccctggttatgcagctgctgaggtcctttttcatgatgatggtagtgtaaaaggaattgccactaacgatgtagggatacaaaaggatggtgcaccaaaggcaacatttgagagaggactggaactacatgctaaagtcacaatttttgcagaaggttgccatggacatctagccaagcaactatataagaagtttgatttgagagcaaattgtgaacctcaaacctacgggattggactgaaggagttatgggttattgatgaaaagaactggaaacctgggagagtagatcacactgttggttggcccttggacagacatacctatggaggatctttcctctatcatttgaatgaaggtgaacccctagtagctcttggtcttgtggttggtctagactatcagaatccatacctgagtccatttagagagttccaaaggtggaaacaccatcctagcattcggccaaccttggaaggtggaaaaaggattgcatacggagccagagctctcaatgaaggtggctttcagtctataccaaaactcacctttcctggtggtttactaattggttgtagtcctggttttatgaatgttcccaagatcaaaggtactcacacagcaatgaaaagtggaattttagcagcagaatctatttttaatcaactaactagtgaaaatctccaatcaaagacaataggactccatgtaactgaatatgaggacaatttgaagaactcatgggtatggaaagagctatattctgttagaaatataagaccgtcctgccacggagtactgggtgtatatggagggatgatttacactggaatcttttactggatattgagaggaatggagccgtggactctgaaacataaaggttctgactttgaacggctcaagccagccaaggattgcacacctattgagtatccaaaacccgatggacagatcagttttgacctcttgtcatctgtggctctgagtggtactaatcatgaacatgaccagccggcacacttaaccttaagggatgacagtatacctgtaaatagaaatctgtcgatatatgatgggcccgagcagcgattctgtcctgcaggagtttatgaatttgtacctgtggaacaaggtgatggatttcggttacagataaatgctcagaactgtgtacattgtaaaacatgtgatattaaagatccaagtcagaatattaactgggtggtacctgaaggtggaggaggacctgcttacaatggaatgtaaactgcagctagccagtttctttcaagtatggcaagctaacgttaaaatgtttagagattaacagatttcaga

SEQ ID NO: 129412 - DNA, 767 bp, Homo sapiens
  Payload ID: 5311
  Gene Symbol: ETFDH
  Gene Name: electron-transferring-flavoprotein dehydrogenase
  ENST ID: ENST00000507475
  CDS Start-End: 275-767
gcggtcggcagagcggggaggcgaactgcagcagagttcttgctttccggcaggtgatggcgccccccgcggcctagaggtccagcgcccgccgcgagcagcggacagtcctcctgttgtgtccgaccgagagtcctggtgactttgaacatgctggtgccgctagccaagctgtcctgcctgggctccacttaacactcctgtaacagaagacagatttggaattttaacagagaaatacagaattcctgtgccaattcttccagggcttccaatgaataatcatggcaattacattgtacgcttgggacatttagtgagctggatgggcgaacaagcagaagcccttggtgttgaagtataccctggttatgcagctgctgaggtcctttttcatgatgatggtagtgtaaaaggaattgccactaacgatgtagggatacaaaaggatggtgcaccaaaggcaacatttgagagaggactggaactacatgctaaagtcacaatttttgcagaaggttgccatggacatctagccaagcaactatataagaagtttgatttgagagcaaattgtgaacctcaaacctacgggattggactgaaggagttatgggttattgatgaaaagaactggaaacctgggagagtagatcacactgttggttggcccttggacagacatacctatggaggatctttcctctatcatttgaatgaaggtgaacccctagtagctcttggtcttgtggttggtctagactatc

SEQ ID NO: 129413 - DNA, 446 bp, Homo sapiens
  Payload ID: 5311
  Gene Symbol: ETFDH
  Gene Name: electron-transferring-flavoprotein dehydrogenase
  ENST ID: ENST00000512251
  CDS Start-End: 333-446
gtgctgtgggattcgcggacccctctggccgcgctgtggctgtttcaccgctccccggctgggacttggagtcccttatctttccctggtttggtacatgacccggaagcctcggctggccgttgcgtcatccatggcgccggcgcagagcgagaaggaggtgggaacgccgtgaagcaagagcggtcggcagagcggggaggcgaactgcagcagagttcttgctttccggcaggtgatggcgccccccgcggcctagaggtccagcgcccgccgcgagcagcggacagtcctcctgttgtgtccgaccgagagtcctggtgactttgaacatgctggtgccgctagccaagctgtcctgcctggatggtcttcaacttctactgtgcctcgaattactacccattatactatttatccccgggataaggacaagagatgggaag

SEQ ID NO: 129414 - DNA, 3282 bp, Homo sapiens
  Payload ID: 5311
  Gene Symbol: ETFDH
  Gene Name: electron-transferring-flavoprotein dehydrogenase
  Uniprot ID: Q16134
  ENST ID: ENST00000511912
  CDS Start-End: 333-2186
gtgctgtgggattcgcggacccctctggccgcgctgtggctgtttcaccgctccccggctgggacttggagtcccttatctttccctggtttggtacatgacccggaagcctcggctggccgttgcgtcatccatggcgccggcgcagagcgagaaggaggtgggaacgccgtgaagcaagagcggtcggcagagcggggaggcgaactgcagcagagttcttgctttccggcaggtgatggcgccccccgcggcctagaggtccagcgcccgccgcgagcagcggacagtcctcctgttgtgtccgaccgagagtcctggtgactttgaacatgctggtgccgctagccaagctgtcctgcctggcatatcagtgctttcatgccttaaaaattaagaaaaattatctacctctatgtgctacaagatggtcttcaacttctactgtgcctcgaattactacccattatactatttatccccgggataaggacaagagatgggaaggagtgaacatggaaaggtttgcagaagaagcagatgttgtaatagttggtgcaggccctgcagggctctctgcagctgttcgtctaaaacagttggctgtggcacatgaaaaggacatccgtgtgtgtctagtggagaaagctgcccagataggagctcatactctctcaggggcttgccttgatccaggtgcttttaaagaactcttcccagactggaaagagaagggggctccacttaacactcctgtaacagaagacagatttggaattttaacagagaaatacagaattcctgtgccaattcttccagggcttccaatgaataatcatggcaattacattgtacgcttgggacatttagtgagctggatgggcgaacaagcagaagcccttggtgttgaagtataccctggttatgcagctgctgaggtcctttttcatgatgatggtagtgtaaaaggaattgccactaacgatgtagggatacaaaaggatggtgcaccaaaggcaacatttgagagaggactggaactacatgctaaagtcacaatttttgcagaaggttgccatggacatctagccaagcaactatataagaagtttgatttgagagcaaattgtgaacctcaaacctacgggattggactgaaggagttatgggttattgatgaaaagaactggaaacctgggagagtagatcacactgttggttggcccttggacagacatacctatggaggatctttcctctatcatttgaatgaaggtgaacccctagtagctcttggtcttgtggttggtctagactatcagaatccatacctgagtccatttagagagttccaaaggtggaaacaccatcctagcattcggccaaccttggaaggtggaaaaaggattgcatacggagccagagctctcaatgaaggtggctttcagtctataccaaaactcacctttcctggtggtttactaattggttgtagtcctggttttatgaatgttcccaagatcaaaggtactcacacagcaatgaaaagtggaattttagcagcagaatctatttttaatcaactaactagtgaaaatctccaatcaaagacaataggactccatgtaactgaatatgaggacaatttgaagaactcatgggtatggaaagagctatattctgttagaaatataagaccgtcctgccacggagtactgggtgtatatggagggatgatttacactggaatcttttactggatattgagaggaatggagccgtggactctgaaacataaaggttctgactttgaacggctcaagccagccaaggattgcacacctattgagtatccaaaacccgatggacagatcagttttgacctcttgtcatctgtggctctgagtggtactaatcatgaacatgaccagccggcacacttaaccttaagggatgacagtatacctgtaaatagaaatctgtcgatatatgatgggcccgagcagcgattctgtcctgcaggagtttatgaatttgtacctgtggaacaaggtgatggatttcggttacagataaatgctcagaactgtgtacattgtaaaacatgtgatattaaagatccaagtcagaatattaactgggtggtacctgaaggtggaggaggacctgcttacaatggaatgtaaactgcagctagccagtttctttcaagtatggcaagctaacgttaaaatgtttagagattaacagatttcagaatgtctttctgcatattactgaacagaatagtcacaaaatgattatcaaataaaaattttatactatatgtaagattgtcccataaagaaattacgggtattgcttttaaataacctttataagaatgcagcatcttcctacctcttcagttcttcagagattcagtaccaagagcaaaattcactactggactttacatttgacttgccaaagttaagtaatcaaatataaaaatgaatatatattctagactaaagttttattgaaacacagccatacccattggttacacattgtctatggctaattttgaattacaactgtgcaggtgagtgggtgtgacattacatggtctacaaagcctaaaaactttatgatctggcccttgcagaagaagtatgcccatccctgaacaagtttgtgtgtgtgtgtgtgtgtgtgtgtgtgtgtgtgtgtgtattatctataagtatgaaaacctagcatcatccaccatggatacatcaaagaatcgaaggaaacaatatacaaacttaagctctcatctctttattcaataagatgtgtctttacaagtttaaaaagactggacaccattattttttatgaataatgcacataaccattttaaaaaacattttacttggccgggcacggtggctcacacctgtaatcccagcactttgggaggccaaggcggggtggatcacaaggtcaggagttcaagaccaacgtgacgtgaccaatatggtgaaaccccatctctactaaaaatacaaaaattagctgggcgtggtggcacgtgcctgtaatcccagctacttgggaagctgaggcaggagaattgcttgaacccgggaggcagaggatgcagtgagccgagattgcgccaccgcactccagcctgggtgacagagcaagactccatctcaaagaaacaaacaaaaccactttacttactgtattgtgacatgtttattaagcatgaacccctatcagtactcctaaactgtaaacagtaag

SEQ ID NO: 129415 - DNA, 1019 bp, Homo sapiens
  Payload ID: 5312
  Gene Symbol: ELOF1
  Gene Name: ELF1 homolog, elongation factor 1
  Uniprot ID: P60002
  ENST ID: ENST00000252445
  CDS Start-End: 65-316
gaagtcactatctcccgggtgaacggagctttcgcagctggagaaggctcatccacctgcagacatggggcgcagaaagtcaaaacgaaagccgcctcccaagaagaagatgacaggcaccctcgagacccagttcacctgccccttctgcaaccacgagaaatcctgtgatgtgaaaatggaccgtgcccgcaacaccggagtcatctcttgtaccgtgtgcctagaggaattccagacgcccataacgtatctgtcagaacccgtggatgtgtacagtgattggatagacgcctgcgaggcggccaatcagtagcgacacagaggacccgccccctgagcagccccgcgtactgtggatccagctgttcggttctggtccagagacattccaggggtccagggtgtgggtcctgggctgtcacagccgtgtgtgtgtgtgtgtgtgtgtgtgtgtgtgtgtgtgtgtgtgtgtgtgtagtgggtgtgcgtgtgggtgtgggtgtgagtgagtgtgggtgtgtgtggctgcacgtgtcactggggtggccgtgagtgtgtgctcacaggtacgcggtggtgtcgggttcctgggcctgaggggcctgaactgatctcacttggctccgaaagcctttgctgtgttccctgcagcccctggccccccagccttggggctctggctccccccggcggaattgggggactgtttcctgacatcctggacaagggaagcccactagaggctggaacaggacctctccagcctcctcaccagcaccgtgcccatctcaactggacttcccgctctccttctccaccttctagtgcccgtggccggggattcaaagccgccgttccccaggtccctgggctgggccctgacagggagccgcccccctccccatggtaaccaggaagcccgtttcatgttcagttgcttttgtagaggaagcaagggctgggatggggacagctgtcaatcacaagcccttaaataaagcagccagcgcacatcc

SEQ ID NO: 129416 - DNA, 1172 bp, Homo sapiens
  Payload ID: 5312
  Gene Symbol: ELOF1
  Gene Name: ELF1 homolog, elongation factor 1
  ENST ID: ENST00000587806
  CDS Start-End: 159-473
aggctcttaggctccacccggccctgaacagctggcttgtcttggagtctcttgtgccaccctccccaggaacagtggcttccttgtattggcgccagcgatgatgggccagctctgtgctaaacggagtcttgctctgttgcccaggctggagtgcaatggtgcgatctcggctcactgcagtctccgcctcttgggttcaggctcatccacctgcagacatggggcgcagaaagtcaaaacgaaagccgcctcccaagaagaagatgacaggcaccctcgagacccagttcacctgccccttctgcaaccacgagaaatcctgtgatgtgaaaatggaccgtgcccgcaacaccggagtcatctcttgtaccgtgtgcctagaggaattccagacgcccataacgtatctgtcagaacccgtggatgtgtacagtgattggatagacgcctgcgaggcggccaatcagtagcgacacagaggacccgccccctgagcagccccgcgtactgtggatccagctgttcggttctggtccagagacattccaggggtccagggtgtgggtcctgggctgtcacagccgtgtgtgtgtgtgtgtgtgtgtgtgtgtgtgtgtgtgtgtgtgtgtgtgtagtgggtgtgcgtgtgggtgtgggtgtgagtgagtgtgggtgtgtgtggctgcacgtgtcactggggtggccgtgagtgtgtgctcacaggtacgcggtggtgtcgggttcctgggcctgaggggcctgaactgatctcacttggctccgaaagcctttgctgtgttccctgcagcccctggccccccagccttggggctctggctccccccggcggaattgggggactgtttcctgacatcctggacaagggaagcccactagaggctggaacaggacctctccagcctcctcaccagcaccgtgcccatctcaactggacttcccgctctccttctccaccttctagtgcccgtggccggggattcaaagccgccgttccccaggtccctgggctgggccctgacagggagccgcccccctccccatggtaaccaggaagcccgtttcatgttcagttgcttttgtagaggaagcaagggctgggatggggacagctgtcaatcacaagcccttaaataaagcagccagcgcac

SEQ ID NO: 129417 - DNA, 585 bp, Homo sapiens
  Payload ID: 5312
  Gene Symbol: ELOF1
  Gene Name: ELF1 homolog, elongation factor 1
  ENST ID: ENST00000593077
  CDS Start-End: 542-585
actatctcccgggtgaacggagctttcgcagctggagaagctcccaggatccatccaaacacccagaaccctcccacctgtccctcctctctccctcacctgccaggggacggacagctgccctgagccttcacacagtgttcctctactcagaagtgcctgtccccacttctctgccctgcagtctgtcatctggatcgaggccatcagataacctgagtgtcactcctcctggatggtacttacatgtcctttgccaagaggagcagccagaataaaatcaccagttcctaggctcttaggctccacccggccctgaacagctggcttgtcttggagtctcttgtgccaccctccccaggaacagtggcttccttgtattggcgccagcgatgatgggccagctctgtgctaagtacttaacttaccattcctggtgtcagccccacaagtctcctctgagatagcaaccttatttcgactttttttttttttttttttttgagacggagtcttgctctgttgcccaggctggagtgcaatggtgcgatctcggctcactgcagtctccgcctcttgggttca

SEQ ID NO: 129418 - DNA, 899 bp, Homo sapiens
  Payload ID: 5312
  Gene Symbol: ELOF1
  Gene Name: ELF1 homolog, elongation factor 1
  ENST ID: ENST00000591912
  CDS Start-End: 330-692
aggggacggacagctgccctgagccttcacacagtgttcctctactcagaagtgcctgtccccacttctctgccctgcagtctgtcatctggatcgaggccatcagataacctgagtgtcactcctcctggatggtacttacatgtcctttgccaagaggagcagccagaataaaatcaccagttcctaggctcttaggctccacccggccctgaacagctggcttgtcttggagtctcttgtgccaccctccccaggaacagtggcttccttgtattggcgccagcgatgatgggccagctctgtgctaagctcatccacctgcagacatggggcgcagaaagtcaaaacgaaagccgcctcccaagaagaagatgacaggcaccctcgagacccagttcacctgccccttctgcaaccacgagaaatcctgtgatgtgaaaatggaccgtgcccgcaacaccggagtcatctcttgtaccgtgtgcctagaggaattccagacgcccataacgtgtatccttggaaacctgggctttttccagagggtggggagggggctggagtccggaccctgctcatctggcccactgtgtgccctggtgcagggccaaagccgtccagaggaacaggtgccacctagtgatttctgtggggtgagaagatgcagggcagggttccaatgccaatgatcgcccttgacctaagtggcccagatctgtcagaacccgtggatgtgtacagtgattggatagacgcctgcgaggcggccaatcagtagcgacacagaggacccgccccctgagcagccccgcgtactgtggatccagctgttcggttctggtccagagacattccaggggtccagggtgtgggtcctgggctgtcacagccgtgtg

SEQ ID NO: 129419 - DNA, 743 bp, Homo sapiens
  Payload ID: 5312
  Gene Symbol: ELOF1
  Gene Name: ELF1 homolog, elongation factor 1
  ENST ID: ENST00000589171
  CDS Start-End: 198-428
ggactggaagttcctctactccgtgcgtttacggggtcctggaggaggctcctgggacctcgagcttgggggaaagccggtcggggagactgactccccccgaccccatccttccaagcgcgactaccgggacgcctggctcctcccggcggccgtcgggaggcgatgccgaagctttagctcatccacctgcagacatggggcgcagaaagtcaaaacgaaagccgcctcccaagaagaagatgacaggcaccctcgagacccagttcacctgccccttctgcaaccacgagaaatcctgtgatgtgaaaatggaccgtgcccgcaacaccggagtcatctcttgtaccgtgtgcctagaggaattccagacgcccataacgtcccagatctgtcagaacccgtggatgtgtacagtgattggatagacgcctgcgaggcggccaatcagtagcgacacagaggacccgccccctgagcagccccgcgtactgtggatccagctgttcggttctggtccagagacattccaggggtccagggtgtgggtcctgggctgtcacagccgtgtgtgtgtgtgtgtgtgtgtgtgtgtgtgtgtgtgtgtgtgtgtgtgtagtgggtgtgcgtgtgggtgtgggtgtgagtgagtgtgggtgtgtgtggctgcacgtgtcactggggtggccgtgagtgtgtgctcacaggtacgcggtggtgtcgggttcctgggcctgaggggc

SEQ ID NO: 129420 - DNA, 585 bp, Homo sapiens
  Payload ID: 5312
  Gene Symbol: ELOF1
  Gene Name: ELF1 homolog, elongation factor 1
  Uniprot ID: P60002
  ENST ID: ENST00000590700
  CDS Start-End: 179-430
cccgggtgaacggagctttcgcagctggagaagggtttcatcctgttgcctaggctggagtgcagtgcctggatcataactctggatcatcactgaaacctgaaactcctgggctcaagcgatcctcccatctcagcctcccaagtagctgggactacaggctcatccacctgcagacatggggcgcagaaagtcaaaacgaaagccgcctcccaagaagaagatgacaggcaccctcgagacccagttcacctgccccttctgcaaccacgagaaatcctgtgatgtgaaaatggaccgtgcccgcaacaccggagtcatctcttgtaccgtgtgcctagaggaattccagacgcccataacgtatctgtcagaacccgtggatgtgtacagtgattggatagacgcctgcgaggcggccaatcagtagcgacacagaggacccgccccctgagcagccccgcgtactgtggatccagctgttcggttctggtccagagacattccaggggtccagggtgtgggtcctgggctgtcacagccgtgtgtgtgtgtgtgtgtgtgtgtgtgtgtgtgtgtgtgtgt

SEQ ID NO: 129421 - DNA, 679 bp, Homo sapiens
  Payload ID: 5312
  Gene Symbol: ELOF1
  Gene Name: ELF1 homolog, elongation factor 1
  ENST ID: ENST00000591674
  CDS Start-End: 192-464
caggatccatccaaacacccagaaccctcccacctgtccctcctctctccctcacctgccaggggacggacagctgccctgagccttcacacagtgttcctctactcagaagtgcctgtccccacttctctgccctgcagtctgtcatctggatcgaggccatcagataacctgagtgtcactcctcctggatggctcatccacctgcagacatggggcgcagaaagtcaaaacgaaagccgcctcccaagaagaagatgacaggcaccctcgagacccagttcacctgccccttctgcaaccacgagaaatcctgtgatgtgaaaatggaccgtgcccgcaacaccggagtcatctcttgtaccgtgtgcctagaggaattccagacgcccataacgtatctgtcagaacccgtggatgtgtacagtgattggatagacgcctgcgaggcggccaatcagtagcgacacagaggacccgccccctgagcagccccgcgtactgtggatccagctgttcggttctggtccagagacattccaggggtccagggtgtgggtcctgggctgtcacagccgtgtgtgtgtgtgtgtgtgtgtgtgtgtgtgtgtgtgtgtgtgtgtgtgtagtgggtgtgcgtgtgggtgtgggtgtgagtgagtgtgggtgtgtgtggctg

SEQ ID NO: 129422 - DNA, 2154 bp, Homo sapiens
  Payload ID: 5312
  Gene Symbol: ELOF1
  Gene Name: ELF1 homolog, elongation factor 1
  ENST ID: ENST00000586683
  CDS Start-End: 59-403
actatctcccgggtgaacggagctttcgcagctggagaaggctcatccacctgcagacatggggcgcagaaagtcaaaacgaaagccgcctcccaagaagaagatgacaggcaccctcgagacccagttcacctgccccttctgcaaccacgagaaatcctgtgatgtgaaaatggaccgtgcccgcaacaccggagtcatctcttgtaccgtgtgcctagaggaattccagacgcccataacgtccagcgcacatcccttgctgtccgtgatgtcttgggttctgcgtctgcctggtcaccagaagaaggagaggggacctgaggctctgacgttcgggaggtggcctggtggcccatgtgaccagcccttcaaaccacccagcgttttattcagtcagtaagcattcagggtggtggagcaggcagacatctggccaggtgtttacagcagtcacaataggaaatgggggaggtgagacagaacaggtggtcagaggaggcttctgggaggggcaggctgagacagtgacaccgtagggccacctctagccagacgctgacctctggccttcctgcgtcgccccagtgtcctgacagccactttgtggggcaggtgccaagctaaccccaagttcaaagatgaggaaacagaggctagaggtgaaggaggtcactggcccaagaccctacagccagaaagtggcacaggggggatttgaacccaggaaacgaggctccacagcttacagtctgacttcttgtgagcccagagtccaggctgagggaacagcttacaggccgttctggaggtagtgagtggaagagggacacgggagggaaacatgaaaggggcctttattcaagggtggtgaggactctcagaaggctggtgttggggcgggatgtgtgtggccgatggggagcacctgagggctgatgtccccttagctggtcgcaccggtgacaaggaccacaacacccagcaacctggggcagtgccagaccctccacctggcctcatgagcccgggtggcaggtgacctgtgcttcagagtcctcgttgctacagtgcaggggatgaaagcaccttcttcccggagccatgctgaggatggaagtgccaggcatggtttgagcggctctggggcccacccagggcactgacggatgtgaacagcggggggagacattgagctggcccggaagccctggctgccagactgggctgctgggtctggcctgtgcaccccctcaggcccactctgccatgacatgtcttccctggttatcccgccacctccaagatcccaggtaaggtctgctagccctggcaggagccggcacacatgcgcagagtggtggacaggcacctaggtttagggtgatggccctctgggatccagcaaaaagggggctcattcctctggcacccgaggcccttcctgccgcccgcccaccccagcctcacaggctaagtgctaatatggtgctgttttcccgaggaggcagggccctgggccaggcccggatcctcctcagcatagcttccccgcgccggcccagggggagcaggacttgcggtagccaggccaaaagcgcctggaatccggtttacgaggccccaggggctgcgtgcgtctgtgcgcgggtcttctggtgtctgcctccgcaggtctccacgttccagcctcaactcctgccctccctggggagaagacagctccgtgccgcgctcctcgcttctctgcctcctctcctccttggaatcctgatggttggggacctctccctcctcccggggataacagggtcccctctgaaatgtgaggaggttgaggccctggacacagccttttagagtcccgggttggcaggctcagccttaagacggctgagagcgggcggggcgcacagaattaaccgtgccctatggtgccctgtgccagtcagtaaagggccattgccttggctcagaagtgcccctctccctgtcccctttcccctccccacagtctggggctaaagggttcaccctgcccacagggcccaccaggacccctacttgtcatcctttctctattgatgcctggtctttaccagcgattaaacatgtagaacatcaccccatctgggggtgtcatttcatgaccac

SEQ ID NO: 129423 - DNA, 658 bp, Homo sapiens
  Payload ID: 5312
  Gene Symbol: ELOF1
  Gene Name: ELF1 homolog, elongation factor 1
  Uniprot ID: P60002
  ENST ID: ENST00000586120
  CDS Start-End: 225-476
ttttaattttttttttttagagatgaggcctcactatgttgcccaggctggtatccaggtcctggcatcaagtaatcctctcaccttagcttcccaaagtgctggctgggatcacaggtgtgagccaccatgcctggccttgtctctgttttatagacgaggaaactgtggcacaaagagcttaaataacctgcccaggtcacgcagctcatccacctgcagacatggggcgcagaaagtcaaaacgaaagccgcctcccaagaagaagatgacaggcaccctcgagacccagttcacctgccccttctgcaaccacgagaaatcctgtgatgtgaaaatggaccgtgcccgcaacaccggagtcatctcttgtaccgtgtgcctagaggaattccagacgcccataacgtatctgtcagaacccgtggatgtgtacagtgattggatagacgcctgcgaggcggccaatcagtagcgacacagaggacccgccccctgagcagccccgcgtactgtggatccagctgttcggttctggtccagagacattccaggggtccagggtgtgggtcctgggctgtcacagccgtgtgtgtgtgtgtgtgtgtgtgtgtgtgtgtgtgtgtgtgtgtgtgtgtagtgggtgtgcgtgtgggt

SEQ ID NO: 129424 - DNA, 2695 bp, Homo sapiens
  Payload ID: 5313
  Gene Symbol: ELK1
  Gene Name: ELK1, member of ETS oncogene family
  Uniprot ID: P19419
  ENST ID: ENST00000247161
  CDS Start-End: 101-1387
cgcgtatggagcccccgccccccggagctgccaacattgccaacgccaccgccacgctacacacaggtacccctgggatggcgtgagcactcccccagcgatggacccatctgtgacgctgtggcagtttctgctgcagctgctgagagagcaaggcaatggccacatcatctcctggacttcacgggatggtggtgaattcaagctggtggatgcagaggaggtggcccggctgtgggggctacgcaagaacaagaccaacatgaattacgacaagctcagccgggccttgcggtactactatgacaagaacatcatccgcaaggtgagcggccagaagttcgtctacaagtttgtgtcctaccctgaggtcgcagggtgctccactgaggactgcccgccccagccagaggtgtctgttacctccaccatgccaaatgtggcccctgctgctatacatgccgccccaggggacactgtctctggaaagccaggcacacccaagggtgcaggaatggcaggcccaggcggtttggcacgcagcagccggaacgagtacatgcgctcgggcctctattccaccttcaccatccagtctctgcagccgcagccaccccctcatcctcggcctgctgtggtgctccccagtgcagctcctgcaggggcagcagcgcccccctcggggagcaggagcaccagtccaagccccttggaggcctgtctggaggctgaagaggccggcttgcctctgcaggtcatcctgaccccgcccgaggccccaaacctgaaatcggaagagcttaatgtggagccgggtttgggccgggctttgcccccagaagtgaaagtagaagggcccaaggaagagttggaagttgcgggggagagagggtttgtgccagaaaccaccaaggccgagccagaagtccctccacaggagggcgtgccagcccggctgcccgcggttgttatggacaccgcagggcaggcgggcggccatgcggcttccagccctgagatctcccagccgcagaagggccggaagccccgggacctagagcttccactcagcccgagcctgctaggtgggccgggacccgaacggaccccaggatcgggaagtggctccggcctccaggctccggggccggcgctgaccccatccctgcttcctacgcatacattgaccccggtgctgctgacacccagctcgctgcctcctagcattcacttctggagcaccctgagtcccattgcgccccgtagcccggccaagctctccttccagtttccatccagtggcagcgcccaggtgcacatcccttctatcagcgtggatggcctctcgacccccgtggtgctctccccagggccccagaagccatgactactaccaccaccaccaccaccccttctggggtcactccatccatgctctctccagccagccatctcaaggagaaacatagttcaactgaaagactcatgctctgattgtggtggggtggggatccttgggaagaattactcccaagagtaactctcattatctcctccacagaaaacacacagcttccacaacttctctgttttctgtcagtcccccagtggccgcccttacacgtctcctacttcaatggtaggggcggtttatttatttattttttgaaggccactgggaggagcctgacctaaccttttagggtggttaggacatctcccccacctccccacttttttccccaagacaagacaatcgaggtctggcttgagaacgacctttctttctttatttctcagcctgcccttggggagatgagggagccctgtctgcgtttttggatgtgagtagaagagttagtttgttttgttttattattcctggccatactcaggggtccaggaagaatttgtaccatttaatgggttgggagtcttggccaaggaagaatcacacccttggaatagaaatttccacctccccaacctttctctcagacagcttatccttttcaaccaactttttggccagggaggaatgtcccttttgttcttccccctgagaagccattcctttgtctgccaacctccctggggtcctgcctgtttcctcccaatggagggtttttttggggggtggtccccgtctggggggcccctccagccagtactccaggtctccctgtctctcccccgctgccattttgatagtataatctatttttaaatggggcttttcaataggggagagggagtcatctcttcctatatttggtggggtgggtgggaaggaagggatttgggggggaatcttcctgccgcctcccccactccaagtgtttatttttgataccaaacatgaattttcagttccctccctcccagccccccaatttcctgcgggcgggtacaaaggaccctttcaatgtccctggagttgggagggaggaatgggggacataaagcctgtcctgtctctattctaggcaagagagagtgggttcaaaagactcctgggctcacctgttagcgctggcccagcccaggccttgggacctgggggttggtgatttgggggacagtgctacactcgtctccactgtttgttttacttccccaaaatggaccttttttttttctaaagagtcccagagaatggggaattgttcctgtaaatatatatttttcaaagtga

SEQ ID NO: 129425 - DNA, 736 bp, Homo sapiens
  Payload ID: 5313
  Gene Symbol: ELK1
  Gene Name: ELK1, member of ETS oncogene family
  Uniprot ID: P19419
  ENST ID: ENST00000343894
  CDS Start-End: 310-597
gagctgtagggaaacgcaggggcggcttctaggtgctgccgccgccaccgccaccaccacctccaccgccgcctcggaacccaggcctggggggcggtggggccgcgtatggagcccccgccccccggagctgccaacattgccaacgccaccgccacgctacacacagcctcaactttcaggagacccgtccgtggccttatttattccacccttcctgtacatcgtagcgaatcaatccgtggcgccgcactcctccgcatccctctttaacagtacccctgggatggcgtgagcactcccccagcgatggacccatctgtgacgctgtggcagtttctgctgcagctgctgagagagcaaggcaatggccacatcatctcctggacttcacgggatggtggtgaattcaagctggtggatgcagaggaggtggcccggctgtgggggctacgcaagaacaagaccaacatgaattacgacaagctcagccgggccttgcggtactactatgacaagaacatcatccgcaaggtgagcggccagaagttcgtctacaagtttgtgtcctaccctgagtcccattgcgccccgtagcccggccaagctctccttccagtttccatccagtggcagcgcccaggtgcacatcccttctatcagcgtggatggcctctcgacccccgtggtgctctccccagggccccagaagccatgactactaccaccaccacca

SEQ ID NO: 129426 - DNA, 2258 bp, Homo sapiens
  Payload ID: 5313
  Gene Symbol: ELK1
  Gene Name: ELK1, member of ETS oncogene family
  Uniprot ID: P19419
  ENST ID: ENST00000376983
  CDS Start-End: 310-1596
gagctgtagggaaacgcaggggcggcttctaggtgctgccgccgccaccgccaccaccacctccaccgccgcctcggaacccaggcctggggggcggtggggccgcgtatggagcccccgccccccggagctgccaacattgccaacgccaccgccacgctacacacagcctcaactttcaggagacccgtccgtggccttatttattccacccttcctgtacatcgtagcgaatcaatccgtggcgccgcactcctccgcatccctctttaacagtacccctgggatggcgtgagcactcccccagcgatggacccatctgtgacgctgtggcagtttctgctgcagctgctgagagagcaaggcaatggccacatcatctcctggacttcacgggatggtggtgaattcaagctggtggatgcagaggaggtggcccggctgtgggggctacgcaagaacaagaccaacatgaattacgacaagctcagccgggccttgcggtactactatgacaagaacatcatccgcaaggtgagcggccagaagttcgtctacaagtttgtgtcctaccctgaggtcgcagggtgctccactgaggactgcccgccccagccagaggtgtctgttacctccaccatgccaaatgtggcccctgctgctatacatgccgccccaggggacactgtctctggaaagccaggcacacccaagggtgcaggaatggcaggcccaggcggtttggcacgcagcagccggaacgagtacatgcgctcgggcctctattccaccttcaccatccagtctctgcagccgcagccaccccctcatcctcggcctgctgtggtgctccccagtgcagctcctgcaggggcagcagcgcccccctcggggagcaggagcaccagtccaagccccttggaggcctgtctggaggctgaagaggccggcttgcctctgcaggtcatcctgaccccgcccgaggccccaaacctgaaatcggaagagcttaatgtggagccgggtttgggccgggctttgcccccagaagtgaaagtagaagggcccaaggaagagttggaagttgcgggggagagagggtttgtgccagaaaccaccaaggccgagccagaagtccctccacaggagggcgtgccagcccggctgcccgcggttgttatggacaccgcagggcaggcgggcggccatgcggcttccagccctgagatctcccagccgcagaagggccggaagccccgggacctagagcttccactcagcccgagcctgctaggtgggccgggacccgaacggaccccaggatcgggaagtggctccggcctccaggctccggggccggcgctgaccccatccctgcttcctacgcatacattgaccccggtgctgctgacacccagctcgctgcctcctagcattcacttctggagcaccctgagtcccattgcgccccgtagcccggccaagctctccttccagtttccatccagtggcagcgcccaggtgcacatcccttctatcagcgtggatggcctctcgacccccgtggtgctctccccagggccccagaagccatgactactaccaccaccaccaccaccccttctggggtcactccatccatgctctctccagccagccatctcaaggagaaacatagttcaactgaaagactcatgctctgattgtggtggggtggggatccttgggaagaattactcccaagagtaactctcattatctcctccacagaaaacacacagcttccacaacttctctgttttctgtcagtcccccagtggccgcccttacacgtctcctacttcaatggtaggggcggtttatttatttattttttgaaggccactgggaggagcctgacctaaccttttagggtggttaggacatctcccccacctccccacttttttccccaagacaagacaatcgaggtctggcttgagaacgacctttctttctttatttctcagcctgcccttggggagatgagggagccctgtctgcgtttttggatgtgagtagaagagttagtttgttttgttttattattcctggccatactcaggggtccaggaagaatttgtaccatttaatgggttgggagtcttggccaaggaagaatcacacccttggaatagaaatttccacctccccaacctttctctcagacagcttatccttttcaaccaactttttggccagggaggaatgtccctttt

SEQ ID NO: 129427 - DNA, 4205 bp, Homo sapiens
  Payload ID: 5314
  Gene Symbol: ELK3
  Gene Name: ELK3, ETS-domain protein (SRF accessory protein 2)
  Uniprot ID: P41970
  ENST ID: ENST00000228741
  CDS Start-End: 327-1550
tgggcggccagccccggcgcacagccgcggccggggcgcgcggcgcggggcggaaaagcctgtttacacagactgcacaccgcctggggaataatgcagtaaaggaagtgagccggctcggcctgactgctccaacttcctgctctcacacacaccagaggggaaaaaaaaagaggagcgagagaaagaaaaaaagggggaaaaatcaggatctcattacaagagccacagaccgtctgcagacgcctgtcagcatggaaagtcgggggctttcgcccgggtcctcctagaaattccccccgaagaagactcccccacatctgggtatggagagtgcaatcacgctgtggcagttcctgttgcagttgctgctggatcagaaacatgagcatttgatctgctggacctcgaacgatggtgaattcaagctcctcaaagcagaagaagtggccaagctgtggggactccgaaaaaacaaaacaaatatgaactatgataagctgagcagagccctgcgatactattatgacaagaacatcatcaagaaggtgatcgggcagaagtttgtgtacaagtttgtctctttcccggagatcctgaagatggatcctcacgcggtggagatcagccgggagagccttctgctgcaggacagcgactgcaaggcgtctccggagggccgcgaggcccacaaacacggcctggccgccctcagaagcacgagccgcaacgaatacatccactcaggcctgtactcgtccttcaccattaattccctgcagaacccaccagacgccttcaaggccatcaagacggagaagctggaggagccgcccgaagacagcccccccgtggaagaagtcaggactgtgatcaggtttgtgaccaataaaaccgacaagcacgtcaccaggccggtggtgtccctgccttccacgtcagaggctgcggcggcgtccgccttcctggcctcgtccgtctcggccaagatctcctctttaatgttgccaaacgctgccagtatttcatccgcctcacccttctcatctcggtccccgtccctgtcccccaactcacccctcccttctgaacacagaagcctcttcctggaggccgcctgccatgactccgattccctggagcccttgaacctgtcatcgggctccaagaccaagtctccatctcttcccccaaaggccaaaaaacccaaaggcttggaaatctcagcgcccccgctggtgctctccggcaccgacatcggctccatcgccctcaacagcccagccctcccctcgggatccctcaccccagccttcttcaccgcacagacaccaaatggattgcttctgactccgagtccactgctctccagcatacatttctggagcagccttagtccagttgctccgctgagtcctgccaggctgcaagggccaagcacgctgttccagttccccacactgcttaatggccacatgccagtgccaatccccagtctggacagagctgcttctccagtactgctttcttcaaactctcagaaatcctgatgacgtctggccacaattaaggactcattaactgatgaaacaaatttgtccccacgggctagtttacctgtgtcgtgagaaggacattgtgaaactcttgttaatttggtttgcacttttcataacatggatagtctagatttatgttagcattttaaaaactgtttttgatatattcaagtatatatgaaaatctgtttggcattaagtgaattttaatgtttttgtttttatatccttttagctcttaagtgttgaacactgttgacagtgaagaacttttcttaatggttttcagtataactaataaggatgtgaagcttttttctctttagttctgagtatgctaaactgtgtgcttatatagactataaccagttgtgccttccttcgcatttaatgtaaatgaatgatttatatattttttagtattaagaggaaatgtttgaaagatgaaaattagtatcaaacagctctctagtagaatttcattatttttcaccagtgggcaatatgaaagcatatatcacgttttgttttactttcaattgtataagaattgccttagaacctcttttgaactgaaattcagtaaatgtccaagtaatgtttttataataaactaagccatatttagacaataaacattgataaaagaaaatgttctaaagtacattttcaaaagaatggaccttgaaaggctagcctccttagctgtttacagtatcttatcttttagatgcctcccagacaaaaatctgagatggaaaagctacatcaagttcatgctattccaggcccaagaatatctcctaggttagcatattcttatttcaaaaaattagccctggttttctcagttttccatagggaatcccgaccatctgatatatttactgtgtcagtataagtaagttggggttcccctggaactataattaacatttaaaaaatctaatgctttagaagaagctcacagagtggtgatgaacccaaacaacaaagaaaccatttttaacactaggtatcttcatcagtataggtaggtgttcacaatttttgatggatcaaaaacttgctgtaatacaaatagagagtggaggtactaaaggccttgcttgtggaaactgagagaggatacactgctttatgtattactaaagttaggggagaatgaaggaaatctgacagatgaaaaattctacaggaacctcatcatcgtggaactgaactgatgataacttggaacactccagtaaattctgttgtgtaatgtaatttggagcagtgataatacagacatattttctgttccatcagaaaatcagcaggcaccagtccaaaggtaccacacctgtacatgaagaaggaaagttctaatacaagaaaactgaaaagcaccaagctttaaattcaagattaattacaatccttaactataagtgatgataaaaactaacttgaaatgtgactaaataactgatccaaactgggcattaagtggcaggattatgagaaaggataaaaaaagagatttgagaaaacacatttcttgaattttcagaaaaaaatctagactattgctttgacacttagaaattctgaggtttttcaattggaattgagcatctctgtatgtggggatgtgggcccttatcaagggataaaaatccaaacactctaacatgcctccttgactgtaaagtaatgacactggttccaaaattcacaaataatagacactactgtccccccacccccaccccataggctaagaataattctgtaccagaataaaaggagctggtccagggaactgatatttactgaacatacaaagttagtgctagaaggggcctttgagaatgcttcccgccacctgtttccagctcaagacaggtgcacagcagaagctgggagttgcctatggctgcacagctcactgaaggtagaacaatgattggtgctcagtccaattctgtctcccccatgcctagctgttaagtaattactggttcaaaactacgtgttattagtaaaacaaacaaaacagataaagacagcatttaaaactgtgttgtcagataagagaacacatccaaaatgcatgattcttacaaactaaaggaagttaatgtgcaaaaatctcaaccaaaactactatttttagtatacttgtttacgtaaatgctgattggaaatatttaaatgactatagatctgattctttcttttcctttggaaactgggattaatgtatgctctagatccatttattagaaatgcaaaaatactacaattttttgatggatgaaaatactcctgtaacacaaacagagaactggaggaactgaagaataactcactcatatagctctgcctcattctgtgtgtgtgtgcatgtgtgtgttagcagaggtattttactcagaaaataggtttcaaagaacattaatgactttcttttcccttttatgtctgcttaatcagtgttaaactgctatgggaaaagttttatagaactatataacctgaatgttggtctctttgtacacatcttttctatgactgcaaatcttcactttatgtatcatttttactgtcatattatttttgttcaataaaaactttgtgataaaaggtgtttagaggtaa

SEQ ID NO: 129428 - DNA, 539 bp, Homo sapiens
  Payload ID: 5314
  Gene Symbol: ELK3
  Gene Name: ELK3, ETS-domain protein (SRF accessory protein 2)
  ENST ID: ENST00000547249
  CDS Start-End: 424-539
acagccgcggccggggcgcgcggcgcggggcggaaaagcctgtttacacagactgcacaccgcctggggaataatgcagtaaaggaagtgagccggctcggcctgactgctccaacttcctgctctcacacacaccagaggggaaaaaaaaagaggagcgagagaaagaaaaaaagggggaaaaatcaggatctcattacaagagccacagaccgtctgcagacgcctgtcagcatggaaagtcgggggctttcgcccgggtcctcctagaaattccccccgaagaagactcccccacatctggaagaccagtatggtgctgtgaaatgttgcaaaacatgacctgatgacaacccaaaacacttcatagaaaactatccaagaatgtgacttcctggagtagagtcttttttcactgagggtatggagagtgcaatcacgctgtggcagttcctgttgcagttgctgctggatcagaaacatgagcatttgatctgctggacctcgaacgatggtgaattcaagctcctcaaagcaga

SEQ ID NO: 129429 - DNA, 808 bp, Homo sapiens
  Payload ID: 5314
  Gene Symbol: ELK3
  Gene Name: ELK3, ETS-domain protein (SRF accessory protein 2)
  ENST ID: ENST00000547860
  CDS Start-End: 330-808
ccgtctgcagacgcctgtcagcatggaaagtcgggggctttcgcccgggtcctcctagaaattccccccgaagaagactcccccacatctggaagagattaaatgaagatgtgtgtgtgttgaagactgcatagtgcacactctgtgtggctaccggtgagccacgtggcgggatacaggactcaaagaagatcacactggagaagggagttcatgctctgttgcccaggctggggtgcagtgatgtgatcacagctcactgcagcctcaaactcctgggcttaagtgatcctcctgcctcagctccccaagtagctgggactacaggtatggagagtgcaatcacgctgtggcagttcctgttgcagttgctgctggatcagaaacatgagcatttgatctgctggacctcgaacgatggtgaattcaagctcctcaaagcagaagaagtggccaagctgtggggactccgaaaaaacaaaacaaatatgaactatgataagctgagcagagccctgcgatactattatgacaagaacatcatcaagaaggtgatcgggcagaagtttgtgtacaagtttgtctctttcccggagatcctgaagatggatcctcacgcggtggagatcagccgggagagccttctgctgcaggacagcgactgcaaggcgtctccggagggccgcgaggcccacaaacacggcctggccgccctcagaagcacgagccgcaacgaatacatccactcaggcctgtactcgtccttcaccattaattccctgcagaacccaccagacgccttcaaggc

SEQ ID NO: 129430 - DNA, 684 bp, Homo sapiens
  Payload ID: 5314
  Gene Symbol: ELK3
  Gene Name: ELK3, ETS-domain protein (SRF accessory protein 2)
  ENST ID: ENST00000549985
  CDS Start-End: 1-307
ccgcaacgaatacatccactcaggcctgtactcgtccttcaccattaattccctgcagaacccaccagacgccttcaaggccatcaagacggagaagctggaggagccgcccgaagacagcccccccgtggaagaagtcaggactgtgatcaggccaaaaaacccaaaggcttggaaatctcagcgcccccgctggtgctctccggcaccgacatcggctccatcgccctcaacagcccagccctcccctcgggatccctcaccccagccttcttcaccgcacagacaccaaatggattgcttctgactccgagtccactgctctccagcatacatttctggagcagccttagtccagttgctccgctgagtcctgccaggctgcaagggccaagcacgctgttccagttccccacactgcttaatggccacatgccagtgccaatccccagtctggacagagctgcttctccagtactgctttcttcaaactctcagaaatcctgatgacgtctggccacaattaaggactcattaactgatgaaacaaatttgtccccacgggctagtttacctgtgtcgtgagaaggacattgtgaaactcttgttaatttggtttgcacttttcataacatggatagtctagatttatgttagcattttaaaaactgtttttgatatatt

SEQ ID NO: 129431 - DNA, 1242 bp, Homo sapiens
  Payload ID: 5314
  Gene Symbol: ELK3
  Gene Name: ELK3, ETS-domain protein (SRF accessory protein 2)
  ENST ID: ENST00000552142
  CDS Start-End: 164-592
aaaaaaaaagaggagcgagagaaagaaaaaaagggggaaaaatcaggatctcattacaagagccacagaccgtctgcagacgcctgtcagcatggaaagtcgggggctttcgcccgggtcctcctagaaattccccccgaagaagactcccccacatctgggtatggagagtgcaatcacgctgtggcagttcctgttgcagttgctgctggatcagaaacatgagcatttgatctgctggacctcgaacgatggtgaattcaagctcctcaaagcagaagaagtggccaagctgtggggactccgaaaaaacaaaacaaatatgaactatgataagctgagcagagccctgcgatactattatgacaagacaccaaatggattgcttctgactccgagtccactgctctccagcatacatttctggagcagccttagtccagttgctccgctgagtcctgccaggctgcaagggccaagcacgctgttccagttccccacactgcttaatggccacatgccagtgccaatccccagtctggacagagctgcttctccagtactgctttcttcaaactctcagaaatcctgatgacgtctggccacaattaaggactcattaactgatgaaacaaatttgtccccacgggctagtttacctgtgtcgtgagaaggacattgtgaaactcttgttaatttggtttgcacttttcataacatggatagtctagatttatgttagcattttaaaaactgtttttgatatattcaagtatatatgaaaatctgtttggcattaagtgaattttaatgtttttgtttttatatccttttagctcttaagtgttgaacactgttgacagtgaagaacttttcttaatggttttcagtataactaataaggatgtgaagcttttttctctttagttctgagtatgctaaactgtgtgcttatatagactataaccagttgtgccttccttcgcatttaatgtaaatgaatgatttatatattttttagtattaagaggaaatgtttgaaagatgaaaattagtatcaaacagctctctagtagaatttcattatttttcaccagtgggcaatatgaaagcatatatcacgttttgttttactttcaattgtataagaattgccttagaacctcttttgaactgaaattcagtaaatgtccaagtaatgtttttataataaactaagccatatttagacaataaacattg

SEQ ID NO: 129432 - DNA, 2118 bp, Homo sapiens
  Payload ID: 5315
  Gene Symbol: ELK4
  Gene Name: ELK4, ETS-domain protein (SRF accessory protein 1)
  Uniprot ID: P28324
  ENST ID: ENST00000289703
  CDS Start-End: 341-1558
gcggccgcggagggcctggcaggccccgccgctgcaaggaacgccccgaacgcgcgcgcccggcgtgtagcggccccaagacccgcgccgccgctgccgcgtgcgggggcggggagggcggggcgccaggagccgcggcggcgggagatgcgggcggctgcgggcacccggcgggctcggcttggccgccgccgccttctacggctccgccgcgggggtcgcagcggctgccgcgccgtcctcgagtttccagcgtgaggaggaggctgagggcggagaggcgcatcgtgttcgaggcggagaccgagggggagccccgcgcgcggcgtcgctcattgctatggacagtgctatcaccctgtggcagttccttcttcagctcctgcagaagcctcagaacaagcacatgatctgttggacctctaatgatgggcagtttaagcttttgcaggcagaagaggtggctcgtctctgggggattcgcaagaacaagcctaacatgaattatgacaaactcagccgagccctcagatactattatgtaaagaatatcatcaaaaaagtgaatggtcagaagtttgtgtacaagtttgtctcttatccagagattttgaacatggatccaatgacagtgggcaggattgagggtgactgtgaaagtttaaacttcagtgaagtcagcagcagttccaaagatgtggagaatggagggaaagataaaccacctcagcctggtgccaagacctctagccgcaatgactacatacactctggcttatattcttcatttactctcaactctttgaactcctccaatgtaaagcttttcaaattgataaagactgagaatccagccgagaaactggcagagaaaaaatctcctcaggagcccacaccatctgtcatcaaatttgtcacgacaccttccaaaaagccaccggttgaacctgttgctgccaccatttcaattggcccaagtatttctccatcttcagaagaaactatccaagctttggagacattggtttccccaaaactgccttccctggaagccccaacctctgcctctaacgtaatgactgcttttgccaccacaccacccatttcgtccataccccctttgcaggaacctcccagaacaccttcaccaccactgagttctcacccagacatcgacacagacattgattcagtggcttctcagccaatggaacttccagagaatttgtcactggagcctaaagaccaggattcagtcttgctagaaaaggacaaagtaaataattcatcaagatccaagaaacccaaagggttagaactggcacccacccttgtgatcacgagcagtgatccaagcccactgggaatactgagcccatctctccctacagcttctcttacaccagcatttttttcacaggtagcttgctcgctctttatggtgtcaccattgctttcatttatttgcccttttaagcaaatccagaatttatacactcaagtttgctttctgttacttaggtttgtcttagaaaggttatgtgtgactgtcatgtgaaagttaccccatttctcatcttaattaggattgctaaaatagaaagtttggagtattttcttaaaaaattcattgttctacaagtaaataaatattttgatttttctatttcctcctaaagaaagtacacacactctctcgctctctctcggtcttataaaactcgttggtgtcttataaaacaaacagtgataatctcaagttagaaaacagtaggtcctgagaaccataagaaaaatgactggtgtgatgttgagtaacaagttggtacagttactttagctatttattaacttgctcatctcatagaacattttagtagatttttcacacacctcattattaaaaaaaaacaaacatgctggtgtcttggttacccattattcctctgtacctgaattcaggttggtttttctatttggaaaagactttataaatgttggcttaaaaagaggttgagcaccagaatctcagaatttaccaccaaagaactcatccatgtaaccaaaaaccacttgtacccccaaaaactattgaaataaaaatttaaaaaattttaa

SEQ ID NO: 129433 - DNA, 10239 bp, Homo sapiens
  Payload ID: 5315
  Gene Symbol: ELK4
  Gene Name: ELK4, ETS-domain protein (SRF accessory protein 1)
  Uniprot ID: P28324
  ENST ID: ENST00000357992
  CDS Start-End: 341-1636
gcggccgcggagggcctggcaggccccgccgctgcaaggaacgccccgaacgcgcgcgcccggcgtgtagcggccccaagacccgcgccgccgctgccgcgtgcgggggcggggagggcggggcgccaggagccgcggcggcgggagatgcgggcggctgcgggcacccggcgggctcggcttggccgccgccgccttctacggctccgccgcgggggtcgcagcggctgccgcgccgtcctcgagtttccagcgtgaggaggaggctgagggcggagaggcgcatcgtgttcgaggcggagaccgagggggagccccgcgcgcggcgtcgctcattgctatggacagtgctatcaccctgtggcagttccttcttcagctcctgcagaagcctcagaacaagcacatgatctgttggacctctaatgatgggcagtttaagcttttgcaggcagaagaggtggctcgtctctgggggattcgcaagaacaagcctaacatgaattatgacaaactcagccgagccctcagatactattatgtaaagaatatcatcaaaaaagtgaatggtcagaagtttgtgtacaagtttgtctcttatccagagattttgaacatggatccaatgacagtgggcaggattgagggtgactgtgaaagtttaaacttcagtgaagtcagcagcagttccaaagatgtggagaatggagggaaagataaaccacctcagcctggtgccaagacctctagccgcaatgactacatacactctggcttatattcttcatttactctcaactctttgaactcctccaatgtaaagcttttcaaattgataaagactgagaatccagccgagaaactggcagagaaaaaatctcctcaggagcccacaccatctgtcatcaaatttgtcacgacaccttccaaaaagccaccggttgaacctgttgctgccaccatttcaattggcccaagtatttctccatcttcagaagaaactatccaagctttggagacattggtttccccaaaactgccttccctggaagccccaacctctgcctctaacgtaatgactgcttttgccaccacaccacccatttcgtccataccccctttgcaggaacctcccagaacaccttcaccaccactgagttctcacccagacatcgacacagacattgattcagtggcttctcagccaatggaacttccagagaatttgtcactggagcctaaagaccaggattcagtcttgctagaaaaggacaaagtaaataattcatcaagatccaagaaacccaaagggttagaactggcacccacccttgtgatcacgagcagtgatccaagcccactgggaatactgagcccatctctccctacagcttctcttacaccagcatttttttcacagacacccatcatactgactccaagccccttgctctccagtatccacttctggagtactctcagtcctgttgctcccctaagtccagccagactgcaaggtgctaacacacttttccagtttccttctgtactgaacagtcatgggccattcactctgtctgggctggatggaccttccacccctggcccattttccccagacctacagaagacataacctatgcacttgtggaatgagagaaccgaggaacgaagaaacagacattcaacatgattgcatttgaagtgagcaattgatagttctacaatgctgataatagactattgtgatttttgccattccccattgaaaacatctttttaggattctctttgaataggactcaagttggactatatgtataaaaatgccttaattggagtctaaactccacctccctctgtcttttccttttctttttctttccttccttccttttcttttctcctttaaaaatattttgagctttgtgctgaagaagtttttggtgggctttagtgactgtgctttgcaaaagcaattaagaacaaagttactccttctggctattgggaccctttggccaggaaaaattatgcttagaatctattatttaaagaaatatttgtgaaatgaattggcatctttaggactaagtgtgctctgttgaatgacttaaagtgagctgttcctaagcagtggaagaagaagaatcattcctattcatacaaagtaagattggagcagtcatactggggagattgttttgtgtgaactataacgtgtaagcaactccatgaaaaggcatcttgtttacctttattcagggtggatctcttagccatatgtatgatcctgtctgaacctgtcaacagagcatggagctagtctatttcactatagaaagatttttagacctggggtttaagacagtttttggaacacctagtaagaatatgggacctcacatctagcacagaaatgctctttgccctctgggtggtatgattatatgcccatggaatacagcatgggaaatgatcacttttaggaggatgaacttggattttgaatatttgaaacatctctgagtaaaagattcgatcagataacttgaaacaacatgtagtggttttctcaattagaagataaccaagtgaaggacctgtctttttcctgttcattttacctcattttctactatacatttatcacctttcctttatgtttaaggttgttagaggttatgatagttttaaagatgcagttaggaaggtagaattcaaagtgaagcctccccagtcaggagcgaagatgtgcttatttcctttttttttttttttttttttttttgagacagagtcttgctctatcacccaggctggagtgcagtggcgcgatctcagctcactgtaagctccgcctcccgggttcaagcaattctcctgcctcagcctcctgagtagctgggactacaggcatgcgccactacgcctggctaatttttgtatttttagtagagacggggtttcaccatgttggccaggatggtcttgatctcttgaccttgtgatccgcccacctcagcctcccaaaggcgcaggctcagatgtgcttatttctttcaactttttttttttaaatggggaagagcagagttcatttgggaatgcttatacatagggattggattgttcatattagtagtaaaaaatgtaggccttattctctacattaccaaatttttaaaatattactatatggtaatcaatgccaggtacagatttgttggttccccaaactgaattgatatcagtatcacagtggagtcttttgaaaattaaagtccaggattaaattatatgttgtcaccattcaccaccactaccaccctcccccaccaatctctcccaccggttaaactcgtcttctaatcctgtagaatcacatgaactaaatgaagaagtaagaacttgaaggctcagactgacactgttacaaactagcatcttcagatgcatggtatttactttaaatgtgcttatatacagtgtagagaagctcttgtataagaagacatctatgctagctaacttagtagtagtagagggaacatattcagtgagctgcctttatatctgtagtgtcggagacttgttactggttcatttgtggttatcagttgaaggttctgttcctgagatgtgcaatagtagtgttgaaaggtattgtttaatagtgatggggaacagacatattggacttttttttccatattaaattatttagtttgcatgcctgtttgaaattggacctctcagcagcactttgaaatagttttaattaggttaacattttgtacattaaataagtagatatagatggttgatttaactagatgtgttaaattttgaaagcacaaaggtattttatctttttgaattaaaggagaaaagccattgatttgttttcacagacagtatttttaataattaactgtctcagcacagaggtaccttggaaccaagggcaccattgaaactcagttgaagcaacttcctagtaaaccattttagtgagtcctttttgcataaatctatagcctctcagaggtgtgaggctgtcacagattggtgatctgctatctctttgagatcaactaatttggagaagtgtgtgtgtgcgtatccttttttaagtcaaagtttacaaccttactgcaggtgtatgaggcagacagttctgtttatagactacctccttcctggaaaagtctcagcttcatattctgttgaatatatgcagaattcttagtgtgaaaggtgatgtaccacttcagatcagttttcactggagagacttgtaattggtagctgtagctcgtatccatccctagtcactttgccaggatgaatgctgttgggcagcagtagcctaagttacggaaggggagcagattgaatggggttttgagacatcttctctgataccttagctttccttctgctctggtcgctatccactcagtcgtgtgctagaaatgtttaacaaccaggatctctggggtgggggtgggggggagcgctgaatttgtagcatttgctgcaaatataaattataaataaaattctaatataaattagaattttatatcaaattctttgatataaattagttactcctcctgtggctgatttcaagctaccaccttagagttcagaaaggatgtgcacagttggctcagagccagtgctggcaaaccattgcatttactccacccaagagtggattttcacataatttctaaaataattttttcttatttatatactgacttttcaaaatacaaaattaaaatatcatgtctgacttcagtgatctttttctttttctttttttagaaatgagatctttcagtaatcctttaatttaattttttagagatggagtcttggtgtgttacccagggtggactcaaactcccgggctcaagtgatcctcctgcctcagcctcctgcatagctgggctacaggcatgcaccaccacacctggcttagtaatccttctttattaatggtttgtcacagtacgtttgtgatgttatattgctcatggcatactttatgtgttcgaacaaaggtggaaatttccattgatttttttttttttaaatgtatgcacaaacaatctggattttgaggagtacggtcaggaaaaaaaaaaaagaattagaggcccttgaaaggtcaaccgtaagcttcttagagttaaaatatgagtttaattttttcccacattttgacagttgaaattttgatagggacagtaaacctatgagcctctattaggctactggattttttttaactggaaaattccttgaagatttacatactatattacagattttaaaagtcaagactgacttaagtaaatcagaggtttggaattctggagctgtaactccaggctgttgatagtatcacttcagttccattcacccctgcattgtgtgacgtccagtctgacaacattgtttcatcctgatctgactttctactatgattcttaagttcttaaaggtgtccttttatgtttttggtgaatgtaagcacatttagagccactcagtaccacttctcaatacctctgaagcagtggttcagaaaaggagtgtccagcctttttgaacacacaaattgatcagtaagagttattgaacataaaaactttccctattaaaaattcatatgggtatatgttaaattatataccgctataccaaagtaatatgtgtgttataaaaaaatacacaaaaattgaagtgaaggatggcataaaaagtaattcttgagtagcagttatagtattttcttcccacaccccagttggttgtcttgtgcaccctccagaagcacacgcttttcctaaagactgctgactcaggatattctcattctaatctccaaacatatatgatgctctcttatgatatatggagaaatcctagagatttggagtttttcaggagagcttattgtcaacttttgaaatttcacattaattctttttgataaattcccaaataataatccattaccacatgttttccacagctttattcctattactttcgtcagcctgttgtctcttatcttcatgttaggtatgactctatttttattttactagtctgctcacagacttctttgggacttatgttatattttaccaacaaatttagaattatttcaagttgctttatgttaaaatatataacaagttacattttcttgctgcattaataagtttttgatttttaaaatctgatatttcagcaactaaaggaatacttttctttataggtctgttctgtttttaacctcattgactgtatatgttttatttacccgtgccaggagtctagaatcgtgcttaggtgccattcttaggtatgaaaacaagtttggagaccaatgcaggtctctgtgcagaaatctggggctctaaatgaattaccaaaccaataggaaagttaaaatactactcatgatgtagtgtgtcatctgaagctatgatagaatatattatttctaaaatagtattgagaagttaattgttcagtccatagtagtgtaagtgaagtgtggaggtcagccatagttgtctttcttcagcaggtactctaaccagagactgggttctgtggaaaatagaattatattcttggtttgggatcaacaaatgttttgttattgttttaatgttgctggcattgcctgaaacaaagtgccctgttattcctcttatgtcatcagaactctgcttactgaagttgaagtttaatcttaggatctagaattcttgtggttggtcgtgtattaagaaaagaaggtggtttgattttatttcttgtacttggtggaacctgttactatacaagtcatgttttgacctgtaagccgagcaaatctgaaaggtgaatcgttaatggtagtataattgtttcatttgaaactgtcagtttcttcaagtcacttctctgaaaaaaattatgatagattgatagcctgccagaaaatagcaatttctaaggtgctgccatccacacttacttattgtgaaatatgaaaatccagagtggtttgtatgagaggggaaatactggctctaagctttctacagaaaacaggaaattcatgctgttgttgacataattttaaaggaaacttttaacaagaaaattcatgagggatacaatcaaacatagttaatctcttgagtgctaatcatttgagtatagtccacatcaggaagttttatgaggttgaaaactttactttgaaatatttaattgggagactagaccatttctttttccaagtcattctgatttattgtcctagtaaatgtatgtgtatgcatatatactgatgtattgactgaatgtgtgtgtgtgtgtgtgtgcgcgtgtaaatctgttttcatagggaacatacattgatggctcctagtctattttatactaaaacttaaaaaaatttgctgcactttgcagttgccactttttaaaagattaatgctttgcacatttcagtaggccttaaagatgaattgctcaccaacattttagaaatacactgcttacatgtgacatactctaaacaaagtcatagtaaactgttctcttaggttcatgtattattgagcaaataaggatgtcctttcttaaaatttctacatttatgtttgcttttgtgtaaaatctttattagtttgtaagtttctcaaagaggaggtttatactggaagcagtatttctaaagtacagagattcgaccatggattgaatacagtagtggaggaatgctggtattgtggcctaatttatccttttaaactgtatgtcattagtattagccaaaacctcagagtggagtgtcttgggctgaatgatcttctcaactttgccttgtttcccatctcataaaggctccttctggttcttttcccttccaaggattgtgagtcatgctcacataggcctgggatcttctggatggggtcggggaggaggtgggggtttcctgtggctggcccagagttctagccaatggaatcattcaagaatgcctaaagttcaggggtgggaatgccatatattggtgttaatcacttggcactttcttgggcaccaatattagcactgtttcatttttaataactggaagcacttaatgattattttgtttgtttaatttcaacttaaggatattgagggtcagagaagtaaggtttatttcttgtttatgttttctggaatttatagggtgtttgtagaagggataaatgggttacctaatgagccattcttctaggctctgtaaggtatgcccttttggctaggatattttaaaataatttgcaagcttttaatattgtgctttgtagaaatttacgatttttaaaaataatttgcaattgatagattacacttaaatttataaagtatccaattttaagtttcttttctgtttggtcattgttgcttattgtctattgtgtaggggacacaatcctgacatttcattgttttgttacttggggcagtattaaccagtggcctttgtatgtacattcattgcttacatttattgtttaagtggtagagtagcatttttatgaacttccctgttcagtattagtgaaattgacagatgcgtatatgtaaagatagaaaagaaacgaatacaattaattttttattccttgaggcctatttatttgttttggccctggatcttttctaatcacaattatatttctttatttttgcctttgagcagtttcatttatctttgtgggcagggaagattaaatatgaaattcagtccagtcattttgctactggttagctttagtttgaggcaagtaaaaatttttgattaaaattagtttcttaaaattatgcccttgctttaccaaataatcaaattggctaaaaaataagggtatgtaactttgcattttgaagaacaaaccaataatttttcatgagccctactcgatcttctttaaagaagaccttcctaagagacaattagggatgagtttgattaatgggaaatagctctaggttagattattttaaattccatacaccaagtgatttaaccacagtggcagtggcagtttctgaaccgtcaagtatgaacatcacttaaaaattaaaagatgcttaataataaactcttaattttcattaagccaatctgtaattcagaagaaaagcatatgtctgccatgggactattgcagtgcgtctccatcagtgttaacacaggagagatatgttattttatgtgtatgtcttagtttgggatatgtggtagtaagaacatgtcaagagtgctttcttcaaacctgtcagctcaactgagaagacagttacttcattgcttattttttcccttgttttattgaaatctgtatctcatatccagtatctaacactttgtagagatacttacatataatgtaagtgcacacctacccagaggaatggataactgttaaagtgttaataatagctcgtcttagttgatttcagcataatttacattagggagacctaaaaagcaccttcaaagtattaaaagcaccttttttttttctttttcctaaaaaagcaattaaaatggtcactgctaacatttattaaacttcatgttagttgatgaaacagctggagggaagctgccacatctcctagctaagcagtctgacttacctgttgggaaacaaagggatattgctctaagattgattaggatgattgtagctagagtcttgaattctatctgtatacggcagagaaactttatagagtgtagagaggtgagcgaaaggatgcaaaagcactttgagggctttataataatatgctgcttgaaaaaaaaaatgtgtagttgatactcagtgcatctccagacatagtaaggggttgctctgaccaatcaggtgatcattttttctatcacttcccaggttttatgcaaaaattttgttaaattctataatggtgatatgcatcttttaggaaagatatacatttttaaaaatctattttatgtaagaactgacagaggaatttgctttgtataatgcaggctggctttacaaaagcactgtagcaaatttactacaagtctaaaagtatacatatatgttaatagatatatgtgcaactagatatggacagcagttgtatttttttaaataaatatttttaacaaaatga

SEQ ID NO: 129434 - DNA, 2535 bp, Homo sapiens
  Payload ID: 5315
  Gene Symbol: ELK4
  Gene Name: ELK4, ETS-domain protein (SRF accessory protein 1)
  Uniprot ID: P28324
  ENST ID: ENST00000616704
  CDS Start-End: 272-1567
gcggccccaagacccgcgccgccgctgccgcgtgcgggggcggggagggcggggcgccaggagccgcggcggcgggagatgcgggcggctgcgggcacccggcgggctcggcttggccgccgccgccttctacggctccgccgcgggggtcgcagcggctgccgcgccgtcctcgagtttccagcgtgaggaggaggctgagggcggagaggcgcatcgtgttcgaggcggagaccgagggggagccccgcgcgcggcgtcgctcattgctatggacagtgctatcaccctgtggcagttccttcttcagctcctgcagaagcctcagaacaagcacatgatctgttggacctctaatgatgggcagtttaagcttttgcaggcagaagaggtggctcgtctctgggggattcgcaagaacaagcctaacatgaattatgacaaactcagccgagccctcagatactattatgtaaagaatatcatcaaaaaagtgaatggtcagaagtttgtgtacaagtttgtctcttatccagagattttgaacatggatccaatgacagtgggcaggattgagggtgactgtgaaagtttaaacttcagtgaagtcagcagcagttccaaagatgtggagaatggagggaaagataaaccacctcagcctggtgccaagacctctagccgcaatgactacatacactctggcttatattcttcatttactctcaactctttgaactcctccaatgtaaagcttttcaaattgataaagactgagaatccagccgagaaactggcagagaaaaaatctcctcaggagcccacaccatctgtcatcaaatttgtcacgacaccttccaaaaagccaccggttgaacctgttgctgccaccatttcaattggcccaagtatttctccatcttcagaagaaactatccaagctttggagacattggtttccccaaaactgccttccctggaagccccaacctctgcctctaacgtaatgactgcttttgccaccacaccacccatttcgtccataccccctttgcaggaacctcccagaacaccttcaccaccactgagttctcacccagacatcgacacagacattgattcagtggcttctcagccaatggaacttccagagaatttgtcactggagcctaaagaccaggattcagtcttgctagaaaaggacaaagtaaataattcatcaagatccaagaaacccaaagggttagaactggcacccacccttgtgatcacgagcagtgatccaagcccactgggaatactgagcccatctctccctacagcttctcttacaccagcatttttttcacagacacccatcatactgactccaagccccttgctctccagtatccacttctggagtactctcagtcctgttgctcccctaagtccagccagactgcaaggtgctaacacacttttccagtttccttctgtactgaacagtcatgggccattcactctgtctgggctggatggaccttccacccctggcccattttccccagacctacagaagacataacctatgcacttgtggaatgagagaaccgaggaacgaagaaacagacattcaacatgattgcatttgaatgaatccgatgtgcctgatgggttagatttccatatacaagtagcagaggaaaatctgggaacagggtgattccacaggattctgaaatgtccaaattcctgaaaggaagatgaggaagaaagtcctacttgtgtaactgagaagcgtgtggtaatgatctcaaacccagagtatggtccatgcatgaggtgacaaatggagtgaagcgcgcggctgtctccttccttcccatctgggtatctggacagctcttaccaacagtctgaaccagggaagaagataacttgagaagccagggaggacagagtctccgcctgggcaccttctcttaagaactggctttgcacacagccgatgcagtccctgggcactttgaaagcagtgggcaaaagggcaggttacactaaagcaagtcccagatgtcacatcatttcaatgaggagggtatggtgagatgcagctcttcccctccctccagcagggcaaaagaggaggaaaggagaatggagtcacaatgagggagattttggaggccggaagatctagatgtgaggtcctctctgtcagtttctggaagtgtgactgacctagggtccccacataccgaaccaaccagcatctgcagcaccatctcgccaactcctgcccctgtcaccagcactgtggttgcacagcctaacaaaaagagaaggtttggtttggtaaaagcaagttaaggagacagaagccagcattacaatccaggttgctggccaggcacagtggcatatgcatttcggaaggcacatcccagtactttaggagtcagaagtgggaggatctcttgaggccaggagttcaagaccagtctgggcaatatcacaagacttggtctctacaaaaagtaaaatttaaaaaaa

SEQ ID NO: 129435 - DNA, 477 bp, Homo sapiens
  Payload ID: 5315
  Gene Symbol: ELK4
  Gene Name: ELK4, ETS-domain protein (SRF accessory protein 1)
  ENST ID: ENST00000468523
  CDS Start-End: 46-477
gcagaactgaccagctgtgagatcagaaggcaccagctcattgctatggacagtgctatcaccctgtggcagttccttcttcagctcctgcagaagcctcagaacaagcacatgatctgttggacctctaatgatgggcagtttaagcttttgcaggcagaagaggtggctcgtctctgggggattcgcaagaacaagcctaacatgaattatgacaaactcagccgagccctcagatactattatgtaaagaatatcatcaaaaaagtgaatggtcagaagtttgtgtacaagtttgtctcttatccagagattttgaacatggatccaatgacagtgggcaggattgagggtgactgtgaaagtttaaacttcagtgaagtcagcagcagttccaaagatgtggagaatggagggaaagataaaccacctcagcctggtgccaagacctctagccgcaatgactacatacactct

SEQ ID NO: 129436 - DNA, 4955 bp, Homo sapiens
  Payload ID: 5316
  Gene Symbol: ERC1
  Gene Name: ELKS/RAB6-interacting/CAST family member 1
  Uniprot ID: Q8IUD2
  ENST ID: ENST00000347735
  CDS Start-End: 407-3253
gtgctgtggcggcggcggcggcggtagtggcggcggcggcggtgcctgggcggcagcagcagcagtagcggcagccctgaggacggtgagacggccgcggcggcggcgacagcgcggaagtcgcgcgggacccagagcttcccccctgtcgctagtgctgaggctttcgcctttcctacccagcttcttgctcacggcccgggctgggctgggcagggcaacgcgcccccggggaggggcggagctgtagatatggtgtaagatacttcttcaagattggacagctggggaccttcttctgattaaccttaaaccaacttgtagccatagagacacctcacaaggttcccatttttgttgttgttgttgttgattttctgctcacacctttcctgaccttgcaaccatgtatggaagtgcccgctctgttgggaaggtggagccgagcagccagagccctgggcgttcacccaggcttccacgttcccctcgcttgggtcaccgtcgaaccaacagtacgggagggagttcgggaagcagtgttggaggtggcagtgggaaaaccctttcaatggaaaatatacaatctttaaatgctgcctatgccacctctggccctatgtatctaagtgaccatgaaaatgtgggttcagaaacacctaaaagcaccatgacacttggccgttctgggggacgtctgccttacggtgttcggatgactgctatgggtagtagccccaatatagctagcagtggggttgctagtgacaccatagcatttggagagcatcacctccctcctgtgagtatggcatccactgtacctcactcccttcgtcaggcgagagataacacaatcatggatctgcagacacagctgaaggaagtattaagagaaaatgatctcttgcggaaggatgtggaagtaaaggagagcaaattgagttcttcaatgaatagcatcaagaccttctggagcccagagctgaagaaggaacgagccctgagaaaagatgaagcttccaaaatcaccatttggaaggaacagtacagagttgtacaggaggaaaaccagcacatgcagatgacaatccaggctctccaggatgaattgcggatccagagggacctgaatcagctgtttcagcaggatagtagcagcaggactggcgaaccttgtgtagcagagctgacagaggagaactttcagaggcttcatgctgagcatgagcggcaggccaaagagctgtttcttcttcgaaagacattggaggaaatggagctgcgtattgagactcaaaagcagaccctaaatgctcgggatgaatccattaagaagcttctggaaatgttgcagagcaaaggactttctgccaaggctaccgaggaagaccatgagagaacaagacgactggcagaggcagagatgcacgttcatcacctagaaagccttttggagcagaaggaaaaagagaacagtatgttgagagaggagatgcatcgaaggtttgagaatgctcctgattctgccaaaacaaaagctctgcaaactgttattgagatgaaggattcaaaaatttcctctatggagcgtgggcttcgagacctggaagaggaaattcagatgctgaaatcgaatggtgctttgagtactgaggaaagggaagaagaaatgaagcaaatggaagtgtatcggagccattctaaatttatgaaaaataagattggccaggtgaaacaggagctgtccagaaaggacacagaactactcgccctgcagacaaagctagaaacactcacaaaccagttctcagatagtaaacagcacattgaagtgttgaaggagtccttgactgctaaggagcagagggctgccatcctgcagactgaggtggatgctctccgattgcgtttggaagagaaggaaaccatgttgaataaaaagacaaaacaaattcaggatatggctgaagagaaggggacacaagctggagagatacatgacctcaaggacatgttggatgtgaaggagcggaaggttaatgttcttcagaagaagattgaaaatcttcaagagcagcttagagacaaggaaaagcagatgagcagcttgaaagaacgggtcaaatccttgcaggctgacaccaccaacactgacactgccttgacaactttggaggaggcccttgcagagaaagagcggacaattgaacgcttaaaggagcagagggacagagatgagcgagagaagcaagaggaaattgataactacaaaaaagatcttaaagacttgaaggaaaaagtcagcctgttgcaaggcgacctttcagagaaagaggcttcacttttggatctgaaagagcatgcttcttctctggcatcctcaggactgaaaaaggactcacggcttaagacactagagattgctttggagcagaagaaggaggagtgtctgaaaatggaatcacaattgaaaaaggcacatgaggcagcattggaagccagagccagtccagagatgagtgaccgaatacagcacttggagagagagatcaccaggtacaaagatgaatctagcaaggcccaggcagaagttgatcgactcttagaaatcttgaaggaggtggaaaatgagaagaatgacaaagataagaagatagctgagttggaaagtctcacctcaaggcaagtgaaagaccagaataagaaggtagcaaatctgaagcacaaggaacaggtggaaaaaaagaagagtgcacaaatgttagaggaggcgcgacgacgggaggacaatctcaacgacagctctcagcagctacaggtggaggagttactgatggccatggagaaggtaaagcaggaactagaatccatgaaagcaaagctgtcctccacccagcagtctctggcagaaaaggaaactcacttgactaatcttcgggcagagagaaggaaacacttagaggaagttctggagatgaagcaagaagctcttctggctgccattagtgaaaaagacgccaatatagctctcttggagctttcgtcctctaagaagaagacccaagaggaagtggctgccctgaagcgggagaaggatcgtctggtacagcagcttaagcagcagacgcaaaatcgaatgaagctaatggccgacaactacgaggatgaccacttcaaatcctcccattccaatcaaacaaatcacaagccctccccagaccaggatgaggaggagggtatatgggcatagccaatcagaggcttagttcagccattttgttcagaacgatcatccagcccctcttagaacttgaccaaaatagaagtaaattaaagttgtacattggacacctgacaaccctctgccatgaccgagaccccctgatcctccgtggactcactccaccagcttcctataacttggacgatgaccaggcggcttgggagaatgagctgcagaagatgacccgggggcagcttcaggatgagttagagaaaggtgaacgggacaatgcagaactgcaggagtttgccaacgccattcttcagcagatagcagaccattgtcccgacatcctagagcaagtggtcaacgccctggaagagtcctcttgaccctgctttatggggaagcctgaggtagtcaacccaggagccaagaaaagagaactacgaggaacaggtgcccggaaccttcttggcaccaaacactacaaacttcatcccaacttgctcacttgaagaagtgtgattccagcaccgtttctacatctgccatcttactctgcctttctgctttggatgtggtctctacactaaccttcttgatgtccagggtagataaagggtcgaatctctctgaagaactgccacctggtcatcagcagtggagaactgtgggagctggtggctctgccctgacagagagccatggagcagaggagcctctcacctcctgtcctctgacatgagaatgaaaccaggaatggacttggagttcaacaggctgagaggatgcctccaatggaccagagagctgagtgttctaatatcacaataggtgctttctcctaaaagggcaaaaaacaatctcaaaaagattagaaaaagagaaggggggaagggaagagaaaatcgactcttctttttactgtctcttctgcttactttccacatgagatgctttgtaccggggagctgtgagcaggcctcacgatggcttgggagcactcgttctcccaaggtctgagtcttcatccagccctgcctgtctgtcgcagccttcctcactctgttcctcggccagttaacaagaagatggtgtgaggtgttctccaccagtctctcctgtttgagactgttgacgttatcatactgaggtgttagatcaaatatctctaattgaagaacatgtgaggttgaaagagcaccagccagggcaacatagcgtgaccctgtctctacaaaaaattaaaaagagaacatacaaagttgacatatgagaccctgttgtccccgcctgcagctttgccccagtaacagatgcccgttgctcttgggctggtttcccctgaacacctccaagaggctgcctgccttgccagcacccgtgtcctgagctcctgcagcccagtggctgctgaagttgtgatccctcactcaccctgctagctttgcccttgactcgtcttctctgaacctcagcctcgtgcattgcctggaaccttcttctagcataaatgaaggtttttcctcctacacacattccttcctcggttatttcattcagagaatatttatgaaatgcctactgtgtgcaagtcatccatccttgaaaaggccacttctcagtgagggagagatgtagtggattctgtgagacatacctgctggagttgaagcagtaaatagcatgtccttcccctccccgatcttaaggtgtgttttctaga

SEQ ID NO: 129437 - DNA, 5796 bp, Homo sapiens
  Payload ID: 5316
  Gene Symbol: ERC1
  Gene Name: ELKS/RAB6-interacting/CAST family member 1
  ENST ID: ENST00000355446
  CDS Start-End: 133-3393
gattggacagctggggaccttcttctgattaaccttaaaccaacttgtagccatagagacacctcacaaggttcccatttttgttgttgttgttgttgattttctgctcacacctttcctgaccttgcaaccatgtatggaagtgcccgctctgttgggaaggtggagccgagcagccagagccctgggcgttcacccaggcttccacgttcccctcgcttgggtcaccgtcgaaccaacagtacgggagggagttcgggaagcagtgttggaggtggcagtgggaaaaccctttcaatggaaaatatacaatctttaaatgctgcctatgccacctctggccctatgtatctaagtgaccatgaaaatgtgggttcagaaacacctaaaagcaccatgacacttggccgttctgggggacgtctgccttacggtgttcggatgactgctatgggtagtagccccaatatagctagcagtggggttgctagtgacaccatagcatttggagagcatcacctccctcctgtgagtatggcatccactgtacctcactcccttcgtcaggcgagagataacacaatcatggatctgcagacacagctgaaggaagtattaagagaaaatgatctcttgcggaaggatgtggaagtaaaggagagcaaattgagttcttcaatgaatagcatcaagaccttctggagcccagagctgaagaaggaacgagccctgagaaaagatgaagcttccaaaatcaccatttggaaggaacagtacagagttgtacaggaggaaaaccagcacatgcagatgacaatccaggctctccaggatgaattgcggatccagagggacctgaatcagctgtttcagcaggatagtagcagcaggactggcgaaccttgtgtagcagagctgacagaggagaactttcagaggcttcatgctgagcatgagcggcaggccaaagagctgtttcttcttcgaaagacattggaggaaatggagctgcgtattgagactcaaaagcagaccctaaatgctcgggatgaatccattaagaagcttctggaaatgttgcagagcaaaggactttctgccaaggctaccgaggaagaccatgagagaacaagacgactggcagaggcagagatgcacgttcatcacctagaaagccttttggagcagaaggaaaaagagaacagtatgttgagagaggagatgcatcgaaggtttgagaatgctcctgattctgccaaaacaaaagctctgcaaactgttattgagatgaaggattcaaaaatttcctctatggagcgtgggcttcgagacctggaagaggaaattcagatgctgaaatcgaatggtgctttgagtactgaggaaagggaagaagaaatgaagcaaatggaagtgtatcggagccattctaaatttatgaaaaataaggtagaacaactgaaggaggaactaagttcgaaagaggctcaatgggaggagctgaaaaagaaagcggctggtcttcaggctgagattggccaggtgaaacaggagctgtccagaaaggacacagaactactcgccctgcagacaaagctagaaacactcacaaaccagttctcagatagtaaacagcacattgaagtgttgaaggagtccttgactgctaaggagcagagggctgccatcctgcagactgaggtggatgctctccgattgcgtttggaagagaaggaaaccatgttgaataaaaagacaaaacaaattcaggatatggctgaagagaaggggacacaagctggagagatacatgacctcaaggacatgttggatgtgaaggagcggaaggttaatgttcttcagaagaagattgaaaatcttcaagagcagcttagagacaaggaaaagcagatgagcagcttgaaagaacgggtcaaatccttgcaggctgacaccaccaacactgacactgccttgacaactttggaggaggcccttgcagagaaagagcggacaattgaacgcttaaaggagcagagggacagagatgagcgagagaagcaagaggaaattgataactacaaaaaagatcttaaagacttgaaggaaaaagtcagcctgttgcaaggcgacctttcagagaaagaggcttcacttttggatctgaaagagcatgcttcttctctggcatcctcaggactgaaaaaggactcacggcttaagacactagagattgctttggagcagaagaaggaggagtgtctgaaaatggaatcacaattgaaaaaggcacatgaggcagcattggaagccagagccagtccagagatgagtgaccgaatacagcacttggagagagagatcaccaggtacaaagatgaatctagcaaggcccaggcagaagttgatcgactcttagaaatcttgaaggaggtggaaaatgagaagaatgacaaagataagaagatagctgagttggaaaggcaagtgaaagaccagaataagaaggtagcaaatctgaagcacaaggaacaggtggaaaaaaagaagagtgcacaaatgttagaggaggcgcgacgacgggaggacaatctcaacgacagctctcagcagctacaggacagtctccgtaagaaggatgacaggattgaagagctggaagaagcactaagagaaagtgtacagataactgcagagcgggaaatggtgctagcacaagaggaatcagccaggaccaatgctgaaaaacaggtggaggagttactgatggccatggagaaggtaaagcaggaactagaatccatgaaagcaaagctgtcctccacccagcagtctctggcagaaaaggaaactcacttgactaatcttcgggcagagagaaggaaacacttagaggaagttctggagatgaagcaagaagctcttctggctgccattagtgaaaaagacgccaatatagctctcttggagctttcgtcctctaagaagaagacccaagaggaagtggctgccctgaagcgggagaaggatcgtctggtacagcagcttaagcagcagacgcaaaatcgaatgaagctaatggccgacaactacgaggatgaccacttcaaatcctcccattccaatcaaacaaatcacaagccctccccagaccagatcatccagcccctcttagaacttgaccaaaatagaagtaaattaaagttgtacattggacacctgacaaccctctgccatgaccgagaccccctgatcctccgtggactcactccaccagcttcctataacttggacgatgaccaggcggcttgggagaatgagctgcagaagatgacccgggggcagaatccgttgcatcccaaagccatggaaaaactgccttttttcatgtgatgctcatgcttcaggatgagttagagaaaggtgaacgggacaatgcagaactgcaggagtttgccaacgccattcttcagcagatagcagaccattgtcccgacatcctagagcaagtggtcaacgccctggaagagtcctcttgaccctgctttatggggaagcctgaggtagtcaacccaggagccaagaaaagagaactacgaggaacaggtgcccggaaccttcttggcaccaaacactacaaacttcatcccaacttgctcacttgaagaagtgtgattccagcaccgtttctacatctgccatcttactctgcctttctgctttggatgtggtctctacactaaccttcttgatgtccagggtagataaagggtcgaatctctctgaagaactgccacctggtcatcagcagtggagaactgtgggagctggtggctctgccctgacagagagccatggagcagaggagcctctcacctcctgtcctctgacatgagaatgaaaccaggaatggacttggagttcaacaggctgagaggatgcctccaatggaccagagagctgagtgttctaatatcacaataggtgctttctcctaaaagggcaaaaaacaatctcaaaaagattagaaaaagagaaggggggaagggaagagaaaatcgactcttctttttactgtctcttctgcttactttccacatgagatgctttgtaccggggagctgtgagcaggcctcacgatggcttgggagcactcgttctcccaaggtctgagtcttcatccagccctgcctgtctgtcgcagccttcctcactctgttcctcggccagttaacaagaagatggtgtgaggtgttctccaccagtctctcctgtttgagactgttgacgttatcatactgaggtgttagatcaaatatctctaattgaagaacatgtgaggttgaaagagcaccagccagggcaacatagcgtgaccctgtctctacaaaaaattaaaaagagaacatacaaagttgacatatgagaccctgttgtccccgcctgcagctttgccccagtaacagatgcccgttgctcttgggctggtttcccctgaacacctccaagaggctgcctgccttgccagcacccgtgtcctgagctcctgcagcccagtggctgctgaagttgtgatccctcactcaccctgctagctttgcccttgactcgtcttctctgaacctcagcctcgtgcattgcctggaaccttcttctagcataaatgaaggtttttcctcctacacacattccttcctcggttatttcattcagagaatatttatgaaatgcctactgtgtgcaagtcatccatccttgaaaaggccacttctcagtgagggagagatgtagtggattctgtgagacatacctgctggagttgaagcagtaaatagcatgtccttcccctccccgatcttaaggtgtgttttctagaaaagttccctaatggaattcatgagtttgggggtctcagtcacccgcttgcctgtaggattccatttgatgattctggatttttgctgtttgttattgcccttagaggggctctgagtatctacttgtgggtggccatttcctgacatctgcatgtacctcgtggaattcagccagcttcatgttgcaaatcagaaagctgaccccaagactgcaaatcaatgaaggtattggcattgttaaggacgtagcgtagacaacagcagtcataaataattaggcaggaacttaacccaaatctagttctttgaccacctctaccaccagaacccagcagacactcacatctcctgataagagttgctggactcgatgtttttgttttgcattttctcctctccttccccacttactcagagaatttaaagtctgtagagtcagcacagccccatcagtccaggaacttcccaccaccagcccttgactgtcccattaactgacatggtcagatttccagctccccctactccctgctgtgaaacaatccctctccctgtgagaggaaactgtggagcgtttcttatcgaaggttaaatggactctgctcataaacctcttactgagatgcttcctgatagccaggctggccagagaggggtgcaggggttagatagtaagtggtggtcgtttgtggtcagttacctcaattctgttcattgcagtgcccgtaaaccatgtagaaagctcccagcactgaaaggcaggagtgttagcatctcgctttatccaccataacgtaaagaactgcggtgtgataacagccttcacggggccacggtggaaccaagacagcaggcgaggccatgcctaaacaagtggtctggcacgggcactggccagctgctctctccaagcaggtgg

SEQ ID NO: 129438 - DNA, 5789 bp, Homo sapiens
  Payload ID: 5316
  Gene Symbol: ERC1
  Gene Name: ELKS/RAB6-interacting/CAST family member 1
  Uniprot ID: Q8IUD2
  ENST ID: ENST00000360905
  CDS Start-End: 182-3532
agcagtagcggcagccctgaggacgatatggtgtaagatacttcttcaagattggacagctggggaccttcttctgattaaccttaaaccaacttgtagccatagagacacctcacaaggttcccatttttgttgttgttgttgttgattttctgctcacacctttcctgaccttgcaaccatgtatggaagtgcccgctctgttgggaaggtggagccgagcagccagagccctgggcgttcacccaggcttccacgttcccctcgcttgggtcaccgtcgaaccaacagtacgggagggagttcgggaagcagtgttggaggtggcagtgggaaaaccctttcaatggaaaatatacaatctttaaatgctgcctatgccacctctggccctatgtatctaagtgaccatgaaaatgtgggttcagaaacacctaaaagcaccatgacacttggccgttctgggggacgtctgccttacggtgttcggatgactgctatgggtagtagccccaatatagctagcagtggggttgctagtgacaccatagcatttggagagcatcacctccctcctgtgagtatggcatccactgtacctcactcccttcgtcaggcgagagataacacaatcatggatctgcagacacagctgaaggaagtattaagagaaaatgatctcttgcggaaggatgtggaagtaaaggagagcaaattgagttcttcaatgaatagcatcaagaccttctggagcccagagctgaagaaggaacgagccctgagaaaagatgaagcttccaaaatcaccatttggaaggaacagtacagagttgtacaggaggaaaaccagcacatgcagatgacaatccaggctctccaggatgaattgcggatccagagggacctgaatcagctgtttcagcaggatagtagcagcaggactggcgaaccttgtgtagcagagctgacagaggagaactttcagaggcttcatgctgagcatgagcggcaggccaaagagctgtttcttcttcgaaagacattggaggaaatggagctgcgtattgagactcaaaagcagaccctaaatgctcgggatgaatccattaagaagcttctggaaatgttgcagagcaaaggactttctgccaaggctaccgaggaagaccatgagagaacaagacgactggcagaggcagagatgcacgttcatcacctagaaagccttttggagcagaaggaaaaagagaacagtatgttgagagaggagatgcatcgaaggtttgagaatgctcctgattctgccaaaacaaaagctctgcaaactgttattgagatgaaggattcaaaaatttcctctatggagcgtgggcttcgagacctggaagaggaaattcagatgctgaaatcgaatggtgctttgagtactgaggaaagggaagaagaaatgaagcaaatggaagtgtatcggagccattctaaatttatgaaaaataaggtagaacaactgaaggaggaactaagttcgaaagaggctcaatgggaggagctgaaaaagaaagcggctggtcttcaggctgagattggccaggtgaaacaggagctgtccagaaaggacacagaactactcgccctgcagacaaagctagaaacactcacaaaccagttctcagatagtaaacagcacattgaagtgttgaaggagtccttgactgctaaggagcagagggctgccatcctgcagactgaggtggatgctctccgattgcgtttggaagagaaggaaaccatgttgaataaaaagacaaaacaaattcaggatatggctgaagagaaggggacacaagctggagagatacatgacctcaaggacatgttggatgtgaaggagcggaaggttaatgttcttcagaagaagattgaaaatcttcaagagcagcttagagacaaggaaaagcagatgagcagcttgaaagaacgggtcaaatccttgcaggctgacaccaccaacactgacactgccttgacaactttggaggaggcccttgcagagaaagagcggacaattgaacgcttaaaggagcagagggacagagatgagcgagagaagcaagaggaaattgataactacaaaaaagatcttaaagacttgaaggaaaaagtcagcctgttgcaaggcgacctttcagagaaagaggcttcacttttggatctgaaagagcatgcttcttctctggcatcctcaggactgaaaaaggactcacggcttaagacactagagattgctttggagcagaagaaggaggagtgtctgaaaatggaatcacaattgaaaaaggcacatgaggcagcattggaagccagagccagtccagagatgagtgaccgaatacagcacttggagagagagatcaccaggtacaaagatgaatctagcaaggcccaggcagaagttgatcgactcttagaaatcttgaaggaggtggaaaatgagaagaatgacaaagataagaagatagctgagttggaaaggcaagtgaaagaccagaataagaaggtagcaaatctgaagcacaaggaacaggtggaaaaaaagaagagtgcacaaatgttagaggaggcgcgacgacgggaggacaatctcaacgacagctctcagcagctacaggacagtctccgtaagaaggatgacaggattgaagagctggaagaagcactaagagaaagtgtacagataactgcagagcgggaaatggtgctagcacaagaggaatcagccaggaccaatgctgaaaaacaggtggaggagttactgatggccatggagaaggtaaagcaggaactagaatccatgaaagcaaagctgtcctccacccagcagtctctggcagaaaaggaaactcacttgactaatcttcgggcagagagaaggaaacacttagaggaagttctggagatgaagcaagaagctcttctggctgccattagtgaaaaagacgccaatatagctctcttggagctttcgtcctctaagaagaagacccaagaggaagtggctgccctgaagcgggagaaggatcgtctggtacagcagcttaagcagcagacgcaaaatcgaatgaagctaatggccgacaactacgaggatgaccacttcaaatcctcccattccaatcaaacaaatcacaagccctccccagaccagatcatccagcccctcttagaacttgaccaaaatagaagtaaattaaagttgtacattggacacctgacaaccctctgccatgaccgagaccccctgatcctccgtggactcactccaccagcttcctataacttggacgatgaccaggcggcttgggagaatgagctgcagaagatgacccgggggcagcttcaggatgagttagagaaaggtgaacgggacaatgcagaactgcaggagtttgccaacgccattcttcagcagatagcagaccattgtcccgacatcctagagcaagtggtcaacgccctggaagagtcctcttgaccctgctttatggggaagcctgaggtagtcaacccaggagccaagaaaagagaactacgaggaacaggtgcccggaaccttcttggcaccaaacactacaaacttcatcccaacttgctcacttgaagaagtgtgattccagcaccgtttctacatctgccatcttactctgcctttctgctttggatgtggtctctacactaaccttcttgatgtccagggtagataaagggtcgaatctctctgaagaactgccacctggtcatcagcagtggagaactgtgggagctggtggctctgccctgacagagagccatggagcagaggagcctctcacctcctgtcctctgacatgagaatgaaaccaggaatggacttggagttcaacaggctgagaggatgcctccaatggaccagagagctgagtgttctaatatcacaataggtgctttctcctaaaagggcaaaaaacaatctcaaaaagattagaaaaagagaaggggggaagggaagagaaaatcgactcttctttttactgtctcttctgcttactttccacatgagatgctttgtaccggggagctgtgagcaggcctcacgatggcttgggagcactcgttctcccaaggtctgagtcttcatccagccctgcctgtctgtcgcagccttcctcactctgttcctcggccagttaacaagaagatggtgtgaggtgttctccaccagtctctcctgtttgagactgttgacgttatcatactgaggtgttagatcaaatatctctaattgaagaacatgtgaggttgaaagagcaccagccagggcaacatagcgtgaccctgtctctacaaaaaattaaaaagagaacatacaaagttgacatatgagaccctgttgtccccgcctgcagctttgccccagtaacagatgcccgttgctcttgggctggtttcccctgaacacctccaagaggctgcctgccttgccagcacccgtgtcctgagctcctgcagcccagtggctgctgaagttgtgatccctcactcaccctgctagctttgcccttgactcgtcttctctgaacctcagcctcgtgcattgcctggaaccttcttctagcataaatgaaggtttttcctcctacacacattccttcctcggttatttcattcagagaatatttatgaaatgcctactgtgtgcaagtcatccatccttgaaaaggccacttctcagtgagggagagatgtagtggattctgtgagacatacctgctggagttgaagcagtaaatagcatgtccttcccctccccgatcttaaggtgtgttttctagaaaagttccctaatggaattcatgagtttgggggtctcagtcacccgcttgcctgtaggattccatttgatgattctggatttttgctgtttgttattgcccttagaggggctctgagtatctacttgtgggtggccatttcctgacatctgcatgtacctcgtggaattcagccagcttcatgttgcaaatcagaaagctgaccccaagactgcaaatcaatgaaggtattggcattgttaaggacgtagcgtagacaacagcagtcataaataattaggcaggaacttaacccaaatctagttctttgaccacctctaccaccagaacccagcagacactcacatctcctgataagagttgctggactcgatgtttttgttttgcattttctcctctccttccccacttactcagagaatttaaagtctgtagagtcagcacagccccatcagtccaggaacttcccaccaccagcccttgactgtcccattaactgacatggtcagatttccagctccccctactccctgctgtgaaacaatccctctccctgtgagaggaaactgtggagcgtttcttatcgaaggttaaatggactctgctcataaacctcttactgagatgcttcctgatagccaggctggccagagaggggtgcaggggttagatagtaagtggtggtcgtttgtggtcagttacctcaattctgttcattgcagtgcccgtaaaccatgtagaaagctcccagcactgaaaggcaggagtgttagcatctcgctttatccaccataacgtaaagaactgcggtgtgataacagccttcacggggccacggtggaaccaagacagcaggcgaggccatgcctaaacaagtggtctggcacgggcactggccagctgctctctccaagcaggtgg

SEQ ID NO: 129439 - DNA, 9118 bp, Homo sapiens
  Payload ID: 5316
  Gene Symbol: ERC1
  Gene Name: ELKS/RAB6-interacting/CAST family member 1
  Uniprot ID: Q8IUD2
  ENST ID: ENST00000397203
  CDS Start-End: 158-3424
gatatggtgtaagatacttcttcaagattggacagctggggaccttcttctgattaaccttaaaccaacttgtagccatagagacacctcacaaggttcccatttttgttgttgttgttgttgattttctgctcacacctttcctgaccttgcaaccatgtatggaagtgcccgctctgttgggaaggtggagccgagcagccagagccctgggcgttcacccaggcttccacgttcccctcgcttgggtcaccgtcgaaccaacagtacgggagggagttcgggaagcagtgttggaggtggcagtgggaaaaccctttcaatggaaaatatacaatctttaaatgctgcctatgccacctctggccctatgtatctaagtgaccatgaaaatgtgggttcagaaacacctaaaagcaccatgacacttggccgttctgggggacgtctgccttacggtgttcggatgactgctatgggtagtagccccaatatagctagcagtggggttgctagtgacaccatagcatttggagagcatcacctccctcctgtgagtatggcatccactgtacctcactcccttcgtcaggcgagagataacacaatcatggatctgcagacacagctgaaggaagtattaagagaaaatgatctcttgcggaaggatgtggaagtaaaggagagcaaattgagttcttcaatgaatagcatcaagaccttctggagcccagagctgaagaaggaacgagccctgagaaaagatgaagcttccaaaatcaccatttggaaggaacagtacagagttgtacaggaggaaaaccagcacatgcagatgacaatccaggctctccaggatgaattgcggatccagagggacctgaatcagctgtttcagcaggatagtagcagcaggactggcgaaccttgtgtagcagagctgacagaggagaactttcagaggcttcatgctgagcatgagcggcaggccaaagagctgtttcttcttcgaaagacattggaggaaatggagctgcgtattgagactcaaaagcagaccctaaatgctcgggatgaatccattaagaagcttctggaaatgttgcagagcaaaggactttctgccaaggctaccgaggaagaccatgagagaacaagacgactggcagaggcagagatgcacgttcatcacctagaaagccttttggagcagaaggaaaaagagaacagtatgttgagagaggagatgcatcgaaggtttgagaatgctcctgattctgccaaaacaaaagctctgcaaactgttattgagatgaaggattcaaaaatttcctctatggagcgtgggcttcgagacctggaagaggaaattcagatgctgaaatcgaatggtgctttgagtactgaggaaagggaagaagaaatgaagcaaatggaagtgtatcggagccattctaaatttatgaaaaataagattggccaggtgaaacaggagctgtccagaaaggacacagaactactcgccctgcagacaaagctagaaacactcacaaaccagttctcagatagtaaacagcacattgaagtgttgaaggagtccttgactgctaaggagcagagggctgccatcctgcagactgaggtggatgctctccgattgcgtttggaagagaaggaaaccatgttgaataaaaagacaaaacaaattcaggatatggctgaagagaaggggacacaagctggagagatacatgacctcaaggacatgttggatgtgaaggagcggaaggttaatgttcttcagaagaagattgaaaatcttcaagagcagcttagagacaaggaaaagcagatgagcagcttgaaagaacgggtcaaatccttgcaggctgacaccaccaacactgacactgccttgacaactttggaggaggcccttgcagagaaagagcggacaattgaacgcttaaaggagcagagggacagagatgagcgagagaagcaagaggaaattgataactacaaaaaagatcttaaagacttgaaggaaaaagtcagcctgttgcaaggcgacctttcagagaaagaggcttcacttttggatctgaaagagcatgcttcttctctggcatcctcaggactgaaaaaggactcacggcttaagacactagagattgctttggagcagaagaaggaggagtgtctgaaaatggaatcacaattgaaaaaggcacatgaggcagcattggaagccagagccagtccagagatgagtgaccgaatacagcacttggagagagagatcaccaggtacaaagatgaatctagcaaggcccaggcagaagttgatcgactcttagaaatcttgaaggaggtggaaaatgagaagaatgacaaagataagaagatagctgagttggaaaggcaagtgaaagaccagaataagaaggtagcaaatctgaagcacaaggaacaggtggaaaaaaagaagagtgcacaaatgttagaggaggcgcgacgacgggaggacaatctcaacgacagctctcagcagctacaggacagtctccgtaagaaggatgacaggattgaagagctggaagaagcactaagagaaagtgtacagataactgcagagcgggaaatggtgctagcacaagaggaatcagccaggaccaatgctgaaaaacaggtggaggagttactgatggccatggagaaggtaaagcaggaactagaatccatgaaagcaaagctgtcctccacccagcagtctctggcagaaaaggaaactcacttgactaatcttcgggcagagagaaggaaacacttagaggaagttctggagatgaagcaagaagctcttctggctgccattagtgaaaaagacgccaatatagctctcttggagctttcgtcctctaagaagaagacccaagaggaagtggctgccctgaagcgggagaaggatcgtctggtacagcagcttaagcagcagacgcaaaatcgaatgaagctaatggccgacaactacgaggatgaccacttcaaatcctcccattccaatcaaacaaatcacaagccctccccagaccagatcatccagcccctcttagaacttgaccaaaatagaagtaaattaaagttgtacattggacacctgacaaccctctgccatgaccgagaccccctgatcctccgtggactcactccaccagcttcctataacttggacgatgaccaggcggcttgggagaatgagctgcagaagatgacccgggggcagcttcaggatgagttagagaaaggtgaacgggacaatgcagaactgcaggagtttgccaacgccattcttcagcagatagcagaccattgtcccgacatcctagagcaagtggtcaacgccctggaagagtcctcttgaccctgctttatggggaagcctgaggtagtcaacccaggagccaagaaaagagaactacgaggaacaggtgcccggaaccttcttggcaccaaacactacaaacttcatcccaacttgctcacttgaagaagtgtgattccagcaccgtttctacatctgccatcttactctgcctttctgctttggatgtggtctctacactaaccttcttgatgtccagggtagataaagggtcgaatctctctgaagaactgccacctggtcatcagcagtggagaactgtgggagctggtggctctgccctgacagagagccatggagcagaggagcctctcacctcctgtcctctgacatgagaatgaaaccaggaatggacttggagttcaacaggctgagaggatgcctccaatggaccagagagctgagtgttctaatatcacaataggtgctttctcctaaaagggcaaaaaacaatctcaaaaagattagaaaaagagaaggggggaagggaagagaaaatcgactcttctttttactgtctcttctgcttactttccacatgagatgctttgtaccggggagctgtgagcaggcctcacgatggcttgggagcactcgttctcccaaggtctgagtcttcatccagccctgcctgtctgtcgcagccttcctcactctgttcctcggccagttaacaagaagatggtgtgaggtgttctccaccagtctctcctgtttgagactgttgacgttatcatactgaggtgttagatcaaatatctctaattgaagaacatgtgaggttgaaagagcaccagccagggcaacatagcgtgaccctgtctctacaaaaaattaaaaagagaacatacaaagttgacatatgagaccctgttgtccccgcctgcagctttgccccagtaacagatgcccgttgctcttgggctggtttcccctgaacacctccaagaggctgcctgccttgccagcacccgtgtcctgagctcctgcagcccagtggctgctgaagttgtgatccctcactcaccctgctagctttgcccttgactcgtcttctctgaacctcagcctcgtgcattgcctggaaccttcttctagcataaatgaaggtttttcctcctacacacattccttcctcggttatttcattcagagaatatttatgaaatgcctactgtgtgcaagtcatccatccttgaaaaggccacttctcagtgagggagagatgtagtggattctgtgagacatacctgctggagttgaagcagtaaatagcatgtccttcccctccccgatcttaaggtgtgttttctagaaaagttccctaatggaattcatgagtttgggggtctcagtcacccgcttgcctgtaggattccatttgatgattctggatttttgctgtttgttattgcccttagaggggctctgagtatctacttgtgggtggccatttcctgacatctgcatgtacctcgtggaattcagccagcttcatgttgcaaatcagaaagctgaccccaagactgcaaatcaatgaaggtattggcattgttaaggacgtagcgtagacaacagcagtcataaataattaggcaggaacttaacccaaatctagttctttgaccacctctaccaccagaacccagcagacactcacatctcctgataagagttgctggactcgatgtttttgttttgcattttctcctctccttccccacttactcagagaatttaaagtctgtagagtcagcacagccccatcagtccaggaacttcccaccaccagcccttgactgtcccattaactgacatggtcagatttccagctccccctactccctgctgtgaaacaatccctctccctgtgagaggaaactgtggagcgtttcttatcgaaggttaaatggactctgctcataaacctcttactgagatgcttcctgatagccaggctggccagagaggggtgcaggggttagatagtaagtggtggtcgtttgtggtcagttacctcaattctgttcattgcagtgcccgtaaaccatgtagaaagctcccagcactgaaaggcaggagtgttagcatctcgctttatccaccataacgtaaagaactgcggtgtgataacagccttcacggggccacggtggaaccaagacagcaggcgaggccatgcctaaacaagtggtctggcacgggcactggccagctgctctctccaagcaggtggcccagatcccacccacgtggactttctcatcaggtgcagcgcctgccactctcagccactgggtgtgtcactctcctcttcatctcagcattctccatcacttcccctccagaaaaacggatggaaggaagccctctgtgacactgcttctgagaagaagcatttccgggaccgatatcatctgtctggtctctgtgaacagcaaggaatcttcttgaccgttcttgggcactggaggctggctaggagttcagtaataaacgtggccttcgtgctgtagggcagagtggatgcagtttgtagctttcagagtgtctcattgagtctagatcattgaaccaacacttaaccaaatgtcccactcccatcacactaggacttgtcattccatgcccctctcctagtggtcatggtttcatatgggcatacaactgctactgaagttatatagccttgaaaactcagtgcaggttgcccttaattttccccaaacccctccatcggcaagtctagttgccctttagcacctaaagatctgcaccccaaaccaatgtcaccataaagagggcacgaagaagagtgggtgtgatcccaacggggttttgtaactgaagaagcccagtgtgagcttctcatcttttcatatacctctaacccccggtactcattgaatcattgatgaggtatctcaattgagatttgcaaggactttgataccatttgaaatggaaaaattttgaacgggctttaacatgtttaagaaatatggatggggccggccacagtggctcacgcctgtaatcccagaactctggaaggctgaggcaggcggatcacctgagatcaggagttcgaggccagcctggccaagatggcaaaaaccccgactctactaaaaatacaaaattagccaggcgtggtggcgtacgcctgtaatcccagctactcaggaggcaggagaatcgcttgagcctgggaggcagaggctgcggtgagccgagatcgtgtcactgcactccagcctgggtgacagagactccatttaaaaaaaaaaaaaaaaaatatatatatatatatatatatatatatatggatgggaatcaccaaattcatctcagctctaaccttttaacctttgtccttgcactttacaatctaaagatctacctgtggctctcagacttcctcacacttgggttttagaaataacttgtaaagcagactggacccaaggccgccttcagtgtcaagaagggcattgtgacttgcccctcaatttctgtccattgaagtctggttttccatgaggaacttgcgggctcacccacccccagagtgagagaagaggaaggcgaagtcatcacagacacggtcttagccacctgctgaactaatccctccgctattgagggtcagggttgtgaggcaaccatcatgtgtcaccccaaaatataaatgtttctgagccgcccatccactggcatttggatttgctgccagagtcctgttcctcccagaaccatcccgccctcctgttgaccatgttacttgagtgtaggcccggtgtcaagaccctcagagtctttgaggaaagagccaagcagagaagaccgctgcgtggagtgtgacaccacatggcatttctcaagcccagcggaccctgtgtcagcaaataccagtaatttaacatctgctcctggcctcctcttcacctgcctgggttcggaactgaggaggaaggatgagaagagactgcaatgcagcaggcaccctctgcagagtgaggccgcccgtccatcactgccagccctgggctgctcaggaggggacgtgaaccactcaaaggaatgtcttaaagaggatctggagtttcccccatgcaaattagggaagaattaggcaagaaaagacatacattacagggaaatccttctgaacaaaatggctgtcttcacctactcttcttgcaagaaaagacatacattacagggaaatccttctgaacaaaatggctatcttcacctactcttcagcaaaaaccgtctccagactttttagtgtcaaaaatgtaaccaactgtctcctgattttttccaatgtgtttggcaagtgctgtggccctgttgtaggtacttctcctgactcttgggggagaagtggttttagggattgatttgggggagcgggtttttgtcccatcccacctcctctcttctttctctgcttgtcgatattgtctgtgtgattcagagaattggggcagttacattgtgtctgttgttgagattattaaaagattaaaacgtagttgtagaaatgaaaaattaaacagctgtgttttaaaaatgcaaaccaatatcttgttaataaaggaattcaagctatggggcagccacactcccctcctcccaggctggcataggtggccctgggctggcggcttaggaagcatggagcacacttagggtagtgcctgcctgggcaagagacacctgccgagcaaaaggaacgagaatctggggctcagagcctcgcagttgtgccaggattttcctatacatgttcaggacctctgggtagaggtttcacagtttgtgaccccataaccaccctcacccgacgtgggttctagctcagtgtgcctaatactgcatggtaacctgggcttgaccctgaagcccctgcctggcaggccacaggacctctcctgcccacttggtgctatctcttccagtgaccacccagcacgggtgagcactggccagcctggagcctgcaatccaggtggaacagactgtcctccatgtcagttccttctggcttcaggccctcaattatttccctttgagcttttttagaccctagatctcctaggcccaggctctctcttgaccccagagaagccactgtcaggaaaggaagtgaaccctactgaagccagagaattcaccccggccaaagcaggccctctgggtccagcccctcattccacaccacgccagtattgcatccatctactgcagctacacatcctgagggcagcaccacccactctggcctgctggcccatcgcaggactagcccaggcacctgccgggcattgcaggatatccagtggggcctgtgactgctccctgatgcgtcagaagagaagtgttgcactttagtggaggagctgaggagcacctgcccccttgtagcttgagttccttttggtaacagtagcagcctccatggtggtgtctgggatgcacgtgcacccgctgccttcagctgtatgtgtgtgttcctgctggagttgtgttactgacaggataatgacattacaaagaaattgtgttatattcaactttgccttgataattattgtaaacactttgttcattttttcttttttattcacaaactaaatccaccaggaaattataaagttattt

SEQ ID NO: 129440 - DNA, 7040 bp, Homo sapiens
  Payload ID: 5316
  Gene Symbol: ERC1
  Gene Name: ELKS/RAB6-interacting/CAST family member 1
  Uniprot ID: Q8IUD2
  ENST ID: ENST00000440394
  CDS Start-End: 378-3356
gcggcggcggcggtgcctgggcggcagcagcagcagtagcggcagccctgaggacggtgagacggccgcggcggcggcgacagcgcggaagtcgcgcgggacccagagcttcccccctgtcgctagtgctgaggctttcgcctttcctacccagcttcttgctcacggcccgggctgggctgggcagggcaacgcgcccccggggaggggcggagctgtagatatggtgtaagatacttcttcaagattggacagctggggaccttcttctgattaaccttaaaccaacttgtagccatagagacacctcacaaggttcccatttttgttgttgttgttgttgattttctgctcacacctttcctgaccttgcaaccatgtatggaagtgcccgctctgttgggaaggtggagccgagcagccagagccctgggcgttcacccaggcttccacgttcccctcgcttgggtcaccgtcgaaccaacagtacgggagggagttcgggaagcagtgttggaggtggcagtgggaaaaccctttcaatggaaaatatacaatctttaaatgctgcctatgccacctctggccctatgtatctaagtgaccatgaaaatgtgggttcagaaacacctaaaagcaccatgacacttggccgttctgggggacgtctgccttacggtgttcggatgactgctatgggtagtagccccaatatagctagcagtggggttgctagtgacaccatagcatttggagagcatcacctccctcctgtgagtatggcatccactgtacctcactcccttcgtcaggcgagagataacacaatcatggatctgcagacacagctgaaggaagtattaagagaaaatgatctcttgcggaaggatgtggaagtaaaggagagcaaattgagttcttcaatgaatagcatcaagaccttctggagcccagagctgaagaaggaacgagccctgagaaaagatgaagcttccaaaatcaccatttggaaggaacagtacagagttgtacaggaggaaaaccagcacatgcagatgacaatccaggctctccaggatgaattgcggatccagagggacctgaatcagctgtttcagcaggatagtagcagcaggactggcgaaccttgtgtagcagagctgacagaggagaactttcagaggcttcatgctgagcatgagcggcaggccaaagagctgtttcttcttcgaaagacattggaggaaatggagctgcgtattgagactcaaaagcagaccctaaatgctcgggatgaatccattaagaagcttctggaaatgttgcagagcaaaggactttctgccaaggctaccgaggaagaccatgagagaacaagacgactggcagaggcagagatgcacgttcatcacctagaaagccttttggagcagaaggaaaaagagaacagtatgttgagagaggagatgcatcgaaggtttgagaatgctcctgattctgccaaaacaaaagctctgcaaactgttattgagatgaaggattcaaaaatttcctctatggagcgtgggcttcgagacctggaagaggaaattcagatgctgaaatcgaatggtgctttgagtactgaggaaagggaagaagaaatgaagcaaatggaagtgtatcggagccattctaaatttatgaaaaataagattggccaggtgaaacaggagctgtccagaaaggacacagaactactcgccctgcagacaaagctagaaacactcacaaaccagttctcagatagtaaacagcacattgaagtgttgaaggagtccttgactgctaaggagcagagggctgccatcctgcagactgaggtggatgctctccgattgcgtttggaagagaaggaaaccatgttgaataaaaagacaaaacaaattcaggatatggctgaagagaaggggacacaagctggagagatacatgacctcaaggacatgttggatgtgaaggagcggaaggttaatgttcttcagaagaagattgaaaatcttcaagagcagcttagagacaaggaaaagcagatgagcagcttgaaagaacgggtcaaatccttgcaggctgacaccaccaacactgacactgccttgacaactttggaggaggcccttgcagagaaagagcggacaattgaacgcttaaaggagcagagggacagagatgagcgagagaagcaagaggaaattgataactacaaaaaagatcttaaagacttgaaggaaaaagtcagcctgttgcaaggcgacctttcagagaaagaggcttcacttttggatctgaaagagcatgcttcttctctggcatcctcaggactgaaaaaggactcacggcttaagacactagagattgctttggagcagaagaaggaggagtgtctgaaaatggaatcacaattgaaaaaggcacatgaggcagcattggaagccagagccagtccagagatgagtgaccgaatacagcacttggagagagagatcaccaggtacaaagatgaatctagcaaggcccaggcagaagttgatcgactcttagaaatcttgaaggaggtggaaaatgagaagaatgacaaagataagaagatagctgagttggaaagtctcacctcaaggcaagtgaaagaccagaataagaaggtagcaaatctgaagcacaaggaacaggtggaaaaaaagaagagtgcacaaatgttagaggaggcgcgacgacgggaggacaatctcaacgacagctctcagcagctacaggacagtctccgtaagaaggatgacaggattgaagagctggaagaagcactaagagaaagtgtacagataactgcagagcgggaaatggtgctagcacaagaggaatcagccaggaccaatgctgaaaaacaggtggaggagttactgatggccatggagaaggtaaagcaggaactagaatccatgaaagcaaagctgtcctccacccagcagtctctggcagaaaaggaaactcacttgactaatcttcgggcagagagaaggaaacacttagaggaagttctggagatgaagcaagaagctcttctggctgccattagtgaaaaagacgccaatatagctctcttggagctttcgtcctctaagaagaagacccaagaggaagtggctgccctgaagcgggagaaggatcgtctggtacagcagcttaagcagcagacgcaaaatcgaatgaagctaatggccgacaactacgaggatgaccacttcaaatcctcccattccaatcaaacaaatcacaagccctccccagaccaggatgaggaggagggtatatgggcatagccaatcagaggcttagttcagccattttgttcagaacgatcatccagcccctcttagaacttgaccaaaatagaagtaaattaaagttgtacattggacacctgacaaccctctgccatgaccgagaccccctgatcctccgtggactcactccaccagcttcctataacttggacgatgaccaggcggcttgggagaatgagctgcagaagatgacccgggggcagcttcaggatgagttagagaaaggtgaacgggacaatgcagaactgcaggagtttgccaacgccattcttcagcagatagcagaccattgtcccgacatcctagagcaagtggtcaacgccctggaagagtcctcttgaccctgctttatggggaagcctgaggtagtcaacccaggagccaagaaaagagaactacgaggaacaggtgcccggaaccttcttggcaccaaacactacaaacttcatcccaacttgctcacttgaagaagtgtgattccagcaccgtttctacatctgccatcttactctgcctttctgctttggatgtggtctctacactaaccttcttgatgtccagggtagataaagggtcgaatctctctgaagaactgccacctggtcatcagcagtggagaactgtgggagctggtggctctgccctgacagagagccatggagcagaggagcctctcacctcctgtcctctgacatgagaatgaaaccaggaatggacttggagttcaacaggctgagaggatgcctccaatggaccagagagctgagtgttctaatatcacaataggtgctttctcctaaaagggcaaaaaacaatctcaaaaagattagaaaaagagaaggggggaagggaagagaaaatcgactcttctttttactgtctcttctgcttactttccacatgagatgctttgtaccggggagctgtgagcaggcctcacgatggcttgggagcactcgttctcccaaggtctgagtcttcatccagccctgcctgtctgtcgcagccttcctcactctgttcctcggccagttaacaagaagatggtgtgaggtgttctccaccagtctctcctgtttgagactgttgacgttatcatactgaggtgttagatcaaatatctctaattgaagaacatgtgaggttgaaagagcaccagccagggcaacatagcgtgaccctgtctctacaaaaaattaaaaagagaacatacaaagttgacatatgagaccctgttgtccccgcctgcagctttgccccagtaacagatgcccgttgctcttgggctggtttcccctgaacacctccaagaggctgcctgccttgccagcacccgtgtcctgagctcctgcagcccagtggctgctgaagttgtgatccctcactcaccctgctagctttgcccttgactcgtcttctctgaacctcagcctcgtgcattgcctggaaccttcttctagcataaatgaaggtttttcctcctacacacattccttcctcggttatttcattcagagaatatttatgaaatgcctactgtgtgcaagtcatccatccttgaaaaggccacttctcagtgagggagagatgtagtggattctgtgagacatacctgctggagttgaagcagtaaatagcatgtccttcccctccccgatcttaaggtgtgttttctagaaaagttccctaatggaattcatgagtttgggggtctcagtcacccgcttgcctgtaggattccatttgatgattctggatttttgctgtttgttattgcccttagaggggctctgagtatctacttgtgggtggccatttcctgacatctgcatgtacctcgtggaattcagccagcttcatgttgcaaatcagaaagctgaccccaagactgcaaatcaatgaaggtattggcattgttaaggacgtagcgtagacaacagcagtcataaataattaggcaggaacttaacccaaatctagttctttgaccacctctaccaccagaacccagcagacactcacatctcctgataagagttgctggactcgatgtttttgttttgcattttctcctctccttccccacttactcagagaatttaaagtctgtagagtcagcacagccccatcagtccaggaacttcccaccaccagcccttgactgtcccattaactgacatggtcagatttccagctccccctactccctgctgtgaaacaatccctctccctgtgagaggaaactgtggagcgtttcttatcgaaggttaaatggactctgctcataaacctcttactgagatgcttcctgatagccaggctggccagagaggggtgcaggggttagatagtaagtggtggtcgtttgtggtcagttacctcaattctgttcattgcagtgcccgtaaaccatgtagaaagctcccagcactgaaaggcaggagtgttagcatctcgctttatccaccataacgtaaagaactgcggtgtgataacagccttcacggggccacggtggaaccaagacagcaggcgaggccatgcctaaacaagtggtctggcacgggcactggccagctgctctctccaagcaggtggcccagatcccacccacgtggactttctcatcaggtgcagcgcctgccactctcagccactgggtgtgtcactctcctcttcatctcagcattctccatcacttcccctccagaaaaacggatggaaggaagccctctgtgacactgcttctgagaagaagcatttccgggaccgatatcatctgtctggtctctgtgaacagcaaggaatcttcttgaccgttcttgggcactggaggctggctaggagttcagtaataaacgtggccttcgtgctgtagggcagagtggatgcagtttgtagctttcagagtgtctcattgagtctagatcattgaaccaacacttaaccaaatgtcccactcccatcacactaggacttgtcattccatgcccctctcctagtggtcatggtttcatatgggcatacaactgctactgaagttatatagccttgaaaactcagtgcaggttgcccttaattttccccaaacccctccatcggcaagtctagttgccctttagcacctaaagatctgcaccccaaaccaatgtcaccataaagagggcacgaagaagagtgggtgtgatcccaacggggttttgtaactgaagaagcccagtgtgagcttctcatcttttcatatacctctaacccccggtactcattgaatcattgatgaggtatctcaattgagatttgcaaggactttgataccatttgaaatggaaaaattttgaacgggctttaacatgtttaagaaatatggatggggccggccacagtggctcacgcctgtaatcccagaactctggaaggctgaggcaggcggatcacctgagatcaggagttcgaggccagcctggccaagatggcaaaaaccccgactctactaaaaatacaaaattagccaggcgtggtggcgtacgcctgtaatcccagctactcaggaggcaggagaatcgcttgagcctgggaggcagaggctgcggtgagccgagatcgtgtcactgcactccagcctgggtgacagagactccatttaaaaaaaaaaaaaaaaaa

SEQ ID NO: 129441 - DNA, 9241 bp, Homo sapiens
  Payload ID: 5316
  Gene Symbol: ERC1
  Gene Name: ELKS/RAB6-interacting/CAST family member 1
  Uniprot ID: Q8IUD2
  ENST ID: ENST00000543086
  CDS Start-End: 272-3538
gggcgcggtgacgtcgcgggcgcctgggccgtgctgtggcggcggcggcggcggtagtggcggcggcggcggtgcctgggcggcagcagcagcagtagcggcagccctgaggacgatatggtgtaagatacttcttcaagattggacagctggggaccttcttctgattaaccttaaaccaacttgtagccatagagacacctcacaaggttcccatttttgttgttgttgttgttgattttctgctcacacctttcctgaccttgcaaccatgtatggaagtgcccgctctgttgggaaggtggagccgagcagccagagccctgggcgttcacccaggcttccacgttcccctcgcttgggtcaccgtcgaaccaacagtacgggagggagttcgggaagcagtgttggaggtggcagtgggaaaaccctttcaatggaaaatatacaatctttaaatgctgcctatgccacctctggccctatgtatctaagtgaccatgaaaatgtgggttcagaaacacctaaaagcaccatgacacttggccgttctgggggacgtctgccttacggtgttcggatgactgctatgggtagtagccccaatatagctagcagtggggttgctagtgacaccatagcatttggagagcatcacctccctcctgtgagtatggcatccactgtacctcactcccttcgtcaggcgagagataacacaatcatggatctgcagacacagctgaaggaagtattaagagaaaatgatctcttgcggaaggatgtggaagtaaaggagagcaaattgagttcttcaatgaatagcatcaagaccttctggagcccagagctgaagaaggaacgagccctgagaaaagatgaagcttccaaaatcaccatttggaaggaacagtacagagttgtacaggaggaaaaccagcacatgcagatgacaatccaggctctccaggatgaattgcggatccagagggacctgaatcagctgtttcagcaggatagtagcagcaggactggcgaaccttgtgtagcagagctgacagaggagaactttcagaggcttcatgctgagcatgagcggcaggccaaagagctgtttcttcttcgaaagacattggaggaaatggagctgcgtattgagactcaaaagcagaccctaaatgctcgggatgaatccattaagaagcttctggaaatgttgcagagcaaaggactttctgccaaggctaccgaggaagaccatgagagaacaagacgactggcagaggcagagatgcacgttcatcacctagaaagccttttggagcagaaggaaaaagagaacagtatgttgagagaggagatgcatcgaaggtttgagaatgctcctgattctgccaaaacaaaagctctgcaaactgttattgagatgaaggattcaaaaatttcctctatggagcgtgggcttcgagacctggaagaggaaattcagatgctgaaatcgaatggtgctttgagtactgaggaaagggaagaagaaatgaagcaaatggaagtgtatcggagccattctaaatttatgaaaaataagattggccaggtgaaacaggagctgtccagaaaggacacagaactactcgccctgcagacaaagctagaaacactcacaaaccagttctcagatagtaaacagcacattgaagtgttgaaggagtccttgactgctaaggagcagagggctgccatcctgcagactgaggtggatgctctccgattgcgtttggaagagaaggaaaccatgttgaataaaaagacaaaacaaattcaggatatggctgaagagaaggggacacaagctggagagatacatgacctcaaggacatgttggatgtgaaggagcggaaggttaatgttcttcagaagaagattgaaaatcttcaagagcagcttagagacaaggaaaagcagatgagcagcttgaaagaacgggtcaaatccttgcaggctgacaccaccaacactgacactgccttgacaactttggaggaggcccttgcagagaaagagcggacaattgaacgcttaaaggagcagagggacagagatgagcgagagaagcaagaggaaattgataactacaaaaaagatcttaaagacttgaaggaaaaagtcagcctgttgcaaggcgacctttcagagaaagaggcttcacttttggatctgaaagagcatgcttcttctctggcatcctcaggactgaaaaaggactcacggcttaagacactagagattgctttggagcagaagaaggaggagtgtctgaaaatggaatcacaattgaaaaaggcacatgaggcagcattggaagccagagccagtccagagatgagtgaccgaatacagcacttggagagagagatcaccaggtacaaagatgaatctagcaaggcccaggcagaagttgatcgactcttagaaatcttgaaggaggtggaaaatgagaagaatgacaaagataagaagatagctgagttggaaaggcaagtgaaagaccagaataagaaggtagcaaatctgaagcacaaggaacaggtggaaaaaaagaagagtgcacaaatgttagaggaggcgcgacgacgggaggacaatctcaacgacagctctcagcagctacaggacagtctccgtaagaaggatgacaggattgaagagctggaagaagcactaagagaaagtgtacagataactgcagagcgggaaatggtgctagcacaagaggaatcagccaggaccaatgctgaaaaacaggtggaggagttactgatggccatggagaaggtaaagcaggaactagaatccatgaaagcaaagctgtcctccacccagcagtctctggcagaaaaggaaactcacttgactaatcttcgggcagagagaaggaaacacttagaggaagttctggagatgaagcaagaagctcttctggctgccattagtgaaaaagacgccaatatagctctcttggagctttcgtcctctaagaagaagacccaagaggaagtggctgccctgaagcgggagaaggatcgtctggtacagcagcttaagcagcagacgcaaaatcgaatgaagctaatggccgacaactacgaggatgaccacttcaaatcctcccattccaatcaaacaaatcacaagccctccccagaccagatcatccagcccctcttagaacttgaccaaaatagaagtaaattaaagttgtacattggacacctgacaaccctctgccatgaccgagaccccctgatcctccgtggactcactccaccagcttcctataacttggacgatgaccaggcggcttgggagaatgagctgcagaagatgacccgggggcagcttcaggatgagttagagaaaggtgaacgggacaatgcagaactgcaggagtttgccaacgccattcttcagcagatagcagaccattgtcccgacatcctagagcaagtggtcaacgccctggaagagtcctcttgaccctgctttatggggaagcctgaggtagtcaacccaggagccaagaaaagagaactacgaggaacaggtgcccggaaccttcttggcaccaaacactacaaacttcatcccaacttgctcacttgaagaagtgtgattccagcaccgtttctacatctgccatcttactctgcctttctgctttggatgtggtctctacactaaccttcttgatgtccagggtagataaagggtcgaatctctctgaagaactgccacctggtcatcagcagtggagaactgtgggagctggtggctctgccctgacagagagccatggagcagaggagcctctcacctcctgtcctctgacatgagaatgaaaccaggaatggacttggagttcaacaggctgagaggatgcctccaatggaccagagagctgagtgttctaatatcacaataggtgctttctcctaaaagggcaaaaaacaatctcaaaaagattagaaaaagagaaggggggaagggaagagaaaatcgactcttctttttactgtctcttctgcttactttccacatgagatgctttgtaccggggagctgtgagcaggcctcacgatggcttgggagcactcgttctcccaaggtctgagtcttcatccagccctgcctgtctgtcgcagccttcctcactctgttcctcggccagttaacaagaagatggtgtgaggtgttctccaccagtctctcctgtttgagactgttgacgttatcatactgaggtgttagatcaaatatctctaattgaagaacatgtgaggttgaaagagcaccagccagggcaacatagcgtgaccctgtctctacaaaaaattaaaaagagaacatacaaagttgacatatgagaccctgttgtccccgcctgcagctttgccccagtaacagatgcccgttgctcttgggctggtttcccctgaacacctccaagaggctgcctgccttgccagcacccgtgtcctgagctcctgcagcccagtggctgctgaagttgtgatccctcactcaccctgctagctttgcccttgactcgtcttctctgaacctcagcctcgtgcattgcctggaaccttcttctagcataaatgaaggtttttcctcctacacacattccttcctcggttatttcattcagagaatatttatgaaatgcctactgtgtgcaagtcatccatccttgaaaaggccacttctcagtgagggagagatgtagtggattctgtgagacatacctgctggagttgaagcagtaaatagcatgtccttcccctccccgatcttaaggtgtgttttctagaaaagttccctaatggaattcatgagtttgggggtctcagtcacccgcttgcctgtaggattccatttgatgattctggatttttgctgtttgttattgcccttagaggggctctgagtatctacttgtgggtggccatttcctgacatctgcatgtacctcgtggaattcagccagcttcatgttgcaaatcagaaagctgaccccaagactgcaaatcaatgaaggtattggcattgttaaggacgtagcgtagacaacagcagtcataaataattaggcaggaacttaacccaaatctagttctttgaccacctctaccaccagaacccagcagacactcacatctcctgataagagttgctggactcgatgtttttgttttgcattttctcctctccttccccacttactcagagaatttaaagtctgtagagtcagcacagccccatcagtccaggaacttcccaccaccagcccttgactgtcccattaactgacatggtcagatttccagctccccctactccctgctgtgaaacaatccctctccctgtgagaggaaactgtggagcgtttcttatcgaaggttaaatggactctgctcataaacctcttactgagatgcttcctgatagccaggctggccagagaggggtgcaggggttagatagtaagtggtggtcgtttgtggtcagttacctcaattctgttcattgcagtgcccgtaaaccatgtagaaagctcccagcactgaaaggcaggagtgttagcatctcgctttatccaccataacgtaaagaactgcggtgtgataacagccttcacggggccacggtggaaccaagacagcaggcgaggccatgcctaaacaagtggtctggcacgggcactggccagctgctctctccaagcaggtggcccagatcccacccacgtggactttctcatcaggtgcagcgcctgccactctcagccactgggtgtgtcactctcctcttcatctcagcattctccatcacttcccctccagaaaaacggatggaaggaagccctctgtgacactgcttctgagaagaagcatttccgggaccgatatcatctgtctggtctctgtgaacagcaaggaatcttcttgaccgttcttgggcactggaggctggctaggagttcagtaataaacgtggccttcgtgctgtagggcagagtggatgcagtttgtagctttcagagtgtctcattgagtctagatcattgaaccaacacttaaccaaatgtcccactcccatcacactaggacttgtcattccatgcccctctcctagtggtcatggtttcatatgggcatacaactgctactgaagttatatagccttgaaaactcagtgcaggttgcccttaattttccccaaacccctccatcggcaagtctagttgccctttagcacctaaagatctgcaccccaaaccaatgtcaccataaagagggcacgaagaagagtgggtgtgatcccaacggggttttgtaactgaagaagcccagtgtgagcttctcatcttttcatatacctctaacccccggtactcattgaatcattgatgaggtatctcaattgagatttgcaaggactttgataccatttgaaatggaaaaattttgaacgggctttaacatgtttaagaaatatggatggggccggccacagtggctcacgcctgtaatcccagaactctggaaggctgaggcaggcggatcacctgagatcaggagttcgaggccagcctggccaagatggcaaaaaccccgactctactaaaaatacaaaattagccaggcgtggtggcgtacgcctgtaatcccagctactcaggaggcaggagaatcgcttgagcctgggaggcagaggctgcggtgagccgagatcgtgtcactgcactccagcctgggtgacagagactccatttaaaaaaaaaaaaaaaaaatatatatatatatatatatatatatatatggatgggaatcaccaaattcatctcagctctaaccttttaacctttgtccttgcactttacaatctaaagatctacctgtggctctcagacttcctcacacttgggttttagaaataacttgtaaagcagactggacccaaggccgccttcagtgtcaagaagggcattgtgacttgcccctcaatttctgtccattgaagtctggttttccatgaggaacttgcgggctcacccacccccagagtgagagaagaggaaggcgaagtcatcacagacacggtcttagccacctgctgaactaatccctccgctattgagggtcagggttgtgaggcaaccatcatgtgtcaccccaaaatataaatgtttctgagccgcccatccactggcatttggatttgctgccagagtcctgttcctcccagaaccatcccgccctcctgttgaccatgttacttgagtgtaggcccggtgtcaagaccctcagagtctttgaggaaagagccaagcagagaagaccgctgcgtggagtgtgacaccacatggcatttctcaagcccagcggaccctgtgtcagcaaataccagtaatttaacatctgctcctggcctcctcttcacctgcctgggttcggaactgaggaggaaggatgagaagagactgcaatgcagcaggcaccctctgcagagtgaggccgcccgtccatcactgccagccctgggctgctcaggaggggacgtgaaccactcaaaggaatgtcttaaagaggatctggagtttcccccatgcaaattagggaagaattaggcaagaaaagacatacattacagggaaatccttctgaacaaaatggctgtcttcacctactcttcttgcaagaaaagacatacattacagggaaatccttctgaacaaaatggctatcttcacctactcttcagcaaaaaccgtctccagactttttagtgtcaaaaatgtaaccaactgtctcctgattttttccaatgtgtttggcaagtgctgtggccctgttgtaggtacttctcctgactcttgggggagaagtggttttagggattgatttgggggagcgggtttttgtcccatcccacctcctctcttctttctctgcttgtcgatattgtctgtgtgattcagagaattggggcagttacattgtgtctgttgttgagattattaaaagattaaaacgtagttgtagaaatgaaaaattaaacagctgtgttttaaaaatgcaaaccaatatcttgttaataaaggaattcaagctatggggcagccacactcccctcctcccaggctggcataggtggccctgggctggcggcttaggaagcatggagcacacttagggtagtgcctgcctgggcaagagacacctgccgagcaaaaggaacgagaatctggggctcagagcctcgcagttgtgccaggattttcctatacatgttcaggacctctgggtagaggtttcacagtttgtgaccccataaccaccctcacccgacgtgggttctagctcagtgtgcctaatactgcatggtaacctgggcttgaccctgaagcccctgcctggcaggccacaggacctctcctgcccacttggtgctatctcttccagtgaccacccagcacgggtgagcactggccagcctggagcctgcaatccaggtggaacagactgtcctccatgtcagttccttctggcttcaggccctcaattatttccctttgagcttttttagaccctagatctcctaggcccaggctctctcttgaccccagagaagccactgtcaggaaaggaagtgaaccctactgaagccagagaattcaccccggccaaagcaggccctctgggtccagcccctcattccacaccacgccagtattgcatccatctactgcagctacacatcctgagggcagcaccacccactctggcctgctggcccatcgcaggactagcccaggcacctgccgggcattgcaggatatccagtggggcctgtgactgctccctgatgcgtcagaagagaagtgttgcactttagtggaggagctgaggagcacctgcccccttgtagcttgagttccttttggtaacagtagcagcctccatggtggtgtctgggatgcacgtgcacccgctgccttcagctgtatgtgtgtgttcctgctggagttgtgttactgacaggataatgacattacaaagaaattgtgttatattcaactttgccttgataattattgtaaacactttgttcattttttcttttttattcacaaactaaatccaccaggaaattataaagttatttaaaaaccgt

SEQ ID NO: 129442 - DNA, 4390 bp, Homo sapiens
  Payload ID: 5316
  Gene Symbol: ERC1
  Gene Name: ELKS/RAB6-interacting/CAST family member 1
  ENST ID: ENST00000546231
  CDS Start-End: 529-3891
gggccgtgctgtggcggcggcggcggcggtagtggcggcggcggcggtgcctgggcggcagcagcagcagtagcggcagccctgaggacggtgagacggccgcggcggcggcgacagcgcggaagtcgcgcgggacccagagcttcccccctgtcgctagtgctgaggctttcgcctttcctacccagcttcttgctcacggcccgggctgggctgggcagggcaacgcgcccccggggaggggcggagctgtaggttggtcttgaactcctggcctcaagcgatcttcctaccttggcctcccagagcgctgggattataggcatgagccattgcacttggcactttttttgtttgttttccagttgcatgatatggtgtaagatacttcttcaagattggacagctggggaccttcttctgattaaccttaaaccaacttgtagccatagagacacctcacaaggttcccatttttgttgttgttgttgttgattttctgctcacacctttcctgaccttgcaaccatgtatggaagtgcccgctctgttgggaaggtggagccgagcagccagagccctgggcgttcacccaggcttccacgttcccctcgcttgggtcaccgtcgaaccaacagtacgggagggagttcgggaagcagtgttggaggtggcagtgggaaaaccctttcaatggaaaatatacaatctttaaatgctgcctatgccacctctggccctatgtatctaagtgaccatgaaaatgtgggttcagaaacacctaaaagcaccatgacacttggccgttctgggggacgtctgccttacggtgttcggatgactgctatgggtagtagccccaatatagctagcagtggggttgctagtgacaccatagcatttggagagcatcacctccctcctgtgagtatggcatccactgtacctcactcccttcgtcaggcgagagataacacaatcatggatctgcagacacagctgaaggaagtattaagagaaaatgatctcttgcggaaggatgtggaagtaaaggagagcaaattgagttcttcaatgaatagcatcaagaccttctggagcccagagctgaagaaggaacgagccctgagaaaagatgaagcttccaaaatcaccatttggaaggaacagtacagagttgtacaggaggaaaaccagcacatgcagatgacaatccaggctctccaggatgaattgcggatccagagggacctgaatcagctgtttcagcaggatagtagcagcaggactggcgaaccttgtgtagcagagctgacagaggagaactttcagaggcttcatgctgagcatgagcggcaggccaaagagctgtttcttcttcgaaagacattggaggaaatggagctgcgtattgagactcaaaagcagaccctaaatgctcgggatgaatccattaagaagcttctggaaatgttgcagagcaaaggactttctgccaaggctaccgaggaagaccatgagagaacaagacgactggcagaggcagagatgcacgttcatcacctagaaagccttttggagcagaaggaaaaagagaacagtatgttgagagaggagatgcatcgaaggtttgagaatgctcctgattctgccaaaacaaaagctctgcaaactgttattgagatgaaggattcaaaaatttcctctatggagcgtgggcttcgagacctggaagaggaaattcagatgctgaaatcgaatggtgctttgagtactgaggaaagggaagaagaaatgaagcaaatggaagtgtatcggagccattctaaatttatgaaaaataaggtagaacaactgaaggaggaactaagttcgaaagaggctcaatgggaggagctgaaaaagaaagcggctggtcttcaggctgagattggccaggtgaaacaggagctgtccagaaaggacacagaactactcgccctgcagacaaagctagaaacactcacaaaccagttctcagatagtaaacagcacattgaagtgttgaaggagtccttgactgctaaggagcagagggctgccatcctgcagactgaggtggatgctctccgattgcgtttggaagagaaggaaaccatgttgaataaaaagacaaaacaaattcaggatatggctgaagagaaggggacacaagctggagagatacatgacctcaaggacatgttggatgtgaaggagcggaaggttaatgttcttcagaagaagattgaaaatcttcaagagcagcttagagacaaggaaaagcagatgagcagcttgaaagaacgggtcaaatccttgcaggctgacaccaccaacactgacactgccttgacaactttggaggaggcccttgcagagaaagagcggacaattgaacgcttaaaggagcagagggacagagatgagcgagagaagcaagaggaaattgataactacaaaaaagatcttaaagacttgaaggaaaaagtcagcctgttgcaaggcgacctttcagagaaagaggcttcacttttggatctgaaagagcatgcttcttctctggcatcctcaggactgaaaaaggactcacggcttaagacactagagattgctttggagcagaagaaggaggagtgtctgaaaatggaatcacaattgaaaaaggcacatgaggcagcattggaagccagagccagtccagagatgagtgaccgaatacagcacttggagagagagatcaccaggtacaaagatgaatctagcaaggcccaggcagaagttgatcgactcttagaaatcttgaaggaggtggaaaatgagaagaatgacaaagataagaagatagctgagttggaaagtctcacctcaaggcaagtgaaagaccagaataagaaggtagcaaatctgaagcacaaggaacaggtggaaaaaaagaagagtgcacaaatgttagaggaggcgcgacgacgggaggacaatctcaacgacagctctcagcagctacaggacagtctccgtaagaaggatgacaggattgaagagctggaagaagcactaagagaaagtgtacagataactgcagagcgggaaatggtgctagcacaagaggaatcagccaggaccaatgctgaaaaacaggtggaggagttactgatggccatggagaaggtaaagcaggaactagaatccatgaaagcaaagctgtcctccacccagcagtctctggcagaaaaggaaactcacttgactaatcttcgggcagagagaaggaaacacttagaggaagttctggagatgaagcaagaagctcttctggctgccattagtgaaaaagacgccaatatagctctcttggagctttcgtcctctaagaagaagacccaagaggaagtggctgccctgaagcgggagaaggatcgtctggtacagcagcttaagcagcagacgcaaaatcgaatgaagctaatggccgacaactacgaggatgaccacttcaaatcctcccattccaatcaaacaaatcacaagccctccccagaccagatcatccagcccctcttagaacttgaccaaaatagaagtaaattaaagttgtacattggacacctgacaaccctctgccatgaccgagaccccctgatcctccgtggactcactccaccagcttcctataacttggacgatgaccaggcggcttgggagaatgagctgcagaagatgacccgggggcagcttcaggatgagttagagaaaggtgaacgggacaatgcagaactgcaggagtttgccaacgccattcttcagcagatagcagaccattgtcccgacatcctagagcaagtggtcaacgccctggaagagtcctcttgaccctgctttatggggaagcctgaggtagtcaacccaggagccaagaaaagagaactacgaggaacaggtgcccggaaccttcttggcaccaaacactacaaacttcatcccaacttgctcacttgaagaagtgtgattccagcaccgtttctacatctgccatcttactctgcctttctgctttggatgtggtctctacactaaccttcttgatgtccagggtagataaagggtcgaatctctctgaagaactgccacctggtcatcagcagtggagaactgtgggagctggtggctctgccctgacagagagccatggagcagaggagcctctcacctcctgtcctctgacatgagaatgaaaccaggaatggacttggagttcaacaggctgagaggatgcctccaatggaccagagagctgagtgttctaatatcacaataggtgctttctcctaaaagggcaaaaaacaatctcaaaaagattagaaaaagagaa

SEQ ID NO: 129443 - DNA, 2881 bp, Homo sapiens
  Payload ID: 5316
  Gene Symbol: ERC1
  Gene Name: ELKS/RAB6-interacting/CAST family member 1
  Uniprot ID: Q8IUD2
  ENST ID: ENST00000545948
  CDS Start-End: 207-2369
gcggcggtgcctgggcggcagcagcagcagtagcggcagccctgaggacgatatggtgtaagatacttcttcaagattggacagctggggaccttcttctgattaaccttaaaccaacttgtagccatagagacacctcacaaggttcccatttttgttgttgttgttgttgattttctgctcacacctttcctgaccttgcaaccatgtatggaagtgcccgctctgttgggaaggtggagccgagcagccagagccctgggcgttcacccaggcttccacgttcccctcgcttgggtcaccgtcgaaccaacagtacgggagggagttcgggaagcagtgttggaggtggcagtgggaaaaccctttcaatggaaaatatacaatctttaaatgctgcctatgccacctctggccctatgtatctaagtgaccatgaaaatgtgggttcagaaacacctaaaagcaccatgacacttggccgttctgggggacgtctgccttacggtgttcggatgactgctatgggtagtagccccaatatagctagcagtggggttgctagtgacaccatagcatttggagagcatcacctccctcctgtgagtatggcatccactgtacctcactcccttcgtcaggcgagagataacacaatcatggatctgcagacacagctgaaggaagtattaagagaaaatgatctcttgcggaaggatgtggaagtaaaggagagcaaattgagttcttcaatgaatagcatcaagaccttctggagcccagagctgaagaaggaacgagccctgagaaaagatgaagcttccaaaatcaccatttggaaggaacagtacagagttgtacaggaggaaaaccaggtggatgctctccgattgcgtttggaagagaaggaaaccatgttgaataaaaagacaaaacaaattcaggatatggctgaagagaaggggacacaagctggagagatacatgacctcaaggacatgttggatgtgaaggagcggaaggttaatgttcttcagaagaagattgaaaatcttcaagagcagcttagagacaaggaaaagcagatgagcagcttgaaagaacgggtcaaatccttgcaggctgacaccaccaacactgacactgccttgacaactttggaggaggcccttgcagagaaagagcggacaattgaacgcttaaaggagcagagggacagagatgagcgagagaagcaagaggaaattgataactacaaaaaagatcttaaagacttgaaggaaaaagtcagcctgttgcaaggcgacctttcagagaaagaggcttcacttttggatctgaaagagcatgcttcttctctggcatcctcaggactgaaaaaggactcacggcttaagacactagagattgctttggagcagaagaaggaggagtgtctgaaaatggaatcacaattgaaaaaggcacatgaggcagcattggaagccagagccagtccagagatgagtgaccgaatacagcacttggagagagagatcaccaggtacaaagatgaatctagcaaggcccaggcagaagttgatcgactcttagaaatcttgaaggaggtggaaaatgagaagaatgacaaagataagaagatagctgagttggaaagtctcacctcaaggcaagtgaaagaccagaataagaaggtagcaaatctgaagcacaaggaacaggtggaaaaaaagaagagtgcacaaatgttagaggaggcgcgacgacgggaggacaatctcaacgacagctctcagcagctacaggacagtctccgtaagaaggatgacaggattgaagagctggaagaagcactaagagaaagtgtacagataactgcagagcgggaaatggtgctagcacaagaggaatcagccaggaccaatgctgaaaaacaggtggaggagttactgatggccatggagaaggtaaagcaggaactagaatccatgaaagcaaagctgtcctccacccagcagtctctggcagaaaaggaaactcacttgactaatcttcgggcagagagaaggaaacacttagaggaagttctggagatgaagcaagaagctcttctggctgccattagtgaaaaagacgccaatatagctctcttggagctttcgtcctctaagaagaagacccaagaggaagtggctgccctgaagcgggagaaggatcgtctggtacagcagcttaagcagcagacgcaaaatcgaatgaagctaatggccgacaactacgaggatgaccacttcaaatcctcccattccaatcaaacaaatcacaagccctccccagaccaggatgaggaggagggtatatgggcatagccaatcagaggcttagttcagccattttgttcagaacgatcatccagcccctcttagaacttgaccaaaatagaagtaaattaaagttgtacattggacacctgacaaccctctgccatgaccgagaccccctgatcctccgtggactcactccaccagcttcctataacttggacgatgaccaggcggcttgggagaatgagctgcagaagatgacccgggggcagcttcaggatgagttagagaaaggtgaacgggacaatgcagaactgcaggagtttgccaacgccattcttcagcagatagcagaccattgtcccgacatcctagagcaagtggtcaacgccctggaagagtcctcttgaccctgctttatggggaagcctgaggtagtcaacccaggagccaagaaaagagaactacgaggaacaggtgcccggaaccttcttggcaccaaacactacaaacttcatcccaacttgctcacttgaagaagtgtgattccagcaccg

SEQ ID NO: 129444 - DNA, 4323 bp, Homo sapiens
  Payload ID: 5316
  Gene Symbol: ERC1
  Gene Name: ELKS/RAB6-interacting/CAST family member 1
  ENST ID: ENST00000542302
  CDS Start-End: 529-3459
gggccgtgctgtggcggcggcggcggcggtagtggcggcggcggcggtgcctgggcggcagcagcagcagtagcggcagccctgaggacggtgagacggccgcggcggcggcgacagcgcggaagtcgcgcgggacccagagcttcccccctgtcgctagtgctgaggctttcgcctttcctacccagcttcttgctcacggcccgggctgggctgggcagggcaacgcgcccccggggaggggcggagctgtaggttggtcttgaactcctggcctcaagcgatcttcctaccttggcctcccagagcgctgggattataggcatgagccattgcacttggcactttttttgtttgttttccagttgcatgatatggtgtaagatacttcttcaagattggacagctggggaccttcttctgattaaccttaaaccaacttgtagccatagagacacctcacaaggttcccatttttgttgttgttgttgttgattttctgctcacacctttcctgaccttgcaaccatgtatggaagtgcccgctctgttgggaaggtggagccgagcagccagagccctgggcgttcacccaggcttccacgttcccctcgcttgggtcaccgtcgaaccaacagtacgggagggagttcgggaagcagtgttggaggtggcagtgggaaaaccctttcaatggaaaatatacaatctttaaatgctgcctatgccacctctggccctatgtatctaagtgaccatgaaaatgtgggttcagaaacacctaaaagcaccatgacacttggccgttctgggggacgtctgccttacggtgttcggatgactgctatgggtagtagccccaatatagctagcagtggggttgctagtgacaccatagcatttggagagcatcacctccctcctgtgagtatggcatccactgtacctcactcccttcgtcaggcgagagataacacaatcatggatctgcagacacagctgaaggaagtattaagagaaaatgatctcttgcggaaggatgtggaagtaaaggagagcaaattgagttcttcaatgaatagcatcaagaccttctggagcccagagctgaagaaggaacgagccctgagaaaagatgaagcttccaaaatcaccatttggaaggaacagtacagagttgtacaggaggaaaaccagcacatgcagatgacaatccaggctctccaggatgaattgcggatccagagggacctgaatcagctgtttcagcaggatagtagcagcaggactggcgaaccttgtgtagcagagctgacagaggagaactttcagaggcttcatgctgagcatgagcggcaggccaaagagctgtttcttcttcgaaagacattggaggaaatggagctgcgtattgagactcaaaagcagaccctaaatgctcgggatgaatccattaagaagcttctggaaatgttgcagagcaaaggactttctgccaaggctaccgaggaagaccatgagagaacaagacgactggcagaggcagagatgcacgttcatcacctagaaagccttttggagcagaaggaaaaagagaacagtatgttgagagaggagatgcatcgaaggtttgagaatgctcctgattctgccaaaacaaaagctctgcaaactgttattgagatgaaggattcaaaaatttcctctatggagcgtgggcttcgagacctggaagaggaaattcagatgctgaaatcgaatggtgctttgagtactgaggaaagggaagaagaaatgaagcaaatggaagtgtatcggagccattctaaatttatgaaaaataaggtagaacaactgaaggaggaactaagttcgaaagaggctcaatgggaggagctgaaaaagaaagcggctggtcttcaggctgagattggccaggtgaaacaggagctgtccagaaaggacacagaactactcgccctgcagacaaagctagaaacactcacaaaccagttctcagatagtaaacagcacattgaagtgttgaaggagtccttgactgctaaggagcagagggctgccatcctgcagactgaggtggatgctctccgattgcgtttggaagagaaggaaaccatgttgaataaaaagacaaaacaaattcaggatatggctgaagagaaggggacacaagctggagagatacatgacctcaaggacatgttggatgtgaaggagcggaaggttaatgttcttcagaagaagattgaaaatcttcaagagcagcttagagacaaggaaaagcagatgagcagcttgaaagaacgggtcaaatccttgcaggctgacaccaccaacactgacactgccttgacaactttggaggaggcccttgcagagaaagagcggacaattgaacgcttaaaggagcagagggacagagatgagcgagagaagcaagaggaaattgataactacaaaaaagatcttaaagacttgaaggaaaaagtcagcctgttgcaaggcgacctttcagagaaagaggcttcacttttggatctgaaagagcatgcttcttctctggcatcctcaggactgaaaaaggactcacggcttaagacactagagattgctttggagcagaagaaggaggagtgtctgaaaatggaatcacaattgaaaaaggcacatgaggcagcattggaagccagagccagtccagagatgagtgaccgaatacagcacttggagagagagatcaccaggtacaaagatgaatctagcaaggcccaggcagaagttgatcgactcttagaaatcttgaaggaggtggaaaatgagaagaatgacaaagataagaagatagctgagttggaaagtctcacctcaaggcaagtgaaagaccagaataagaaggtagcaaatctgaagcacaaggaacaggtggaaaaaaagaagagtgcacaaatgttagaggaggcgcgacgacgggaggacaatctcaacgacagctctcagcagctacaggtggaggagttactgatggccatggagaaggtaaagcaggaactagaatccatgaaagcaaagctgtcctccacccagcagtctctggcagaaaaggaaactcacttgactaatcttcgggcagagagaaggaaacacttagaggaagttctggagatgaagcaagaagctcttctggctgccattagtgaaaaagacgccaatatagctctcttggagctttcgtcctctaagaagaagacccaagaggaagtggctgccctgaagcgggagaaggatcgtctggtacagcagcttaagcagcagacgcaaaatcgaatgaagctaatggccgacaactacgaggatgaccacttcaaatcctcccattccaatcaaacaaatcacaagccctccccagaccaggatgaggaggagggtatatgggcatagccaatcagaggcttagttcagccattttgttcagaacgatcatccagcccctcttagaacttgaccaaaatagaagtaaattaaagttgtacattggacacctgacaaccctctgccatgaccgagaccccctgatcctccgtggactcactccaccagcttcctataacttggacgatgaccaggcggcttgggagaatgagctgcagaagatgacccgggggcagcttcaggatgagttagagaaaggtgaacgggacaatgcagaactgcaggagtttgccaacgccattcttcagcagatagcagaccattgtcccgacatcctagagcaagtggtcaacgccctggaagagtcctcttgaccctgctttatggggaagcctgaggtagtcaacccaggagccaagaaaagagaactacgaggaacaggtgcccggaaccttcttggcaccaaacactacaaacttcatcccaacttgctcacttgaagaagtgtgattccagcaccgtttctacatctgccatcttactctgcctttctgctttggatgtggtctctacactaaccttcttgatgtccagggtagataaagggtcgaatctctctgaagaactgccacctggtcatcagcagtggagaactgtgggagctggtggctctgccctgacagagagccatggagcagaggagcctctcacctcctgtcctctgacatgagaatgaaaccaggaatggacttggagttcaacaggctgagaggatgcctccaatggaccagagagctgagtgttctaatatcacaataggtgctttctcctaaaagggcaaaaaacaatctcaaaaagattagaaaaagagaa

SEQ ID NO: 129445 - DNA, 868 bp, Homo sapiens
  Payload ID: 5316
  Gene Symbol: ERC1
  Gene Name: ELKS/RAB6-interacting/CAST family member 1
  ENST ID: ENST00000589132
  CDS Start-End: 433-868
agatgtggggatcctggggcgggaggtgggggagtggggactggggctctgggcacttggggagcggagggggggaggcttaggactagtgaagccgcggacgaggtagtggggagacggagaaattggggagccatgaggttggggtgcggtcagggtggatctttgggttagggtagtttgaagtttgagtatcctcacgacatggcagctggattcctgagagagagtgatttgagagagtgacgaagacagaagccccagtgtcttttaagaatatggtgtaagatacttcttcaagattggacagctggggaccttcttctgattaaccttaaaccaacttgtagccatagagacacctcacaaggttcccatttttgttgttgttgttgttgattttctgctcacacctttcctgaccttgcaaccatgtatggaagtgcccgctctgttgggaaggtggagccgagcagccagagccctgggcgttcacccaggcttccacgttcccctcgcttgggtcaccgtcgaaccaacagtacgggagggagttcgggaagcagtgttggaggtggcagtgggaaaaccctttcaatggaaaatatacaatctttaaatgctgcctatgccacctctggccctatgtatctaagtgaccatgaaaatgtgggttcagaaacacctaaaagcaccatgacacttggccgttctgggggacgtctgccttacggtgttcggatgactgctatgggtagtagccccaatatagctagcagtggggttgctagtgacaccatagcatttggagagcatcacctccctcctgtgagtatggcatccactgtacctcactcccttcgtcagg

SEQ ID NO: 129446 - DNA, 546 bp, Homo sapiens
  Payload ID: 5316
  Gene Symbol: ERC1
  Gene Name: ELKS/RAB6-interacting/CAST family member 1
  ENST ID: ENST00000545318
  CDS Start-End: 278-546
gtcggaacgtggacactaatttccgcccacgctccccgcgtcctggcgggatcaccacagacacgacgtccattgctggggtcctcggcgatgcccgtgtgcgcagccccgcgagtctcagatatggtgtaagatacttcttcaagattggacagctggggaccttcttctgattaaccttaaaccaacttgtagccatagagacacctcacaaggttcccatttttgttgttgttgttgttgattttctgctcacacctttcctgaccttgcaaccatgtatggaagtgcccgctctgttgggaaggtggagccgagcagccagagccctgggcgttcacccaggcttccacgttcccctcgcttgggtcaccgtcgaaccaacagtacgggagggagttcgggaagcagtgttggaggtggcagtgggaaaaccctttcaatggaaaatatacaatctttaaatgctgcctatgccacctctggccctatgtatctaagtgaccatgaaaatgtgggttcagaaacacctaaaagcaccatgac

SEQ ID NO: 129447 - DNA, 550 bp, Homo sapiens
  Payload ID: 5316
  Gene Symbol: ERC1
  Gene Name: ELKS/RAB6-interacting/CAST family member 1
  ENST ID: ENST00000539802
  CDS Start-End: 1-269
accacttcaaatcctcccattccaatcaaacaaatcacaagccctccccagaccagatcatccagcccctcttagaacttgaccaaaatagaagtaaattaaagttgtacattggacacctgacaaccctctgccatgaccgagaccccctgatcctccgtggactcactccaccagcttcctataacttggacgatgaccaggcggcttgggagaatgagctgcagaagatgacccgggggcaggtgagcctctcactcaaactttgaaaagagcctgtgaaaatccagttgctgtgtaggttgatgcagtgggggctaccttggggaatccagttgccgtgtagttgatgcagtgggggctaccttggggaatcccgttgctgtgtaggttcatgcagtgggagctaccttggggaattccatgtttagattcaagatttggggggtggggaggggtttccagatataatttttaaactgatttttaattgattttttactgttttatttttttaattcaccaattaaaaatgtatgtttctcatgta

SEQ ID NO: 129448 - DNA, 2071 bp, Homo sapiens
  Payload ID: 5316
  Gene Symbol: ERC1
  Gene Name: ELKS/RAB6-interacting/CAST family member 1
  ENST ID: ENST00000588412
  CDS Start-End: 1-857
agatgagtgaccgaatacagcacttggagagagagatcaccaggtacaaagatgaatctagcaaggcccaggcagaagttgatcgactcttagaaatcttgaaggaggtggaaaatgagaagaatgacaaagataagaagatagctgagttggaaaggcaagtgaaagaccagaataagaaggtagcaaatctgaagcacaaggaacaggtggaaaaaaagaagagtgcacaaatgttagaggaggcgcgacgacgggaggacaatctcaacgacagctctcagcagctacaggacagtctccgtaagaaggatgacaggattgaagagctggaagaagcactaagagaaagtgtacagataactgcagagcgggaaatggtgctagcacaagaggaatcagccaggaccaatgctgaaaaacaggtggaggagttactgatggccatggagaaggtaaagcaggaactagaatccatgaaagcaaagctgtcctccacccagcagtctctggcagaaaaggaaactcacttgactaatcttcgggcagagagaaggaaacacttagaggaagttctggagatgaagcaagaagctcttctggctgccattagtgaaaaagacgccaatatagctctcttggagctttcgtcctctaagaagaagacccaagaggaagtggctgccctgaagcgggagaaggatcgtctggtacagcagcttaagcagcagacgcaaaatcgaatgaagctaatggccgacaactacgaggatgaccacttcaaatcctcccattccaatcaaacaaatcacaagccctccccagaccaggatgaggaggagggtatatgggcatagccaatcagaggcttagttcagccattttgttcagaacgatcatccagcccctcttagaacttgaccaaaatagaagtaaattaaagttgtacattggacacctgacaaccctctgccatgaccgagaccccctgatcctccgtggactcactccaccagcttcctataacttggacgatgaccaggcggcttgggagaatgagctgcagaagatgacccgggggcagcttcaggatgagttagagaaaggtgaacgggacaatgcagaactgcaggagtttgccaacgccattcttcagcagatagcagaccattgtcccgacatcctagagcaagtggtcaacgccctggaagagtcctcttgaccctgctttatggggaagcctgaggtagtcaacccaggagccaagaaaagagaactacgaggaacaggtgcccggaaccttcttggcaccaaacactacaaacttcatcccaacttgctcacttgaagaagtgtgattccagcaccgtttctacatctgccatcttactctgcctttctgctttggatgtggtctctacactaaccttcttgatgtccagggtagataaagggtcgaatctctctgaagaactgccacctggtcatcagcagtggagaactgtgggagctggtggctctgccctgacagagagccatggagcagaggagcctctcacctcctgtcctctgacatgagaatgaaaccaggaatggacttggagttcaacaggctgagaggatgcctccaatggaccagagagctgagtgttctaatatcacaataggtgctttctcctaaaagggcaaaaaacaatctcaaaaagattagaaaaagagaaggggggaagggaagagaaaatcgactcttctttttactgtctcttctgcttactttccacatgagatgctttgtaccggggagctgtgagcaggcctcacgatggcttgggagcactcgttctcccaaggtctgagtcttcatccagccctgcctgtctgtcgcagccttcctcactctgttcctcggccagttaacaagaagatggtgtgaggtgttctccaccagtctctcctgtttgagactgttgacgttatcatactgaggtgttagatcaaatatctctaattgaagaacatgtgaggttgaaagagcaccagccagggcaacatagcgtgaccctgtctctac

SEQ ID NO: 129449 - DNA, 1275 bp, Homo sapiens
  Payload ID: 5316
  Gene Symbol: ERC1
  Gene Name: ELKS/RAB6-interacting/CAST family member 1
  ENST ID: ENST00000592048
  CDS Start-End: 244-1275
agtggcggcggcggcggtgcctgggcggcagcagcagcagtagcggcagccctgaggacggtgagacggccgcggcggcggcgacagcgcggaagtcgcgcgggacccagagcttcccccctgtcgctagtgctgaggctttcgcctttcctacccagcttcttgctcacggcccgggctgggctgggcagggcaacgcgcccccggggaggggcggagctgtaggcgagagataacacaatcatggatctgcagacacagctgaaggaagtattaagagaaaatgatctcttgcggaaggatgtggaagtaaaggagagcaaattgagttcttcaatgaatagcatcaagaccttctggagcccagagctgaagaaggaacgagccctgagaaaagatgaagcttccaaaatcaccatttggaaggaacagtacagagttgtacaggaggaaaaccagcacatgcagatgacaatccaggctctccaggatgaattgcggatccagagggacctgaatcagctgtttcagcaggatagtagcagcaggactggcgaaccttgtgtagcagagctgacagaggagaactttcagaggcttcatgctgagcatgagcggcaggccaaagagctgtttcttcttcgaaagacattggaggaaatggagctgcgtattgagactcaaaagcagaccctaaatgctcgggatgaatccattaagaagcttctggaaatgttgcagagcaaaggactttctgccaaggctaccgaggaagaccatgagagaacaagacgactggcagaggcagagatgcacgttcatcacctagaaagccttttggagcagaaggaaaaagagaacagtatgttgagagaggagatgcatcgaaggtttgagaatgctcctgattctgccaaaacaaaagctctgcaaactgttattgagatgaaggattcaaaaatttcctctatggagcgtgggcttcgagacctggaagaggaaattcagatgctgaaatcgaatggtgctttgagtactgaggaaagggaagaagaaatgaagcaaatggaagtgtatcggagccattctaaatttatgaaaaataagattggccaggtgaaacaggagctgtccagaaaggacacagaactactcgccctgcagacaaagctagaaacactcacaaaccagttctcagatagtaaacagcacattgaagtgttgaaggagtccttgactgctaaggagcagagggctgccatcctgcagactgag

SEQ ID NO: 129450 - DNA, 9202 bp, Homo sapiens
  Payload ID: 5316
  Gene Symbol: ERC1
  Gene Name: ELKS/RAB6-interacting/CAST family member 1
  Uniprot ID: Q8IUD2
  ENST ID: ENST00000589028
  CDS Start-End: 158-3508
gatatggtgtaagatacttcttcaagattggacagctggggaccttcttctgattaaccttaaaccaacttgtagccatagagacacctcacaaggttcccatttttgttgttgttgttgttgattttctgctcacacctttcctgaccttgcaaccatgtatggaagtgcccgctctgttgggaaggtggagccgagcagccagagccctgggcgttcacccaggcttccacgttcccctcgcttgggtcaccgtcgaaccaacagtacgggagggagttcgggaagcagtgttggaggtggcagtgggaaaaccctttcaatggaaaatatacaatctttaaatgctgcctatgccacctctggccctatgtatctaagtgaccatgaaaatgtgggttcagaaacacctaaaagcaccatgacacttggccgttctgggggacgtctgccttacggtgttcggatgactgctatgggtagtagccccaatatagctagcagtggggttgctagtgacaccatagcatttggagagcatcacctccctcctgtgagtatggcatccactgtacctcactcccttcgtcaggcgagagataacacaatcatggatctgcagacacagctgaaggaagtattaagagaaaatgatctcttgcggaaggatgtggaagtaaaggagagcaaattgagttcttcaatgaatagcatcaagaccttctggagcccagagctgaagaaggaacgagccctgagaaaagatgaagcttccaaaatcaccatttggaaggaacagtacagagttgtacaggaggaaaaccagcacatgcagatgacaatccaggctctccaggatgaattgcggatccagagggacctgaatcagctgtttcagcaggatagtagcagcaggactggcgaaccttgtgtagcagagctgacagaggagaactttcagaggcttcatgctgagcatgagcggcaggccaaagagctgtttcttcttcgaaagacattggaggaaatggagctgcgtattgagactcaaaagcagaccctaaatgctcgggatgaatccattaagaagcttctggaaatgttgcagagcaaaggactttctgccaaggctaccgaggaagaccatgagagaacaagacgactggcagaggcagagatgcacgttcatcacctagaaagccttttggagcagaaggaaaaagagaacagtatgttgagagaggagatgcatcgaaggtttgagaatgctcctgattctgccaaaacaaaagctctgcaaactgttattgagatgaaggattcaaaaatttcctctatggagcgtgggcttcgagacctggaagaggaaattcagatgctgaaatcgaatggtgctttgagtactgaggaaagggaagaagaaatgaagcaaatggaagtgtatcggagccattctaaatttatgaaaaataaggtagaacaactgaaggaggaactaagttcgaaagaggctcaatgggaggagctgaaaaagaaagcggctggtcttcaggctgagattggccaggtgaaacaggagctgtccagaaaggacacagaactactcgccctgcagacaaagctagaaacactcacaaaccagttctcagatagtaaacagcacattgaagtgttgaaggagtccttgactgctaaggagcagagggctgccatcctgcagactgaggtggatgctctccgattgcgtttggaagagaaggaaaccatgttgaataaaaagacaaaacaaattcaggatatggctgaagagaaggggacacaagctggagagatacatgacctcaaggacatgttggatgtgaaggagcggaaggttaatgttcttcagaagaagattgaaaatcttcaagagcagcttagagacaaggaaaagcagatgagcagcttgaaagaacgggtcaaatccttgcaggctgacaccaccaacactgacactgccttgacaactttggaggaggcccttgcagagaaagagcggacaattgaacgcttaaaggagcagagggacagagatgagcgagagaagcaagaggaaattgataactacaaaaaagatcttaaagacttgaaggaaaaagtcagcctgttgcaaggcgacctttcagagaaagaggcttcacttttggatctgaaagagcatgcttcttctctggcatcctcaggactgaaaaaggactcacggcttaagacactagagattgctttggagcagaagaaggaggagtgtctgaaaatggaatcacaattgaaaaaggcacatgaggcagcattggaagccagagccagtccagagatgagtgaccgaatacagcacttggagagagagatcaccaggtacaaagatgaatctagcaaggcccaggcagaagttgatcgactcttagaaatcttgaaggaggtggaaaatgagaagaatgacaaagataagaagatagctgagttggaaaggcaagtgaaagaccagaataagaaggtagcaaatctgaagcacaaggaacaggtggaaaaaaagaagagtgcacaaatgttagaggaggcgcgacgacgggaggacaatctcaacgacagctctcagcagctacaggacagtctccgtaagaaggatgacaggattgaagagctggaagaagcactaagagaaagtgtacagataactgcagagcgggaaatggtgctagcacaagaggaatcagccaggaccaatgctgaaaaacaggtggaggagttactgatggccatggagaaggtaaagcaggaactagaatccatgaaagcaaagctgtcctccacccagcagtctctggcagaaaaggaaactcacttgactaatcttcgggcagagagaaggaaacacttagaggaagttctggagatgaagcaagaagctcttctggctgccattagtgaaaaagacgccaatatagctctcttggagctttcgtcctctaagaagaagacccaagaggaagtggctgccctgaagcgggagaaggatcgtctggtacagcagcttaagcagcagacgcaaaatcgaatgaagctaatggccgacaactacgaggatgaccacttcaaatcctcccattccaatcaaacaaatcacaagccctccccagaccagatcatccagcccctcttagaacttgaccaaaatagaagtaaattaaagttgtacattggacacctgacaaccctctgccatgaccgagaccccctgatcctccgtggactcactccaccagcttcctataacttggacgatgaccaggcggcttgggagaatgagctgcagaagatgacccgggggcagcttcaggatgagttagagaaaggtgaacgggacaatgcagaactgcaggagtttgccaacgccattcttcagcagatagcagaccattgtcccgacatcctagagcaagtggtcaacgccctggaagagtcctcttgaccctgctttatggggaagcctgaggtagtcaacccaggagccaagaaaagagaactacgaggaacaggtgcccggaaccttcttggcaccaaacactacaaacttcatcccaacttgctcacttgaagaagtgtgattccagcaccgtttctacatctgccatcttactctgcctttctgctttggatgtggtctctacactaaccttcttgatgtccagggtagataaagggtcgaatctctctgaagaactgccacctggtcatcagcagtggagaactgtgggagctggtggctctgccctgacagagagccatggagcagaggagcctctcacctcctgtcctctgacatgagaatgaaaccaggaatggacttggagttcaacaggctgagaggatgcctccaatggaccagagagctgagtgttctaatatcacaataggtgctttctcctaaaagggcaaaaaacaatctcaaaaagattagaaaaagagaaggggggaagggaagagaaaatcgactcttctttttactgtctcttctgcttactttccacatgagatgctttgtaccggggagctgtgagcaggcctcacgatggcttgggagcactcgttctcccaaggtctgagtcttcatccagccctgcctgtctgtcgcagccttcctcactctgttcctcggccagttaacaagaagatggtgtgaggtgttctccaccagtctctcctgtttgagactgttgacgttatcatactgaggtgttagatcaaatatctctaattgaagaacatgtgaggttgaaagagcaccagccagggcaacatagcgtgaccctgtctctacaaaaaattaaaaagagaacatacaaagttgacatatgagaccctgttgtccccgcctgcagctttgccccagtaacagatgcccgttgctcttgggctggtttcccctgaacacctccaagaggctgcctgccttgccagcacccgtgtcctgagctcctgcagcccagtggctgctgaagttgtgatccctcactcaccctgctagctttgcccttgactcgtcttctctgaacctcagcctcgtgcattgcctggaaccttcttctagcataaatgaaggtttttcctcctacacacattccttcctcggttatttcattcagagaatatttatgaaatgcctactgtgtgcaagtcatccatccttgaaaaggccacttctcagtgagggagagatgtagtggattctgtgagacatacctgctggagttgaagcagtaaatagcatgtccttcccctccccgatcttaaggtgtgttttctagaaaagttccctaatggaattcatgagtttgggggtctcagtcacccgcttgcctgtaggattccatttgatgattctggatttttgctgtttgttattgcccttagaggggctctgagtatctacttgtgggtggccatttcctgacatctgcatgtacctcgtggaattcagccagcttcatgttgcaaatcagaaagctgaccccaagactgcaaatcaatgaaggtattggcattgttaaggacgtagcgtagacaacagcagtcataaataattaggcaggaacttaacccaaatctagttctttgaccacctctaccaccagaacccagcagacactcacatctcctgataagagttgctggactcgatgtttttgttttgcattttctcctctccttccccacttactcagagaatttaaagtctgtagagtcagcacagccccatcagtccaggaacttcccaccaccagcccttgactgtcccattaactgacatggtcagatttccagctccccctactccctgctgtgaaacaatccctctccctgtgagaggaaactgtggagcgtttcttatcgaaggttaaatggactctgctcataaacctcttactgagatgcttcctgatagccaggctggccagagaggggtgcaggggttagatagtaagtggtggtcgtttgtggtcagttacctcaattctgttcattgcagtgcccgtaaaccatgtagaaagctcccagcactgaaaggcaggagtgttagcatctcgctttatccaccataacgtaaagaactgcggtgtgataacagccttcacggggccacggtggaaccaagacagcaggcgaggccatgcctaaacaagtggtctggcacgggcactggccagctgctctctccaagcaggtggcccagatcccacccacgtggactttctcatcaggtgcagcgcctgccactctcagccactgggtgtgtcactctcctcttcatctcagcattctccatcacttcccctccagaaaaacggatggaaggaagccctctgtgacactgcttctgagaagaagcatttccgggaccgatatcatctgtctggtctctgtgaacagcaaggaatcttcttgaccgttcttgggcactggaggctggctaggagttcagtaataaacgtggccttcgtgctgtagggcagagtggatgcagtttgtagctttcagagtgtctcattgagtctagatcattgaaccaacacttaaccaaatgtcccactcccatcacactaggacttgtcattccatgcccctctcctagtggtcatggtttcatatgggcatacaactgctactgaagttatatagccttgaaaactcagtgcaggttgcccttaattttccccaaacccctccatcggcaagtctagttgccctttagcacctaaagatctgcaccccaaaccaatgtcaccataaagagggcacgaagaagagtgggtgtgatcccaacggggttttgtaactgaagaagcccagtgtgagcttctcatcttttcatatacctctaacccccggtactcattgaatcattgatgaggtatctcaattgagatttgcaaggactttgataccatttgaaatggaaaaattttgaacgggctttaacatgtttaagaaatatggatggggccggccacagtggctcacgcctgtaatcccagaactctggaaggctgaggcaggcggatcacctgagatcaggagttcgaggccagcctggccaagatggcaaaaaccccgactctactaaaaatacaaaattagccaggcgtggtggcgtacgcctgtaatcccagctactcaggaggcaggagaatcgcttgagcctgggaggcagaggctgcggtgagccgagatcgtgtcactgcactccagcctgggtgacagagactccatttaaaaaaaaaaaaaaaaaatatatatatatatatatatatatatatatggatgggaatcaccaaattcatctcagctctaaccttttaacctttgtccttgcactttacaatctaaagatctacctgtggctctcagacttcctcacacttgggttttagaaataacttgtaaagcagactggacccaaggccgccttcagtgtcaagaagggcattgtgacttgcccctcaatttctgtccattgaagtctggttttccatgaggaacttgcgggctcacccacccccagagtgagagaagaggaaggcgaagtcatcacagacacggtcttagccacctgctgaactaatccctccgctattgagggtcagggttgtgaggcaaccatcatgtgtcaccccaaaatataaatgtttctgagccgcccatccactggcatttggatttgctgccagagtcctgttcctcccagaaccatcccgccctcctgttgaccatgttacttgagtgtaggcccggtgtcaagaccctcagagtctttgaggaaagagccaagcagagaagaccgctgcgtggagtgtgacaccacatggcatttctcaagcccagcggaccctgtgtcagcaaataccagtaatttaacatctgctcctggcctcctcttcacctgcctgggttcggaactgaggaggaaggatgagaagagactgcaatgcagcaggcaccctctgcagagtgaggccgcccgtccatcactgccagccctgggctgctcaggaggggacgtgaaccactcaaaggaatgtcttaaagaggatctggagtttcccccatgcaaattagggaagaattaggcaagaaaagacatacattacagggaaatccttctgaacaaaatggctgtcttcacctactcttcttgcaagaaaagacatacattacagggaaatccttctgaacaaaatggctatcttcacctactcttcagcaaaaaccgtctccagactttttagtgtcaaaaatgtaaccaactgtctcctgattttttccaatgtgtttggcaagtgctgtggccctgttgtaggtacttctcctgactcttgggggagaagtggttttagggattgatttgggggagcgggtttttgtcccatcccacctcctctcttctttctctgcttgtcgatattgtctgtgtgattcagagaattggggcagttacattgtgtctgttgttgagattattaaaagattaaaacgtagttgtagaaatgaaaaattaaacagctgtgttttaaaaatgcaaaccaatatcttgttaataaaggaattcaagctatggggcagccacactcccctcctcccaggctggcataggtggccctgggctggcggcttaggaagcatggagcacacttagggtagtgcctgcctgggcaagagacacctgccgagcaaaaggaacgagaatctggggctcagagcctcgcagttgtgccaggattttcctatacatgttcaggacctctgggtagaggtttcacagtttgtgaccccataaccaccctcacccgacgtgggttctagctcagtgtgcctaatactgcatggtaacctgggcttgaccctgaagcccctgcctggcaggccacaggacctctcctgcccacttggtgctatctcttccagtgaccacccagcacgggtgagcactggccagcctggagcctgcaatccaggtggaacagactgtcctccatgtcagttccttctggcttcaggccctcaattatttccctttgagcttttttagaccctagatctcctaggcccaggctctctcttgaccccagagaagccactgtcaggaaaggaagtgaaccctactgaagccagagaattcaccccggccaaagcaggccctctgggtccagcccctcattccacaccacgccagtattgcatccatctactgcagctacacatcctgagggcagcaccacccactctggcctgctggcccatcgcaggactagcccaggcacctgccgggcattgcaggatatccagtggggcctgtgactgctccctgatgcgtcagaagagaagtgttgcactttagtggaggagctgaggagcacctgcccccttgtagcttgagttccttttggtaacagtagcagcctccatggtggtgtctgggatgcacgtgcacccgctgccttcagctgtatgtgtgtgttcctgctggagttgtgttactgacaggataatgacattacaaagaaattgtgttatattcaactttgccttgataattattgtaaacactttgttcattttttcttttttattcacaaactaaatccaccaggaaattataaagttattt

SEQ ID NO: 129451 - DNA, 2832 bp, Homo sapiens
  Payload ID: 5316
  Gene Symbol: ERC1
  Gene Name: ELKS/RAB6-interacting/CAST family member 1
  Uniprot ID: Q8IUD2
  ENST ID: ENST00000611180
  CDS Start-End: 158-2320
gatatggtgtaagatacttcttcaagattggacagctggggaccttcttctgattaaccttaaaccaacttgtagccatagagacacctcacaaggttcccatttttgttgttgttgttgttgattttctgctcacacctttcctgaccttgcaaccatgtatggaagtgcccgctctgttgggaaggtggagccgagcagccagagccctgggcgttcacccaggcttccacgttcccctcgcttgggtcaccgtcgaaccaacagtacgggagggagttcgggaagcagtgttggaggtggcagtgggaaaaccctttcaatggaaaatatacaatctttaaatgctgcctatgccacctctggccctatgtatctaagtgaccatgaaaatgtgggttcagaaacacctaaaagcaccatgacacttggccgttctgggggacgtctgccttacggtgttcggatgactgctatgggtagtagccccaatatagctagcagtggggttgctagtgacaccatagcatttggagagcatcacctccctcctgtgagtatggcatccactgtacctcactcccttcgtcaggcgagagataacacaatcatggatctgcagacacagctgaaggaagtattaagagaaaatgatctcttgcggaaggatgtggaagtaaaggagagcaaattgagttcttcaatgaatagcatcaagaccttctggagcccagagctgaagaaggaacgagccctgagaaaagatgaagcttccaaaatcaccatttggaaggaacagtacagagttgtacaggaggaaaaccaggtggatgctctccgattgcgtttggaagagaaggaaaccatgttgaataaaaagacaaaacaaattcaggatatggctgaagagaaggggacacaagctggagagatacatgacctcaaggacatgttggatgtgaaggagcggaaggttaatgttcttcagaagaagattgaaaatcttcaagagcagcttagagacaaggaaaagcagatgagcagcttgaaagaacgggtcaaatccttgcaggctgacaccaccaacactgacactgccttgacaactttggaggaggcccttgcagagaaagagcggacaattgaacgcttaaaggagcagagggacagagatgagcgagagaagcaagaggaaattgataactacaaaaaagatcttaaagacttgaaggaaaaagtcagcctgttgcaaggcgacctttcagagaaagaggcttcacttttggatctgaaagagcatgcttcttctctggcatcctcaggactgaaaaaggactcacggcttaagacactagagattgctttggagcagaagaaggaggagtgtctgaaaatggaatcacaattgaaaaaggcacatgaggcagcattggaagccagagccagtccagagatgagtgaccgaatacagcacttggagagagagatcaccaggtacaaagatgaatctagcaaggcccaggcagaagttgatcgactcttagaaatcttgaaggaggtggaaaatgagaagaatgacaaagataagaagatagctgagttggaaagtctcacctcaaggcaagtgaaagaccagaataagaaggtagcaaatctgaagcacaaggaacaggtggaaaaaaagaagagtgcacaaatgttagaggaggcgcgacgacgggaggacaatctcaacgacagctctcagcagctacaggacagtctccgtaagaaggatgacaggattgaagagctggaagaagcactaagagaaagtgtacagataactgcagagcgggaaatggtgctagcacaagaggaatcagccaggaccaatgctgaaaaacaggtggaggagttactgatggccatggagaaggtaaagcaggaactagaatccatgaaagcaaagctgtcctccacccagcagtctctggcagaaaaggaaactcacttgactaatcttcgggcagagagaaggaaacacttagaggaagttctggagatgaagcaagaagctcttctggctgccattagtgaaaaagacgccaatatagctctcttggagctttcgtcctctaagaagaagacccaagaggaagtggctgccctgaagcgggagaaggatcgtctggtacagcagcttaagcagcagacgcaaaatcgaatgaagctaatggccgacaactacgaggatgaccacttcaaatcctcccattccaatcaaacaaatcacaagccctccccagaccaggatgaggaggagggtatatgggcatagccaatcagaggcttagttcagccattttgttcagaacgatcatccagcccctcttagaacttgaccaaaatagaagtaaattaaagttgtacattggacacctgacaaccctctgccatgaccgagaccccctgatcctccgtggactcactccaccagcttcctataacttggacgatgaccaggcggcttgggagaatgagctgcagaagatgacccgggggcagcttcaggatgagttagagaaaggtgaacgggacaatgcagaactgcaggagtttgccaacgccattcttcagcagatagcagaccattgtcccgacatcctagagcaagtggtcaacgccctggaagagtcctcttgaccctgctttatggggaagcctgaggtagtcaacccaggagccaagaaaagagaactacgaggaacaggtgcccggaaccttcttggcaccaaacactacaaacttcatcccaacttgctcacttgaagaagtgtgattccagcaccg

SEQ ID NO: 129452 - DNA, 6138 bp, Homo sapiens
  Payload ID: 5317
  Gene Symbol: ERC2
  Gene Name: ELKS/RAB6-interacting/CAST family member 2
  Uniprot ID: O15083
  ENST ID: ENST00000288221
  CDS Start-End: 257-3130
gctcgctcggtctccggctccggcgccggctcctgctcctcctggccgcccggggccaaggcgacgagaggttgtaaaaatccatgtgggacggccccggggcgagcatcggaaagatctctgagtggagttattttctggtacggactgtgaaaagaatgcggtgaaaattctggacaatcgtggaaatattagctcaaaccccaacttaatatagcatttcttctcttcagtaacacctcataatacaagaaaaatgtatggaagtgcaagaacaatcaccaatctggaaggtagcccttccagatcccctcgtttgccaaggtctcctcgtttgggccaccgaagaacaagtagtgggggaggtggaggaacaggcaagactctgtctatggagaatatccagtccctcaatgcagcctatgctacgtctggacccatgtatctgagtgatcatgaaggggtggcttcaacaacctacccaaagggcactatgactctgggaagggctacaaatcgagctgtatatggaggccgtgtcacagccatggggagtagtcccaatattgcttctgctggactttcccacacagatgtcctttcatacacagatcaacatggtgggctgactggctcatcccatcatcaccaccaccaggtcccctccatgttgaggcaggtaagagacagcacaatgttagatcttcaggcccagctgaaagaactgcagagagagaatgacctcctccggaaagagctagacatcaaggacagcaaattgggatcttccatgaacagtattaagactttctggagtcctgagcttaagaaggagagagtcttgaggaaagaagaggcagcgcggatgtctgtcctcaaggagcagatgagggtttcccatgaagaaaatcagcacctacagttgacaatccaggcccttcaagatgagctgcgaacccagagagacctcaaccacctcctccagcaagagagtggcaaccgaggagcggagcacttcaccatcgagctgaccgaggagaactttaggcggctccaagccgagcatgacaggcaggctaaggagctgttccttttgaggaagacattagaggaaatggagctgagaattgaaacgcagaaacaaaccctcaatgcccgagatgagtcaattaaaaaacttcttgagatgttgcaaagtaaaggcttgccatccaaaagcctggaggatgacaatgagcgaacgcggcggatggcagaggctgagtctcaggtcagccacttggaagtgattttagatcagaaagagaaggaaaacatacatcttagagaggaattgcaccgaagaagccaacttcagccggagccagccaagacgaaggctctccagactgtcatcgaaatgaaggacacaaaaatcgcttcattggaacgaaacataagggatcttgaggatgagatccagatgttaaaagccaatggtgtgctgaacactgaggaccgcgaagaagagatcaaacaaattgaggtttacaaaagtcactccaagtttatgaagaccaagattgatcagctgaagcaggaactttcaaagaaagagtcggaacttcttgccttacaaacaaagcttgaaaccctcagcaatcaaaattcagattgcaagcaacacattgaagtgctcaaagagtcacttactgccaaagaacagagggctgccatccttcagactgaggtagatgcgctgagattacgactggaagaaaaagaatctttcctcaataaaaaaacaaaacagctacaggacctcacagaagagaaggggacactggccggtgaaattcgtgacatgaaagatatgttagaagtgaaggaaagaaaaatcaatgttcttcagaaaaagattgaaaacttgcaagaacaacttagggataaagacaagcaactgaccaacctgaaagacagagtgaagtccttgcagacggattccagtaatacagatactgcactggcgacgctagaggaagctctgtcagagaaggagagaataattgagcgcttgaaagaacagcgagaaagagatgatcgggaaagactagaagagatagaatccttccgaaaagagaacaaagacctgaaagagaaggtcaatgctttacaggctgaactgactgagaaagagtctagtttaattgacctcaaagaacatgcatcttcattagcctctgcggggctgaaaagggattccaaattaaaatctctagaaatagccattgaacaaaagaaagaggaatgtagcaaattggaagcacagttaaaaaaggcacataatattgaagatgactccaggatgaaccctgagtttgcagaccaaataaaacagctcgataaagaggcgtcttactaccgcgacgagtgtggcaaggcccaagcggaagtggaccggttgctggagatcctcaaggaggtggagaatgagaagaatgacaaggacaagaagatcgcagaactggagagcttgactctcaggcatatgaaagatcagaataagaaggtggccaacctcaagcacaatcaacagttggaaaagaagaaaaatgctcagttactagaagaagtgcgcaggcgagaagacagcatggctgacaactcacagcatttgcagatagaggaactgatgaatgcactggagaagaccagacaggaactggatgccaccaaagcacgcctcgcctccacacaacagtccctggccgaaaaagaagcgcacttggccaacctccggattgagaggaggaaacagctggaggagatcctggagatgaaacaggaagcactacttgcagccatcagtgaaaaagatgcaaacattgccttgctggaattgtctgcctccaaaaagaaaaagacgcaggaagaagtcatggccctcaagcgggaaaaagaccgactagtacatcaattaaagcagcagacccagaacagaatgaagttgatggcagacaactatgatgatgaccatcaccattaccaccaccaccaccatcaccaccaccatcgatctcctgggaggtcgcaacattccaatcacaggccctctccggaccaggatgacgaggagggcatatgggcatagccgggcctgtaaaccaaagttccagttttgttttgagggctattagaagggctgaataaagggaacatgcagctctgcagcaatattctgataatgtattgcagtgcggctcacatcactgtccaccaccacctggagcggctcatcagaactgaaggggagttttcacttaccttattgagcgtgattctgttctacttgatatttccttcaccacctcatgtcatttctcatggatttggttatgatggaaaggaagaatgcagaggaggagaaaagtgacagatcctccatttttgttgggatgcgggcattttgaatgtgatcatctttgctgaatgtcattatttgataacattttgtttatgttacttaaacatcattggataaatttgaactccatgggattttatctgtggattcagcttctgttggacaactagcctcatctccagtatcctgctggttcactctaattggtcattcctaatgcattagattatcaaaaagtataaattcgctgtgagtgagtggtgttggcagtgtttgtataccatgatgcatggagtgtttgacgaagaaacaaaaaacaccaaaaattgcgagcctttaccctcctctatttctttaatctgttgtttgaagaaccgcattttgagggtgtaaccagtagtcacctctgggccaggttggaaaagaaatcaattttttaaaccactaatgcttgccaagaaatcgccttatgagaacatggtgtgtgtctctgacaatgcgtggcacatctaaattgatcattcataattttatctacccagtcatgtactggagagtggcaaaagtctgaggcacctgcatatctctagtccctgtgttctgcacatccccacggtggggacgccaccaagcctcagactcttaccatcccggtgcatgcaggtctccatgaagaagctgggactcattcacatttcaagatccaaatgctgtgcaaacagtgtaagcttagattttctgtaaatgaagggtcatttctctttttttttttttttaaagaaaatgtgtctgcaacatggattccaaagcattttcagcatcaaacatgaaaacattgatgaatgaggaacaatcacaaaagctgtgtctctgtatatagctctacacaacatgtatgtggatacagtcattatttaaagcacatgccagggaaaaagaccaaattttgaggtcttttacatacagtgatatggtactaaggagaattaaactcctactgcttcctctgaatattaagaaacaatttaaattgttataacttcataaaactcatgactgagtctggcaaacatgtgcaactcttgtattgctccattttcttgtcaatggaagaaacccttccacgtgtatgcaagtgggagatgaaaacctgcatttttaaaggacaaacagtgaatttaagcatgagtggccttaataaatatagttgtctttctttgctgctgtggaaaggattctaaacagatgtccctgaagtcttgcattgaatttagtcattattattactttttaaaatgttggtgcaattaactctggacctctcttgtgagccatagagatatttaaaagacaaacaccttatttgtcggggaagatgaaaccgtccctgagttgcaccattctttcttggtgcattcgcggttaagatactcaagcaggtttcttgcttctggctttgttcttgtcatcagtaagtataacaaactatgtaatgcttatgtgttgcataaacaatccaaatgcattcatgttttaaaagtttgtcctttaactatcagagggatctaggtcttggttagagaagtaagcagagttctttgcaagcttatttagcacattttgacacaatgttgcactgaaaacccaggccacaaatgtgtcccagtgaacagtttggatgtcctcaaagaagtggttctcactgcctcctacaaccaggtcttgacctgaactctgcaactgaatacttgaagtaggaagtaggaaatccagtagggaaaatagggtccttgaaacagaaaaaaaaaaccaacccatgtatagctagctatttctatgtatgtgccaattttgtcacagctcttgtttggagggatcattttctgcccaactttcattggttaaaatattactgatcttacctttatgaggtcgtataatttagtcccttaaaaattaaattctctctaacataacaacctttcccatttcgtgtaatattctctgatgtttgggggttaccaaaaatatccctttttcacatattaagaatagtctctgggtttacaacaaacactgtgatgttgggaagctatttcctttgcgcaaactttaacaggttttcttctaatcataacatagttgaaaaaagaagtttgggctaacatttaggagaagttggtcttactttgtgcaaaagcaggcttgtgctttataccccatttgatttcgatgtacagtctcaattttgtatttaatgatttttgtgtatccagtatgcacgttaacagcgtgtcaactttcatttgaaagtgggtttcaatttactttttaaacagtgtttatgacgagacctcagatgtgttgacgtaagctctatctgcaatgtttttgtgtagagtggcgattgaatgctgcccagggtcagtgtatctaattccccgagaccctcgtttgatagtgcttcttgtaatatttcttcaagtgagtggcatgtgggttgtgatattgaccatgtgattatggacatcgatatgaaaaataaataaataaaactaaggaaccctggaaactaccagtgggcatgtattagccagtcattgtaacctcgtgtctagtagaacaatgtacaaggtatgtacagttcataaatttgttgtcatgtgtatgagaagtactttgtgctgatcgccttatttatattcatcaaataaaccttgtttctttctgaagtg

SEQ ID NO: 129453 - DNA, 1585 bp, Homo sapiens
  Payload ID: 5317
  Gene Symbol: ERC2
  Gene Name: ELKS/RAB6-interacting/CAST family member 2
  ENST ID: ENST00000492584
  CDS Start-End: 1-1585
gaagaagccaacttcagccggagccagccaagacgaaggctctccagactgtcatcgaaatgaaggacacaaaaatcgcttcattggaacgaaacataagggatcttgaggatgagatccagatgttaaaagccaatggtgtgctgaacactgaggaccgcgaagaagagatcaaacaaattgaggtttacaaaagtcactccaagtttatgaagaccaagattgatcagctgaagcaggaactttcaaagaaagagtcggaacttcttgccttacaaacaaagcttgaaaccctcagcaatcaaaattcagattgcaagcaacacattgaagtgctcaaagagtcacttactgccaaagaacagagggctgccatccttcagactgaggtagatgcgctgagattacgactggaagaaaaagaatctttcctcaataaaaaaacaaaacagctacaggacctcacagaagagaaggggacactggccggtgaaattcgtgacatgaaagatatgttagaagtgaaggaaagaaaaatcaatgttcttcagaaaaagattgaaaacttgcaagaacaacttagggataaagacaagcaactgaccaacctgaaagacagagtgaagtccttgcagacggattccagtaatacagatactgcactggcgacgctagaggaagctctgtcagagaaggagagaataattgagcgcttgaaagaacagcgagaaagagatgatcgggaaagactagaagagatagaatccttccgaaaagagaacaaagacctgaaagagaaggtcaatgctttacaggctgaactgactgagaaagagtctagtttaattgacctcaaagaacatgcatcttcattagcctctgcggggctgaaaagggattccaaattaaaatctctagaaatagccattgaacaaaagaaagaggaatgtagcaaattggaagcacagttaaaaaagcaagctgagcagttgttcaatcagatgtacaacccagcacataatattgaagatgactccaggatgaaccctgagtttgcagaccaaataaaacagctcgataaagaggcgtcttactaccgcgacgagtgtggcaaggcccaagcggaagtggaccggttgctggagatcctcaaggaggtggagaatgagaagaatgacaaggacaagaagatcgcagaactggagaggcatatgaaagatcagaataagaaggtggccaacctcaagcacaatcaacagttggaaaagaagaaaaatgctcagttactagaagaagtgcgcaggcgagaagacagcatggctgacaactcacagcatttgcagatagaggaactgatgaatgcactggagaagaccagacaggaactggatgccaccaaagcacgcctcgcctccacacaacagtccctggccgaaaaagaagcgcacttggccaacctccggattgagaggaggaaacagctggaggagatcctggagatgaaacaggaagcactacttgcagccatcagtgaaaaagatgcaaacattgccttgctggaattgtctgcctccaaaaagaaaaa

SEQ ID NO: 129454 - DNA, 3831 bp, Homo sapiens
  Payload ID: 5317
  Gene Symbol: ERC2
  Gene Name: ELKS/RAB6-interacting/CAST family member 2
  Uniprot ID: O15083
  ENST ID: ENST00000460849
  CDS Start-End: 231-3104
cggctcctgctcctcctggccgcccggggccaaggcgacgagaggttgtaaaaatccatgtgggacggccccggggcgagcatcggaaagatctctgagtggagttattttctggtacggactgtgaaaagaatgcggtgaaaattctggacaatcgtggaaatattagctcaaaccccaacttaatatagcatttcttctcttcagtaacacctcataatacaagaaaaatgtatggaagtgcaagaacaatcaccaatctggaaggtagcccttccagatcccctcgtttgccaaggtctcctcgtttgggccaccgaagaacaagtagtgggggaggtggaggaacaggcaagactctgtctatggagaatatccagtccctcaatgcagcctatgctacgtctggacccatgtatctgagtgatcatgaaggggtggcttcaacaacctacccaaagggcactatgactctgggaagggctacaaatcgagctgtatatggaggccgtgtcacagccatggggagtagtcccaatattgcttctgctggactttcccacacagatgtcctttcatacacagatcaacatggtgggctgactggctcatcccatcatcaccaccaccaggtcccctccatgttgaggcaggtaagagacagcacaatgttagatcttcaggcccagctgaaagaactgcagagagagaatgacctcctccggaaagagctagacatcaaggacagcaaattgggatcttccatgaacagtattaagactttctggagtcctgagcttaagaaggagagagtcttgaggaaagaagaggcagcgcggatgtctgtcctcaaggagcagatgagggtttcccatgaagaaaatcagcacctacagttgacaatccaggcccttcaagatgagctgcgaacccagagagacctcaaccacctcctccagcaagagagtggcaaccgaggagcggagcacttcaccatcgagctgaccgaggagaactttaggcggctccaagccgagcatgacaggcaggctaaggagctgttccttttgaggaagacattagaggaaatggagctgagaattgaaacgcagaaacaaaccctcaatgcccgagatgagtcaattaaaaaacttcttgagatgttgcaaagtaaaggcttgccatccaaaagcctggaggatgacaatgagcgaacgcggcggatggcagaggctgagtctcaggtcagccacttggaagtgattttagatcagaaagagaaggaaaacatacatcttagagaggaattgcaccgaagaagccaacttcagccggagccagccaagacgaaggctctccagactgtcatcgaaatgaaggacacaaaaatcgcttcattggaacgaaacataagggatcttgaggatgagatccagatgttaaaagccaatggtgtgctgaacactgaggaccgcgaagaagagatcaaacaaattgaggtttacaaaagtcactccaagtttatgaagaccaagattgatcagctgaagcaggaactttcaaagaaagagtcggaacttcttgccttacaaacaaagcttgaaaccctcagcaatcaaaattcagattgcaagcaacacattgaagtgctcaaagagtcacttactgccaaagaacagagggctgccatccttcagactgaggtagatgcgctgagattacgactggaagaaaaagaatctttcctcaataaaaaaacaaaacagctacaggacctcacagaagagaaggggacactggccggtgaaattcgtgacatgaaagatatgttagaagtgaaggaaagaaaaatcaatgttcttcagaaaaagattgaaaacttgcaagaacaacttagggataaagacaagcaactgaccaacctgaaagacagagtgaagtccttgcagacggattccagtaatacagatactgcactggcgacgctagaggaagctctgtcagagaaggagagaataattgagcgcttgaaagaacagcgagaaagagatgatcgggaaagactagaagagatagaatccttccgaaaagagaacaaagacctgaaagagaaggtcaatgctttacaggctgaactgactgagaaagagtctagtttaattgacctcaaagaacatgcatcttcattagcctctgcggggctgaaaagggattccaaattaaaatctctagaaatagccattgaacaaaagaaagaggaatgtagcaaattggaagcacagttaaaaaaggcacataatattgaagatgactccaggatgaaccctgagtttgcagaccaaataaaacagctcgataaagaggcgtcttactaccgcgacgagtgtggcaaggcccaagcggaagtggaccggttgctggagatcctcaaggaggtggagaatgagaagaatgacaaggacaagaagatcgcagaactggagagcttgactctcaggcatatgaaagatcagaataagaaggtggccaacctcaagcacaatcaacagttggaaaagaagaaaaatgctcagttactagaagaagtgcgcaggcgagaagacagcatggctgacaactcacagcatttgcagatagaggaactgatgaatgcactggagaagaccagacaggaactggatgccaccaaagcacgcctcgcctccacacaacagtccctggccgaaaaagaagcgcacttggccaacctccggattgagaggaggaaacagctggaggagatcctggagatgaaacaggaagcactacttgcagccatcagtgaaaaagatgcaaacattgccttgctggaattgtctgcctccaaaaagaaaaagacgcaggaagaagtcatggccctcaagcgggaaaaagaccgactagtacatcaattaaagcagcagacccagaacagaatgaagttgatggcagacaactatgatgatgaccatcaccattaccaccaccaccaccatcaccaccaccatcgatctcctgggaggtcgcaacattccaatcacaggccctctccggaccaggatgacgaggagggcatatgggcatagccgggcctgtaaaccaaagttccagttttgttttgagggatgatccagctctgtcggaggcacgtaggcacagccaaatctcatgctgtacattgatcacctgtccaacctttgcctagagtgggagcccccagttccttcgagatccaacattacctgtctgtaaagaagaagaggaggagggagacagcggggaggatccggtggcagtttaacaccagagcagctattagaagggctgaataaagggaacatgcagctctgcagcaatattctgataatgtattgcagtgcggctcacatcactgtccaccaccacctggagcggctcatcagaactgaaggggagttttcacttaccttattgagcgtgattctgttctacttgatatttccttcaccacctcatgtcatttctcatggatttggttatgatggaaaggaagaatgcagaggaggagaaaagtgacagatcctccatttttgttgggatgcgggcattttgaatgtgatcatctttgctgaatgtcattatttgataacattttgtttatgttacttaaacatcattggataaatttgaactccatgggattttatctgtggattcagcttctgttggacaactagcctcatctccagtatcctgctggttcactctaattggtcattcctaatgcattagattatcaaaaagtataaattcgctgtgagtgagtggtgttgg

SEQ ID NO: 129455 - DNA, 3831 bp, Homo sapiens; identical to SEQ ID NO: 129454
  Payload ID: 5317
  Gene Symbol: ERC2
  Gene Name: ELKS/RAB6-interacting/CAST family member 2
  Uniprot ID: O15083
  ENST ID: ENST00000612797
  CDS Start-End: 231-3104

SEQ ID NO: 129456 - DNA, 4690 bp, Homo sapiens
  Payload ID: 5318
  Gene Symbol: EAF1
  Gene Name: ELL associated factor 1
  Uniprot ID: Q96JC9
  ENST ID: ENST00000396842
  CDS Start-End: 426-1232
catcagttcctaaattcacctgcagggctagggccaggcgcactcaccccacagccagccccactgggcctcggaggcagaatacgggaagaaccgcgaaacaaccctaaaccaattctgaggaccacgaattcggattatccgggagttcttttgccatggcaccgcccccgccacttccgctaggaacccggaagttcctacccgacgccggaagtcccacggccttgcctcctcagattcctctctcacccccacgcagaggagagaacttgcttctggacccgggtgggtgccggctcggctctccttgtcttccagagcggtggcccggaagcacagtcctcccagacgccagcgccagaagctcggatcgcggctgcaccgggagagcgccgatctgggtgcgaggcaggtgcggggccatgaatgggaccgcaaacccgctgctggaccgcgaggaacattgcctgaggctcggggagagcttcgagaagcggccgcgggcctccttccacactattcgttatgattttaaaccagcatctatagacacttcctgtgaaggagagcttcaagttggcaaaggagatgaagtcacaattacactgccacatatccctggatccacaccacccatgactgtgttcaaggggaacaaacggccttaccagaaagactgtgtgcttattattaatcatgacactggtgaatatgtgctggaaaaactcagtagcagcattcaggtgaagaaaacaagagctgagggcagcagtaaaatccaggcccgaatggaacagcagcccactcgtcctccacagacgtcacagccaccaccacctccaccacctatgccattcagagctccaacgaagcctccagttggacccaaaacttctcccttgaaagataacccctcacctgaacctcagttggatgacatcaaaagagagctgagggctgaagttgacattattgaacaaatgagcagcagcagtgggagcagctcttcagactctgagagctcttcgggaagtgatgacgatagctccagcagtggaggcgaggacaatggcccagcctctcctccgcagccttcacaccagcagccctacaacagtaggcctgccgttgccaatggaaccagccggccacaaggaagcaaccagctcatgaacaccctcagaaatgacttgcagttgagtgagtctggcagtgacagtgatgactagtgctggatctttcgaaacctactttttggtgcacaaacatgccgcaagactgagctactttggcgtggagtccattgcaagaggaaaatgttatggatcagtgactgtagtaggagtttgaggctctggaactctcacatattcaagtctttaacttagtggtgatgggtgattttctcgtgtcatttttgaacaatctcatctttcaaagtttaagtagacctgtagaagagctaacagaattatatttctatttagttaaaattgttaatgaaaaacagataaatgtgccctggtctaagttactcaaaggccatatcttcaccaggccagagattcagttttaaacctcagcagccatcagtttggccaagtggttggtaccagtggaatgaagtctttgatgggtaggagagagagggaaaacctcaaactacatcatagaagtatgttaaaaccactttaaattgttgacacaaagtggtaaggaagttttgtctgactcagcctgacaagcctggatagaaatggacctcagaatacagaatggagtccttgagtgtcagttggtgaggaccatggagtcctgccagctcaacctgtcatttacagactaagaaagggaagtacacacctggcttgtggccagtctcctgccccctctctgggctttcctcactgttctctcccttgaatctcatttgtaggaatcaagagattcctatacatgggacttttagatgtacattggcacttggattagattccaaaagacaaaagtgttgggtgcttctagcttgaattcagtccctaaatacatgaggctgggtgagcagatgaaaccggtagccactgtgctgatgcatgtgactccattcagttggggattttggttccatgtggatccatactaagtattcttcagtcagtggattttagcaaggggaggtaggagtggaagagaggtgtgaagaaacctctccgaacaaatgaaccagcagtaagtttctaaaaatcagaatctagatagaagttctgcaatatgaaatgagcacattctttgataaggcgtatctattcatgcttttgtaccactgttttgtacctgactccctgaccgatttgtattttttatatacaactagaaggaagtcacaagattgccttctacagtgtgccatttccaaatggatctgttgttggaggaaactggttgctagtcaatgttctatatttaatgaatgtgtgataaatcatcctgtaatcagtatggagtaacctgtttttgtagtttggatgaatatgtcctgagaaatttccatccactttggttcagcggacatcaaggtagtaataataatttttcctccacaggtccctccactcatatggcctctccctccccagctagtggaggggaagcagtctggacttagaaaggaaataggtggtctgtcataggggctttcattagagttaaacttcatagagtcaactgtttcatcatcatagtgagcccagagagccactgcccagcagcatgctcacaccacctaccctagtgtaggtaataggtctacgctaggaccccgtgctgggctctcagcccatcatgagattttggtggatttaatggcaggtaggaacttatttatagtggattgataattgctttataattccttggtaatgacagctcagggaaggtttcacaaggtcatgatcaggagacttgaattgttactggatgtaggaattgtttcactgctcttaacttgctcaaactggggcaggttccaggaacttgaactaaaaatatctatttaagcctctctctctttctctcctccccaacttttttctgaaagccttgatttctgtagacagaactatggtttttggcatgttgggtcaagacgtgtttctataggaaatgcttgcacgtggcactggcttggtgagtcaagcttcctgagcttcagaccgtttgtcctgtcatctgtcctgcccaacactgtatggtttttctctagcacggcttcaattttgttctctgcacaaagcctttggtggttctgccctctgccctccagctttacccaccagagtaagcaatcttttctttttagaaatcaagaatttggcttcacagatggcttctcacagatgccctcctgccagccaaaccggacttgttcttcctgcctctgtgccttctctcattctccttctctccctccataccccacttttgaggttctgtgggtaccatctttgtggactcttgtcttttttttcaacccacatggagtgccctgtgtgtacatactgaccttttttttttttttttttttttgcttgaactctggtcggtatgagctccttaaaagcaggtactgggctggctgtggtgactcatgcctgtaatcccagcactttgggaggctgaggtgggaggattgcttgagtccaggagtttgagaccagcctgggcaacatggcgagaccctgtttctacaaaaagaaaaagggaaaaaaaaagcagggactgtcattctcatctcctccctggggtatccacaggaatggacattcaaatggttgtagcctggtggggtagaaggcagagaagactacccagccagtgaagtgcagaggatagacataggaaaacattccaggcatttggagacagctgaaagtatccatgctgactttcatgatttagaagtctttaactgaattattaaaattgccttttttttgtgctgtacaatgtctactgtactgtgggtcatttagatgagatgaaaaacttaattaaatctgaagtgtcagaggcgcttagtaagccttagtaaagttgtgattgaagaaacttaatacaaatgaactagaggtttgtaatcatgccactcactaacgattttatttctgtagcagaatcattttttctatgtaaggtgttaatgtgtgtgtatgtgctttggttgtaggaaaacttgaaaattccaaaatccttattttcctatttgagaggctggttcagcagggtgtgtgtgtgtgtgtgtgtgtgtgtgtatgaatggtatatttattacattattttgaaagagaattagtgtgttatgtggataatgttatatacagccaaagtggatgtttctatttggcaaggaaggtaggatttctgaaactcaggccttaaccaataggttggaagacaagaccaattgaagagttaggaaatgtgagtttttgttacttctgttattccagtcttggtttcattgtctcattctttatttttaaaatcttgtgcctaaaagtttttttgcttaattatgaagtagacatgcatgtttacatttatgtaaaatatttgctgtgtaaagtattttttgtttattctcttaaaagatcactatatttaaataaaagtgaaggtcagcaacaca

SEQ ID NO: 129457 - DNA, 1037 bp, Homo sapiens
  Payload ID: 5318
  Gene Symbol: EAF1
  Gene Name: ELL associated factor 1
  ENST ID: ENST00000449565
  CDS Start-End: 183-386
ctctctcacccccacgcagaggagagaacttgcttctggacccgggtgggtgccggctcggctctccttgtcttccagagcggtggcccggaagcacagtcctcccagacgccagcgccagaagctcggatcgcggctgcaccgggagagcgccgatctgggtgcgaggcaggtgcggggccatgaatgggaccgcaaacccgctgctggaccgcgaggaacattgcctgaggctcggggagagcttcgagaagcggccgcgggcctccttccacactattcgttatgattttaaaccagcatctatagacacttcctgtgaaggagagcttcaagttggcaaaggagatgaagtcacaattacactgccacatatccctagctgagggcagcagtaaaatccaggcccgaatggaacagcagcccactcgtcctccacagacgtcacagccaccaccacctccaccacctatgccattcagagctccaacgaagcctccagttggacccaaaacttctcccttgaaagataacccctcacctgaacctcagttggatgacatcaaaagagagctgagggctgaagttgacattattgaacaaatgagcagcagcagtgggagcagctcttcagactctgagagctcttcgggaagtgatgacgatagctccagcagtggaggcgaggacaatggcccagcctctcctccgcagccttcacaccagcagccctacaacagtaggcctgccgttgccaatggaaccagccggccacaaggaagcaaccagctcatgaacaccctcagaaatgacttgcagttgagtgagtctggcagtgacagtgatgactagtgctggatctttcgaaacctactttttggtgcacaaacatgccgcaagactgagctactttggcgtggagtccattgcaagaggaaaatgttatggatcagtgactgtagtaggagtttgaggctctggaactctcacatattcaagtctttaacttagtggtgatgggtgattttctcgtgtca

SEQ ID NO: 129458 - DNA, 992 bp, Homo sapiens
  Payload ID: 5319
  Gene Symbol: EAF2
  Gene Name: ELL associated factor 2
  Uniprot ID: Q96CJ1
  ENST ID: ENST00000273668
  CDS Start-End: 72-854
agctgcttcaggctgaggtggcagatagtgagcgctggtggcggagttaaagtcaaagcaggagagtaattatgaatagcgcagcgggattctcacacctagaccgtcgcgagcgggttctcaagttaggggagagtttcgagaagcagccgcgctgcgccttccacactgtgcgctatgacttcaaacctgcttctattgacacttcttctgaaggataccttgaggttggtgaaggtgaacaggtgaccataactctgccaaatatagaaggttcaactccaccagtaactgttttcaaaggttcaaaaaaaccttacttaaaagaatgcattttgattattaaccatgatactggagaatgtcggctagaaaaactcagcagcaacatcactgtaaaaaaaacaagagttgaaggaagcagtaaaattcagtatcgtaaagaacaacagcaacaacaaatgtggaattcagccaggactcccaatcttgtaaaacattctccatctgaagataagatgtccccagcatctccaatagatgatatcgaaagagaactgaaggcagaagctagtctaatggaccagatgagtagttgtgatagttcatcagattccaaaagttcatcatcttcaagtagtgaggatagttctagtgactcagaagatgaagattgcaaatcctctacttctgatacagggaattgtgtctcaggacatcctaccatgacacagtacaggattcctgatatagatgccagtcataatagatttcgagacaacagtggccttctgatgaatactttaagaaatgatttgcagctgagtgaatcaggaagtgacagtgatgactgaagaaatatttagctataaataaaaatttatacagcatgtataatttattttgtattaacaataaaaattcctaagactgagggaaatatgtcttaacttttgatgataaaagaaattaaatttgattcagaaatttca

SEQ ID NO: 129459 - DNA, 960 bp, Homo sapiens
  Payload ID: 5319
  Gene Symbol: EAF2
  Gene Name: ELL associated factor 2
  ENST ID: ENST00000451944
  CDS Start-End: 50-841
agatagtgagcgctggtggcggagttaaagtcaaagcaggagagtaattatgaatagcgcagcgggattctcacacctagaccgtcgcgagcgggttctcaagttaggggagagtttcgagaagcagccgcgctgcgccttccacactgtgcgctatgacttcaaacctgcttctattgacacttcttctgaaggataccttgaggttggtgaaggtgaacaggtgaccataactctgccaaatatagaaggttcaactccaccagtaactgttttcaaaggttcaaaaaaaccttacttaaaagaatgcattttgattattaaccatgatactggagaatgtcggctagaaaaactcagcagcaacatcactgtaaaaaaaacaagagttgaaggaagcagtaaaattcagtatcgtaaagaacaacagcaacaacaaatgtggaattcagccaggactcccaatcttgtaaaacattctccatctgaagataagatgtccccagcatctccaatagatgatatcgaaagagaactgaaggcagaagctagtctaatggaccagatgagtagttgtgatagttcatcagattccaaaagttcatcatcttcaagtagtgaggatagttctagtgactcagaagatgaagattgcaaatcctctacttctgatacagggaattgtgtctcaggacatcctaccatgacacagtacaggattcctgatatagatgccagtcataatagatttcgagacaacagtggccttctgatgaatactttaaataatctttcctctcactccttttcaagtttatatgatcctctgctcagtcattaaagttggagtttctcaaggcttacttttgggttctttttttcttttcattctacaatttctccctaaataacttcctccatgtttctgttgcagtcaatacttatgtgtaggtaacttgc

SEQ ID NO: 129460 - DNA, 829 bp, Homo sapiens
  Payload ID: 5319
  Gene Symbol: EAF2
  Gene Name: ELL associated factor 2
  ENST ID: ENST00000490434
  CDS Start-End: 104-310
gtctgggtgacttggctggcgggatcaagtgcagctgcttcaggctgaggtggcagatagtgagcgctggtggcggagttaaagtcaaagcaggagagtaattatgaatagcgcagcgggattctcacacctagaccgtcgcgagcgggttctcaagttaggggagagtttcgagaagcagccgcgctgcgccttccacactgtgcgctatgacttcaaacctgcttctattgacacttcttctgaaggataccttgaggttggtgaaggtgaacaggtgaccataactctgccaaatatagaaagttgaaggaagcagtaaaattcagtatcgtaaagaacaacagcaacaacaaatgtggaattcagccaggactcccaatcttgtaaaacattctccatctgaagataagatgtccccagcatctccaatagatgatatcgaaagagaactgaaggcagaagctagtctaatggaccagatgagtagttgtgatagttcatcagattccaaaagttcatcatcttcaagtagtgaggatagttctagtgactcagaagatgaagattgcaaatcctctacttctgatacagggaattgtgtctcaggacatcctaccatgacacagtacaggattcctgatatagatgccagtcataatagatttcgagacaacagtggccttctgatgaatactttaagaaatgatttgcagctgagtgaatcaggaagtgacagtgatgactgaagaaatatttagctataaataaaaatttatacagcatgtataatttattttgtattaacaataaaaattcctaagactga

SEQ ID NO: 129461 - DNA, 643 bp, Homo sapiens
  Payload ID: 5319
  Gene Symbol: EAF2
  Gene Name: ELL associated factor 2
  ENST ID: ENST00000490477
  CDS Start-End: 10-117
agagtaattatgaatagcgcagcgggattctcacacctagaccgtcgcgagcgggttctcaagttaggggagagtttcgagaagcagccgcgctgcgccttccacactgtgcgctagctccccacgatgagatggtgctgtgctggctctgcagtttctctctcttcagtcccattttccggaagtgtgatatgcgtctttatctggtttttccatgcctttttctcaaatagtatctactctctccttttctcttccttctcagatgacttcaaacctgcttctattgacacttcttctgaaggataccttgaggttggtgaaggtgaacaggtgaccataactctgccaaatatagaaggttcaactccaccagtaactgttttcaaaggttcaaaaaaaccttacttaaaagaatgcattttgattattaaccatgatactggagaatgtcggctagaaaaactcagcagcaacatcactgtaaaaaaaacaagagttgaaggaagcagtaaaattcagtatcgtaaagaacaacagcaacaacaaatgtggaattcagccaggactcccaatcttgtaaaacattctccatctgaagataagatgtccccagcatctccaatagatgatatcgaaagag

SEQ ID NO: 129462 - DNA, 6431 bp, Homo sapiens
  Payload ID: 5320
  Gene Symbol: EVC
  Gene Name: Ellis van Creveld protein
  Uniprot ID: P57679
  ENST ID: ENST00000264956
  CDS Start-End: 185-3163
ccctccggctcggcgaagcagggaaggggagagaagcaggagtcgggagactgcacaggccagaaagtctgcggagcgggccgcgcccctggcccgcccgggctccaagtcccgcgtcgccgccctggcggggacggtgcagcaggcggcgggatgcggcggggcggcagcctgagcgccccggatggcccgcggcggggcggcctgcaagagcgacgcgcggctgctgctggggcgggacgcgctgcggccggcgcccgccctgctggcccccgccgtgctgctgggcgccgcgctcggcctcggcctcggcctttggcttggctgccgcgcgggccgccagcgcacgcgacaccagaaagacgacactcaaaatctgctcaagaatttggagtctaatgcgcagaccccctcggaaactggctccccatcaaggaggaggaagagagaagtgcagatgtcgaaggacaaggaagctgttgatgaatgtgagccgccttccaacagcaatatcacagcattcgccctgaaggccaaagtcatctaccccatcaatcagaagttccggcctctggccgatggctcctccaacccgtctctgcatgaaaacttaaagcaggctgttttgccacaccagccggtagaggcctctccttccagcagtctggggagcctgagccagggtgagaaggacgactgcagctcctcatccagcgtccactcggccaccagcgatgacaggtttctcagccgcaccttcctccgggtgaacgccttccctgaagtgctggcctgcgagagtgtagacgttgacctgtgtatctacagccttcacttaaaagacctgctgcatttggacacggcactgaggcaggaaaagcatatgatgtttattcagatttttaaaatgtgcctccttgaccttcttcctaaaaagaagtcagatgatgaactataccagaagatcctttcaaaacaagaaaaagatttggaggaactagaaaagggacttcaggtcaaactgtcaaacacagaaatgtcgggggctggtgactctgagtacatcaccctggctgatgtggaaaagaaggagagagaatactctgaacagctaatcgataatatggaagctttctggaaacagatggcaaatatccagcactttcttgtggaccagtttaagtgttccagctccaaagcccgacagctgatgatgactctgacggaaagaatgattgcagccgaagggctattgtgcgattctcaggagctgcaggctctggacgccctggagaggacgatggggcgggcgcacatggcaaaagtgattgagtttctgaagctgcaagtccaggaggagaccaggtgccggctggctgccatctcccacggcctggagctgctggctggtgaggggaagctgtccgggcggcagaaggaggagctgctcacgcagcagcacaaggccttctggcaggaggcagagcgcttcagccgggagtttgtccagcgaggcaaagacctggtcacggcgtctctggctcaccaggtggagggaacggcaaaactcacgctggcccaagaggaggaacagagaagcttcctggctgaggcccagccgactgctgacccggaaaagtttctcgaggcttttcatgaggtcctggagaggcagaggctgatgcagtgtgacctggaggaagaggagaatgtcagagccaccgaggctgtggttgcactctgccaggagctgtacttcagcaccgtggacactttccagaagttcgtggatgccctgttccttcagacgctccctggcatgactggcctccccccggaagagtgtgactacttgaggcaggaagtccaggagaacgctgcctggcagctggggaagtcaaatcgcttccggaggcagcagtggaaactcttccaggagctcctagagcaagaccagcaggtgtggatggaggagtgtgcgctgtccagcgtgctgcagacacacctgcgggaggaccacgagggcaccatccgcggcgtcttgggccgactgggcggcctcactgaagagtccacgcggtgtgtcctgcaggggcatgacctgctgttgcgctcagccctccggaggctggcactccgcggcaacgccctggccaccctgacgcagatgcggctatcggggaagaagcacctcctgcaggagctgcgggaacagcgtgcactggagcaggggtcctcccagtgcctggacgagcatcagtggcagctgctcagggccctggaggcgcgtgtgctggaggaggccagccggctagaggaggaagcacagcagacacggctgcagctccagcagcggctcctggccgaggcccaggaggtggggcagcttctgcagcagcacatggagtgcgccattgggcaggcgctgctggtgcatgcacggaatgcagccaccaagagccgggccaaggacagggatgacttcaagaggacactgatggaggcggcagtggagagcgtctacgtgaccagcgctggtgtcagccgcctggtgcaggcgtattaccagcaaatcggaaggatcatggaggaccacgaggagagaaaactgcagcacctgaagaccctgcagggtgagaggatggaaaattacaaactgcggaaaaagcaagaactcagcaacccttcgtcgggcagcaggacggcaggtggcgctcatgagacctcccaggcggtccaccagaggatgctgtcccagcagaagaggttcctggcccagttcccagtgcaccagcagatgcgtctgcacgcccagcagcagcaggcaggagtcatggaccttctggaagcccagctggagacccagctacaggaagctgaacagaacttcatctccgagctggcagccttggcccgagtgccccttgctgaaagcaaactgttgcctgctaagcgtgggctgctagagaagcccctaaggactaaaaggaagaagcccctgccccaggaaagaggggacctgggggtgcccaacaatgaggaccttgcctccggggaccagacctcaggctcactcagcagcaaaaggctgagtcagcaagaaagtgaagctggggacagtgggaactcaaagaagatgctaaagagaagaagcaacttgtagtttaagaccagtcggtgggacaagacctgaagccctgggtctgggtgtgaattccaccttccctcctgcagtgctgagaggcagcgaggacggagaggacagcggcatctctaggctcttctgagagggacagagaaagaatagaaatgtgccctaaaagcataaatgagtatcacctgagaaaattaggcattcccgtcttggaaacacgtctctgtgagtttgcatttcatttggcttggagccctggctcgatgcctcatggatctttctccccaaggagggacgtcttgaggggtccgagcctcaggccaaggacccctgatgcagactctggaatccctggcccaaaggcctgtctgggcccatctggggctgaggacacacagatacataatgacacctgcagaaatgtattctctgaggacacttagaatatgaggaagagggtgtggcccaaccctcacttcacctggggaggggcttcttccggacagtagacaccctgcccgtgcagagagatgtcatgggggcacctgctctccctgatagatgctgagagcatccagaaacttccagaccagccctctcaccacacccagaagaggcctttcccatctggagagaagcttccagaccagcccttcacacaccacagccaggaggggcctttcccacctggagagaaacttccagaccagcccctcataccacagccaagaggggcctttctcacctggagagaaatttccagaccatcccctctcaccacagccaggagaggcctttcccaccggtagagaaacttccagaccagcccctcacaccacagccaagagaagcctttccagcctggagagaaacttccagaccagccctctcactacagccaggagaggcctttcccgcctggaaacttccggacaagcctctcacacaccacagccaggagaggcctttcccacctggacagaaacttccagaccagcccctctcaccacagccaggagaggcctttaccacctggagagaagcttccagaccagcccctcacaccacagccaggagaggcctttcccacctggagagaaacttccagaccagcccctcataccacagccaagaggggcctttctcacctggagagaaacttccagaccagcccctcacaccaccgccaggagaggcctttcccaccgggagagaaacttccagaccagcccctcacaccacagccaggagaggcctttcccaccgggagagaaacttccagaccagccctctcactacagccagaagaggcctttcccaccgggagaggaacttccagaccagcccctcacaccacagccaggagaggcctttcccgcctggagagaagcttcaggccagctcctcacaccacagccaggagagaccttttctgcctggagagaaactttcagaccagccccacacaccacagccaggagaggccgttcctgcctggagagaagcttccagaccagcccttcacaccacagccaggagaggcctttcccacctggagagaaacttccagaccagcccctctcaccacagccaggagaggccgttcccacctggagggaaaattgctcctttgatggaggttagggactgtcaccctcagcactgtgaacataccgggcgagatcattcttcaggggaaggagctgcccagagcatcacaggatgttccagtgtccctggtctctgcccaccagatgccagcactcccaccattcgtggcaaccaaggatgtctccagacactgccccgtgtccatggggttatcacccactgtgctgagtcaaagggtgccttgccctggtctaatccaggacatagccgtggatacgtccaaaaatccccagaacctagtgagccctctggctctgggagcccctatctcaggaattttcagggtcatttgtgacttttcatttcttaaaacctgaaatagactctcttagaaacaagtgactccttcccagtggccaaaacttaatcatcagagcgcttccttcagttcctcacccatcagccagtgggctctccaaagttaaccaacagctccctcttgtggttcactaaaaaacttggttattccatggagttgtgcaaagctatggcttccttggtgcaatattcttaaaacctgctttgcatagaaatcacttttgcccaggctggagtgcagtggcgtgatctcggctcatggcaatctccatctcccgggttcaagcgattttcctgcctcagcctccccagtagctgggactacagacgtgtgccaccacgcctggctaaatcttttttgtattttattttagtagagacggggtttcaccatactggccaggctgctctcgaactcctgacctcatcgtccacctgcctcggcctccccaaagtgctgagattaggcgttagccaccgcgcccggccagaaatcacttttatattgtcacatgggccctctgcacagagtccgatggctcctcccggggaagcctgattttgtgacgtgtgtatagtaaatgcaggccctctggcagcaccataattggtcggttaccctgagcccagagctctgaaagcatctgtggaatgatcacgggacccttctcctctgagaaggctcccggctgcctccccgccaccgagcttgtagcctgaatgcctggctgtcgcatggagcattttgcttctggggtgtcttccttagccaaagggaacgtgtcatttgctcgaccctggcccacccttgccgcccagctgttgtgctgggcacagtctggggcacaggcctccatgatgaagacgcgtgggctgtcggtgctttcatccgtcacaaactggcacctgtacctgccagcaggagcatgatggggacttccatgctggaattgctccctgattaaaatgagatatggctatttggaagacactgcattttagccagtgtacctgggcacagactcggggctgccctgaagctgatgaaggcttgaaggacggaagggctgagccacatgaaggcagcactcagggccaggggagagagaagaggatcagcagtgcagccccaggatgcctcgcaggtaccctgcctccattttggttaccatccccacttattatgggctgtgggctgttatggtgatggatggatgtggatttggaaggggaccatgagagatgatgtattatgatgaactcatgatttaattctttggtgaaaata

SEQ ID NO: 129463 - DNA, 1960 bp, Homo sapiens
  Payload ID: 5320
  Gene Symbol: EVC
  Gene Name: Ellis van Creveld protein
  ENST ID: ENST00000509451
  CDS Start-End: 167-1774
cagggaaggggagagaagcaggagtcgggagactgcacaggccagaaagtctgcggagcgggccgcgcccctggcccgcccgggctccaagtcccgcgtcgccgccctggcggggacggtgcagcaggcggcgggatgcggcggggcggcagcctgagcgccccggatggcccgcggcggggcggcctgcaagagcgacgcgcggctgctgctggggcgggacgcgctgcggccggcgcccgccctgctggcccccgccgtgctgctgggcgccgcgctcggcctcggcctcggcctttggcttggctgccgcgcgggccgccagcgcacgcgacaccagaaagacgacactcaaaatctgctcaagaatttggagtctaatgcgcagaccccctcggaaactggctccccatcaaggaggaggaagagagaagtgcagatgtcgaaggacaaggaagctgttgatgaatgtgagccgccttccaacagcaatatcacagcattcgccctgaaggccaaagtcatctaccccatcaatcagaagttccggcctctggccgatggctcctccaacccgtctctgcatgaaaacttaaagcaggctgttttgccacaccagccggtagaggcctctccttccagcagtctggggagcctgagccagggtgagaaggacgactgcagctcctcatccagcgtccactcggccaccagcgatgacaggtttctcagccgcaccttcctccgggtgaacgccttccctgaagtgctggcctgcgagagtgtagacgttgacctgtgtatctacagccttcacttaaaagacctgctgcatttggacacggcactgaggcaggaaaagcatatgatgtttattcagatttttaaaatgtgcctccttgaccttcttcctaaaaagaagtcagatgatgaactataccagaagatcctttcaaaacaagaaaaagatttggaggaactagaaaagggacttcaggtcaaactgtcaaacacagaaatgtcgggggctggtgactctgagtacatcaccctggctgatgtggaaaagaaggagagagaatactctgaacagctaatcgataatatggaagctttctggaaacagatggcaaatatccagcactttcttgtggaccagtttaagtgttccagctccaaagcccgacagctgatgatgactctgacggaaagaatgattgcagccgaagggctattgtgcgattctcaggagctgcaggctctggacgccctggagaggacgatggggcgggcgcacatggcaaaagtgattgagtttctgaagctgcaagtccaggaggagaccaggtgccggctggctgccatctcccacggcctggagctgctggctggtgaggggaagctgtccgggcggcagaaggaggagctgctcacgcagcagcacaaggccttctggcaggaggcagagcgcttcagccgggagtttgtccagcgaggcaaagacctggtcacggcgtctctggctcaccaggtggagggaacggcaaaactcacgctggcccaagaggaggaacagagaagcttcctggctgaggcccagccgactgctgacccggaaaagtttctcgaggcttttcatgaggtcctggagaggcagaggctgatgcagtgtgacctggaggaagaggagaatgtcagagccaccgaggctgtggttgcactctgccagaaggccatgagaagacatagagacacagggaaggaggctgtttgaagacagaaggagggactggagtgatgcagccacaagccgaggaacacctgcagccaccaaaagccagaagagcccaggaagggcccctcccagagcctttggagggggcgaggctctgccaacaccttggtttcatactaatgccctccggaacggtgagagaataaacttcgttgtcttaatgca

SEQ ID NO: 129464 - DNA, 4828 bp, Homo sapiens
  Payload ID: 5321
  Gene Symbol: EVC2
  Gene Name: Ellis van Creveld syndrome 2
  Uniprot ID: Q86UK5
  ENST ID: ENST00000310917
  CDS Start-End: 733-4419
ttataaattctcagcttctcgaaccccatggccttgtccatgttaggtcaggaaaggcctgtccttggatggtctgggttatggggagagaggctgccaggggccaggctcgctggcctgagactttatagacagcctaacagcctgccccgcaggaaggctggcgggagtggagccctcccccgtcaacaggtgtcagctgtcacccaggacctaggcagggatgaggaagcacacaaaaggctccaccagtccccctttttgtgtctttctcctcctcctcctcctgcgtcccttggcaaagcaaatccctgtcccctcggagagttcagggagagcttgcttagggctgcgacttcagacaccagctcccctctttctaggtccccagagaggtggcccagcggctggcctgtttcccactgggaatgcgaggggcacccgggccggcccagggctgacccacagcaggctcgggcagtgggtgctcagctggtctgcactgaacgcaaccggaagtgagggtccttttccttctctgcggccaccccctcctccccgagctttcctgaaccttctgggtgctccaggactcccggccccgcgctccaaatgcttctccgttttctaagcggggatggggaaactctggattcacatccgtgtgtcaggaaaccgttcccaggggaagtgcgtctgagctgaggcttacagacccaggacttgccctgtatgatttggcccaaagtggaatgctgtcactttaagactgcagtggaagcaccacttggaatgaaattggacaagaaaatggaagtcttcatcccactctcaacttctgcagcctctagtgggccatgggctcattccttatttgcttttataccctcctggcctaagaagaacttatttaaaagagagtctcctataacacaccgcctgtatggggacatttcaagagaagttcaagggacttctgaaaatggagtaatttttcagaaatgtgcactggtgtctgggtcgagtgaagcacagacagcccgcatatggctgcttgttaacaacaccaagacaacctcgtcagccaacctctcggagctgctcttgctggacagcattgctggtctcaccatttgggactctgtgggaaacaggacctcggaaggattccaggcttttagcaagaagtttctgcaagtgggagatgcctttgctgtcagctacgcagccacgctccaggctggagacctcgggaacggggagagcctcaagcttcctgcccaactcacctttcagagctcgtcacggaacagaacacagctgaaagtgcttttttccataacagcagaagaaaacgtaacggttctgccgcaccacggcctccacgcagcagggttcttcattgccttcctcctctcccttgtgctgacctgggctgccctcttcctcatggttcgctatcagtgtctgaagggaaacatgctcaccagacatcgggtttggcagtatgagagcaagctggaacccttgccgttcacctcagctgatggcgtgaatgaggacctttcccttaacgaccaaatgatagacattctgtcttccgaggaccctgggagcatgcttcaagccttagaagagttggagattgcaaccctgaatcgggcagatgcagatctggaggcttgtcgaacacaaatcagcaaggatatcattgcccttctgctgaaaaatctcaccagcagtggccacctctcaccccaagtagagagaaaaatgagtgctgttttcaaaaagcagtttctattgctggaaaatgaaatacaagaggagtacgatcggaagatggtggcattgacagctgaatgtgacctggaaacaagaaagaagatggaaaaccagtaccagagagagatgatggcaatggaggaagcagaagagttgctgaaacgtgctggtgagaggtctgctgtagagtgcagcaaccttctgcggaccctccatggcctggaacaggagcacttgaggaagtctctcgctttgcaacaagaagaagactttgccaaagctcacagacagctggctgttttccagagaaatgaactgcacagtatcttttttacccagataaaaagtgctattttcaaaggggaattgaaaccagaggcagctaaaatgctgctgcaaaattattctaaaatacaggagaatgtagaagagttaatggactttttccaggctagtaagaggtatcatctaagtaaaagatttggccacagggaatatctggtccagaacctccagtcatcagagacccgtgtgcagggccttctgagcaccgctgcagcccagctgactcacctcattcagaagcacgagagagcagggtacctggatgaagaccaaatggaaatgctattggagcgggctcagacagaagtcttttcaatcaagcagaagttggacaatgacttaaagcaggaaaagaaaaagctccaccaaaaattaataactaagagaagacgagagttgctacaaaagcacagggagcagcgtagggagcaggcgtccgtcggcgaggccttccgaacggttgaggatgccggccagtacctgcaccagaagaggagcctgatggaggagcacggtgccaccctggaggagctgcaggagcgtctggaccaggccgccctggacgatctcaggaccctgaccctttcgctgtttgaaaaggccaccgacgagctgcggcgcctgcagaactcagccatgacccaggagctgctcaagcgtggggtgccctggctcttcctgcagcagatcctggaggagcacggcaaggagatggctgcacgggccgagcagctggagggggaggagagggacagggaccaggagggtgtccagagcgtgaggcagagactgaaggatgacgctcctgaggccgtgacagaggagcaggcagagctgcgacgctgggagcacctgatcttcatgaagctctgctcctcagtcttctccctgtctgaagaggagctgctcaggatgaggcaggaggtccatggctgctttgctcagatggacaggagcttggccctccccaagatccgggcccgagttctgctgcagcaatttcagactgcgtggcgagaagcagagttcgtgaagctggaccaggccgtggctgcccctgagctgcagcaacagtccaaggtgagaaagtcacggtccaagagtaaaagcaagggagagcttctgaagaagtgcatcgaagacaaaattcacctctgtgaggaacaggcctctgaagacctggtggaaaaggttcgaggtgaattgctgcgggagagagtgcagcggatggaggcacaggagggaggctttgcacagtcgcttgttgctctgcagttccagaaggcgtcccgggtgaccgagactctgtcggcctacaccgccctcctcagcatccaggacttgctcctggaagagctgagtgcatctgagatgctgaccaagtcggcctgcacacagatcctggagtcgcacagccgggagctccaggagttggagaggaagctggaggaccagctggtgcagcaggaggcagcccagcagcagcaggccctggcgagctggcagcagtgggtggccgatgggcccgggattctgaacgaacctggggaggtggattctgaaaggcaggtctctactgtcctgcaccaagccctgagcaagagccagacattactggagcaacatcagcagtgtttgagagaggaacaacagaacagtgtcgtgctagaagacttgttggaaaacatggaggcagacacctttgcaaccctgtgcagccaggagctgagactggcatcgtacctggcgaggatggccatggtgcccggggccacgcttcgccggctcctgagtgtggtactgcccacagcctcacagcctcagctgctggccctgctggattcggccaccgagagacatgtggaccacgcagctgagagcgatggcggagcggagcaggccgacgtgggcaggcggaggaaacaccagagctggtggcaagccttagatggcaaactgcgaggagatctgataagcagaggattagaaaagatgctgtgggcccgcaagagaaagcagagcatattaaagaagacatgtctccctctcagagagaggatgatattctctggaaaaggaagttggccacacctgtcactggagcccattggcgaactggcccctgtacccattgtaggggcagaaaccattgatctattaaacacaggagagaagctctttatattcagaaatccaaaggagccagagatctcactgcacgttcctcccaggaaaaagaagaactttttgaatgccaaaaaggccatgagggccttgggcatggactagcccaagggaaagacctgcgggagcatctgaagagagaagggatgattttctcctgcccgccggtgtttgtgtgtttataatgcacaactcgcaaatataaattgcacatgcagaaggcacagaccccgtagcgcatgccaacttgcagggactcggtttaatcttgtctcatgaatttccagatggcccactctcttccatatcacaaggacataaacactccttctttcagccccacctccccagggccctggaggagacccccaccctgcaatccacaccccatcctctgctgcagaagctatggtctgtgtggtgacagccagattctctactcttatgttttgtatttgttacatattctatttttataaagggaattttaaaaaataaatgtgttttgcacaaa

SEQ ID NO: 129465 - DNA, 4390 bp, Homo sapiens
  Payload ID: 5321
  Gene Symbol: EVC2
  Gene Name: Ellis van Creveld syndrome 2
  Uniprot ID: Q86UK5
  ENST ID: ENST00000344408
  CDS Start-End: 55-3981
gctccagcgactcggcggcacccgccgctttgaggtagcgggtcccgacaggcgatggacccctcgggctcccgggggcgccccacgtgggtgctggccgggggtctcctggcagtggccctggcgctggggggccgaggctgtctcggcgccagctcacgtccccgctggcgccccctcggcgcgcagccaccccgggatccccaggtggctcctaggtctgggcccggcctgaggatccctccggggcggagcggggcggggcccgagagcagcacgcaggacttgccctgtatgatttggcccaaagtggaatgctgtcactttaagactgcagtggaagcaccacttggaatgaaattggacaagaaaatggaagtcttcatcccactctcaacttctgcagcctctagtgggccatgggctcattccttatttgcttttataccctcctggcctaagaagaacttatttaaaagagagtctcctataacacaccgcctgtatggggacatttcaagagaagttcaagggacttctgaaaatggagtaatttttcagaaatgtgcactggtgtctgggtcgagtgaagcacagacagcccgcatatggctgcttgttaacaacaccaagacaacctcgtcagccaacctctcggagctgctcttgctggacagcattgctggtctcaccatttgggactctgtgggaaacaggacctcggaaggattccaggcttttagcaagaagtttctgcaagtgggagatgcctttgctgtcagctacgcagccacgctccaggctggagacctcgggaacggggagagcctcaagcttcctgcccaactcacctttcagagctcgtcacggaacagaacacagctgaaagtgcttttttccataacagcagaagaaaacgtaacggttctgccgcaccacggcctccacgcagcagggttcttcattgccttcctcctctcccttgtgctgacctgggctgccctcttcctcatggttcgctatcagtgtctgaagggaaacatgctcaccagacatcgggtttggcagtatgagagcaagctggaacccttgccgttcacctcagctgatggcgtgaatgaggacctttcccttaacgaccaaatgatagacattctgtcttccgaggaccctgggagcatgcttcaagccttagaagagttggagattgcaaccctgaatcgggcagatgcagatctggaggcttgtcgaacacaaatcagcaaggatatcattgcccttctgctgaaaaatctcaccagcagtggccacctctcaccccaagtagagagaaaaatgagtgctgttttcaaaaagcagtttctattgctggaaaatgaaatacaagaggagtacgatcggaagatggtggcattgacagctgaatgtgacctggaaacaagaaagaagatggaaaaccagtaccagagagagatgatggcaatggaggaagcagaagagttgctgaaacgtgctggtgagaggtctgctgtagagtgcagcaaccttctgcggaccctccatggcctggaacaggagcacttgaggaagtctctcgctttgcaacaagaagaagactttgccaaagctcacagacagctggctgttttccagagaaatgaactgcacagtatcttttttacccagataaaaagtgctattttcaaaggggaattgaaaccagaggcagctaaaatgctgctgcaaaattattctaaaatacaggagaatgtagaagagttaatggactttttccaggctagtaagaggtatcatctaagtaaaagatttggccacagggaatatctggtccagaacctccagtcatcagagacccgtgtgcagggccttctgagcaccgctgcagcccagctgactcacctcattcagaagcacgagagagcagggtacctggatgaagaccaaatggaaatgctattggagcgggctcagacagaagtcttttcaatcaagcagaagttggacaatgacttaaagcaggaaaagaaaaagctccaccaaaaattaataactaagagaagacgagagttgctacaaaagcacagggagcagcgtagggagcaggcgtccgtcggcgaggccttccgaacggttgaggatgccggccagtacctgcaccagaagaggagcctgatggaggagcacggtgccaccctggaggagctgcaggagcgtctggaccaggccgccctggacgatctcaggaccctgaccctttcgctgtttgaaaaggccaccgacgagctgcggcgcctgcagaactcagccatgacccaggagctgctcaagcgtggggtgccctggctcttcctgcagcagatcctggaggagcacggcaaggagatggctgcacgggccgagcagctggagggggaggagagggacagggaccaggagggtgtccagagcgtgaggcagagactgaaggatgacgctcctgaggccgtgacagaggagcaggcagagctgcgacgctgggagcacctgatcttcatgaagctctgctcctcagtcttctccctgtctgaagaggagctgctcaggatgaggcaggaggtccatggctgctttgctcagatggacaggagcttggccctccccaagatccgggcccgagttctgctgcagcaatttcagactgcgtggcgagaagcagagttcgtgaagctggaccaggccgtggctgcccctgagctgcagcaacagtccaaggtgagaaagtcacggtccaagagtaaaagcaagggagagcttctgaagaagtgcatcgaagacaaaattcacctctgtgaggaacaggcctctgaagacctggtggaaaaggttcgaggtgaattgctgcgggagagagtgcagcggatggaggcacaggagggaggctttgcacagtcgcttgttgctctgcagttccagaaggcgtcccgggtgaccgagactctgtcggcctacaccgccctcctcagcatccaggacttgctcctggaagagctgagtgcatctgagatgctgaccaagtcggcctgcacacagatcctggagtcgcacagccgggagctccaggagttggagaggaagctggaggaccagctggtgcagcaggaggcagcccagcagcagcaggccctggcgagctggcagcagtgggtggccgatgggcccgggattctgaacgaacctggggaggtggattctgaaaggcaggtctctactgtcctgcaccaagccctgagcaagagccagacattactggagcaacatcagcagtgtttgagagaggaacaacagaacagtgtcgtgctagaagacttgttggaaaacatggaggcagacacctttgcaaccctgtgcagccaggagctgagactggcatcgtacctggcgaggatggccatggtgcccggggccacgcttcgccggctcctgagtgtggtactgcccacagcctcacagcctcagctgctggccctgctggattcggccaccgagagacatgtggaccacgcagctgagagcgatggcggagcggagcaggccgacgtgggcaggcggaggaaacaccagagctggtggcaagccttagatggcaaactgcgaggagatctgataagcagaggattagaaaagatgctgtgggcccgcaagagaaagcagagcatattaaagaagacatgtctccctctcagagagaggatgatattctctggaaaaggaagttggccacacctgtcactggagcccattggcgaactggcccctgtacccattgtaggggcagaaaccattgatctattaaacacaggagagaagctctttatattcagaaatccaaaggagccagagatctcactgcacgttcctcccaggaaaaagaagaactttttgaatgccaaaaaggccatgagggccttgggcatggactagcccaagggaaagacctgcgggagcatctgaagagagaagggatgattttctcctgcccgccggtgtttgtgtgtttataatgcacaactcgcaaatataaattgcacatgcagaaggcacagaccccgtagcgcatgccaacttgcagggactcggtttaatcttgtctcatgaatttccagatggcccactctcttccatatcacaaggacataaacactccttctttcagccccacctccccagggccctggaggagacccccaccctgcaatccacaccccatcctctgctgcagaagctatggtctgtgtggtgacagccagattctctactcttatgttttgtatttgttacatattctatttttataaagggaattttaaaaaataaatgtgttttgcacaaa

SEQ ID NO: 129466 - DNA, 4079 bp, Homo sapiens
  Payload ID: 5321
  Gene Symbol: EVC2
  Gene Name: Ellis van Creveld syndrome 2
  ENST ID: ENST00000509670
  CDS Start-End: 342-1700
tgctcagctggtctgcactgaacgcaaccggaagtgagggtccttttccttctctgcggccaccccctcctccccgagctttcctgaaccttctgggtgctccaggactcccggccccgcgctccaaatgcttctccgttttctaagcggggatggggaaactctggattcacatccgtgtgtcaggaaaccgttcccaggggaagtgcgtctgagctgaggcttacagacccaggtgtatcccgctcacggccagaaagcttcgagggaaactggagaccttcctcggggtgtggcagctgccggcttggacttcaccagcgaccctggacttgccctgtatgatttggcccaaagtggaatgctgtcactttaagactgcagtggaagcaccacttggaatgaaattggacaagaaaatggaagtcttcatcccactctcaacttctgcagcctctagtgggccatgggctcattccttatttgcttttataccctcctggcctaagaagaacttatttaaaagagagtctcctataacacaccgcctgtatggggacatttcaagagaagttcaagggacttctgaaaatggagtaatttttcagaaatgtgcactggtgtctgggtcgagtgaagcacagacagcccgcatatggctgcttgttaacaacaccaagacaacctcgtcagccaacctctcggagctgctcttgctggacagcattgctggtctcaccatttgggactctgtgggaaacaggacctcggaaggattccaggcttttagcaagaagtttctgcaagtgggagatgcctttgctgtcagctacgcagccacgctccaggctggagacctcgggaacggggagagcctcaagcttcctgcccaactcacctttcagagctcgtcacggaacagaacacagctgaaagtgcttttttccataacagcagaagaaaacgtaacggttctgccgcaccacggcctccacgcagcagggttcttcattgccttcctcctctcccttgtgctgacctgggctgccctcttcctcatggttcgctatcagtgtctgaagggaaacatgctcaccagacatcgggtttggcagtatgagagcaagctggaacccttgccgttcacctcagctgatggcgtgaatgaggacctttcccttaacgaccaaatgatagacattctgtcttccgaggaccctgggagcatgcttcaagccttagaagagttggagattgcaaccctgaatcgggcagatgcagatctggaggcttgtcgaacacaaatcagcaaggatatcattgcccttctgctgaaaaatctcaccagcagtggccacctctcaccccaagtagagagaaaaatgagtgctgttttcaaaaagcagtttctattgctggaaaatgaaatacaagaggagtacgatcggaagatggtggcattgacagctgaatgtgacctggaaacaagaaagaagatggaaaaccagtaccagagagagatgatggcaatggaggaagcagaagagttgctgaaacgtgctgtctgctgtagagtgcagcaaccttctgcggaccctccatggcctggaacaggagcacttgaggaagtctctcgctttgcaacaagaagaagactttgccaaagctcacagacagctggctgttttccagagaaatgaactgcacagtatcttttttacccagataaaaagtgctattttcaaaggggaattgaaaccagaggcagctaaaatgctgctgcaaaattattctaaaatacaggagaatgtagaagagttaatggactttttccaggctagtaagaggtatcatctaagtaaaagatttggccacagggaatatctggtccagaacctccagtcatcagagacccgtgtgcagggccttctgagcaccgctgcagcccagctgactcacctcattcagaagcacgagagagcagggtacctggatgaagaccaaatggaaatgctattggagcgggctcagacagaagtcttttcaatcaagcagaagttggacaatgacttaaagcaggaaaagaaaaagctccaccaaaaattaataactaagagaagacgagagttgctacaaaagcacagggagcagcgtagggagcaggcgtccgtcggcgaggccttccgaacggttgaggatgccggccagtacctgcaccagaagaggagcctgatggaggagcacggtgccaccctggaggagctgcaggagcgtctggaccaggccgccctggacgatctcaggaccctgaccctttcgctgtttgaaaaggccaccgacgagctgcggcgcctgcagaactcagccatgacccaggagctgctcaagcgtggggtgccctggctcttcctgcagcagatcctggaggagcacggcaaggagatggctgcacgggccgagcagctggagggggaggagagggacagggaccaggagggtgtccagagcgtgaggcagagactgaaggatgacgctcctgaggccgtgacagaggagcaggcagagctgcgacgctgggagcacctgatcttcatgaagctctgctcctcagtcttctccctgtctgaagaggagctgctcaggatgaggcaggaggtccatggctgctttgctcagatggacaggagcttggccctccccaagatccgggcccgagttctgctgcagcaatttcagactgcgtggcgagaagcagagttcgtgaagctggaccaggccgtggctgcccctgagctgcagcaacagtccaaggtgagaaagtcacggtccaagagtaaaagcaagggagagcttctgaagaagtgcatcgaagacaaaattcacctctgtgaggaacaggcctctgaagacctggtggaaaaggttcgaggtgaattgctgcgggagagagtgcagcggatggaggcacaggagggaggctttgcacagtcgcttgttgctctgcagttccagaaggcgtcccgggtgaccgagactctgtcggcctacaccgccctcctcagcatccaggacttgctcctggaagagctgagtgcatctgagatgctgaccaagtcggcctgcacacagatcctggagtcgcacagccgggagctccaggagttggagaggaagctggaggaccagctggtgcagcaggaggcagcccagcagcagcaggccctggcgagctggcagcagtgggtggccgatgggcccgggattctgaacgaacctggggaggtggattctgaaaggcaggtctctactgtcctgcaccaagccctgagcaagagccagacattactggagcaacatcagcagtgtttgagagaggaacaacagaacagtgtcgtgctagaagacttgttggaaaacatggaggcagacacctttgcaaccctgtgcagccaggagctgagactggcatcgtacctggcgaggatggccatggtgcccggggccacgcttcgccggctcctgagtgtggtactgcccacagcctcacagcctcagctgctggccctgctggattcggccaccgagagacatgtggaccacgcagctgagagcgatggcggagcggagcaggccgacgtgggcaggcggaggaaacaccagagctggtggcaagccttagatggcaaactgcgaggagatctgataagcagaggattagaaaagatgctgtgggcccgcaagagaaagcagagcatattaaagaagacatgtctccctctcagagagaggatgatattctctggaaaaggaagttggccacacctgtcactggagcccattggcgaactggcccctgtacccattgtaggggcagaaaccattgatctattaaacacaggagagaagctctttatattcagaaatccaaaggagccagagatctcactgcacgttcctcccaggaaaaagaagaactttttgaatgccaaaaaggccatgagggccttgggcatggactagcccaagggaaagacctgcgggagcatctgaagagagaagggatgattttctcctgcccg

SEQ ID NO: 129467 - DNA, 4456 bp, Homo sapiens
  Payload ID: 5321
  Gene Symbol: EVC2
  Gene Name: Ellis van Creveld syndrome 2
  ENST ID: ENST00000475313
  CDS Start-End: 733-4233
ttataaattctcagcttctcgaaccccatggccttgtccatgttaggtcaggaaaggcctgtccttggatggtctgggttatggggagagaggctgccaggggccaggctcgctggcctgagactttatagacagcctaacagcctgccccgcaggaaggctggcgggagtggagccctcccccgtcaacaggtgtcagctgtcacccaggacctaggcagggatgaggaagcacacaaaaggctccaccagtccccctttttgtgtctttctcctcctcctcctcctgcgtcccttggcaaagcaaatccctgtcccctcggagagttcagggagagcttgcttagggctgcgacttcagacaccagctcccctctttctaggtccccagagaggtggcccagcggctggcctgtttcccactgggaatgcgaggggcacccgggccggcccagggctgacccacagcaggctcgggcagtgggtgctcagctggtctgcactgaacgcaaccggaagtgagggtccttttccttctctgcggccaccccctcctccccgagctttcctgaaccttctgggtgctccaggactcccggccccgcgctccaaatgcttctccgttttctaagcggggatggggaaactctggattcacatccgtgtgtcaggaaaccgttcccaggggaagtgcgtctgagctgaggcttacagacccaggacttgccctgtatgatttggcccaaagtggaatgctgtcactttaagactgcagtggaagcaccacttggaatgaaattggacaagaaaatggaagtcttcatcccactctcaacttctgcagcctctagtgggccatgggctcattccttatttgcttttataccctcctggcctaagaagaacttatttaaaagagagtctcctataacacaccgcctgtatggggacatttcaagagaagttcaagggacttctgaaaatggagtaatttttcagaaatgtgcactggtgtctgggtcgagtgaagcacagacagcccgcatatggctgcttgttaacaacaccaagacaacctcgtcagccaacctctcggagctgctcttgctggacagcattgctggtctcaccatttgggactctgtgggaaacaggacctcggaaggattccaggcttttagcaagaagtttctgcaagtgggagatgcctttgctgtcagctacgcagccacgctccaggctggagacctcgggaacggggagagcctcaagcttcctgcccaactcacctttcagagctcgtcacggaacagaacacagctgaaagtgcttttttccataacagcagaagaaaacgtaacggttctgccgcaccacggcctccacgcagcagggttcttcattgccttcctcctctcccttgtgctgacctgggctgccctcttcctcatggttcgctatcagtgtctgaagggaaacatgctcaccagacatcgggtttggcagtatgagagcaagctggaacccttgccgttcacctcagctgatggcgtgaatgaggacctttcccttaacgaccaaatgatagacattctgtcttccgaggaccctgggagcatgcttcaagccttagaagagttggagattgcaaccctgaatcgggcagatgcagatctggaggcttgtcgaacacaaatcagcaaggatatcattgcccttctgctgaaaaatctcaccagcagtggccacctctcaccccaagtagagagaaaaatgagtgctgttttcaaaaagcagtttctattgctggaaaatgaaatacaagaggagtacgatcggaagatggtggcattgacagctgaatgtgacctggaaacaagaaagaagatggaaaaccagtaccagagagagatgatggcaatggaggaagcagaagagttgctgaaacgtgctggtgagaggtctgctgtagagtgcagcaaccttctgcggaccctccatggcctggaacaggagcacttgaggaagtctctcgctttgcaacaagaagaagactttgccaaagctcacagacagctggctgttttccagagaaatgaactgcacagtatcttttttacccagataaaaagtgctattttcaaaggggaattgaaaccagaggcagctaaaatgctgctgcaaaattattctaaaatacaggagaatgtagaagagttaatggactttttccaggctagtaagaggtatcatctaagtaaaagatttggccacagggaatatctggtccagaacctccagtcatcagagacccgtgtgcagggccttctgagcaccgctgcagcccagctgactcacctcattcagaagcacgagagagcagggtacctggatgaagaccaaatggaaatgctattggagcgggctcagacagaagtcttttcaatcaagcagaagttggacaatgacttaaagcaggaaaagaaaaagctccaccaaaaattaataactaagagaagacgagagttgctacaaaagcacagggagcagcgtagggagcaggcgtccgtcggcgaggccttccgaacggttgaggatgccggccagtacctgcaccagaagaggagcctgatggaggagcacggtgccaccctggaggagctgcaggagcgtctggaccaggccgccctggacgatctcaggaccctgaccctttcgctgtttgaaaaggccaccgacgagctgcggcgcctgcagaactcagccatgacccaggagctgctcaagcgtggggtgccctggctcttcctgcagcagatcctggaggagcacggcaaggagatggctgcacgggccgagcagctggagggggaggagagggacagggaccaggagggtgtccagagcgtgaggcagagactgaaggatgacgctcctgaggccgtgacagaggagcaggcagagctgcgacgctgggagcacctgatcttcatgaagctctgctcctcagtcttctccctgtctgaagaggagctgctcaggatgaggcaggaggtccatggctgctttgctcagatggacaggagcttggccctccccaagatccgggcccgagttctgctgcagcaatttcagactgcgtggcgagaagcagagttcgtgaagctggaccaggccgtggctgcccctgagctgcagcaacagtccaaggtgagaaagtcacggtccaagagtaaaagcaagggagagcttctgaagaagtgcatcgaagacaaaattcacctctgtgaggaacaggcctctgaagacctggtggaaaaggttcgaggtgaattgctgcgggagagagtgcagcggatggaggcacaggagggaggctttgcacagtcgcttgttgctctgcagttccagaaggcgtcccgggtgaccgagactctgtcggcctacaccgccctcctcagcatccaggacttgctcctggaagagctgagtgcatctgagatgctgaccaagtcggcctgcacacagatcctggagtcgcacagccgggagctccaggagttggagaggaagctggaggaccagctggtgcagcaggaggcagcccagcagcagcaggccctggcgagctggcagcagtgggtggccgatgggcccgggattctgaacgaacctggggaggtggattctgaaaggcaggtctctactgtcctgcaccaagccctgagcaagagccagacattactggagcaacatcagcagtgtttgagagaggaacaacagaacagtgtcgtgctagaagacttgttggaaaacatggaggcagacacctttgcaaccctgtgcagccaggagctgagactggcatcgtacctggcgaggatggccatggtgcccggggccacgcttcgccggctcctgagtgtggtactgcccacagcctcacagcctcagctgctggccctgctggattcggccaccgagagacatgtggaccacgcagctgagagcgatggcggagcggagcaggccgacgtgggcaggcggaggaaacaccagagctggtggcaagccttagatggcaaactgcgaggagatctgataagcagaggattagaaaagatgctgtgggcccgcaagagaaagcagaggtcagggaaccaagagagcttctggcagtacctggtagggactccagagattgggttaattgagtggatgtctgaaaaatgagaacttacctgcaagtttgtcccaaacatagatgagttacctcggactgagcagtgcaatcgttggagcctctgtttgcgtaatatggccctggaacaccaaggaagggcctgggagagctgctgttgttcctatgagcccagctgtgggcacactgcgctgacacaatgtcatggccctcatgacgaggatgacttggaggagccaatcctgacaactgacc

SEQ ID NO: 129468 - DNA, 8091 bp, Homo sapiens
  Payload ID: 5322
  Gene Symbol: ELMSAN1
  Gene Name: ELM2 and Myb/SANT-like domain containing 1
  Uniprot ID: Q6PJG2
  ENST ID: ENST00000286523
  CDS Start-End: 784-3921
gatgaagtggtagagctggttcctgctcgccgcggtgccgcgcgcgccggccggccgctgggcgctccgcgctcccagcctcgagttgtgcaatcctttgtagcacgccagagtcctcctcctccgctgttgcctctcgccctctctctttttttttttttcaagctgtgagctcaaccgatgagtcagagccgtgcaatcctgacactgcatcgcaggactgggggtgacacggagggaggcagagcgctcgcgaggcggacggcacgggtgcggggcgcgccgaggctcctgcatcgcaagcggggggtgacagcccgcgcgtcccgcccgggccctgccagcaaacttctcagcctcgggaggcgcgggctggcggaagccccgcgagcgccgcggggaggcgacggcgcctgtttgtttttaaaatcgggagtgcgtgcaggcggctggagtcccggaggcgaccgaaggcggcgacccgcggcggaagggggacagccgagcccggagcccggagcccgggcaagagctgggtgccagaaccctgtggagcatcatgaactgggaagagtagctgagccccagagcctctctggaagagaaaggaagagccagcagttctttctcccagtgtccgacctcactgtccagcgtcttcctctgcccctgctctgccctccctggctcctggactagagcccggcttccagcaggacgtttccccaggggatgggcgactgttgaaggggatctcaccgccagggctcagttggccacatcatgaacctccaggcccagcccaaggctcagaacaagcggaagcgttgcctcttcgggggccaggaaccagctcccaaggagcagccccctcccctgcagcccccccagcagtccatcagagtgaaggaggagcagtacctcgggcacgagggtccaggaggggcagtctccacctctcagcctgtggaactgccccctcctagcagcctggccctgctgaactctgtggtatatgggcctgagcggacctcagcagccatgctgtcccagcaggtggcctcagtaaagtggcccaactctgtgatggctccagggcggggcccggagcgtggaggaggtgggggtgtcagtgacagcagctggcagcagcagccaggccagcctccaccccattcaacatggaactgccacagtctgtccctctacagtgcaaccaaggggagcccgcatcctggagtgggagtcccgacttactataaccaccctgaggcactgaagcgggagaaagcggggggcccacagctggaccgctatgtgcgaccaatgatgccacagaaggtgcagctggaggtagggcggccccaggcacccctgaattctttccacgcagccaagaaacccccaaaccagtcactgcccctgcaacccttccagctggcattcggccaccaggtgaaccggcaggtcttccggcagggcccaccgcccccaaacccggtggctgccttccctccacagaagcagcagcagcagcagcaaccacagcagcagcagcagcagcagcaggcagccctaccccagatgccgctctttgagaacttctattccatgccgcagcaaccctcgcagcaaccccaggactttggcctgcagccagctgggccactgggacagtcccacctggctcaccacagcatggcaccctaccccttcccccccaacccagatatgaacccagaactgcgcaaggcccttctgcaggactcagccccgcagccagcgctacctcaggtccagatccccttcccccgccgctcccgccgcctctctaaggagggtatcctgcctcccagcgccctggatggggctggcacccagcctgggcaggaggccactggcaacctgttcctacatcactggcccctgcagcagccgccacctggctccctggggcagccccatcctgaagctctgggattcccgctggagctgagggagtcgcagctactgcctgatggggagagactagcacccaatggccgggagcgagaggctcctgccatgggcagcgaggagggcatgagggcagtgagcacaggggactgtgggcaggtgctacggggcggagtgatccagagcacgcgacggaggcgccgggcatcccaggaggccaatttgctgaccctggcccagaaggctgtggagctggcctcactgcagaatgcaaaggatggcagtggttctgaagagaagcggaaaagtgtattggcctcaactaccaagtgtggggtggagttttctgagccttccttagccaccaagcgagcacgagaagacagtgggatggtacccctcatcatcccagtgtctgtgcctgtgcgaactgtggacccaactgaggcagcccaggctggaggtcttgatgaggacgggaagggtcctgaacagaaccctgctgagcacaagccatcagtcatcgtcacccgcaggcggtccacccgaatccccgggacagatgctcaagctcaggcagaggacatgaatgtcaagttggagggggagccttccgtgcggaaaccaaagcagcggcccaggcccgagcccctcatcatccccaccaaggcgggcactttcatcgcccctcccgtctactccaacatcaccccataccagagccacctgcgctctcccgtgcgcctagctgaccacccctctgagcggagctttgagctacctccctacacgccgccccccatcctcagccctgtgcgggaaggctctggcctctacttcaatgccatcatatcaaccagcaccatccctgcccctcctcccatcacgcctaagagtgcccatcgcacgctgctccggactaacagtgctgaagtaaccccgcctgtcctctctgtgatgggggaggccaccccagtgagcatcgagccacggatcaacgtgggctcccggttccaggcagaaatccccttgatgagggaccgtgccctggcagctgcagatccccacaaggctgacttggtgtggcagccatgggaggacctagagagcagccgggagaagcagaggcaagtggaagacctgctgacagccgcctgctccagcattttccctggtgctggcaccaaccaggagctggccctgcactgtctgcacgaatccagaggagacatcctggaaacgctgaataagctgctgctgaagaagcccctgcggccccacaaccatccgctggcaacttatcactacacaggctctgaccagtggaagatggccgagaggaagctgttcaacaaaggcattgccatctacaagaaggatttcttcctggtgcagaagctgatccagaccaagaccgtggcccagtgcgtggagttctactacacctacaagaagcaggtgaaaatcggccgcaatgggactctaacctttggggatgtggatacgagcgatgagaagtcggcccaggaagaggttgaagtggatattaagacttcccaaaagttcccaagggtgcctcttcccagaagagagtccccaagtgaagagaggctggagcccaagagggaggtgaaggagcccaggaaggagggggaggaggaggtgccagagatccaagagaaggaggagcaggaagaggggcgagagcgcagcaggcgggcagcggcagtcaaagccacgcagacactacaggccaatgagtcggccagtgacatcctcatcctccggagccacgagtccaacgcccctgggtctgccggtggccaggcctcggagaagccaagggaagggacagggaagtcacgaagggcactacctttttcagagaagaagaaaaaaacagagacattcagtaagacccagaatcaggagaacactttcccctgtaaaaaatgtggcaggtaaggtgggcagcgctgtccccgctgggacccccgcgggctggtgcgcggagggggcgggggtggggtggaggggagggggaagaggtacaggcggtgtccgcctcgtttctggttggctcagcgggtttctagggctgtgacgtcatggggcagctttcggaaaatgacgcgagctggccggccgcggctgtgcagcgtgggggtgaaggtgaaggctggggctcctcgcgcacccgcgctgggggcccccgggtgggctaggccggttctgagcaacccccacccggctgcagggtgttttacaaggtgaagagccgcagtgcgcatatgaagagccacgcagagcaggagaagaaggctgcagcgctgaggctgaaggagaaagaggccgctgctgccgccgccgccgcccaccagcaggccctgcgggaggagagcggtgcgggcgacaagggctgagcgcgggagccaggctggcccagtcctgggcctcggcccttcccgcaccgccgccagcgcccgcagacaccctggcatctcaagagggagtgaggagaggattgcagggacttttccctgcgaaacaaatgagacaatgacataaacggctcttttatttatgaaggccctgggagcagcgttaagggctccaggatccagctctctttgcatttggtctgtcggaagctgtcctcgtgctttcctggaccgggagagtcccggtcccctcgggagggactccaccgcctctcacactccgatttctgctgctctgctgccccgcagtcttttccctttatttgcttccccctcctcccctcggcctccaggaagccaccgtggccggccaagcacaagctcacccactttggagcagcatttctcctccccagaggacctcgaaggctgcaacggccctgccccaagccccagaaaaagaaactcttggagggagtctgcgggcttctctgagaaggggcgcagcctgacacctgtgctgtccctgcagtctctaggcctgtctgagctgctcccgtgaccgtgtcctgagtggccacctcctccttgggagggaggccgcggcaggtactctccctttgctgcttgctggcggccttgctagggctagaaagttttctcagcgttgggggaggggctagcgttcttgtccaaagcactcatcctgctgcagggaagggagctgtacggaggctggaagctgcagggttaggcccgagagagcttttgacaagcctggctcttcctgcttcccacctttttggctgaatacctttgggtcctggaggctgccaagggcgcttcgccttgagcaggtcccggagaggctcagcctgcccctcctggggccagcctccttgcctctgctctgacctcagcagctacacctaaccccaccgcaccctacccagtgtcgatatccacaacccagcccccaggcctgcactttggagatttctggatccttccctgggagggagaggtctcctaactcgattggacaggagccttcattccttgactcgtgtcatttgggagctatttatttattcttagtatttaatttttaacatcctctcagggaccaggggcctcctgcttttcagaggcccgagtgcatttatcccaaaacgaggcatcttgacatcccctatccccaccccctaaattcccaaggccctaaggtccctcacctggttgctctggaagctcttgctgataggaatgatagcaacactgaaagagcgtgggaaggtggagggtgtcaccagacccacacagagcaagggagattaaggcagttcttgctgccccttctctggctgtgctttgcctgagggaagagttggcaagaggccagaattctagtttggtttatggggcctggattctggcttgaagaagccatatttggcatgggtgaagtgaaagggccaggaggttctggaggccccttcacttccagtcccatagcggggctcagctatttttctgatcttattcaactttagttgtgcaaaagaaattctaagtgaatgcgcgtatgacaggtcaacgtattaggaaggagccagaaagtattcatactgctactccttatgagatagccaagaagcatcatgtcagtaactgggagtggagagggagttttgttttgaaactatgcaggtatttttcagcatccatttgtacattagtatggttctacaggaccccagctgtggaagtaacaaatttcttctccctccagactcttggatgactacctagatccccagcttaccggttagtttcctccacaggcttccatgagctcagtgtcccaagacagcaaaaatctggtataccctgtagaagcaggggggtagcaaatttaggctctcttcgaaattacttgtacaatacgagtgccttcgcagcttagccccaaagtgctacttatgtttcccaaggtcttttctattcaaatcatatttggtttcaggcccctttatgggcatacggtaacagaaacctccatcattcatatgagacccttttgtcagtggtaacatcttgtacttggaaaaaaaatttttttttttttttttttttttttttgagacagagtctcattctgtcgcccaggctggagtgcagtggtgtgatcttggctcactgcaacctccgcctcttgggttaaaagaattctcctgcctcagcctcctgagtagctgggattataggcacacaccaccacacccagctaatctttttgtatttttttttttagtagagacagggtttcgccatgtcggccaggctggtcttgaactcctgacctcaggtggtccacccgcctcggcctcccaaagtgctggcattacaggcgtgaaccaccgtgcctggccggaagtctttaaaaaataaagtgattctactcttctaagcttacagagaccagaccaggtgaatgtaactggggaaaatcaagatggtacctctctgcattatcccgccagacactgtattttatgcattcatgtctaggatacagtgtgaaaattaaaaagtttagagggcagatgcaattgtggcaagtgacctgccaataaagcaggtgcagctatagaagctggcataggtatatccttaatggtgctttctccctgggcttgtctttttgttgtttttttccccctatattcagagctccttgagaagtgataaacacctccagctttctaacatcctccccacaccatctcaccatatccatctcccagcatccatctgcattcagctaagggcgggaaactgacctagtgcctgtgttgcagaccatttctgaggtctccaccatccaaggaggcacagccgtcattactgtcctccatgccttcagcagcccccctcacagctaaggtacataccaccccttctgccgcgcctccacccctggcaccaaggtcttctgctgcttatgtctaaagggatcacctatatttaactgcctcagtgacctaacctctttcttctcatgtgccagatgttaagatgaaggaggaatacaacacatactcaagcctcagcctgtttagttgttttcactggggctcgcttttctgggacggtatttattatcagactggcaagcctaactccataggtttacaggaagtagggatatttttataaaacaattgtgtcctccccacattttgctatgttaatatttgcttctaacaatttgcagctgtttcactttttcctcatttgtctctaagttgaaggctttgttggaggggacagagcacaggaacagccttgacagtctgtaattattgtacagatattttaatagcatataaataagtatattccttttattttgaaacaaaaatgatcagacactgccttttgtgtgtttgctgcctgtggcatccttttttaaaaagactgttacatattaaaatagtgtacatatataaatattacctcttttgctgtacagttgtgatagagactgaagattttattttttgtgtgctttttataagaaaaaaattaatacactaaagaatcttgctgatgtgattgtaatgtacctatgtaacttatttacttttgaatgttcttctgtatctttaaaccttttattaaataaggtttt

SEQ ID NO: 129469 - DNA, 7721 bp, Homo sapiens
  Payload ID: 5322
  Gene Symbol: ELMSAN1
  Gene Name: ELM2 and Myb/SANT-like domain containing 1
  Uniprot ID: Q6PJG2
  ENST ID: ENST00000394071
  CDS Start-End: 405-3542
gctgggtcacagcccgggccgcacagcccgggccgcaccgcccgctccgcgaggaagtgacgactgcgccgtcccgagagcaacaaagttagagtctgcgggccgcactcgcctgcgccccgcacccctccgagcagcccggggatccagcacgcaggtgccagaaccctgtggagcatcatgaactgggaagagtagctgagccccagagcctctctggaagagaaaggaagagccagcagttctttctcccagtgtccgacctcactgtccagcgtcttcctctgcccctgctctgccctccctggctcctggactagagcccggcttccagcaggacgtttccccaggggatgggcgactgttgaaggggatctcaccgccagggctcagttggccacatcatgaacctccaggcccagcccaaggctcagaacaagcggaagcgttgcctcttcgggggccaggaaccagctcccaaggagcagccccctcccctgcagcccccccagcagtccatcagagtgaaggaggagcagtacctcgggcacgagggtccaggaggggcagtctccacctctcagcctgtggaactgccccctcctagcagcctggccctgctgaactctgtggtatatgggcctgagcggacctcagcagccatgctgtcccagcaggtggcctcagtaaagtggcccaactctgtgatggctccagggcggggcccggagcgtggaggaggtgggggtgtcagtgacagcagctggcagcagcagccaggccagcctccaccccattcaacatggaactgccacagtctgtccctctacagtgcaaccaaggggagcccgcatcctggagtgggagtcccgacttactataaccaccctgaggcactgaagcgggagaaagcggggggcccacagctggaccgctatgtgcgaccaatgatgccacagaaggtgcagctggaggtagggcggccccaggcacccctgaattctttccacgcagccaagaaacccccaaaccagtcactgcccctgcaacccttccagctggcattcggccaccaggtgaaccggcaggtcttccggcagggcccaccgcccccaaacccggtggctgccttccctccacagaagcagcagcagcagcagcaaccacagcagcagcagcagcagcagcaggcagccctaccccagatgccgctctttgagaacttctattccatgccgcagcaaccctcgcagcaaccccaggactttggcctgcagccagctgggccactgggacagtcccacctggctcaccacagcatggcaccctaccccttcccccccaacccagatatgaacccagaactgcgcaaggcccttctgcaggactcagccccgcagccagcgctacctcaggtccagatccccttcccccgccgctcccgccgcctctctaaggagggtatcctgcctcccagcgccctggatggggctggcacccagcctgggcaggaggccactggcaacctgttcctacatcactggcccctgcagcagccgccacctggctccctggggcagccccatcctgaagctctgggattcccgctggagctgagggagtcgcagctactgcctgatggggagagactagcacccaatggccgggagcgagaggctcctgccatgggcagcgaggagggcatgagggcagtgagcacaggggactgtgggcaggtgctacggggcggagtgatccagagcacgcgacggaggcgccgggcatcccaggaggccaatttgctgaccctggcccagaaggctgtggagctggcctcactgcagaatgcaaaggatggcagtggttctgaagagaagcggaaaagtgtattggcctcaactaccaagtgtggggtggagttttctgagccttccttagccaccaagcgagcacgagaagacagtgggatggtacccctcatcatcccagtgtctgtgcctgtgcgaactgtggacccaactgaggcagcccaggctggaggtcttgatgaggacgggaagggtcctgaacagaaccctgctgagcacaagccatcagtcatcgtcacccgcaggcggtccacccgaatccccgggacagatgctcaagctcaggcagaggacatgaatgtcaagttggagggggagccttccgtgcggaaaccaaagcagcggcccaggcccgagcccctcatcatccccaccaaggcgggcactttcatcgcccctcccgtctactccaacatcaccccataccagagccacctgcgctctcccgtgcgcctagctgaccacccctctgagcggagctttgagctacctccctacacgccgccccccatcctcagccctgtgcgggaaggctctggcctctacttcaatgccatcatatcaaccagcaccatccctgcccctcctcccatcacgcctaagagtgcccatcgcacgctgctccggactaacagtgctgaagtaaccccgcctgtcctctctgtgatgggggaggccaccccagtgagcatcgagccacggatcaacgtgggctcccggttccaggcagaaatccccttgatgagggaccgtgccctggcagctgcagatccccacaaggctgacttggtgtggcagccatgggaggacctagagagcagccgggagaagcagaggcaagtggaagacctgctgacagccgcctgctccagcattttccctggtgctggcaccaaccaggagctggccctgcactgtctgcacgaatccagaggagacatcctggaaacgctgaataagctgctgctgaagaagcccctgcggccccacaaccatccgctggcaacttatcactacacaggctctgaccagtggaagatggccgagaggaagctgttcaacaaaggcattgccatctacaagaaggatttcttcctggtgcagaagctgatccagaccaagaccgtggcccagtgcgtggagttctactacacctacaagaagcaggtgaaaatcggccgcaatgggactctaacctttggggatgtggatacgagcgatgagaagtcggcccaggaagaggttgaagtggatattaagacttcccaaaagttcccaagggtgcctcttcccagaagagagtccccaagtgaagagaggctggagcccaagagggaggtgaaggagcccaggaaggagggggaggaggaggtgccagagatccaagagaaggaggagcaggaagaggggcgagagcgcagcaggcgggcagcggcagtcaaagccacgcagacactacaggccaatgagtcggccagtgacatcctcatcctccggagccacgagtccaacgcccctgggtctgccggtggccaggcctcggagaagccaagggaagggacagggaagtcacgaagggcactacctttttcagagaagaagaaaaaaacagagacattcagtaagacccagaatcaggagaacactttcccctgtaaaaaatgtggcaggtaaggtgggcagcgctgtccccgctgggacccccgcgggctggtgcgcggagggggcgggggtggggtggaggggagggggaagaggtacaggcggtgtccgcctcgtttctggttggctcagcgggtttctagggctgtgacgtcatggggcagctttcggaaaatgacgcgagctggccggccgcggctgtgcagcgtgggggtgaaggtgaaggctggggctcctcgcgcacccgcgctgggggcccccgggtgggctaggccggttctgagcaacccccacccggctgcagggtgttttacaaggtgaagagccgcagtgcgcatatgaagagccacgcagagcaggagaagaaggctgcagcgctgaggctgaaggagaaagaggccgctgctgccgccgccgccgcccaccagcaggccctgcgggaggagagcggtgcgggcgacaagggctgagcgcgggagccaggctggcccagtcctgggcctcggcccttcccgcaccgccgccagcgcccgcagacaccctggcatctcaagagggagtgaggagaggattgcagggacttttccctgcgaaacaaatgagacaatgacataaacggctcttttatttatgaaggccctgggagcagcgttaagggctccaggatccagctctctttgcatttggtctgtcggaagctgtcctcgtgctttcctggaccgggagagtcccggtcccctcgggagggactccaccgcctctcacactccgatttctgctgctctgctgccccgcagtcttttccctttatttgcttccccctcctcccctcggcctccaggaagccaccgtggccggccaagcacaagctcacccactttggagcagcatttctcctccccagaggacctcgaaggctgcaacggccctgccccaagccccagaaaaagaaactcttggagggagtctgcgggcttctctgagaaggggcgcagcctgacacctgtgctgtccctgcagtctctaggcctgtctgagctgctcccgtgaccgtgtcctgagtggccacctcctccttgggagggaggccgcggcaggtactctccctttgctgcttgctggcggccttgctagggctagaaagttttctcagcgttgggggaggggctagcgttcttgtccaaagcactcatcctgctgcagggaagggagctgtacggaggctggaagctgcagggttaggcccgagagagcttttgacaagcctggctcttcctgcttcccacctttttggctgaatacctttgggtcctggaggctgccaagggcgcttcgccttgagcaggtcccggagaggctcagcctgcccctcctggggccagcctccttgcctctgctctgacctcagcagctacacctaaccccaccgcaccctacccagtgtcgatatccacaacccagcccccaggcctgcactttggagatttctggatccttccctgggagggagaggtctcctaactcgattggacaggagccttcattccttgactcgtgtcatttgggagctatttatttattcttagtatttaatttttaacatcctctcagggaccaggggcctcctgcttttcagaggcccgagtgcatttatcccaaaacgaggcatcttgacatcccctatccccaccccctaaattcccaaggccctaaggtccctcacctggttgctctggaagctcttgctgataggaatgatagcaacactgaaagagcgtgggaaggtggagggtgtcaccagacccacacagagcaagggagattaaggcagttcttgctgccccttctctggctgtgctttgcctgagggaagagttggcaagaggccagaattctagtttggtttatggggcctggattctggcttgaagaagccatatttggcatgggtgaagtgaaagggccaggaggttctggaggccccttcacttccagtcccatagcggggctcagctatttttctgatcttattcaactttagttgtgcaaaagaaattctaagtgaatgcgcgtatgacaggtcaacgtattaggaaggagccagaaagtattcatactgctactccttatgagatagccaagaagcatcatgtcagtaactgggagtggagagggagttttgttttgaaactatgcaggtatttttcagcatccatttgtacattagtatggttctacaggaccccagctgtggaagtaacaaatttcttctccctccagactcttggatgactacctagatccccagcttaccggttagtttcctccacaggcttccatgagctcagtgtcccaagacagcaaaaatctggtataccctgtagaagcaggggggtagcaaatttaggctctcttcgaaattacttgtacaatacgagtgccttcgcagcttagccccaaagtgctacttatgtttcccaaggtcttttctattcaaatcatatttggtttcaggcccctttatgggcatacggtaacagaaacctccatcattcatatgagacccttttgtcagtggtaacatcttgtacttggaaaaaaaatttttttttttttttttttttttttttgagacagagtctcattctgtcgcccaggctggagtgcagtggtgtgatcttggctcactgcaacctccgcctcttgggttaaaagaattctcctgcctcagcctcctgagtagctgggattataggcacacaccaccacacccagctaatctttttgtatttttttttttagtagagacagggtttcgccatgtcggccaggctggtcttgaactcctgacctcaggtggtccacccgcctcggcctcccaaagtgctggcattacaggcgtgaaccaccgtgcctggccggaagtctttaaaaaataaagtgattctactcttctaagcttacagagaccagaccaggtgaatgtaactggggaaaatcaagatggtacctctctgcattatcccgccagacactgtattttatgcattcatgtctaggatacagtgtgaaaattaaaaagtttagagggcagatgcaattgtggcaagtgacctgccaataaagcaggtgcagctatagaagctggcataggtatatccttaatggtgctttctccctgggcttgtctttttgttgtttttttccccctatattcagagctccttgagaagtgataaacacctccagctttctaacatcctccccacaccatctcaccatatccatctcccagcatccatctgcattcagctaagggcgggaaactgacctagtgcctgtgttgcagaccatttctgaggtctccaccatccaaggaggcacagccgtcattactgtcctccatgccttcagcagcccccctcacagctaaggtacataccaccccttctgccgcgcctccacccctggcaccaaggtcttctgctgcttatgtctaaagggatcacctatatttaactgcctcagtgacctaacctctttcttctcatgtgccagatgttaagatgaaggaggaatacaacacatactcaagcctcagcctgtttagttgttttcactggggctcgcttttctgggacggtatttattatcagactggcaagcctaactccataggtttacaggaagtagggatatttttataaaacaattgtgtcctccccacattttgctatgttaatatttgcttctaacaatttgcagctgtttcactttttcctcatttgtctctaagttgaaggctttgttggaggggacagagcacaggaacagccttgacagtctgtaattattgtacagatattttaatagcatataaataagtatattccttttattttgaaacaaaaatgatcagacactgccttttgtgtgtttgctgcctgtggcatccttttttaaaaagactgttacatattaaaatagtgtacatatataaatattacctcttttgctgtacagttgtgatagagactgaagattttattttttgtgtgctttttataagaaaaaaattaatacactaaagaatcttgctgatgtgattgtaatgtacctatgtaacttatttacttttgaatgttcttctgtatctttaaaccttttattaaataaggttttaaaaattca

SEQ ID NO: 129470 - DNA, 2633 bp, Homo sapiens
  Payload ID: 5322
  Gene Symbol: ELMSAN1
  Gene Name: ELM2 and Myb/SANT-like domain containing 1
  ENST ID: ENST00000451078
  CDS Start-End: 1-1338
gtgcgaccaatgatgccacagaaggtgcagctggaggtagggcggccccaggcacccctgaattctttccacgcagccaagaaacccccaaaccagtcactgcccctgcaacccttccagctggcattcggccaccaggtgaaccggcaggtcttccggcagggcccaccgcccccaaacccggtggctgccttccctccacagaagcagcagcagcagcagcaaccacagcagcagcagcagcagcagcaggcagccctaccccagatgccgctctttgagaacttctattccatgccgcagcaaccctcgcagcaaccccaggactttggcctgcagccagctgggccactgggacagtcccacctggctcaccacagcatggcaccctaccccttcccccccaacccagatatgaacccagaactgcgcaaggcccttctgcaggactcagccccgcagccagcgctacctcaggtccagatccccttcccccgccgctcccgccgcctctctaaggagggtatcctgcctcccagcgccctggatggggctggcacccagcctgggcaggaggccactggcaacctgttcctacatcactggcccctgcagcagccgccacctggctccctggggcagccccatcctgaagctctgggattcccgctggagctgagggagtcgcagctactgcctgatggggagagactagcacccaatggccgggagcgagaggctcctgccatgggcagcgaggagggcatgagggcagtgagcacaggggactgtgggcaggtgctacggggcggagtgatccagagcacgcgacggaggcgccgggcatcccaggaggccaatttgctgaccctggcccagaaggctgtggagctggcctcactgcagaatgcaaaggatggcagtggttctgaagagaagcggaaaagtgtattggcctcaactaccaagtgtggggtggagttttctgagccttccttagccaccaagcgagcacgagaagacagtgggatggtacccctcatcatcccagtgtctgtgcctgtgcgaactgtggacccaactgaggcagcccaggctggaggtcttgatgaggacgggaagggtcctgaacagaaccctgctgagcacaagccatcagtcatcgtcacccgcaggcggtccacccgaatccccgggacagatgctcaagctcagaaaaagtttgctgacttctgccctagaggagatgataaaaagggcttttggacctgctccttttttcaggcttgccttggtgggtgtggtaggcagactaagttccaaaggcagaggacatgaatgtcaagttggagggggagccttccgtgcggaaaccaaagcagcggcccaggcccgagcccctcatcatccccaccaaggcgggcactttcatcgcccctcccgtctactccaacatcaccccataccagagccacctgcgctctcccgtgcgcctagctgaccacccctctgagcggagctttgagctacctccctacacgccgccccccatcctcagccctgtgcgggaaggctctggcctctacttcaatgccatcatatcaaccagcaccatccctgcccctcctcccatcacgcctaagagtgcccatcgcacgctgctccggactaacagtgctgaagtaaccccgcctgtcctctctgtgatgggggaggccaccccagtgagcatcgagccacggatcaacgtgggctcccggttccaggcagaaatccccttgatgagggaccgtgccctggcagctgcagatccccacaaggctgacttggtgtggcagccatgggaggacctagagagcagccgggagaagcagaggcaagtggaagacctgctgacagccgcctgctccagcattttccctggtgctggcaccaaccaggagctggccctgcactgtctgcacgaatccagaggagacatcctggaaacgctgaataagctgctgctgaagaagcccctgcggccccacaaccatccgctggcaacttatcactacacaggctctgaccagtggaagatggccgagaggaagctgttcaacaaaggcattgccatctacaagaaggatttcttcctggtgcagaagctgatccagaccaagaccgtggcccagtgcgtggagttctactacacctacaagaagcaggtgaaaatcggccgcaatgggactctaacctttggggatgtggatacgagcgatgagaagtcggcccaggaagaggttgaagtggatattaagacttcccaaaagttcccaagggtgcctcttcccagaagagagtccccaagtgaagagaggctggagcccaagagggaggtgaaggagcccaggaaggagggggaggaggaggtgccagagatccaagagaaggaggagcaggaagaggggcgagagcgcagcaggcgggcagcggcagtcaaagccacgcagacactacaggccaatgagtcggccagtgacatcctcatcctccggagccacgagtccaacgcccctgggtctgccggtggccaggcctcggagaagccaagggaagggacagggaagtcacgaagggcactacctttttca

SEQ ID NO: 129471 - DNA, 558 bp, Homo sapiens
  Payload ID: 5322
  Gene Symbol: ELMSAN1
  Gene Name: ELM2 and Myb/SANT-like domain containing 1
  ENST ID: ENST00000421708
  CDS Start-End: 362-558
aaagcttggatggagagagtgagctacagtaggcttgtagctggccagaaggggcttctctctaaagccgctcagcttctctggggaattggaatccagacaagaaggaaaatggtgccagaaccctgtggagcatcatgaactgggaagagtagctgagccccagagcctctctggaagagaaaggaagagccagcagttctttctcccagtgtccgacctcactgtccagcgtcttcctctgcccctgctctgccctccctggctcctggactagagcccggcttccagcaggacgtttccccaggggatgggcgactgttgaaggggatctcaccgccagggctcagttggccacatcatgaacctccaggcccagcccaaggctcagaacaagcggaagcgttgcctcttcgggggccaggaaccagctcccaaggagcagccccctcccctgcagcccccccagcagtccatcagagtgaaggaggagcagtacctcgggcacgagggtccaggaggggcagtctccacctctcagcctgtggaactgccccc

SEQ ID NO: 129472 - DNA, 3839 bp, Homo sapiens
  Payload ID: 5322
  Gene Symbol: ELMSAN1
  Gene Name: ELM2 and Myb/SANT-like domain containing 1
  ENST ID: ENST00000435371
  CDS Start-End: 784-3839
gatgaagtggtagagctggttcctgctcgccgcggtgccgcgcgcgccggccggccgctgggcgctccgcgctcccagcctcgagttgtgcaatcctttgtagcacgccagagtcctcctcctccgctgttgcctctcgccctctctctttttttttttttcaagctgtgagctcaaccgatgagtcagagccgtgcaatcctgacactgcatcgcaggactgggggtgacacggagggaggcagagcgctcgcgaggcggacggcacgggtgcggggcgcgccgaggctcctgcatcgcaagcggggggtgacagcccgcgcgtcccgcccgggccctgccagcaaacttctcagcctcgggaggcgcgggctggcggaagccccgcgagcgccgcggggaggcgacggcgcctgtttgtttttaaaatcgggagtgcgtgcaggcggctggagtcccggaggcgaccgaaggcggcgacccgcggcggaagggggacagccgagcccggagcccggagcccgggcaagagctgggtgccagaaccctgtggagcatcatgaactgggaagagtagctgagccccagagcctctctggaagagaaaggaagagccagcagttctttctcccagtgtccgacctcactgtccagcgtcttcctctgcccctgctctgccctccctggctcctggactagagcccggcttccagcaggacgtttccccaggggatgggcgactgttgaaggggatctcaccgccagggctcagttggccacatcatgaacctccaggcccagcccaaggctcagaacaagcggaagcgttgcctcttcgggggccaggaaccagctcccaaggagcagccccctcccctgcagcccccccagcagtccatcagagtgaaggaggagcagtacctcgggcacgagggtccaggaggggcagtctccacctctcagcctgtggaactgccccctcctagcagcctggccctgctgaactctgtggtatatgggcctgagcggacctcagcagccatgctgtcccagcaggtggcctcagtaaagtggcccaactctgtgatggctccagggcggggcccggagcgtggaggaggtgggggtgtcagtgacagcagctggcagcagcagccaggccagcctccaccccattcaacatggaactgccacagtctgtccctctacagtgcaaccaaggggagcccgcatcctggagtgggagtcccgacttactataaccaccctgaggcactgaagcgggagaaagcggggggcccacagctggaccgctatgtgcgaccaatgatgccacagaaggtgcagctggaggtagggcggccccaggcacccctgaattctttccacgcagccaagaaacccccaaaccagtcactgcccctgcaacccttccagctggcattcggccaccaggtgaaccggcaggtcttccggcagggcccaccgcccccaaacccggtggctgccttccctccacagaagcagcagcagcagcagcaaccacagcagcagcagcagcagcagcaggcagccctaccccagatgccgctctttgagaacttctattccatgccgcagcaaccctcgcagcaaccccaggactttggcctgcagccagctgggccactgggacagtcccacctggctcaccacagcatggcaccctaccccttcccccccaacccagatatgaacccagaactgcgcaaggcccttctgcaggactcagccccgcagccagcgctacctcaggtccagatccccttcccccgccgctcccgccgcctctctaaggagggtatcctgcctcccagcgccctggatggggctggcacccagcctgggcaggaggccactggcaacctgttcctacatcactggcccctgcagcagccgccacctggctccctggggcagccccatcctgaagctctgggattcccgctggagctgagggagtcgcagctactgcctgatggggagagactagcacccaatggccgggagcgagaggctcctgccatgggcagcgaggagggcatgagggcagtgagcacaggggactgtgggcaggtgctacggggcggagtgatccagagcacgcgacggaggcgccgggcatcccaggaggccaatttgctgaccctggcccagaaggctgtggagctggcctcactgcagaatgcaaaggatggcagtggttctgaagagaagcggaaaagtgtattggcctcaactaccaagtgtggggtggagttttctgagccttccttagccaccaagcgagcacgagaagacagtgggatggtacccctcatcatcccagtgtctgtgcctgtgcgaactgtggacccaactgaggcagcccaggctggaggtcttgatgaggacgggaagggtcctgaacagaaccctgctgagcacaagccatcagtcatcgtcacccgcaggcggtccacccgaatccccgggacagatgctcaagctcaggcagaggacatgaatgtcaagttggagggggagccttccgtgcggaaaccaaagcagcggcccaggcccgagcccctcatcatccccaccaaggcgggcactttcatcgcccctcccgtctactccaacatcaccccataccagagccacctgcgctctcccgtgcgcctagctgaccacccctctgagcggagctttgagctacctccctacacgccgccccccatcctcagccctgtgcgggaaggctctggcctctacttcaatgccatcatatcaaccagcaccatccctgcccctcctcccatcacgcctaagagtgcccatcgcacgctgctccggactaacagtgctgaagtaaccccgcctgtcctctctgtgatgggggaggccaccccagtgagcatcgagccacggatcaacgtgggctcccggttccaggcagaaatccccttgatgagggaccgtgccctggcagctgcagatccccacaaggctgacttggtgtggcagccatgggaggacctagagagcagccgggagaagcagaggcaagtggaagacctgctgacagccgcctgctccagcattttccctggtgctggcaccaaccaggagctggccctgcactgtctgcacgaatccagaggagacatcctggaaacgctgaataagctgctgctgaagaagcccctgcggccccacaaccatccgctggcaacttatcactacacaggctctgaccagtggaagatggccgagaggaagctgttcaacaaaggcattgccatctacaagaaggatttcttcctggtgcagaagctgatccagaccaagaccgtggcccagtgcgtggagttctactacacctacaagaagcaggtgaaaatcggccgcaatgggactctaacctttggggatgtggatacgagcgatgagaagtcggcccaggaagaggttgaagtggatattaagacttcccaaaagttcccaagggtgcctcttcccagaagagagtccccaagtgaagagaggctggagcccaagagggaggtgaaggagcccaggaaggagggggaggaggaggtgccagagatccaagagaaggaggagcaggaagaggggcgagagcgcagcaggcgggcagcggcagtcaaagccacgcagacactacaggccaatgagtcggccagtgacatcctcatcctccggagccacgagtccaacgcccctgggtctgccggtggccaggcctcggagaagccaagggaagggacagggaagtcacgaagggcactacctttttc

SEQ ID NO: 129473 - DNA, 3483 bp, Homo sapiens
  Payload ID: 5322
  Gene Symbol: ELMSAN1
  Gene Name: ELM2 and Myb/SANT-like domain containing 1
  Uniprot ID: Q6PJG2
  ENST ID: ENST00000423556
  CDS Start-End: 248-3382
gtgccagaaccctgtggagcatcatgaactgggaagagtagctgagccccagagcctctctggaagagaaaggaagagccagcagttctttctcccagtgtccgacctcactgtccagcgtcttcctctgcccctgctctgccctccctggctcctggactagagcccggcttccagcaggacgtttccccaggggatgggcgactgttgaaggggatctcaccgccagggctcagttggccacatcatgaacctccaggcccagcccaaggctcagaacaagcggaagcgttgcctcttcgggggccaggaaccagctcccaaggagcagccccctcccctgcagcccccccagcagtccatcagagtgaaggaggagcagtacctcgggcacgagggtccaggaggggcagtctccacctctcagcctgtggaactgccccctcctagcagcctggccctgctgaactctgtggtatatgggcctgagcggacctcagcagccatgctgtcccagcaggtggcctcagtaaagtggcccaactctgtgatggctccagggcggggcccggagcgtggaggaggtgggggtgtcagtgacagcagctggcagcagcagccaggccagcctccaccccattcaacatggaactgccacagtctgtccctctacagtgcaaccaaggggagcccgcatcctggagtgggagtcccgacttactataaccaccctgaggcactgaagcgggagaaagcggggggcccacagctggaccgctatgtgcgaccaatgatgccacagaaggtgcagctggaggtagggcggccccaggcacccctgaattctttccacgcagccaagaaacccccaaaccagtcactgcccctgcaacccttccagctggcattcggccaccaggtgaaccggcaggtcttccggcagggcccaccgcccccaaacccggtggctgccttccctccacagaagcagcagcagcagcagcaaccacagcagcagcagcagcagcagcaggcagccctaccccagatgccgctctttgagaacttctattccatgccgcagcaaccctcgcagcaaccccaggactttggcctgcagccagctgggccactgggacagtcccacctggctcaccacagcatggcaccctaccccttcccccccaacccagatatgaacccagaactgcgcaaggcccttctgcaggactcagccccgcagccagcgctacctcaggtccagatccccttcccccgccgctcccgccgcctctctaaggagggtatcctgcctcccagcgccctggatggggctggcacccagcctgggcaggaggccactggcaacctgttcctacatcactggcccctgcagcagccgccacctggctccctggggcagccccatcctgaagctctgggattcccgctggagctgagggagtcgcagctactgcctgatggggagagactagcacccaatggccgggagcgagaggctcctgccatgggcagcgaggagggcatgagggcagtgagcacaggggactgtgggcaggtgctacggggcggagtgatccagagcacgcgacggaggcgccgggcatcccaggaggccaatttgctgaccctggcccagaaggctgtggagctggcctcactgcagaatgcaaaggatggcagtggttctgaagagaagcggaaaagtgtattggcctcaactaccaagtgtggggtggagttttctgagccttccttagccaccaagcgagcacgagaagacagtgggatggtacccctcatcatcccagtgtctgtgcctgtgcgaactgtggacccaactgaggcagcccaggctggaggtcttgatgaggacgggaagggtcctgaacagaaccctgctgagcacaagccatcagtcatcgtcacccgcaggcggtccacccgaatccccgggacagatgctcaagctcaggcagaggacatgaatgtcaagttggagggggagccttccgtgcggaaaccaaagcagcggcccaggcccgagcccctcatcatccccaccaaggcgggcactttcatcgcccctcccgtctactccaacatcaccccataccagagccacctgcgctctcccgtgcgcctagctgaccacccctctgagcggagctttgagctacctccctacacgccgccccccatcctcagccctgtgcgggaaggctctggcctctacttcaatgccatcatatcaaccagcaccatccctgcccctcctcccatcacgcctaagagtgcccatcgcacgctgctccggactaacagtgctgaagtaaccccgcctgtcctctctgtgatgggggaggccaccccagtgagcatcgagccacggatcaacgtgggctcccggttccaggcagaaatccccttgatgagggaccgtgccctggcagctgcagatccccacaaggctgacttggtgtggcagccatgggaggacctagagagcagccgggagaagcagaggcaagtggaagacctgctgacagccgcctgctccagcattttccctggtgctggcaccaaccaggagctggccctgcactgtctgcacgaatccagaggagacatcctggaaacgctgaataagctgctgctgaagaagcccctgcggccccacaaccatccgctggcaacttatcactacacaggctctgaccagtggaagatggccgagaggaagctgttcaacaaaggcattgccatctacaagaaggatttcttcctggtgcagaagctgatccagaccaagaccgtggcccagtgcgtggagttctactacacctacaagaagcaggtgaaaatcggccgcaatgggactctaacctttggggatgtggatacgagcgatgagaagtcggcccaggaagaggttgaagtggatattaagacttcccaaaagttcccaagggtgcctcttcccagaagagagtccccaagtgaagagaggctggagcccaagagggaggtgaaggagcccaggaaggagggggaggaggaggtgccagagatccaagagaaggaggagcaggaagaggggcgagagcgcagcaggcgggcagcggcagtcaaagccacgcagacactacaggccaatgagtcggccagtgacatcctcatcctccggagccacgagtccaacgcccctgggtctgccggtggccaggcctcggagaagccaagggaagggacagggaagtcacgaagggcactacctttttcagagaagaagaaaaaaacagagacattcagtaagacccagaatcaggagaacactttcccctgtaaaaaatgtggcagggtgttttacaaggtgaagagccgcagtgcgcatatgaagagccacgcagagcaggagaagaaggctgcagcgctgaggctgaaggagaaagaggccgctgc

SEQ ID NO: 129474 - DNA, 2852 bp, Homo sapiens
  Payload ID: 5323
  Gene Symbol: ELMOD1
  Gene Name: ELMO/CED-12 domain containing 1
  Uniprot ID: Q8N336
  ENST ID: ENST00000265840
  CDS Start-End: 266-1270
cccttccgcgcccgcagccagtgcggcagccgcggccgcccctgtccagcctcggcgcccgggaccgagcgcgtcgctcgccgccgcggagcgcgtagccggagcgcctggggaaggcggagatgaagaccacgccgccgcgcgccgggagctgctgagcctaccgccgccagagtccagttgacacttactttgacaaaggcaaatttggaagcaattacttgaggacagttcatatagcatctggacagtcaacacgggcaccatgaagcacttcctgagaatgttgatccaggtatgcctgtatttttactgtaaatttctgtggcgctgcctgaaatttgtaatgaggaagctaactggaagatgtgaactacaacggatctgttataataccaagccgggagcttctagaaccatgaaaatcgaaacatcactgagggattctaaaagtaagctgttgcagacttctgtgagtgttcaccccgacgctattgaaaaaactatagaagatatcatggaactgaaaaaaattaatcctgacgtaaatccacagctgggaatctctcttcaggcttgccttctgcaaatcgttgggtacaggaaccttattgcagatgtggaaaaactgcgtagagaggcctatgattctgataatccccaacatgaagaaatgcttttgaagttatggaaattcttgaagcccaatactccactggaatctcggatttctaagcagtggtgtgaaattggtttccaaggtgatgatcctaaaacagactttcgaggaatgggacttctgggactgtacaatttgcagtatttcgcggaaagggatgccacagcagctcagcaggtcctgtctgactctcttcatccgaaatgcagggatatcactaaagaagaaataagcaaattcagcaaagcagaatgggagaagaaaaggatggataaggcaattgggtactcatttgcaattgtgggcatcaatataactgacctggcatataatctactggtcagcggagctctaaaaacccatttctacaatatcgccccagaagctccaacattgtctcactttcagcaaacattctgctatttgatgcatgaatttcataagttttggatcgaagaggaccccatggacataatggaatttaatcgtgtgagggagaaattccgcaagaggatcatcaaacagctgcagaacccagacatggcgctgtgcccacattttgctgcctcggaaggtttaatcaacatgtagttgcccacgccggttttaatggataccctggaacactgcctcattgtcttgttagatctctgcttaggtcgcagctcacgcattgaatgcacacagtgattgtatgcatgccttttggtacagtgttttcatctcttggtcataattccgagatccccagagaccactgtttctggagtatctgtcatccagtgactgctcatattgtggcattatgcagtgttacatcttgccttgatacccaggtatggagagagttttctatttttttagactttttttcctctccctcataattcagcattaaagaattgtatttctctagctgtattttgtatgtaagaggtttagctgaatctcattctgtgaaagccttttaatttattgaaatgtttcatgactactgctgctagctcttcaagccaggttcatgcttggacctcattctgataaagtataagactttaaaataatacaaaacagggccgggcgcagtggctcacacctgtaatcccagcactttggggagctgaggcgggcggatcacgaggtcaagagatcgagaccatcctggccaacatggtgaaaccccgtctctactaaaaataacaaaaattagctgggcgtggtggtgggtgcctgtaatcccagctactcgggaggctgaggcaggagaatcgcttgaacccgggaggtggaggttacagtgagccgagatcataccactgcactccagcctggcgacagagcaagactccatctcaaaaataaataaataaataaataaataaataaataaataaataaataaataaataaaatagtacagacagacacatgataagccaaactgttcctgcaaacatagctatgcttcatgaggcttacaagaagtaactttaggtaggagctgtttttgtttgaagtactgcaaaattatattgtaacttcccctcaccccagttgcaattgtgtcatagtcatctgtatatcaaactattttattcccataacttcattggcttggatgcctaagtgtatgatgcttgaagcctcagaaaagaaataagcatatttcaaaagctgcaaaaggtttttcactgcctgcctcttgcggaactgggttacaccctggcactgttctgatccaagcatatttgcttggggaactaagtgctgactagtttgttttctatgtcaaggggcaatattaaaaaacaatttgcaagaaaatgtgtttcaagagagcaacctaagctaagtcactctgcgatatttcttgaaaataacgaccttgtcttgtatcagtggaagaagtaagttgcttagaaagggaaaagtcaaattgttccagaactgctaaaaatcattttaaaaaccatgatttagtttggaattatgattgtagtctgttgaatagtatttaccatggcatttcatacccatggtattttataccttctgactatcaattttagtattattagatgtttgtgtaaccacttgcttatttaaatgaattttgagtactgcctaattgtcagttatatgaataaattacatgtcattctactgtaacgta

SEQ ID NO: 129475 - DNA, 1990 bp, Homo sapiens
  Payload ID: 5323
  Gene Symbol: ELMOD1
  Gene Name: ELMO/CED-12 domain containing 1
  Uniprot ID: Q8N336
  ENST ID: ENST00000443271
  CDS Start-End: 247-1227
agtgcggcagccgcggccgcccctgtccagcctcggcgcccgggaccgagcgcgtcgctcgccgccgcggagcgcgtagccggagcgcctggggaaggcggagatgaagaccacgccgccgcgcgccgggagctgctgagcctaccgccgccagagtccagttgacacttactttgacaaaggcaaatttggaagcaattacttgaggacagttcatatagcatctggacagtcaacacgggcaccatgaagcacttcctgagaatgttgatccaggtatgcctgtatttttactgtaaatttctgtggcgctgcctgaaatttgtaatgaggaagctaactggaagatgtgaactacaacggatctgttataataccaagccgggagcttctagaaccatgaaaatcgaaacatcactgagggattctaaaagtaagctgttgcagacttctgtgagtgttcaccccgacgctattgaaaaaactatagaagatatcatggaactgaaaaaaattaatcctgacgtaaatccacagctgggaatctctcttcaggcttgccttctgcaaatcgttgggtacaggaaccttattgcagatgtggaaaaactgcgtagagaggcctatgattctgataatccccaacatgaagaaatgcttttgaagttatggaaattcttgaagcccaatactccactggaatctcggatttctaagcagtggtgtgaaattggtttccaaggtgatgatcctaaaacagactttcgaggaatgggacttctgggactgtacaatttgcagtatttcgcggaaagggatgccacagcagctcagcaggtcctgtctgactctcttcatccgaaatgcagcaaattcagcaaagcagaatgggagaagaaaaggatggataaggcaattgggtactcatttgcaattgtgggcatcaatataactgacctggcatataatctactggtcagcggagctctaaaaacccatttctacaatatcgccccagaagctccaacattgtctcactttcagcaaacattctgctatttgatgcatgaatttcataagttttggatcgaagaggaccccatggacataatggaatttaatcgtgtgagggagaaattccgcaagaggatcatcaaacagctgcagaacccagacatggcgctgtgcccacattttgctgcctcggaaggtttaatcaacatgtagttgcccacgccggttttaatggataccctggaacactgcctcattgtcttgttagatctctgcttaggtcgcagctcacgcattgaatgcacacagtgattgtatgcatgccttttggtacagtgttttcatctcttggtcataattccgagatccccagagaccactgtttctggagtatctgtcatccagtgactgctcatattgtggcattatgcagtgttacatcttgccttgatacccaggtatggagagagttttctatttttttagactttttttcctctccctcataattcagcattaaagaattgtatttctctagctgtattttgtatgtaagaggtttagctgaatctcattctgtgaaagccttttaatttattgaaatgtttcatgactactgctgctagctcttcaagccaggttcatgcttggacctcattctgataaagtataagactttaaaataatacaaaacagggccgggcgcagtggctcacacctgtaatcccagcactttggggagctgaggcgggcggatcacgaggtcaagagatcgagaccatcctggccaacatggtgaaaccccgtctctactaaaaataacaaaaattagctgggcgtggtggtgggtgcctgtaatcccagctactcgggaggctgaggcaggagaatcgcttgaacccgggaggtggaggttacagtgagccgagatcataccactgcactccagcctggcgacagagcaagactccatctc

SEQ ID NO: 129476 - DNA, 1832 bp, Homo sapiens
  Payload ID: 5323
  Gene Symbol: ELMOD1
  Gene Name: ELMO/CED-12 domain containing 1
  ENST ID: ENST00000531234
  CDS Start-End: 559-1545
agccgcccgcttcgtgctcccagggaagcctctgcacgccctcccccgctgctctcggtcgcctcctcgccgccagccgccccgggtgcatcccggcttgctccgctccacgcgacccagattcctgccccgcccccgccccttccgcgcccgcagccagtgcggcagccgcggccgcccctgtccagcctcggcgcccgggaccgagcgcgtcgctcgccgccgcggagcgcgtagccggagcgcctggggaaggcggagatgaagaccacgccgccgcgcgccgggagctgctgagcctaccgccgccagagtccagttgacacttactttgacaaaggcaaatttggaagcaattacttgaggacagttcatatagcatctggacagtcaacacgggcaccatgaagcacttcctgaggatttcttcaagcaagaattaactttcattagcacattcattgaaactgttcaaaataagccacttttctcttactgttccaaaagaagacgtcagagtcacaaatttaggatgatggcatagtgttgcattacagaatgttgatccaggtatgcctgtatttttactgtaaatttctgtggcgctgcctgaaatttgtaatgaggaagctaactggaagatgtgaactacaacggatctgttataataccaagccgggagcttctagaaccatgaaaatcgaaacatcactgagggattctaaaagtaagctgttgcagacttctgtgagtgttcaccccgacgctattgaaaaaactatagaagatatcatggaactgaaaaaaattaatcctgacgtaaatccacagctgggaatctctcttcaggcttgccttctgcaaatcgttgggtacaggaaccttattgcagatgtggaaaaactgcgtagagaggcctatgattctgataatccccaacatgaagaaatgcttttgaagttatggaaattcttgaagcccaatactccactggaatctcggatttctaagcagtggtgtgaaattggtttccaaggtgatgatcctaaaacagactttcgaggaatgggacttctgggactgtacaatttgcagtatttcgcggaaagggatgccacagcagctcagcaggtcctgtctgactctcttcatccgaaatgcagggatatcactaaagaagaaataagcaaattcagcaaagcagaatgggagaagaaaaggatggataaggcaattgggtactcatttgcaattgtgggcatcaatataactgacctggcatataatctactggtcagcggagctctaaaaacccatttctacaatatcgccccagaagctccaacattgtctcactttcagcaaacattctgctatttgatgcatgaatttcataagttttggatcgaagaggaccccatggacataatggaatttaatcgtgtgagggagaaattccgcaagaggatcatcaaacagctgcagaacccagacatggcgctgtgcccacattttgctgcctcggaaggtttaatcaacatgtagttgcccacgccggttttaatggataccctggaacactgcctcattgtcttgttagatctctgcttaggtcgcagctcacgcattgaatgcacacagtgattgtatgcatgccttttggtacagtgttttcatctcttggtcataattccgagatccccagagaccactgtttctggagtatctgtcatccagtgactgctcatattgtggcattatgcagtgttacatcttgccttgatacccaggtatggagagagttttctatttttttagactttttttcctct

SEQ ID NO: 129477 - DNA, 4409 bp, Homo sapiens
  Payload ID: 5324
  Gene Symbol: ELMOD2
  Gene Name: ELMO/CED-12 domain containing 2
  Uniprot ID: Q8IZ81
  ENST ID: ENST00000323570
  CDS Start-End: 133-1014
ctcgctccctgacttccgggtcgcggtgcttgaagggagtgttccgtcgtttccgttgccggctgtttgcagtggggaaaccgaggcagctcctgctccccctagttcttccgctcctgtgaggaaaaaaaaatgtttatttctttgtgggagttcttctatgggcacttttttcgattttggatgaaatggctattacgacagatgactgggaagtgtgaattgcagcgaatatttgatacctatgtaggtgcacaaaggacacacaggatagaaaattccttgacatactccaagaataaggttttacagaaggcgacacatgttgttcagagtgaagtggacaaatatgtagatgatattatgaaggaaaagaatattaaccctgagaaggatgccagttttaaaatatgcatgaagatgtgcttactgcagataactggttataaacagctgtatttggatgtagaaagtgtgaggaaaaggccatatgattctgataacctacagcatgaagagctactcatgaagctttggaatcttctaatgcccacgaagaagttaaacgctagaatctccaagcagtgggctgaaattggttttcagggtgatgatcccaagacagacttcagaggcatgggcatacttgggttaatcaatcttgtgtatttcagtgaaaattacactagtgaagctcatcagattctttcccgttcaaatcatccaaaattagggtattcttatgcaatagttggaatcaatcttacagagatggcttatagcttactgaagagtgaagctttgaagtttcatctctataaccttgttcctggtataccaacaatggaacactttcatcagttttactgttatcttgtctatgaatttgacaagttttggtttgaagaagaaccagaaagcattatgtatttcaatttgtatagagagaagtttcatgaaaagattaaaggacttttactggattgtaatgtagcacttactttaaaagtataaatcatccactgtatcttctatttctaccacattttgcacattcaacagaatttatatgttgtaataggaattatctgatcaattacactcttatatataatttcctacaaaaatatttcagaaattctatttaagaaagctagtggacaatcagtgtatgtttacaattgtttatacactgttctccaaaggtaccttatccttccaaagatcccctctgtagagtcatgcgaactacagtttggaacttgggacttagcccgttggtgtaaaagtataaatcaggtatttgtattaaattgattaaaatgtgtaaaatcaattttcgtttttatgtgttatagggtcaagttggtatctttttcaaagctctttaagatttttttggtttttagtttggaaatggctgtttttaattttgtctgatttttatttctaggttaattaacagcaagtgtttctttatggttttctttgtttgcatcttaattacatgtcataacgttgcttcattagtagcaaatagagcagagatacagcagagagaataaagaattagggcctccttttgggtttctgtgattattgagcataactgatgagagaatgacagtattggtgactagcttttttgtttttaaataacacactttaaaatgccacagtgttatttgaaagcttaaaggcattttctcatcttcagtatttgctttttatcagttgtagaaaagaaccttagtgttttcttctctacctatgtatgcttatgaaaccgctctacctacatatgaaacttctctacctatgtatgtttacgaaaagagatgtatttgccaagaaaatcttgattatataaaagacaaaaagattataaaagacagtttctgtttaagtaaaactgtctttgaaacttaagaaagcttaagttttaaaaaaatctcagttaaacatcattggtttatttgacttactgttaactcttgcttctctttgactccatggtgtttttagataaccatgtatgaactttatgttaatggtttgtgggatactaaaatagcttgaagatgacttgatgactgtgcattttatatagttttattctcctaaaatctcaggagggcagcaagtgctgtcaacgattatatagtgatgagatttttatgggaatgatttcttcttggtgcgttttacacatttgtactgatagcaaaactaaagtttaaagcagcaaagtttaagttctccttaaatcctacagaaaccaaccttttaaggacataatttcatctaaaacatgacgatatttagcacaccttttaatgtgggtatatatcaagtgtttaaggactggctagtatgtgatagagcaagacctgagactttataagtatttgctcgtgtctgttgacagacctctttctttcaaacttgttagaagagtggtaagacatatccaattggaaaataagatgcagtgttgtatagcacatacatttaaagtgcttgcgttaaaattagtttctcaataagataaaattattttaaaaatttggttcactttattacaatagtggcaatttagcttttcagtattacaggaatttaaaaattggtttcttgtaggggacatctcaactttgggaatatcttcacttaatttttaaaaaatattttcatgctttattgtccagctatacaatatgtcgcaaaatcctgacaagttcattgtattaaggtattaactattacatggaaagcaattctgttcatcttttgatgtttgtgttgaaaatgcttatctttgtgttttgatcttccaacagctgagagcttgaactgatttaaacatttgtcaatatacttaagaatgctttaagtaaagaaggggaaaattttaagtaagttttttcccttctaggaagaaaaactatgatgatgttaagaaaatgtcattatagagcttgctcaataatatgttctttaaatccacctccatttgtacattataggtatcattctgtttttgcttaaaataatctgcaaccatttcagatagttttacagcaaattgatctaaaagccactaataaattctagggtttgagtctagaagccaagcaaactgtcaccaatgtcagttgtaaattagaatgcaacatgaggcttcagactcatgacaatgatatacatgaaaacaaaaatataattgtgtctaccttcctactttcccttttgacatatgtagttggaattttacatagtcttaaaatccatatttagaatcttacctgtttctataataattagtaaaatgccaaagtagtgatagaatattgtggcattgaagtagccgaaaaattgttagttttagcatcaaaaaagtaaatagatgttgaaatgaatttttgtatgtgccaggttgaagagagtgtgccagtgacaggaagtagtctaaaaaattaacagttatggttttaataggatctgaaagacaatctttaaagaaatgggagaaattgggggtatcagtgaacctataccaacctctctttgtacataaatatggtgatgtagctagatataaaaatcagtgtcttactggcaccatttacagtttagaaaacaatctttttcttaaaaatgcccatctgatttctatttttaggagctacttggatttgtatgtattttttctacgtgaaaatatatgtactcttcacttttgttccagtactataattgctcatgcactctttctcccctttgagaacattcagtgaaatacaacttcatcaaagatttgctcaaaggagaagaatcgcatgagtgtgaaaagtagatgctcgtagccagaacagaaaaggttacacatgatcatggcacagaagataggaggtttgacttggtgggccataatgtttattatcctttttgaaataacagggaccagcagcagttttctcaggataaatgctctaccccacttctctatgaacaggtgtggggaggcttactttccattttcatatttatacacctctctacaaaagcaatttttaatgaaggttagtggaattgttaaaaatctgagaggaatgatgactggaggtgtttggggtttttttctgtattcattttttaatgagaaaagttttaaatgtagtacaggttagacccaactactaccttactattataggacgattctatgtttctgttaaagtattcaagtagctttctctgggggaaaaagtaccacttggacacttaaaggaattgggatttttgtctactttggataaggcagttgacttcttaagtaaaagcaatagtgtaaaatgtcattttgtttggaatgttaagtgagcaaataaaaaacatgttgaaattgt

SEQ ID NO: 129478 - DNA, 738 bp, Homo sapiens
  Payload ID: 5324
  Gene Symbol: ELMOD2
  Gene Name: ELMO/CED-12 domain containing 2
  ENST ID: ENST00000502397
  CDS Start-End: 236-738
gcgcgaggggggtcggcgcagagacgcccagagccctggggtgctcaggcgccgctacgcgtgcatcccctctgctcggcagttctgcgcttttgtcctaatgagcgcggactagatggcttgattttcaagataatgatcaacccagctgtgctatgcgctctttctgcactgacctgcgggtacttcgaacttcgacagtccctcctcaggccctagtccagaggaaaaaaaaatgtttatttctttgtgggagttcttctatgggcacttttttcgattttggatgaaatggctattacgacagatgactgggaagtgtgaattgcagcgaatatttgatacctatgtaggtgcacaaaggacacacaggatagaaaattccttgacatactccaagaataaggttttacagaaggcgacacatgttgttcagagtgaagtggacaaatatgtagatgatattatgaaggaaaagaatattaaccctgagaaggatgccagttttaaaatatgcatgaagatgtgcttactgcagataactggttataaacagctgtatttggatgtagaaagtgtgaggaaaaggccatatgattctgataacctacagcatgaagagctactcatgaagctttggaatcttctaatgcccacgaagaagttaaacgctagaatctccaagcagtgggctgaaattggttttcagggtgatgatcccaagacagacttcagagg

SEQ ID NO: 129479 - DNA, 594 bp, Homo sapiens
  Payload ID: 5324
  Gene Symbol: ELMOD2
  Gene Name: ELMO/CED-12 domain containing 2
  ENST ID: ENST00000507667
  CDS Start-End: 490-594
ggtgcttgaagggagtgttccgtcgtttccgttgccggctgtttgcagtggggaaaccgaggcagctcctgctccccctagttcttccgctcctgtgaggtggctgctgtttcttttcctcttgccccggatgcctcggtgcggctgcactgagagcgcgcgggctcgcgagccccgcggggttctgcgggaacccgggggcgcctgggccggcgggtctttgtgcgagccctgccctcccattcgcgggcggcgcgcgaggggggtcggcgcagagacgcccagagccctggggtgctcaggcgccgctacgcgtgcatcccctctgctcggcagttctgcgcttttgtcctaatgagcgcggactagatggcttgattttcaagataatgatcaacccagctgtgctatgcgctctttctgcactgacctgcgggtacttcgaacttcgacagtccctcctcaggccctagtccagaggaaaaaaaaatgtttatttctttgtgggagttcttctatgggcacttttttcgattttggatgaaatggctattacgacagatgactgggaagtgtgaattgcagcgaatattt

SEQ ID NO: 129480 - DNA, 535 bp, Homo sapiens
  Payload ID: 5324
  Gene Symbol: ELMOD2
  Gene Name: ELMO/CED-12 domain containing 2
  ENST ID: ENST00000513606
  CDS Start-End: 246-535
agacgctgcctcatagcagctggttgattaagtttaattactttcctagttttcttacaacttcatggttgacttaaattattgctgctcttttaatttgcccttttgactactcaaaagaacaaagtacctcttgataagaaatctcttcaggcaaaaattccttgacatactccaagaataaggttttacagaaggcgacacatgttgttcagagtgaagtggacaaatatgtagatgatattatgaaggaaaagaatattaaccctgagaaggatgccagttttaaaatatgcatgaagatgtgcttactgcagataactggttataaacagctgtatttggatgtagaaagtgtgaggaaaaggccatatgattctgataacctacagcatgaagagctactcatgaagctttggaatcttctaatgcccacgaagaagttaaacgctagaatctccaagcagtgggctgaaattggttttcagggtgatgatcccaagacagacttcagaggcatgggcatacttgggtt

SEQ ID NO: 129481 - DNA, 751 bp, Homo sapiens
  Payload ID: 5324
  Gene Symbol: ELMOD2
  Gene Name: ELMO/CED-12 domain containing 2
  ENST ID: ENST00000511887
  CDS Start-End: 123-302
gacttccgggtcgcggtgcttgaagggagtgttccgtcgtttccgttgccggctgtttgcagtggggaaaccgaggcagctcctgctccccctagttcttccgctcctgtgaggaaaaaaaaatgtttatttctttgtgggagttcttctatgggcacttttttcgattttggatgaaatggctattacgacagatgactgggaagtgtgaattgcagcgaatatttgatacctatgtaggtgcacaaaggacacacaggatagaaaattccttgacatactccaagaataaggtaggataacataaaggtggtaactctagaaaacttaacgtggacatattttttcttaaaaaaaaaaaagtgccctgctagaagagtgttttctatagtgagcattgagtgaaattttccccgtttagaggtaatattctgttttcaaacatttctctatatatgtgtttttcgtgtgtatttcaaagaaaatacttgaataatttgtcctgtcctgaggttttatttgtttattttgctttaagagttgatagcttttaggaaagcagggccttaggaggaaagtcgtcttttagactgtgtcctcaggatagattatatgagagaaaagcaacttaggatagagaaaaccctgggttgtgtaccttttgagctaaaataagtcataattcatgctatgtattagtcagcttttgctgtgtaacaaactataataaaatctcaggggcataaaacga

SEQ ID NO: 129482 - DNA, 2685 bp, Homo sapiens
  Payload ID: 5325
  Gene Symbol: ELMOD3
  Gene Name: ELMO/CED-12 domain containing 3
  Uniprot ID: Q96FG2
  ENST ID: ENST00000315658
  CDS Start-End: 260-1435
ccccaagtttggaaagctcttttaacgagctgaggcttcgaagacctcagaggacttctctcagcactcacagaaacctcctacaccctcggatggcacaaagggactgttttcttactcttagtctgagtgactgccaaggaaggcaaaggtagagcaactggatctctggctctccacatagcttctgatctcagaccttactaaaatgctttctgggcccaaggacaaagctcacatgaacaaatgattttgagtcatgaatgaaaaatcttgctctttccatagtaaagaagaattaagagatggacagggtgaaagattgtctgctggatattctccatcatatgacaaggacaagagtgttctggctttcagaggaatccctatctcagagttgaagaaccatggcattctccaggctctgaccacagaagcttatgaatgggagccacgtgttgtgagtacagaggtggtcagagcccaagaagaatgggaagctgtggacaccatccagccagagacagggagccaagctagctcagagcagcctgggcagctaatctccttcagtgaggccctgcagcacttccagactgtggacctttcccccttcaagaaaagaatccagccaactattcgaaggactgggctcgccgccctccgacactacctcttcgggcctccaaagctccaccagcgccttcgggaagaaagggacttggtcctgaccattgctcagtgtggcctggatagccaagacccagtgcatggccgagtcctccagaccatctataagaagctgaccggctccaagtttgactgtgcccttcatggaaaccactgggaggacctgggctttcagggagcgaatccagccacagacctgagaggcgcaggcttccttgccctcctgcatctgctctacctggtgatggactcaaagaccttgccgatggcgcaggagattttccgcctgtctcgtcaccacatccagcaattccctttctgtttgatgtccgtgaacatcacccacattgccatccaggccttgagagaggagtgtctctccagagagtgtaatcggcagcagaaggtcatccccgtggtgaacagcttctatgccgccacattcctccacctcgcacatgtctggaggacacagcggaagaccatctcagactcgggctttgtcctcaaaggtgtgctctttcttctggggaggcctaggctgaatgcacagtgtcccaggtccagagagcccaaggtggttgctagactggttttggctgcagttcttccccatccacactttctcaaattccagcttaccaaaatctccatcacccaccccctggagtctgctagttctcctttctctgccctgactgtcgcccttttctggtcttatacttatgacaagcatatattctgatcaaaaattgggagccagggtccaatagttggactattcaaagttgcaattgtgcagacaaggtagagtgtgtggtccctgtggctgtagctggctccctagcctacctctctggtgatctctccatctgaggctccttcactttctctccatgggataggggttgggggtactccctagagctgctaggcttgaggccttgactgttgtgtcacccagagccccctcaagccttctgctccccaattctctctgttgcagagttggaagtattggccaagaagagcccacggcggctgctcaagaccctggagctgtacttggccagggtgtcaaagggacaggcctccttgttgggagcacagaagtgctatgggccagaagcccctcccttcaaggatctcaccttcacaggtgagagtgacctgcagtctcactcatccgaaggcgtatggctgatctgacctccgagatgaatggaggcttaaaggctgagctgcaggggctttcagggggtcagtggagccatgtcaggagcctggccaggccgcaccccttgctgtctcagcagatgggatataggaagctcctgggcttagctgtgggaagccaagtaccctcaccggcatgggacatgaggggcagctagacttcacccccttcccgcagacctgcctccagagcaaggagaattctgccttaatctgttgggctccagtctccgggttgaattccagtgtatcccactgggagtgaatggatcatgaggtgggatggccccatctggatgttctgcagatccccacatgggaggagattcccaagtagaggcagccagaattctgactccctggcagcagcagggctttcaggcaccagtgtctgtgttgttagaactcagaggaagaggcaggggcagcagccgacagggggcagcatgacccaagcaaggggcctgaggcctcagtgggggtagggcaaggaggtacctcacaggtgggtgtgaggccccctctggagtttctggccattcacttacccactctcttctccccctgacccccgctccattgtttatgatggaaaaacggacatttggctaggtgtctctcacggctgctccatcctagcccccacaagctggggcttcctcctgtagatgctgtgcatgccccatgatgagtttctggcctaattgagggaaggaggaaattcataccagcagttttcaaataaaagaattgttctaa

SEQ ID NO: 129483 - DNA, 2332 bp, Homo sapiens
  Payload ID: 5325
  Gene Symbol: ELMOD3
  Gene Name: ELMO/CED-12 domain containing 3
  Uniprot ID: Q96FG2
  ENST ID: ENST00000393852
  CDS Start-End: 401-1546
gcggctgtgcgcatgagcagatgaggcctagccgaggcggcgggacccccaagtttggaaagctcttttaacggctatgcgaaagttctgtccaaaggctgctcacagcccctgtctgactggttgtcatgatgaattgagctctctgttacctgcgcatcacaaccgagctgaggcttcgaagacctcagaggacttctctcagcactcacagaaacctcctacaccctcggatggcacaaagggactgttttcttactcttagtctgagtgactgccaaggaaggcaaaggtagagcaactggatctctggctctccacatagcttctgatctcagaccttactaaaatgctttctgggcccaaggacaaagctcacatgaacaaatgattttgagtcatgaatgaaaaatcttgctctttccatagtaaagaagaattaagagatggacagggtgaaagattgtctgctggatattctccatcatatgacaaggacaagagtgttctggctttcagaggaatccctatctcagagttgaagaaccatggcattctccaggctctgaccacagaagcttatgaatgggagccacgtgttgtgagtacagaggtggtcagagcccaagaagaatgggaagctgtggacaccatccagccagagacagggagccaagctagctcagagcagcctgggcagctaatctccttcagtgaggccctgcagcacttccagactgtggacctttcccccttcaagaaaagaatccagccaactattcgaaggactgggctcgccgccctccgacactacctcttcgggcctccaaagctccaccagcgccttcgggaagaaagggacttggtcctgaccattgctcagtgtggcctggatagccaagacccagtgcatggccgagtcctccagaccatctataagaagctgaccggctccaagtttgactgtgcccttcatggaaaccactgggaggacctgggctttcagggagcgaatccagccacagacctgagaggcgcaggcttccttgccctcctgcatctgctctacctggtgatggactcaaagaccttgccgatggcgcaggagattttccgcctgtctcgtcaccacatccagcaattccctttctgtttgatgtccgtgaacatcacccacattgccatccaggccttgagagaggagtgtctctccagagagtgtaatcggcagcagaaggtcatccccgtggtgaacagcttctatgccgccacattcctccacctcgcacatgtctggaggacacagcggaagaccatctcagactcgggctttgtcctcaaagagttggaagtattggccaagaagagcccacggcggctgctcaagaccctggagctgtacttggccagggtgtcaaagggacaggcctccttgttgggagcacagaagtgctatgggccagaagcccctcccttcaaggatctcaccttcacaggtgagagtgacctgcagtctcactcatccgaaggcgtatggctgatctgacctccgagatgaatggaggcttaaaggctgagctgcaggggctttcagggggtcagtggagccatgtcaggagcctggccaggccgcaccccttgctgtctcagcagatgggatataggaagctcctgggcttagctgtgggaagccaagtaccctcaccggcatgggacatgaggggcagctagacttcacccccttcccgcagacctgcctccagagcaaggagaattctgccttaatctgttgggctccagtctccgggttgaattccagtgtatcccactgggagtgaatggatcatgaggtgggatggccccatctggatgttctgcagatccccacatgggaggagattcccaagtagaggcagccagaattctgactccctggcagcagcagggctttcaggcaccagtgtctgtgttgttagaactcagaggaagaggcaggggcagcagccgacagggggcagcatgacccaagcaaggggcctgaggcctcagtgggggtagggcaaggaggtacctcacaggtgggtgtgaggccccctctggagtttctggccattcacttacccactctcttctccccctgacccccgctccattgtttatgatggaaaaacggacatttggctaggtgtctctcacggctgctccatcctagcccccacaagctggggcttcctcctgtagatgctgtgcatgccccatgatgagtttctggcctaattgagggaaggaggaaattcataccagcagttttcaaataaaagaattgttctaa

SEQ ID NO: 129484 - DNA, 2564 bp, Homo sapiens
  Payload ID: 5325
  Gene Symbol: ELMOD3
  Gene Name: ELMO/CED-12 domain containing 3
  Uniprot ID: Q96FG2
  ENST ID: ENST00000409344
  CDS Start-End: 633-1778
ggaagcggctgtgcgcatgagcagatgaggcctagccgaggcggcgggacccccaagtttggaaagctcttttaacggctatgcgaaagttctgtccaaaggctgctcacagcccctgtctgactggttgtcatgatgaattgagctctctgttacctgcgcatcacaaccgatagtaactgtccctactgaaggccccaggagtgctccagccaggtgtggaaagctggtcacgattctatgctacttggttcattttctacacagcaacagaagagccctcctgagattgctattaccatacccgcctgtcaccttgccaaggctggccaatgccgagcgtgttggctcatgcctgtaatcccagcactttggaaggccgaggcaggcggatcacgagagctgaggcttcgaagacctcagaggacttctctcagcactcacagaaacctcctacaccctcggatggcacaaagggactgttttcttactcttagtctgagtgactgccaaggaaggcaaaggtagagcaactggatctctggctctccacatagcttctgatctcagaccttactaaaatgctttctgggcccaaggacaaagctcacatgaacaaatgattttgagtcatgaatgaaaaatcttgctctttccatagtaaagaagaattaagagatggacagggtgaaagattgtctgctggatattctccatcatatgacaaggacaagagtgttctggctttcagaggaatccctatctcagagttgaagaaccatggcattctccaggctctgaccacagaagcttatgaatgggagccacgtgttgtgagtacagaggtggtcagagcccaagaagaatgggaagctgtggacaccatccagccagagacagggagccaagctagctcagagcagcctgggcagctaatctccttcagtgaggccctgcagcacttccagactgtggacctttcccccttcaagaaaagaatccagccaactattcgaaggactgggctcgccgccctccgacactacctcttcgggcctccaaagctccaccagcgccttcgggaagaaagggacttggtcctgaccattgctcagtgtggcctggatagccaagacccagtgcatggccgagtcctccagaccatctataagaagctgaccggctccaagtttgactgtgcccttcatggaaaccactgggaggacctgggctttcagggagcgaatccagccacagacctgagaggcgcaggcttccttgccctcctgcatctgctctacctggtgatggactcaaagaccttgccgatggcgcaggagattttccgcctgtctcgtcaccacatccagcaattccctttctgtttgatgtccgtgaacatcacccacattgccatccaggccttgagagaggagtgtctctccagagagtgtaatcggcagcagaaggtcatccccgtggtgaacagcttctatgccgccacattcctccacctcgcacatgtctggaggacacagcggaagaccatctcagactcgggctttgtcctcaaagagttggaagtattggccaagaagagcccacggcggctgctcaagaccctggagctgtacttggccagggtgtcaaagggacaggcctccttgttgggagcacagaagtgctatgggccagaagcccctcccttcaaggatctcaccttcacaggtgagagtgacctgcagtctcactcatccgaaggcgtatggctgatctgacctccgagatgaatggaggcttaaaggctgagctgcaggggctttcagggggtcagtggagccatgtcaggagcctggccaggccgcaccccttgctgtctcagcagatgggatataggaagctcctgggcttagctgtgggaagccaagtaccctcaccggcatgggacatgaggggcagctagacttcacccccttcccgcagacctgcctccagagcaaggagaattctgccttaatctgttgggctccagtctccgggttgaattccagtgtatcccactgggagtgaatggatcatgaggtgggatggccccatctggatgttctgcagatccccacatgggaggagattcccaagtagaggcagccagaattctgactccctggcagcagcagggctttcaggcaccagtgtctgtgttgttagaactcagaggaagaggcaggggcagcagccgacagggggcagcatgacccaagcaaggggcctgaggcctcagtgggggtagggcaaggaggtacctcacaggtgggtgtgaggccccctctggagtttctggccattcacttacccactctcttctccccctgacccccgctccattgtttatgatggaaaaacggacatttggctaggtgtctctcacggctgctccatcctagcccccacaagctggggcttcctcctgtagatgctgtgcatgccccatgatgagtttctggcctaattgagggaaggaggaaattcataccagcagttttcaaataaaagaattgttctaa

SEQ ID NO: 129485 - DNA, 994 bp, Homo sapiens
  Payload ID: 5325
  Gene Symbol: ELMOD3
  Gene Name: ELMO/CED-12 domain containing 3
  ENST ID: ENST00000409331
  CDS Start-End: 387-994
aaatgtagttctcggggccaggggagccggcacggaagcggctgtgcgcatgagcagatgaggcctagccgaggcggcgggacccccaagtttggaaagctcttttaacgatagtaactgtccctactgaaggccccaggagtgctccagccagagctgaggcttcgaagacctcagaggacttctctcagcactcacagaaacctcctacaccctcggatggcacaaagggactgttttcttactcttagtctgagtgactgccaaggaaggcaaaggtagagcaactggatctctggctctccacatagcttctgatctcagaccttactaaaatgctttctgggcccaaggacaaagctcacatgaacaaatgattttgagtcatgaatgaaaaatcttgctctttccatagtaaagaagaattaagagatggacagggtgaaagattgtctgctggatattctccatcatatgacaaggacaagagtgttctggctttcagaggaatccctatctcagagttgaagaaccatggcattctccaggctctgaccacagaagcttatgaatgggagccacgtgttgtgagtacagaggtggtcagagcccaagaagaatgggaagctgtggacaccatccagccagagacagggagccaagctagctcagagcagcctgggcagctaatctccttcagtgaggccctgcagcacttccagactgtggacctttcccccttcaagaaaagaatccagccaactattcgaaggactgggctcgccgccctccgacactacctcttcgggcctccaaagctccaccagcgccttcgggaagaaagggacttggtcctgaccattgctcagtgtggcctggatagccaagacccagtgcatggccgagtcctccagaccatctataagaagctgaccggctccaagtttgactgtgcccttcatggaaaccactgggaggacctgggctttcaggg

SEQ ID NO: 129486 - DNA, 2492 bp, Homo sapiens
  Payload ID: 5325
  Gene Symbol: ELMOD3
  Gene Name: ELMO/CED-12 domain containing 3
  Uniprot ID: Q96FG2
  ENST ID: ENST00000409890
  CDS Start-End: 559-1704
ggctatgcgaaagttctgtccaaaggctgctcacagcccctgtctgactggttgtcatgatgaattgagctctctgttacctgcgcatcacaaccgatagtaactgtccctactgaaggccccaggagtgctccagccaggtgtggaaagctggtcacgattctatgctacttggttcattttctacacagcaacagaagagccctcctgagattgctattaccatacccgcctgtcaccttgccaaggctggccaatgtgtgttttgtcataggctgtcatggaggccatgatggaggaaaaggaaaggggaggcagatgttgagagctgaggcttcgaagacctcagaggacttctctcagcactcacagaaacctcctacaccctcggatggcacaaagggactgttttcttactcttagtctgagtgactgccaaggaaggcaaaggtagagcaactggatctctggctctccacatagcttctgatctcagaccttactaaaatgctttctgggcccaaggacaaagctcacatgaacaaatgattttgagtcatgaatgaaaaatcttgctctttccatagtaaagaagaattaagagatggacagggtgaaagattgtctgctggatattctccatcatatgacaaggacaagagtgttctggctttcagaggaatccctatctcagagttgaagaaccatggcattctccaggctctgaccacagaagcttatgaatgggagccacgtgttgtgagtacagaggtggtcagagcccaagaagaatgggaagctgtggacaccatccagccagagacagggagccaagctagctcagagcagcctgggcagctaatctccttcagtgaggccctgcagcacttccagactgtggacctttcccccttcaagaaaagaatccagccaactattcgaaggactgggctcgccgccctccgacactacctcttcgggcctccaaagctccaccagcgccttcgggaagaaagggacttggtcctgaccattgctcagtgtggcctggatagccaagacccagtgcatggccgagtcctccagaccatctataagaagctgaccggctccaagtttgactgtgcccttcatggaaaccactgggaggacctgggctttcagggagcgaatccagccacagacctgagaggcgcaggcttccttgccctcctgcatctgctctacctggtgatggactcaaagaccttgccgatggcgcaggagattttccgcctgtctcgtcaccacatccagcaattccctttctgtttgatgtccgtgaacatcacccacattgccatccaggccttgagagaggagtgtctctccagagagtgtaatcggcagcagaaggtcatccccgtggtgaacagcttctatgccgccacattcctccacctcgcacatgtctggaggacacagcggaagaccatctcagactcgggctttgtcctcaaagagttggaagtattggccaagaagagcccacggcggctgctcaagaccctggagctgtacttggccagggtgtcaaagggacaggcctccttgttgggagcacagaagtgctatgggccagaagcccctcccttcaaggatctcaccttcacaggtgagagtgacctgcagtctcactcatccgaaggcgtatggctgatctgacctccgagatgaatggaggcttaaaggctgagctgcaggggctttcagggggtcagtggagccatgtcaggagcctggccaggccgcaccccttgctgtctcagcagatgggatataggaagctcctgggcttagctgtgggaagccaagtaccctcaccggcatgggacatgaggggcagctagacttcacccccttcccgcagacctgcctccagagcaaggagaattctgccttaatctgttgggctccagtctccgggttgaattccagtgtatcccactgggagtgaatggatcatgaggtgggatggccccatctggatgttctgcagatccccacatgggaggagattcccaagtagaggcagccagaattctgactccctggcagcagcagggctttcaggcaccagtgtctgtgttgttagaactcagaggaagaggcaggggcagcagccgacagggggcagcatgacccaagcaaggggcctgaggcctcagtgggggtagggcaaggaggtacctcacaggtgggtgtgaggccccctctggagtttctggccattcacttacccactctcttctccccctgacccccgctccattgtttatgatggaaaaacggacatttggctaggtgtctctcacggctgctccatcctagcccccacaagctggggcttcctcctgtagatgctgtgcatgccccatgatgagtttctggcctaattgagggaaggaggaaattcataccagcagttttcaaataaaagaattgttctaatt

SEQ ID NO: 129487 - DNA, 1392 bp, Homo sapiens
  Payload ID: 5325
  Gene Symbol: ELMOD3
  Gene Name: ELMO/CED-12 domain containing 3
  Uniprot ID: Q96FG2
  ENST ID: ENST00000410106
  CDS Start-End: 9-566
tttgagtcatgaatgaaaaatcttgctctttccatagtaaagaagaattaagagatggacagggtgaaagattgtctgctggatattctccatcatatgacaaggacaagagtgttctggctttcagaggaatccctatctcagagttgaagaaccatggcattctccaggctctgaccacagaagcttatgaatgggagccacgtgttgtgagtacagaggtggtcagagcccaagaagaatgggaagctgtggacaccatccagccagagacagggagccaagctagctcagagcagcctgggcagctaatctccttcagtgaggccctgcagcacttccagactgtggacctttcccccttcaagaaaagaatccagccaactattcgaaggactgggctcgccgccctccgacactacctcttcgggcctccaaagctccaccagcgccttcgggaagaaagggacttggtcctgaccattgctcagtgtgagtgcaatgcgagcccacagggcagttgctgcatctgtggttgggcaagaccgtgtgtgctgaccctgtgaggctaagccaggaatattgcatgtaccatggttggcgggtgagagtgggagctgagaactggatgtctcacagtccagatctcacattctctgagaagcacccggttctcccatgaggggcaatctggcagagagtgtgggtgtgttttggggcaggtggcctggatagccaagacccagtgcatggccgagtcctccagaccatctataagaagctgaccggctccaagtttgactgtgcccttcatggaaaccactgggaggacctgggctttcagggagcgaatccagccacagacctgagaggcgcaggcttccttgccctcctgcatctgctctacctggtgatggactcaaagaccttgccgatggcgcaggagattttccgcctgtctcgtcaccacatccagcaattccctttctgtttgatgtccgtgaacatcacccacattgccatccaggccttgagagaggagtgtctctccagagagtgtaatcggcagcagaaggtcatccccgtggtgaacagcttctatgccgccacattcctccacctcgcacatgtctggaggacacagcggaagaccatctcagactcgggctttgtcctcaaagagttggaagtattggccaagaagagcccacggcggctgctcaagaccctggagctgtacttggccagggtgtcaaagggacaggcctccttgttgggagcacagaagtgctatgggccagaagcccctcccttcaaggatctcaccttcacaggtgagagtgacctgcagtctcactcatccgaaggcgtatggctgatctgacctccgag

SEQ ID NO: 129488 - DNA, 2413 bp, Homo sapiens
  Payload ID: 5325
  Gene Symbol: ELMOD3
  Gene Name: ELMO/CED-12 domain containing 3
  Uniprot ID: Q96FG2
  ENST ID: ENST00000409013
  CDS Start-End: 482-1627
aaatgtagttctcggggccaggggagccggcacggaagcggctgtgcgcatgagcagatgaggcctagccgaggcggcgggacccccaagtttggaaagctcttttaacggctatgcgaaagttctgtccaaaggctgctcacagcccctgtctgactggttgtcatgatgaattgagctctctgttacctgcgcatcacaaccgatagtaactgtccctactgaaggccccaggagtgctccagccagagctgaggcttcgaagacctcagaggacttctctcagcactcacagaaacctcctacaccctcggatggcacaaagggactgttttcttactcttagtctgagtgactgccaaggaaggcaaaggtagagcaactggatctctggctctccacatagcttctgatctcagaccttactaaaatgctttctgggcccaaggacaaagctcacatgaacaaatgattttgagtcatgaatgaaaaatcttgctctttccatagtaaagaagaattaagagatggacagggtgaaagattgtctgctggatattctccatcatatgacaaggacaagagtgttctggctttcagaggaatccctatctcagagttgaagaaccatggcattctccaggctctgaccacagaagcttatgaatgggagccacgtgttgtgagtacagaggtggtcagagcccaagaagaatgggaagctgtggacaccatccagccagagacagggagccaagctagctcagagcagcctgggcagctaatctccttcagtgaggccctgcagcacttccagactgtggacctttcccccttcaagaaaagaatccagccaactattcgaaggactgggctcgccgccctccgacactacctcttcgggcctccaaagctccaccagcgccttcgggaagaaagggacttggtcctgaccattgctcagtgtggcctggatagccaagacccagtgcatggccgagtcctccagaccatctataagaagctgaccggctccaagtttgactgtgcccttcatggaaaccactgggaggacctgggctttcagggagcgaatccagccacagacctgagaggcgcaggcttccttgccctcctgcatctgctctacctggtgatggactcaaagaccttgccgatggcgcaggagattttccgcctgtctcgtcaccacatccagcaattccctttctgtttgatgtccgtgaacatcacccacattgccatccaggccttgagagaggagtgtctctccagagagtgtaatcggcagcagaaggtcatccccgtggtgaacagcttctatgccgccacattcctccacctcgcacatgtctggaggacacagcggaagaccatctcagactcgggctttgtcctcaaagagttggaagtattggccaagaagagcccacggcggctgctcaagaccctggagctgtacttggccagggtgtcaaagggacaggcctccttgttgggagcacagaagtgctatgggccagaagcccctcccttcaaggatctcaccttcacaggtgagagtgacctgcagtctcactcatccgaaggcgtatggctgatctgacctccgagatgaatggaggcttaaaggctgagctgcaggggctttcagggggtcagtggagccatgtcaggagcctggccaggccgcaccccttgctgtctcagcagatgggatataggaagctcctgggcttagctgtgggaagccaagtaccctcaccggcatgggacatgaggggcagctagacttcacccccttcccgcagacctgcctccagagcaaggagaattctgccttaatctgttgggctccagtctccgggttgaattccagtgtatcccactgggagtgaatggatcatgaggtgggatggccccatctggatgttctgcagatccccacatgggaggagattcccaagtagaggcagccagaattctgactccctggcagcagcagggctttcaggcaccagtgtctgtgttgttagaactcagaggaagaggcaggggcagcagccgacagggggcagcatgacccaagcaaggggcctgaggcctcagtgggggtagggcaaggaggtacctcacaggtgggtgtgaggccccctctggagtttctggccattcacttacccactctcttctccccctgacccccgctccattgtttatgatggaaaaacggacatttggctaggtgtctctcacggctgctccatcctagcccccacaagctggggcttcctcctgtagatgctgtgcatgccccatgatgagtttctggcctaattgagggaaggaggaaattcataccagcagttttcaaataaaagaattgttctaa

SEQ ID NO: 129489 - DNA, 1209 bp, Homo sapiens
  Payload ID: 5325
  Gene Symbol: ELMOD3
  Gene Name: ELMO/CED-12 domain containing 3
  ENST ID: ENST00000418268
  CDS Start-End: 850-1209
aataatcaaagcatcctgacaccagcagccagtttttatggcatcctggagggctgacctcatagagaggctaccctccttccttagtcacccaaagttgtgaactatgattgtcagttgtgtgtgggccatctgcccacttaggatgcaatttttgatgtgacagacattccggatgtccaattcccctgtgatgaggtatgagccttgtccagcccttttcctgagggaagcaatgtcagatgaaagacttagaattgcccaaactggctagccagctgccacatgcacagtattgctgataactgagaaaggttagaacatcgtgttgcattttgaatttctaccattgttggaaccaggtctagtattataagcccctgacccagcctgtgtgtgaggcctaaacaaagcctgagcacttcagctaagaccacccaccaaggtgacacctttagcctcacgcctttgataagctggcccaggtcccagtaactccattgtcagaaacagaccccatcccttctagtggtgctgctgccttttggacacagaatccagctcacagtcccctgtgtggtccccttttggccatcctgtggcttgggtagtaagagagctgaggcttcgaagacctcagaggacttctctcagcactcacagaaacctcctacaccctcggatggcacaaagggactgttttcttactcttagtctgagtgactgccaaggaaggcaaaggtagagcaactggatctctggctctccacatagcttctgatctcagaccttactaaaatgctttctgggcccaaggacaaagctcacatgaacaaatgattttgagtcatgaatgaaaaatcttgctctttccatagtaaagaagaattaagagatggacagggtgaaagattgtctgctggatattctccatcatatgacaaggacaagagtgttctggctttcagaggaatccctatctcagagttgaagaaccatggcattctccaggctctgaccacagaagcttatgaatgggagccacgtgttgtgagtacagaggtggtcagagcccaagaagaatgggaagctgtggacaccatccagccagagacagggagccaagctagctcagagcagcctgggcagctaatctccttcagtgaggccctgcagcacttccagactgtggacctttcccccttcaag

SEQ ID NO: 129490 - DNA, 1932 bp, Homo sapiens
  Payload ID: 5325
  Gene Symbol: ELMOD3
  Gene Name: ELMO/CED-12 domain containing 3
  Uniprot ID: Q96FG2
  ENST ID: ENST00000414593
  CDS Start-End: 120-605
ggaaggcaaaggtagagcaactggatctctggctctccacatagcttctgatctcagaccttactaaaatgctttctgggcccaaggacaaagctcacatgaacaaatgattttgagtcatgaatgaaaaatcttgctctttccatagtaaagaagaattaagagatggacagggtgaaagattgtctgctggatattctccatcatatgacaaggacaagagtgttctggctttcagaggaatccctatctcagagttgaagaaccatggcattctccaggctctgaccacagaagcttatgaatgggagccacgtgttgtgagtacagaggtggtcagagcccaagaagaatgggaagctgtggacaccatccagccagagacagggagccaagctagctcagagcagcctgggcagctaatctccttcagtgaggccctgcagcacttccagactgtggacctttcccccttcaagaaaagaatccagccaactattcgaaggactgggctcgccgccctccgacactacctcttcgggcctccaaagctccaccagcgccttcgggaagaaagggacttggtcctgaccattgctcagtgagcgaatccagccacagacctgagaggcgcaggcttccttgccctcctgcatctgctctacctggtgatggactcaaagaccttgccgatggcgcaggagattttccgcctgtctcgtcaccacatccagcaattccctttctgtttgatgtccgtgaacatcacccacattgccatccaggccttgagagaggagtgtctctccagagagtgtaatcggcagcagaaggtcatccccgtggtgaacagcttctatgccgccacattcctccacctcgcacatgtctggaggacacagcggaagaccatctcagactcgggctttgtcctcaaagagttggaagtattggccaagaagagcccacggcggctgctcaagaccctggagctgtacttggccagggtgtcaaagggacaggcctccttgttgggagcacagaagtgctatgggccagaagcccctcccttcaaggatctcaccttcacaggtgagagtgacctgcagtctcactcatccgaaggcgtatggctgatctgacctccgagatgaatggaggcttaaaggctgagctgcaggggctttcagggggtcagtggagccatgtcaggagcctggccaggccgcaccccttgctgtctcagcagatgggatataggaagctcctgggcttagctgtgggaagccaagtaccctcaccggcatgggacatgaggggcagctagacttcacccccttcccgcagacctgcctccagagcaaggagaattctgccttaatctgttgggctccagtctccgggttgaattccagtgtatcccactgggagtgaatggatcatgaggtgggatggccccatctggatgttctgcagatccccacatgggaggagattcccaagtagaggcagccagaattctgactccctggcagcagcagggctttcaggcaccagtgtctgtgttgttagaactcagaggaagaggcaggggcagcagccgacagggggcagcatgacccaagcaaggggcctgaggcctcagtgggggtagggcaaggaggtacctcacaggtgggtgtgaggccccctctggagtttctggccattcacttacccactctcttctccccctgacccccgctccattgtttatgatggaaaaacggacatttggctaggtgtctctcacggctgctccatcctagcccccacaagctggggcttcctcctgtagatgctgtgcatgccccatgatgagtttctggcctaattgagggaaggaggaaattcataccagcagttttcaaataaaagaattgttctaattaa

SEQ ID NO: 129491 - DNA, 559 bp, Homo sapiens
  Payload ID: 5325
  Gene Symbol: ELMOD3
  Gene Name: ELMO/CED-12 domain containing 3
  ENST ID: ENST00000440462
  CDS Start-End: 2-136
catgaatgaaaaatcttgctctttccatagtaaagaagaattaagagatggacagggtgaaagattgtctgctggatattctccatcatatgacaaggacaagagtgttctggctttcagaggaatccctttgtgagtacagaggtggtcagagcccaagaagaatgggaagctgtggacaccatccagccagagacagggagccaagctagctcagagcagcctgggcagctaatctccttcagtgaggccctgcagcacttccagactgtggacctttcccccttcaagaaaagaatccagccaactattcgaaggactgggctcgccgccctccgacactacctcttcgggcctccaaagctccaccagcgccttcgggaagaaagggacttggtcctgaccattgctcagtgtgagtgcaatgcgagcccacagggcagttgctgcatctgtggttgggcaagaccgtgtgtgctgaccctgtgaggctaagccaggaatattgcatgtaccatggttggcgggtgagagtgggagctgagaactggatgtctca

SEQ ID NO: 129492 - DNA, 1414 bp, Homo sapiens
  Payload ID: 5325
  Gene Symbol: ELMOD3
  Gene Name: ELMO/CED-12 domain containing 3
  Uniprot ID: Q96FG2
  ENST ID: ENST00000444108
  CDS Start-End: 9-773
tttgagtcatgaatgaaaaatcttgctctttccatagtaaagaagaattaagagatggacagggtgaaagattgtctgctggatattctccatcatatgacaaggacaagagtgttctggctttcagaggaatccctatctcagagttgaagaaccatggcattctccaggctctgaccacagaagcttatgaatgggagccacgtgttgtgagtacagaggtggtcagagcccaagaagaatgggaagctgtggacaccatccagccagagacagggagccaagctagctcagagcagcctgggcagctaatctccttcagtgaggccctgcagcacttccagactgtggacctttcccccttcaagaaaagaatccagccaactattcgaaggactgggctcgccgccctccgacactacctcttcgggcctccaaagctccaccagcgccttcgggaagaaagggacttggtcctgaccattgctcagtgtggcctggatagccaagacccagtgcatggccgagtcctccagaccatctataagaagctgaccggctccaagtttgactgtgcccttcatggaaaccactgggaggacctgggctttcagggagcgaatccagccacagacctgagaggcgcaggcttccttgccctcctgcatctgctctacctggtgatggactcaaagaccttgccgatggcgcaggagattttccgcctgtctcgtcaccacatccagattgaaagaaatcaagggaagggatgatattatgcaagtatatatgatcattaaataggcaatacctgaaggtacagaggtatacatgaaggtcagcatcaatggtgttctcagctacccatgttgagcaattccctttctgtttgatgtccgtgaacatcacccacattgccatccaggccttgagagaggagtgtctctccagagagtgtaatcggcagcagaaggtcatccccgtggtgaacagcttctatgccgccacattcctccacctcgcacatgtctggaggacacagcggaagaccatctcagactcgggctttgtcctcaaagagttggaagtattggccaagaagagcccacggcggctgctcaagaccctggagctgtacttggccagggtgtcaaagggacaggcctccttgttgggagcacagaagtgctatgggccagaagcccctcccttcaaggatctcaccttcacaggtgagagtgacctgcagtctcactcatccgaaggcgtatggctgatctgacctccgagatgaatggaggcttaaaggctgagctgcaggggctttcagggggtcagtggagccatgtcaggagcctggccaggccgcaccccttgctgtctcagcagatgggatataggaagctcctgggct

SEQ ID NO: 129493 - DNA, 4761 bp, Homo sapiens
  Payload ID: 5325
  Gene Symbol: ELMOD3
  Gene Name: ELMO/CED-12 domain containing 3
  Uniprot ID: Q96FG2
  ENST ID: ENST00000446464
  CDS Start-End: 2208-2972
ccggcacggaagcggctgtgcgcatgagcagatgaggcctagccgaggcggcgggacccccaagtttggaaagctcttttaacggctatgcgaaagttctgtccaaaggctgctcacagcccctgtctgactggttgtcatgatgaattgagctctctgttacctgcgcatcacaaccggtgagcgtctgtctctgtgcccctcaaagtggcccatagttttgtcctgggggcccgcctgggacggagtcctctatggcgggtccctaatgacaccccatccgtggggaacctgggggacggggagccgcccatggacaagcatggtgaaaggatcagctaagggcccatctaatttaaattcctatgcagagaatctaacctccagcaagcagttgaagaatcataccccctccttgcctaaagagggtgcataatgaatacttgattggagaaggatccatttttacaggaaggccgtttccttaggtccaactatcaggaatttgcctttgagtacttccttgtttaatggaattgttgctcttttcttctctgctacagatagtaactgtccctactgaaggccccaggagtgctccagccaggtgtggaaagctggtcacgattctatgctacttggttcattttctacacagcaacagaagagccctcctgagattgctattaccatacccgcctgtcaccttgccaaggctggccaatgtgtgttttgtcataggctgtcatggaggccatgatggaggaaaaggaaaggggaggcagatgttgaggccccagaggccacagtgagagcagtttagttcctggggtgccaggactaagggggcattgccctgtcccccggattacagtgagccacatgtcaagcccaagagccaggaggtattcttcctctcagtgttaataatcaaagcatcctgacaccagcagccagtttttatggcatcctggagggctgacctcatagagaggctaccctccttccttagtcacccaaagttgtgaactatgattgtcagttgtgtgtgggccatctgcccacttaggatgcaatttttgatgtgacagacattccggatgtccaattcccctgtgatgaggtatgagccttgtccagcccttttcctgagggaagcaatgtcagatgaaagacttagaattgcccaaactggctagccagctgccacatgcacagtattgctgataactgagaaaggttagaacatcgtgttgcattttgaatttctaccattgttggaaccaggtctagtattataagcccctgacccagcctgtgtgtgaggcctaaacaaagcctgagcacttcagctaagaccacccaccaaggtgacacctttagcctcacgcctttgataagctggcccaggtcccagtaactccattgtcagaaacagaccccatcccttctagtggtgctgctgccttttggacacagaatccagctcacagtcccctgtgtggtccccttttggccatcctgtggcttgggtagtaagaggtaagcatttggctgaggcaagttgttcattcagaataaattcacagctgcttaaattttgtcaacaggccgagcgtgttggctcatgcctgtaatcccagcactttggaaggccgaggcaggcggatcacgaggtcaggagttcaagaccagcctaaccaacatagtgaaaccccatctctactaaaaatacaaaaattagcagggtgtggtggcgcacgcctgtaattccagctactcgggagactgggacaggagaatcgcttgaacccgggaggcggaggttgcagtgagccgagatcgcacggctgcactccagcctgggcaacagggcaagactccaactcaaaaaaaaaaaaaaattgtcaacagaggcataactgaatggtgaaaccagttttctttttcaatttcttttttttcttttgtgcagagctgaggcttcgaagacctcagaggacttctctcagcactcacagaaacctcctacaccctcggatggcacaaagggactgttttcttactcttagtctgagtgactgccaaggaaggcaaaggtagagcaactggatctctggctctccacatagcttctgatctcagaccttactaaaatgctttctgggcccaaggacaaagctcacatgaacaaatgattttgagtcatgaatgaaaaatcttgctctttccatagtaaagaagaattaagagatggacagggtgaaagattgtctgctggatattctccatcatatgacaaggacaagagtgttctggctttcagaggaatccctatctcagagttgaagaaccatggcattctccaggctctgaccacagaagcttatgaatgggagccacgtgttgtgagtacagaggtggtcagagcccaagaagaatgggaagctgtggacaccatccagccagagacagggagccaagctagctcagagcagcctgggcagctaatctccttcagtgaggccctgcagcacttccagactgtggacctttcccccttcaagaaaagaatccagccaactattcgaaggactgggctcgccgccctccgacactacctcttcgggcctccaaagctccaccagcgccttcgggaagaaagggacttggtcctgaccattgctcagtgtggcctggatagccaagacccagtgcatggccgagtcctccagaccatctataagaagctgaccggctccaagtttgactgtgcccttcatggaaaccactgggaggacctgggctttcagggagcgaatccagccacagacctgagaggcgcaggcttccttgccctcctgcatctgctctacctggtgatggactcaaagaccttgccgatggcgcaggagattttccgcctgtctcgtcaccacatccagattgaaagaaatcaagggaagggatgatattatgcaagtatatatgatcattaaataggcaatacctgaaggtacagaggtatacatgaaggtcagcatcaatggtgttctcagctacccatgttgagcaattccctttctgtttgatgtccgtgaacatcacccacattgccatccaggccttgagagaggagtgtctctccagagagtgtaatcggcagcagaaggtcatccccgtggtgaacagcttctatgccgccacattcctccacctcgcacatgtctggaggacacagcggaagaccatctcagactcgggctttgtcctcaaaggtgtgctctttcttctggggaggcctaggctgaatgcacagtgtcccaggtccagagagcccaaggtggttgctagactggttttggctgcagttcttccccatccacactttctcaaattccagcttaccaaaatctccatcacccaccccctggagtctgctagttctcctttctctgccctgactgtcgcccttttctggtcttatacttatgacaagcatatattctgatcaaaaattgggagccagggtccaatagttggactattcaaagttgcaattgtgcagacaaggtagagtgtgtggtccctgtggctgtagctggctccctagcctacctctctggtgatctctccatctgaggctccttcactttctctccatgggataggggttgggggtactccctagagctgctaggcttgaggccttgactgttgtgtcacccagagccccctcaagccttctgctccccaattctctctgttgcagagttggaagtattggccaagaagagcccacggcggctgctcaagaccctggagctgtacttggccagggtgtcaaagggacaggcctccttgttgggagcacagaagtgctatgggccagaagcccctcccttcaaggatctcaccttcacaggtgagagtgacctgcagtctcactcatccgaaggcgtatggctgatctgacctccgagatgaatggaggcttaaaggctgagctgcaggggctttcagggggtcagtggagccatgtcaggagcctggccaggccgcaccccttgctgtctcagcagatgggatataggaagctcctgggcttagctgtgggaagccaagtaccctcaccggcatgggacatgaggggcagctagacttcacccccttcccgcagacctgcctccagagcaaggagaattctgccttaatctgttgggctccagtctccgggttgaattccagtgtatcccactgggagtgaatggatcatgaggtgggatggccccatctggatgttctgcagatccccacatgggaggagattcccaagtagaggcagccagaattctgactccctggcagcagcagggctttcaggcaccagtgtctgtgttgttagaactcagaggaagaggcaggggcagcagccgacagggggcagcatgacccaagcaaggggcctgaggcctcagtgggggtagggcaaggaggtacctcacaggtgggtgtgaggccccctctggagtttctggccattcacttacccactctcttctccccctgacccccgctccattgtttatgatggaaaaacggacatttggctaggtgtctctcacggctgctccatcctagcccccacaagctggggcttcctcctgtagatgctgtgcatgccccatgatgagtttctggcctaattgagggaaggaggaaattcataccagcagttttcaaataaaagaattgttctaa

SEQ ID NO: 129494 - DNA, 941 bp, Homo sapiens
  Payload ID: 5325
  Gene Symbol: ELMOD3
  Gene Name: ELMO/CED-12 domain containing 3
  ENST ID: ENST00000429764
  CDS Start-End: 456-710
atgagcagatgaggcctagccgaggcggcgggacccccaagtttggaaagctcttttaacgatagtaactgtccctactgaaggccccaggagtgctccagccaggtgtggaaagctggtcacgattctatgctacttggttcattttctacacagcaacagaagagccctcctgagattgctattaccatacccgcctgtcaccttgccaaggctggccaatagctgaggcttcgaagacctcagaggacttctctcagcactcacagaaacctcctacaccctcggatggcacaaagggactgttttcttactcttagtctgagtgactgccaaggaaggcaaaggtagagcaactggatctctggctctccacatagcttctgatctcagaccttactaaaatgctttctgggcccaaggacaaagctcacatgaacaaatgattttgagtcatgaatgaaaaatcttgctctttccatagtaaagaagaattaagagatggacagggtgaaagattgtctgctggatattctccatcatatgacaaggacaagagtgttctggctttcagaggaatccctaaaagaatccagccaactattcgaaggactgggctcgccgccctccgacactacctcttcgggcctccaaagctccaccagcgccttcgggaagaaagggacttggtcctgaccattgctcagtgagcgaatccagccacagacctgagaggcgcaggcttccttgccctcctgcatctgctctacctggtgatggactcaaagaccttgccgatggcgcaggagattttccgcctgtctcgtcaccacatccagattgaaagaaatcaagggaagggatgatattatgcaagtatatatgatcattaaataggcaatacctgaaggtacagaggtatacatgaaggtcagcatcaa

SEQ ID NO: 129495 - DNA, 2216 bp, Homo sapiens
  Payload ID: 5325
  Gene Symbol: ELMOD3
  Gene Name: ELMO/CED-12 domain containing 3
  ENST ID: ENST00000423095
  CDS Start-End: 407-895
acggaagcggctgtgcgcatgagcagatgaggcctagccgaggcggcgggacccccaagtttggaaagctcttttaacggctatgcgaaagttctgtccaaaggctgctcacagcccctgtctgactggttgtcatgatgaattgagctctctgttacctgcgcatcacaaccgagctgaggcttcgaagacctcagaggacttctctcagcactcacagaaacctcctacaccctcggatggcacaaagggactgttttcttactcttagtctgagtgactgccaaggaaggcaaaggtagagcaactggatctctggctctccacatagcttctgatctcagaccttactaaaatgctttctgggcccaaggacaaagctcacatgaacaaatgattttgagtcatgaatgaaaaatcttgctctttccatagtaaagaagaattaagagatggacagggtgaaagattgtctgctggatattctccatcatatgacaaggacaagagtgttctggctttcagaggaatccctatctcagagttgaagaaccatggcattctccaggctctgaccacagaagcttatgaatgggagccacgtgttgtgagtacagaggtggtcagagcccaagaagaatgggaagctgtggacaccatccagccagagacagggagccaagctagctcagagcagcctgggcagctaatctccttcagtgaggccctgcagcacttccagactgtggacctttcccccttcaagaaaagaatccagccaactattcgaaggactgggctcgccgccctccgacactacctcttcgggcctccaaagctccaccagcgccttcgggaagaaagggacttggtcctgaccattgctcagtattgaaagaaatcaagggaagggatgatattatgcaagtatatatgatcattaaataggcaatacctgaaggtacagaggtatacatgaaggtcagcatcaatggtgttctcagctacccatgttgagcaattccctttctgtttgatgtccgtgaacatcacccacattgccatccaggccttgagagaggagtgtctctccagagagtgtaatcggcagcagaaggtcatccccgtggtgaacagcttctatgccgccacattcctccacctcgcacatgtctggaggacacagcggaagaccatctcagactcgggctttgtcctcaaagagttggaagtattggccaagaagagcccacggcggctgctcaagaccctggagctgtacttggccagggtgtcaaagggacaggcctccttgttgggagcacagaagtgctatgggccagaagcccctcccttcaaggatctcaccttcacaggtgagagtgacctgcagtctcactcatccgaaggcgtatggctgatctgacctccgagatgaatggaggcttaaaggctgagctgcaggggctttcagggggtcagtggagccatgtcaggagcctggccaggccgcaccccttgctgtctcagcagatgggatataggaagctcctgggcttagctgtgggaagccaagtaccctcaccggcatgggacatgaggggcagctagacttcacccccttcccgcagacctgcctccagagcaaggagaattctgccttaatctgttgggctccagtctccgggttgaattccagtgtatcccactgggagtgaatggatcatgaggtgggatggccccatctggatgttctgcagatccccacatgggaggagattcccaagtagaggcagccagaattctgactccctggcagcagcagggctttcaggcaccagtgtctgtgttgttagaactcagaggaagaggcaggggcagcagccgacagggggcagcatgacccaagcaaggggcctgaggcctcagtgggggtagggcaaggaggtacctcacaggtgggtgtgaggccccctctggagtttctggccattcacttacccactctcttctccccctgacccccgctccattgtttatgatggaaaaacggacatttggctaggtgtctctcacggctgctccatcctagcccccacaagctggggcttcctcctgtagatgctgtgcatgccccatgatgagtttctggcctaattgagggaaggaggaaattcataccagcagttttcaaataaaagaattgttctaattaa

SEQ ID NO: 129496 - DNA, 977 bp, Homo sapiens
  Payload ID: 5325
  Gene Symbol: ELMOD3
  Gene Name: ELMO/CED-12 domain containing 3
  ENST ID: ENST00000462891
  CDS Start-End: 599-977
caagtttggaaagctcttttaacgatagtaactgtccctactgaaggccccaggagtgctccagccaggtgtggaaagctggtcacgattctatgctacttggttcattttctacacagcaacagaagagccctcctgagattgctattaccatacccgcctgtcaccttgccaaggctggccaatgtgtgttttgtcataggctgtcatggaggccatgatggaggaaaaggaaaggggaggcagatgttgaggccccagaggccacagtgagagcagtttagttcctggggtgccaggactaagggggcattgccctgtcccccggattacagtgagccacatgtcaagcccaagagccaggagagctgaggcttcgaagacctcagaggacttctctcagcactcacagaaacctcctacaccctcggatggcacaaagggactgttttcttactcttagtctgagtgactgccaaggaaggcaaaggtagagcaactggatctctggctctccacatagcttctgatctcagaccttactaaaatgctttctgggcccaaggacaaagctcacatgaacaaatgattttgagtcatgaatgaaaaatcttgctctttccatagtaaagaagaattaagagatggacagggtgaaagattgtctgctggatattctccatcatatgacaaggacaagagtgttctggctttcagaggaatccctatctcagagttgaagaaccatggcattctccaggctctgaccacagaagcttatgaatgggagccacgtgttgtgagtacagaggtggtcagagcccaagaagaatgggaagctgtggacaccatccagccagagacagggagccaagctagctcagagcagcctgggcagctaatctccttcagtgaggccctgcagcacttccagactgtggacctttcccccttcaagaaaagaatccagccaacta

SEQ ID NO: 129497 - DNA, 4027 bp, Homo sapiens
  Payload ID: 5326
  Gene Symbol: ELL
  Gene Name: elongation factor RNA polymerase II
  Uniprot ID: P55199
  ENST ID: ENST00000262809
  CDS Start-End: 73-1938
ggcggggcggggcgtggccggcgtggcggcgctggagccgggaagggggcgcgggggagagatggtcgcaagatggcggcgctgaaggaggataggagctacgggctgtcgtgcgggcgggttagcgacggcagcaaggtgtcggtgttccacgtgaagctcaccgacagtgccctgagggccttcgagagctaccgcgccagacaggattctgtttcactgaggccatctatccgatttcaaggaagccaagggcacatctccatcccccagcctgactgccccgcagaggcgcggacgttctccttctacctctccaacatcggccgcgacaacccccagggcagcttcgactgcatccagcagtatgtctccagtcatggggaagttcacctggactgcctgggcagcatacaggacaagatcacggtgtgtgccaccgacgactcctaccagaaggcgcggcagagcatggcccaggcggaggaggagacgcggagccgaagtgccattgtcatcaaggctggaggccgctacctgggcaagaaggttcagtttcggaaaccagccccaggtgcaacagacgcggtgccctcccggaagcgggcaacccccatcaacttggcgagtgccatcaggaagagtggtgccagtgccgtgagtgggggcagcggggtgtcccagaggcccttccgtgaccgagtgctgcacctcctggcactacggccctaccgcaaggctgagctgctgctgcgactgcagaaggacggcctgacgcaggcggacaaggacgcgctggatggcctcctccagcaggtggccaacatgagtgctaaggacggcacgtgtacactgcaggactgcatgtacaaggatgtgcagaaggactggcctggctactcggagggggaccagcagctgctgaagcgggtgctcgtccggaagctgtgccagccacagagcactggcagcctccttggagaccctgctgcctccagccccccaggcgagcgtgggcgctcggcctcgcccccacagaagcggctgcagcctcctgatttcatcgaccccctagccaacaagaaaccccggatatcgcacttcactcagagagctcagcctgccgtcaacgggaagctgggcgtgcccaatggccgtgaggccttgctgcccaccccgggcccaccagccagcacggacaccctcagctccagcactcacctgcccccgcggctggagcccccgagggcccacgaccccctggccgatgtcagcaatgacctgggccacagcggccgagactgtgagcacggagaggcggctgccccagcccccactgtgcgcctcggcctgcccctgctgacggactgtgcccagcccagcaggccacacggcagcccctcgcgcagcaagcccaagaagaagtccaagaagcacaaagacaaggagagggcggctgaggacaagccccgggcccagcttccagactgtgcacctgccacccatgccacccccggagccccagcagacaccccaggtttaaacggaacctgcagcgtttccagtgttcccacgtccacgtcggagacgcctgactacttgctgaagtacgcagccatctcctcttcggagcagcgccagagctacaagaacgacttcaatgccgagtacagcgagtaccgcgacctgcacgcccgcattgagcgcatcacgcggcggttcacccagctcgacgcccagctccggcagctctcccagggctccgaggagtatgagactactcgagggcagattttgcaggaatatcgaaaaatcaaaaagaccaacaccaactacagccaggagaagcaccgctgcgagtacctgcacagcaagctggcccacatcaagaggctcatcgccgagtacgaccagcggcagctgcaggcttggccctagccgccctccccgatggcggggatctgggagggtcgggggagcaaaaggcggtgagagaggatttatttaaaaaaataaacccgaggaagatgctcatctgagccagcaccgccggctttcagggcagcccctgcagacgtctggccctggcgggtggctgcaagcccacctcggccctccctgcgcttcctgagcagtccctgcttatgatgggctccccaggaagcccactgcctcctccctggctgcagcctccggggttcagcctcctgtctcgccagaagactcctaggcccttggggtggcgcgcctgccttttctagttttatacaaagacagccacttttagctactgctaatgagacttgagtctatttttgtacaaaagagaagcaaaatcttttttctaaacctgtgcctccctctcctcggacacccagggtctagccgctgccctgggtcctgcctgcagtattacagaggtcgtcgaaaggtgcagctgcgttctgagggcgtggggaatgggcaggtggcctctgctggtctctggctctacgtttaggcacccctttccccagcctctcctccttgggcagggtctctgctccagcaagcaaacagggtggcccaggtggctattttgagaactccagctggtgcccccagacagctgctcagagccaagggggcagagggctttcagcgcccccaggcctgccctgctatttcaggccctcagctgtcgggggccactgtgtttctgtgctccaagttgagactcggccgcagcggcgtcagacttttctttgcgatgtcctcggtttcccatttgttgctgctgctgctcattccacactgttgagaccttgtggtctcgatgctgctggcctccctccgtccctctgtccacttgtgggtcctggggtcgtcttagcagagccaccgccaaggtttgcactcagggaggggctgatggagggctgggcgccatggggtcagggaggccccagggacccatgggcagagctggggagccaggaggatgggtctgcctgctctgggggtgcaggctctgcagacaccccaattgctgctctgttgctgtgcctagtctagtgtcccccaaagcatcggggggccacgcaagtgtgggtgtgtgagtgtgcgtatgtggggaccccccagggcatggtggggtctgaggcgtgtgttcccatttagggctgaatgaagccatgacttggaaaggtggtggggggtggatggcggctgtgactcagggcccagggatcacatgggggtcactgctgccatcagcagtcaggcagggagaacagaaatgcaaaaatacagatgtctatttttctaaactggggggtggaggggtgcctcctgacagcttccaaagagctgactgtggagggcccacagtgtatcccacccctgcccgagagtctctctcctttgggacccccgggttcccagagctccgaggaaactgatccttcatgtttcaatagctgttgttgtttttctctttgggccgggccgggccggggaagggccgagcaggctccaggaggcctccagagtcagctggaccttgctgtgtcgcccgcaggcagccctgcagacaccggtgaggtgggatgatttcaggaggtcccagcccgggactgcccgcccctctgccctgggaaccagtccaaggggctgtcagttgaatttgcctttttgttgttgttgttgtttttgttgtttatttgttctccttttaaggaattatgaagctaagaaaagttttgtgttttgggggttggtggacaaagttctagctgattaaatatggtctaacttattgatactatttttttttcttttaatgttgtactgtggagaaaaactattttgagccatggggttggtgtttacaagaactttccacttttgccaaaatgttacaattgaaaggcatctatctgcgtcttcagtttcctgatattttcttaaaagatctagtgtcctttttgtacactaaacaggtgaatgctgacttttttcattctccaataaatttcactgaactgaa

SEQ ID NO: 129498 - DNA, 1852 bp, Homo sapiens
  Payload ID: 5326
  Gene Symbol: ELL
  Gene Name: elongation factor RNA polymerase II
  ENST ID: ENST00000596124
  CDS Start-End: 385-1851
aactcgccgtgtgtgtgtcagagaatgttgctcctgtgccctgagtcaacaaagacggcccctgtgagctcaagggcagttgggaaggtgtagcgaacatcctgtaaaacgtcccatcttgattctgtttcactgaggccatctatccgatttcaaggaagccaagggcacatctccatcccccagcctgactgccccgcagaggcgcggacgttctccttctacctctccaacatcggccgcgacaacccccagggcagcttcgactgcatccagcagtatgtctccagtcatggggaagttcacctggactgcctgggcagcatacaggacaagatcacggtgtgtgccaccgacgactcctaccagaaggcgcggcagagcatggcccaggcggaggaggagacgcggagccgaagtgccattgtcatcaaggctggaggccgctacctgggcaagaaggttcagtttcggaaaccagccccaggtgcaacagacgcggtgccctcccggaagcgggcaacccccatcaacttggcgagtgccatcaggaagagtggtgccagtgccgtgagtgggggcagcggggtgtcccagaggcccttccgtgaccgagtgctgcacctcctggcactacggccctaccgcaaggctgagctgctgctgcgactgcagaaggacggcctgacgcaggcggacaaggacgcgctggatggcctcctccagcaggtggccaacatgagtgctaaggacggcacgtgtacactgcaggactgcatgtacaaggatgtgcagaaggactggcctggctactcggagggggaccagcagctgctgaagcgggtgctcgtccggaagctgtgccagccacagagcactggcagcctccttggagaccctgctgcctccagccccccaggcgagcgtgggcgctcggcctcgcccccacagaagcggctgcagcctcctgatttcatcgaccccctagccaacaagaaaccccggatatcgcacttcactcagagagctcagcctgccgtcaacgggaagctgggcgtgcccaatggccgtgaggccttgctgcccaccccgggcccaccagccagcacggacaccctcagctccagcactcacctgcccccgcggctggagcccccgagggcccacgaccccctggccgatgtcagcaatgacctgggccacagcggccgagactgtgagcacggagaggcggctgccccagcccccactgtgcgcctcggcctgcccctgctgacggactgtgcccagcccagcaggccacacggcagcccctcgcgcagcaagcccaagaagaagtccaagaagcacaaagacaaggagagggcggctgaggacaagccccgggcccagcttccagactgtgcacctgccacccatgccacccccggagccccagcagacaccccaggtttaaacggaacctgcagcgtttccagtgttcccacgtccacgtcggagacgcctgactacttgctgaagtacgcagccatctcctcttcggagcagcgccagagctacaagaacgacttcaatgccgagtacagcgagtaccgcgacctgcacgcccgcattgagcgcatcacgcggcggttcacccagctcgacgcccagctccggcagctctcccagggctccgaggagtatgagactactcgagggcagattttgcaggaatatcgaaaaatcaaaaagaccaacaccaactacagccaggagaagcaccgctgcgagtacctgcacagcaagctggcccacatcaagaggctcatcgccgagtacgaccagcggcagctgcaggcttggccctagc

SEQ ID NO: 129499 - DNA, 4074 bp, Homo sapiens
  Payload ID: 5326
  Gene Symbol: ELL
  Gene Name: elongation factor RNA polymerase II
  ENST ID: ENST00000594635
  CDS Start-End: 62-286
gcgtggccggcgtggcggcgctggagccgggaagggggcgcgggggagagatggtcgcaagatggcggcgctgaaggaggataggagctacgggctgtcgtgcgggcgggttagcgacggcagcaaggtgtcggtgttccacgtgaagctcaccgacagtgccctgagggccttcgagagctaccgcgccagacaggattctgtttcactgaggccatctatccgatttcaaggaagccaagggcctgagagctctgcacagctggatgtggggatatggacatgatgatccatgggcttccagcacatctccatcccccagcctgactgccccgcagaggcgcggacgttctccttctacctctccaacatcggccgcgacaacccccagggcagcttcgactgcatccagcagtatgtctccagtcatggggaagttcacctggactgcctgggcagcatacaggacaagatcacggtgtgtgccaccgacgactcctaccagaaggcgcggcagagcatggcccaggcggaggaggagacgcggagccgaagtgccattgtcatcaaggctggaggccgctacctgggcaagaaggttcagtttcggaaaccagccccaggtgcaacagacgcggtgccctcccggaagcgggcaacccccatcaacttggcgagtgccatcaggaagagtggtgccagtgccgtgagtgggggcagcggggtgtcccagaggcccttccgtgaccgagtgctgcacctcctggcactacggccctaccgcaaggctgagctgctgctgcgactgcagaaggacggcctgacgcaggcggacaaggacgcgctggatggcctcctccagcaggtggccaacatgagtgctaaggacggcacgtgtacactgcaggactgcatgtacaaggatgtgcagaaggactggcctggctactcggagggggaccagcagctgctgaagcgggtgctcgtccggaagctgtgccagccacagagcactggcagcctccttggagaccctgctgcctccagccccccaggcgagcgtgggcgctcggcctcgcccccacagaagcggctgcagcctcctgatttcatcgaccccctagccaacaagaaaccccggatatcgcacttcactcagagagctcagcctgccgtcaacgggaagctgggcgtgcccaatggccgtgaggccttgctgcccaccccgggcccaccagccagcacggacaccctcagctccagcactcacctgcccccgcggctggagcccccgagggcccacgaccccctggccgatgtcagcaatgacctgggccacagcggccgagactgtgagcacggagaggcggctgccccagcccccactgtgcgcctcggcctgcccctgctgacggactgtgcccagcccagcaggccacacggcagcccctcgcgcagcaagcccaagaagaagtccaagaagcacaaagacaaggagagggcggctgaggacaagccccgggcccagcttccagactgtgcacctgccacccatgccacccccggagccccagcagacaccccaggtttaaacggaacctgcagcgtttccagtgttcccacgtccacgtcggagacgcctgactacttgctgaagtacgcagccatctcctcttcggagcagcgccagagctacaagaacgacttcaatgccgagtacagcgagtaccgcgacctgcacgcccgcattgagcgcatcacgcggcggttcacccagctcgacgcccagctccggcagctctcccagggctccgaggagtatgagactactcgagggcagattttgcaggaatatcgaaaaatcaaaaagaccaacaccaactacagccaggagaagcaccgctgcgagtacctgcacagcaagctggcccacatcaagaggctcatcgccgagtacgaccagcggcagctgcaggcttggccctagccgccctccccgatggcggggatctgggagggtcgggggagcaaaaggcggtgagagaggatttatttaaaaaaataaacccgaggaagatgctcatctgagccagcaccgccggctttcagggcagcccctgcagacgtctggccctggcgggtggctgcaagcccacctcggccctccctgcgcttcctgagcagtccctgcttatgatgggctccccaggaagcccactgcctcctccctggctgcagcctccggggttcagcctcctgtctcgccagaagactcctaggcccttggggtggcgcgcctgccttttctagttttatacaaagacagccacttttagctactgctaatgagacttgagtctatttttgtacaaaagagaagcaaaatcttttttctaaacctgtgcctccctctcctcggacacccagggtctagccgctgccctgggtcctgcctgcagtattacagaggtcgtcgaaaggtgcagctgcgttctgagggcgtggggaatgggcaggtggcctctgctggtctctggctctacgtttaggcacccctttccccagcctctcctccttgggcagggtctctgctccagcaagcaaacagggtggcccaggtggctattttgagaactccagctggtgcccccagacagctgctcagagccaagggggcagagggctttcagcgcccccaggcctgccctgctatttcaggccctcagctgtcgggggccactgtgtttctgtgctccaagttgagactcggccgcagcggcgtcagacttttctttgcgatgtcctcggtttcccatttgttgctgctgctgctcattccacactgttgagaccttgtggtctcgatgctgctggcctccctccgtccctctgtccacttgtgggtcctggggtcgtcttagcagagccaccgccaaggtttgcactcagggaggggctgatggagggctgggcgccatggggtcagggaggccccagggacccatgggcagagctggggagccaggaggatgggtctgcctgctctgggggtgcaggctctgcagacaccccaattgctgctctgttgctgtgcctagtctagtgtcccccaaagcatcggggggccacgcaagtgtgggtgtgtgagtgtgcgtatgtggggaccccccagggcatggtggggtctgaggcgtgtgttcccatttagggctgaatgaagccatgacttggaaaggtggtggggggtggatggcggctgtgactcagggcccagggatcacatgggggtcactgctgccatcagcagtcaggcagggagaacagaaatgcaaaaatacagatgtctatttttctaaactggggggtggaggggtgcctcctgacagcttccaaagagctgactgtggagggcccacagtgtatcccacccctgcccgagagtctctctcctttgggacccccgggttcccagagctccgaggaaactgatccttcatgtttcaatagctgttgttgtttttctctttgggccgggccgggccggggaagggccgagcaggctccaggaggcctccagagtcagctggaccttgctgtgtcgcccgcaggcagccctgcagacaccggtgaggtgggatgatttcaggaggtcccagcccgggactgcccgcccctctgccctgggaaccagtccaaggggctgtcagttgaatttgcctttttgttgttgttgttgtttttgttgtttatttgttctccttttaaggaattatgaagctaagaaaagttttgtgttttgggggttggtggacaaagttctagctgattaaatatggtctaacttattgatactatttttttttcttttaatgttgtactgtggagaaaaactattttgagccatggggttggtgtttacaagaactttccacttttgccaaaatgttacaattgaaaggcatctatctgcgtcttcagtttcctgatattttcttaaaagatctagtgtcctttttgtacactaaacaggtgaatgctgacttttttcattctccaataaatttcactgaactg

SEQ ID NO: 129500 - DNA, 2352 bp, Homo sapiens
  Payload ID: 5327
  Gene Symbol: ELL3
  Gene Name: elongation factor RNA polymerase II-like 3
  Uniprot ID: Q9HB65
  ENST ID: ENST00000319359
  CDS Start-End: 643-1836
aactttcactgctgccaccacaaccgcagggccccaattacctctctgttagaaatcggtttcagagcggtggaaccgcgggcgggaaaaagcccaggcgctgtctcgggtgccccttcgtgtcagccatcctctggtctctcgggtctccgaagctcggggctaactgggcgcgaaccgctgagcccgcctaccaaccaggccctttctcccgcccctctgcggctgaaaccctcaaggggttgcaggttcagctttcacttagagacagcaactccaaattcagggtcgctggggaaactaaggcaggactggggactctgagtgagaggtcagacgctggtcgcggactctttctcccgagaactggggatagctcttccgatagcccaaagcgattcatgcggatcctagaagaaagcgccgaggtccgggcggttggccggggagagcgaagcgccgcccacgcggctgggaaagcttggggtggcgctggcgggaggtggggccgggggcgggttcctggcggagggtggggcagacgtgggttaccgggtgtgccaaccaaaccctgaacagaggaggtggcggtggtggccctcgcctgtggcccccgtgctgcttgcactcgaactcgtcgccatggaggagctccaggagcctctgagaggacagctccggctctgcttcacgcaagctgcccggactagcctcttactgctcaggctcaacgacgctgccctgcgggcgctgcaagagtgtcagcggcaacaggtacggccggtgattgctttccaaggccaccgagggtatctgagactcccaggccctggttggtcctgcctcttctccttcatagtgtcccagtgttgtcaggagggcgctggtggtagcttggaccttgtgtgccaacgcttcctcaggtctgggcctaacagcctccactgcctgggctcactcagggagcgcctcattatttgggcagccatggattctatcccagccccatcatcagttcagggacacaacctgactgaagatgccagacatcctgagagttggcagaacacaggaggctattctgaaggagatgcagtatcacagccacagatggcactagaggaggtgtcagtgtcagatccactggcaagcaaccaaggacagtcactcccaggatcctcaagggagcacatggcacagtgggaagtgagaagccagacccatgttccaaacagagaacctgttcaggcactgccttcctctgccagccggaaacgtctggacaagaaacgttcagtgcctgtagccactgtagaactggaagaaaagaggttcagaactctgcctttagtgccaagccccctacaaggcctgaccaatcaggatttacaagagggagaagattgggagcaagaagatgaggacatggaccccagattagaacacagttcctcagttcaagaagattctgaatccccaagtcctgaagatataccagactacctcctgcaatacagggccatccacagtgcagaacagcaacatgcctatgagcaggactttgagacagattatgctgaataccgcatcctgcatgcccgtgttgggactgcaagccaaaggttcatagagctgggagcagagattaaaagagttcggcgaggaactccagaatacaaggtcctggaagacaagataatccaggaatataaaaagttcaggaagcagtacccaagttacagagaagaaaagcgtcgctgtgagtaccttcaccagaaattgtcccacattaaaggtctcatcctggagtttgaggaaaagaacaggggcagctgaagttatcaagggaatttttgagcctctgcttagtgaaacacaaaggaacaaagcagctataaactaaatagaatgcaactatctgcttttcttatgctgaccactggagtccatggtggcaagtagagagctgctctaggttcttgaggtttggttttcattattaatttttagggtatgggcactgtgcaaagactccatagctgtgcctaggagtctaggaaaagtgacagaggcttggcttttttacctttagttcagccaagtcattttcaagtcctgagaaatgacatcatcttcaggataaaataatgaggacattagacaaaccaaactaagtgaattttagcctggtagcctctctaaggaaacagtaataataacttctgataagagttaaaagaacttgtagcatacctggatataatgggaaagggcctgggtgttacccatgtactgaaaatgaacttttaccaacatggctaaaaaattaaaactgactgcttctgtgtcctt

SEQ ID NO: 129501 - DNA, 792 bp, Homo sapiens
  Payload ID: 5327
  Gene Symbol: ELL3
  Gene Name: elongation factor RNA polymerase II-like 3
  ENST ID: ENST00000433927
  CDS Start-End: 174-792
aaaccctcaaggggttgcaggttcagctttcacttagagacagcaactccaaattcagggtcgctggggaaactaaggcaggactggggactctgagtgagaggtcagacgctggtcgcggactctttctcccgagaactggggatagctcttccgatagcccaaagcgattcatgcggatcctagaagaaagcgccgagaggaggtggcggtggtggccctcgcctgtggcccccgtgctgcttgcactcgaactcgtcgccatggaggagctccaggagcctctgagaggacagctccggctctgcttcacgcaagctgcccggactagcctcttactgctcaggctcaacgacgctgccctgcgggcgctgcaagagtgtcagcggcaacaggtacggccggtgattgctttccaaggccaccgagggtatctgagactcccaggccctggttggtcctgcctcttctccttcatagtgtcccagtgttgtcaggagggcgctggtggtagcttggaccttgtgtgccaacgcttcctcaggtctgggcctaacagcctccactgcctgggctcactcagggagcgcctcattatttgggcagccatggattctatcccagccccatcatcagttcagggacacaacctgactgaagatgccagacatcctgagagttggcagaacacaggaggctattctgaaggagatgcagtatcacagccacagatggcactagaggaggtgtcagtgtcagatccactggcaagcaaccaaggacagtcactcc

SEQ ID NO: 129502 - DNA, 3675 bp, Homo sapiens
  Payload ID: 5328
  Gene Symbol: EFTUD1
  Gene Name: elongation factor Tu GTP binding domain containing 1
  Uniprot ID: Q7Z2Z2
  ENST ID: ENST00000268206
  CDS Start-End: 170-3532
agagacgtgcgggtgaaaggtcgagcgacagccggccccgccccctggcgcgcgggcgtgtcggacccgcagagctctcggactttcggaagctctcggtgtgggtgcgacccgagagaaggagcggggctggtggggctgctgcagccgtcacaggaaataagtaatcatggtgctcaacagtttggataagatgattcaactccagaaaaacactgccaacatcaggaatatttgtgttttggctcatgttgaccatggaaaaactactctggctgactgtcttatatctagcaatggaatcatctccagccgcctagcaggcaagttaaggtacatggacagcagagaagatgaacagatccgagggatcactatgaaatccagtgccatttccctacattatgcaacaggtaatgaggagtacctgatcaatctgatagactctccaggacacgtggacttttcctcagaagtatcaaccgctgttcgcatttgtgatggatgcatcattgtggtagatgctgtggaaggagtctgtccacagacacaggcagttctgcgacaagcttggcttgaaaacatccgtccggttttagtgattaataagattgatcgcttgatagtggaactgaaattcaccccacaagaggcctattctcacctcaagaatattttagaacagattaatgcgctcacagggactctttttacttctaaagtcctagaagaaagagcagagagggagactgaatcccaagtgaatccaaattctgaacaaggagagcaagtatatgactggagcactggcttggaggacacagatgattctcacctttacttctctccagaacagggaaatgtggtgtttaccagtgcaatagatgggtggggctttggaattgagcacttcgccagaatctacagtcaaaaaattggcatcaaaaaggaagttcttatgaaaaccttgtggggagattactatataaatatgaaggctaaaaagatcatgaagggtgatcaggccaaaggaaagaaacctttatttgtacagttgatcctggaaaatatatggagtttgtatgatgctgttttgaaaaaggacaaagacaaaattgataaaatagtgacttctttaggattaaaaattggagcccgggaggcacgacattcagaccctaaagttcagatcaacgccatttgcagtcagtggctacccatatcccatgctgttcttgctatggtgtgtcagaaacttcctagtccccttgatattacagctgagagagtggagagactgatgtgcacaggatcacaaacttttgactcttttccaccagaaactcaagcactgaaagcagcttttatgaaatgtggaagtgaggacactgctccagttattatatttgtttccaaaatgtttgcagttgatgctaaggccttgcctcagaataagccaaggcctctcactcaagaagaaattgctcagagacgtgagcgtgcaagacaaaggcatgcagagaagcttgcagcagcacagggacaggcacccttggagcccacccaagatgggagtgccattgaaacatgtccaaaaggagaggagccaagaggtgacgagcaacaggtggaaagtatgacccctaaacctgtgctccaggaagaaaacaaccaagagtcttttattgcatttgctcgggtgttcagtggtgtggctcgaagaggaaagaaaatttttgtcttggggcccaaatacagtcctcttgagtttttacgaagggtaccattaggcttctcagctccaccagatggcctcccccaagtcccccacatggcatactgtgctctggaaaacctgtatcttctgatgggaagggaactggaatatctagaggaggtacctccaggaaatgtgctaggaataggaggccttcaagattttgtgctgaaatctgcaacactgtgtagcctgccatcctgcccaccatttataccactcaacttcgaagccactcctattgtgagagttgctgttgaaccaaaacatccaagtgaaatgcctcagctcgtaaaaggaatgaaactgttaaaccaggctgatccctgtgtccagattttaattcaggaaacgggagagcacgttttagtcacagcaggagaagtccaccttcagcgatgcctggatgacttaaaagaaaggtttgcaaagattcatatcagtgtatctgaacctattattccattcagagaaacaatcacaaaacccccaaaagttgacatggtcaatgaagaaataggcaaacagcaaaaagttgcagtcatacaccaaatgaaagaagatcaaagcaaaatccctgaaggaatccaagttgactctgacgggctaatcaccataacaactcccaataaacttgccacgctcagtgttcgagccatgccccttccagaagaagtcacccagattctggaagaaaatagtgatttgattcgttctatggagcagttgacatcctctttgaatgagggtgaaaatactcacatgattcatcagaagacccaagagaaaatttgggaattcaaaggaaaactggagcaacacctaacagggagaagatggaggaacattgttgaccaaatctggtcatttggcccaagaaaatgtgggcccaacatactagtcaataaaagtgaagattttcagaactcagtatggacaggtccagctgacaaagcttcaaaagaagccagtagataccgagatttgggcaatagcattgtgagtggcttccaactagcaaccctctctggccccatgtgtgaggagcctctcatgggtgtctgttttgttctggaaaaatgggacctaagtaaatttgaggaacaaggagcaagtgatctggcaaaagagggacaggaggaaaatgaaacctgttctggtggaaatgaaaaccaagagctacaagatggctgctctgaggcctttgagaagaggacatcacagaaaggagaatctccactcactgactgctatggacctttctcaggacagctaattgccaccatgaaagaagcatgtcgctatgcactgcaagtgaaacctcagcgcctgatggcagctatgtacacatgtgacatcatggccactggtgatgttctcggtcgagtctatgctgtcttgtcaaagagagaaggtcgggtacttcaagaagaaatgaaagaagggacagacatgttcatcatcaaggctgtgctgcctgttgctgaaagctttggttttgctgatgaaatcaggaagaggacaagtggcctggccagcccacaactagtattcagccattgggagatcattcccagtgaccccttctgggtgccaactactgaggaggaatacttgcactttggggagaaggctgactctgagaaccaagcccggaagtacatgaacgcagtacgaaagcggaaggggctttatgtggaagaaaagattgtggagcatgcagaaaagcagaggacactcagcaaaaataagtagctacctactactggtggattcttttccttatagtgaatttaaaagtatcatcaagggtttaatattgggaaaatttctttttgccacattatctctgtttattcactttcaataaagttgatccatataaatattttaaagag

SEQ ID NO: 129503 - DNA, 3470 bp, Homo sapiens
  Payload ID: 5328
  Gene Symbol: EFTUD1
  Gene Name: elongation factor Tu GTP binding domain containing 1
  Uniprot ID: Q7Z2Z2
  ENST ID: ENST00000359445
  CDS Start-End: 121-3330
gcgcgggcgtgtcggacccgcagagctctcggactttcggaagctctcggtgtgggtgcgacccgagagaaggagcggggctggtggggctgctgcagccgtcacaggaaataagtaatcatggtgctcaacagtttggataagatgattcaactccagaaaaacactgccaacatcaggaatatttgtgttttggctcatgttgaccatggtaatgaggagtacctgatcaatctgatagactctccaggacacgtggacttttcctcagaagtatcaaccgctgttcgcatttgtgatggatgcatcattgtggtagatgctgtggaaggagtctgtccacagacacaggcagttctgcgacaagcttggcttgaaaacatccgtccggttttagtgattaataagattgatcgcttgatagtggaactgaaattcaccccacaagaggcctattctcacctcaagaatattttagaacagattaatgcgctcacagggactctttttacttctaaagtcctagaagaaagagcagagagggagactgaatcccaagtgaatccaaattctgaacaaggagagcaagtatatgactggagcactggcttggaggacacagatgattctcacctttacttctctccagaacagggaaatgtggtgtttaccagtgcaatagatgggtggggctttggaattgagcacttcgccagaatctacagtcaaaaaattggcatcaaaaaggaagttcttatgaaaaccttgtggggagattactatataaatatgaaggctaaaaagatcatgaagggtgatcaggccaaaggaaagaaacctttatttgtacagttgatcctggaaaatatatggagtttgtatgatgctgttttgaaaaaggacaaagacaaaattgataaaatagtgacttctttaggattaaaaattggagcccgggaggcacgacattcagaccctaaagttcagatcaacgccatttgcagtcagtggctacccatatcccatgctgttcttgctatggtgtgtcagaaacttcctagtccccttgatattacagctgagagagtggagagactgatgtgcacaggatcacaaacttttgactcttttccaccagaaactcaagcactgaaagcagcttttatgaaatgtggaagtgaggacactgctccagttattatatttgtttccaaaatgtttgcagttgatgctaaggccttgcctcagaataagccaaggcctctcactcaagaagaaattgctcagagacgtgagcgtgcaagacaaaggcatgcagagaagcttgcagcagcacagggacaggcacccttggagcccacccaagatgggagtgccattgaaacatgtccaaaaggagaggagccaagaggtgacgagcaacaggtggaaagtatgacccctaaacctgtgctccaggaagaaaacaaccaagagtcttttattgcatttgctcgggtgttcagtggtgtggctcgaagaggaaagaaaatttttgtcttggggcccaaatacagtcctcttgagtttttacgaagggtaccattaggcttctcagctccaccagatggcctcccccaagtcccccacatggcatactgtgctctggaaaacctgtatcttctgatgggaagggaactggaatatctagaggaggtacctccaggaaatgtgctaggaataggaggccttcaagattttgtgctgaaatctgcaacactgtgtagcctgccatcctgcccaccatttataccactcaacttcgaagccactcctattgtgagagttgctgttgaaccaaaacatccaagtgaaatgcctcagctcgtaaaaggaatgaaactgttaaaccaggctgatccctgtgtccagattttaattcaggaaacgggagagcacgttttagtcacagcaggagaagtccaccttcagcgatgcctggatgacttaaaagaaaggtttgcaaagattcatatcagtgtatctgaacctattattccattcagagaaacaatcacaaaacccccaaaagttgacatggtcaatgaagaaataggcaaacagcaaaaagttgcagtcatacaccaaatgaaagaagatcaaagcaaaatccctgaaggaatccaagttgactctgacgggctaatcaccataacaactcccaataaacttgccacgctcagtgttcgagccatgccccttccagaagaagtcacccagattctggaagaaaatagtgatttgattcgttctatggagcagttgacatcctctttgaatgagggtgaaaatactcacatgattcatcagaagacccaagagaaaatttgggaattcaaaggaaaactggagcaacacctaacagggagaagatggaggaacattgttgaccaaatctggtcatttggcccaagaaaatgtgggcccaacatactagtcaataaaagtgaagattttcagaactcagtatggacaggtccagctgacaaagcttcaaaagaagccagtagataccgagatttgggcaatagcattgtgagtggcttccaactagcaaccctctctggccccatgtgtgaggagcctctcatgggtgtctgttttgttctggaaaaatgggacctaagtaaatttgaggaacaaggagcaagtgatctggcaaaagagggacaggaggaaaatgaaacctgttctggtggaaatgaaaaccaagagctacaagatggctgctctgaggcctttgagaagaggacatcacagaaaggagaatctccactcactgactgctatggacctttctcaggacagctaattgccaccatgaaagaagcatgtcgctatgcactgcaagtgaaacctcagcgcctgatggcagctatgtacacatgtgacatcatggccactggtgatgttctcggtcgagtctatgctgtcttgtcaaagagagaaggtcgggtacttcaagaagaaatgaaagaagggacagacatgttcatcatcaaggctgtgctgcctgttgctgaaagctttggttttgctgatgaaatcaggaagaggacaagtggcctggccagcccacaactagtattcagccattgggagatcattcccagtgaccccttctgggtgccaactactgaggaggaatacttgcactttggggagaaggctgactctgagaaccaagcccggaagtacatgaacgcagtacgaaagcggaaggggctttatgtggaagaaaagattgtggagcatgcagaaaagcagaggacactcagcaaaaataagtagctacctactactggtggattcttttccttatagtgaatttaaaagtatcatcaagggtttaatattgggaaaatttctttttgccacattatctctgtttattcactttcaataaagttgatccatataaatattttaaa

SEQ ID NO: 129504 - DNA, 639 bp, Homo sapiens
  Payload ID: 5328
  Gene Symbol: EFTUD1
  Gene Name: elongation factor Tu GTP binding domain containing 1
  ENST ID: ENST00000561389
  CDS Start-End: 141-317
agccggccccgccccctggcgcgcgggcgtgtcggacccgcagagctctcggactttcggaagctctcggtgtgggtgcgacccgagagaaggagcggggctggtggggctgctgcagccgtcacaggaaataagtaatcatggtgctcaacagtttggataagatgattcaactccagaaaaacactgccaacatcaggaatatttgtgttttggctcatgttgaccatggaaaaactactctggctgactgtcttatatctagcaatggaatcatctccagccgcctagcaggcaaggtaatgaggagtacctgatcaatctgatagactctccaggacacgtggacttttcctcagaagtatcaaccgctgttcgcatttgtgatggatgcatcattgtggtagatgctgtggaaggagtctgtccacagacacaggcagttctgcgacaagcttggcttgaaaacatccgtccggttttagtgattaataagattgatcgcttgatagtggaactgaaattcaccccacaagaggcctattctcacctcaagaatattttagaacagattaatgcgctcacagggactctttttacttctaaagtcctagaagaaagagcagagagggagactga

SEQ ID NO: 129505 - DNA, 417 bp, Homo sapiens
  Payload ID: 5328
  Gene Symbol: EFTUD1
  Gene Name: elongation factor Tu GTP binding domain containing 1
  ENST ID: ENST00000557939
  CDS Start-End: 1-417
gcagagaagatgaacagatccgagggatcactatgaaatccagtgccatttccctacattatgcaacaggtaatgaggagtacctgatcaatctgatagactctccaggacacgtggacttttcctcagaagtatcaaccgctgttcgcatttgtgatggatgcatcattgtggtagatgctgtggaaggagtctgtccacagattaatgcgctcacagggactctttttacttctaaagtcctagaagaaagagcagagagggagactgaatcccaagtgaatccaaattctgaacaaggagagcaagtatatgactggagcactggcttggaggacacagatgattctcacctttacttctctccagaacagggaaatgtggtgtttaccagtgcaatagatgggtggggctttg

SEQ ID NO: 129506 - DNA, 542 bp, Homo sapiens
  Payload ID: 5328
  Gene Symbol: EFTUD1
  Gene Name: elongation factor Tu GTP binding domain containing 1
  ENST ID: ENST00000558974
  CDS Start-End: 493-542
gtctggggccggggcggtcgcctgtctgtgtggacccaggatcctcaaagagaacgaatctgggaccctgcagaaatgaagggcatgtagtgtagaggtttttcctttttatttagaaaggaatgaaagaccggcagtgcacctgcttggataataagcacgtgacccaaaactttgttcgggctccatgggcaggaataaagctgggtatttgacctcgcgcgaggacgagcgagaatgtcagaatgagggacttgggggaagactgaagagagaaagggagcatcttcttcagcattttctctccctcctggatgcaacccttcctgtacgtggtcattggcctggagatgtttactggagtactcctccaccggcagggttactggtgtcactgtgcacccagtcccctcgagctgcgtgattcatcgcagcctttggatccggaaggatgagcaaactccttaagtgtaatcgtggaaataagtaatcatggtgctcaacagtttggataagatgattcaactccagaaaaacactgc

SEQ ID NO: 129507 - DNA, 521 bp, Homo sapiens
  Payload ID: 5328
  Gene Symbol: EFTUD1
  Gene Name: elongation factor Tu GTP binding domain containing 1
  ENST ID: ENST00000557844
  CDS Start-End: 431-521
gggtgcgacccgagagaaggagcggggctggtggggctgctgcagccgaaaggaatgaaagaccggcagtgcacctgcttggataataagcacgtgacccaaaactttgttcgggctccatgggcaggaataaagctgggtatttgacctcgcgcgaggacgagcgagaatgtcagaatgagggacttgggggaagactgaagagagaaagggagcatcttcttcagcattttctctccctcctggatgcaacccttcctgtacgtggtcattggcctggagatgtttactggagtactcctccaccggcagggttactggtgtcactgtgcacccagtcccctcgagctgcgtgattcatcgcagcctttggatccggaaggatgagcaaactccttaagtgtaatcgtgtcacaggaaataagtaatcatggtgctcaacagtttggataagatgattcaactccagaaaaacactgccaacatcaggaatatttgtgttttggctcatgttgaccatg

SEQ ID NO: 129508 - DNA, 3045 bp, Homo sapiens
  Payload ID: 5329
  Gene Symbol: EFTUD2
  Gene Name: elongation factor Tu GTP binding domain containing 2
  Uniprot ID: Q15029
  ENST ID: ENST00000402521
  CDS Start-End: 78-2891
gcaggcgtttcctcggcgtggggcggaagcacgatctccggcagcggcctgggaactcttagctgagcaggcgagagatggatgatgatgacgacgacgatgacgtaggagatcatgacgatgaccaccctgggatggaggtggtgctgcatgaggacaagaagtactacccaacagccgaggaggtgtatggtcctgaggtggagaccatagttcaagaggaagacactcagcctctcacagaacccattattaagccagtgaaaaccaagaaattcactctgatggagcagacattacctgttacggtgtatgagatggatttcttggcggatctgatggataactcagagctcatcagaaatgtgaccctttgtggacatctccaccatggcaagacatgttttgtggattgtttaattgaacagactcacccggaaatcagaaagcgctatgaccaagatctgtgctatactgacatcctcttcacagagcaagagagaggtgtaggcatcaaaagcactcctgtgacagtggtcttgccagacaccaaaggaaaatcttatctcttcaatatcatggacactccaggacatgtgaatttctctgatgaggtcacagctggcttgcgcatctcagatggagtggtccttttcattgatgctgctgagggggtgatgctgaacacagagcggctgatcaagcatgcggtgcaggagaggctggcagtcactgtgtgcatcaacaagattgaccggctgatcctggagctgaagctgcctccaactgatgcttattacaagctgcgccacattgtggatgaggtcaatggattaataagcatgtattccactgatgagaacctgatcctttccccactcctgggtaacgtctgcttctccagctcccagtacagcatctgcttcacgctgggctcctttgccaagatctatgccgacacctttggtgacattaattaccaagaatttgctaaaagactctggggtgacatctacttcaaccctaagacgcgaaagttcaccaaaaaggccccaactagcagctcccagagaagtttcgtggagtttatcttggagcctctttataagatcctcgcccaggttgtaggtgacgtggacaccagcctcccacggaccctagacgagcttggcatccacctgacgaaggaggagctgaagctgaacatccgccccttgctcaggctggtctgcaaaaagttctttggcgagttcacaggctttgtggacatgtgtgtgcagcatatcccttctccaaaggtgggcgccaagcccaagattgagcacacctacaccggtggtgtggactccgacctcggcgaggctatgagtgactgtgaccctgatggccccctgatgtgccacactactaagatgtacagcacagatgatggagtccagtttcacgcctttggccgggtgctgagtggcaccattcatgctgggcagcctgtgaaggtactgggggagaactacaccctggaggatgaggaagactcccagatatgcaccgtgggccgcctttggatctctgtggccaggtaccacatcgaggtgaaccgtgttcctgctggcaactgggttctgattgaaggtgttgatcaaccaattgtgaagacagcaaccataaccgaaccccgaggcaatgaggaggctcagattttccgacccttgaagttcaataccacatctgttatcaagattgctgtggagccagtcaacccctcagagctgcccaagatgcttgatggcctgcgcaaggtcaacaagagctatccatccctcaccaccaaggtggaggagtctggcgagcatgtgatcctgggcactggggagctctacctggactgtgtgatgcatgatttgcggaagatgtactcagagatagacatcaaggtggctgacccagttgtcacgttttgtgagacggtggtggaaacatcctccctcaagtgctttgctgaaacgcctaataagaagaacaagatcaccatgattgctgagcctcttgagaagggcctggcagaggacatagagaatgaggtggtccagattacgtggaacaggaagaagctgggagagttcttccagaccaagtacgattgggatctgctggctgcccgttccatctgggcttttggccctgatgcgactggccccaacattctggtggatgatactctgccctctgaggtggacaaggctcttcttggttcagtgaaggacagcatcgttcaaggtttccagtggggaaccagggagggccccctctgtgatgaattgattcggaatgtcaagtttaagatcctggatgcggtggttgcccaggagcccctgcaccggggcgggggccagatcatccccacagccaggagagtcgtctactctgccttcctcatggctactcctcgtctgatggagccttactactttgtagaggtccaggcccctgcagattgcgtctctgcagtttataccgtcctggccaggcgcagggggcacgtgactcaggatgcacccatcccaggctcccctctgtacaccatcaaagcttttatcccggccatcgactcttttggctttgagactgatctccggactcacacccagggacaagccttttctctgtctgtcttccaccactggcagattgtgcctggtgatcccctggacaagagcattgtcatccgccccttggagccacagccagctcctcacctggcccgggaattcatgatcaaaacccgccgtaggaagggcctcagtgaagatgtgagcatcagcaaattcttcgatgatcctatgttgctggaacttgccaaacaggatgttgtgctcaattaccccatgtgagtgcgtggactcctgggagctcctgctccctacagtgggctgcaactcctgtacttgaagctgagacctcatatgacgtggccttcgtgttgtcagagagtgtctggaagctgctgttgccatcttgaacaactcaccaacctccaacccagag

SEQ ID NO: 129509 - DNA, 4548 bp, Homo sapiens
  Payload ID: 5329
  Gene Symbol: EFTUD2
  Gene Name: elongation factor Tu GTP binding domain containing 2
  Uniprot ID: Q15029
  ENST ID: ENST00000426333
  CDS Start-End: 299-3217
ttcagggtggtcccgaggcgcctgatcagattcgttcatcctcagctctcaccctctttggagcagcccacgtcttgggctactcgtcttggggacccgctactccgccttgccagtccgcggcgggcatacctcggaactggtcctcaggcagagggttgtcctcccgggcagaaaggcgacagcggcgtctgcggggtccttcctggcggcgggcgcaggcgtttcctcggcgtggggcggaagcacgatctccggcagcggcctgggaactcttagctgagcaggcgagagcatcatggataccgacttatatgatgagtttgggaattatattggaccagagcttgattctgatgaagatgatgatgaattgggtagagagaccaaagatcttgatgagatggatgatgatgacgacgacgatgacgtaggagatcatgacgatgaccaccctgggatggaggtggtgctgcatgaggacaagaagtactacccaacagccgaggaggtgtatggtcctgaggtggagaccatagttcaagaggaagacactcagcctctcacagaacccattattaagccagtgaaaaccaagaaattcactctgatggagcagacattacctgttacggtgtatgagatggatttcttggcggatctgatggataactcagagctcatcagaaatgtgaccctttgtggacatctccaccatggcaagacatgttttgtggattgtttaattgaacagactcacccggaaatcagaaagcgctatgaccaagatctgtgctatactgacatcctcttcacagagcaagagagaggtgtaggcatcaaaagcactcctgtgacagtggtcttgccagacaccaaaggaaaatcttatctcttcaatatcatggacactccaggacatgtgaatttctctgatgaggtcacagctggcttgcgcatctcagatggagtggtccttttcattgatgctgctgagggggtgatgctgaacacagagcggctgatcaagcatgcggtgcaggagaggctggcagtcactgtgtgcatcaacaagattgaccggctgatcctggagctgaagctgcctccaactgatgcttattacaagctgcgccacattgtggatgaggtcaatggattaataagcatgtattccactgatgagaacctgatcctttccccactcctgggtaacgtctgcttctccagctcccagtacagcatctgcttcacgctgggctcctttgccaagatctatgccgacacctttggtgacattaattaccaagaatttgctaaaagactctggggtgacatctacttcaaccctaagacgcgaaagttcaccaaaaaggccccaactagcagctcccagagaagtttcgtggagtttatcttggagcctctttataagatcctcgcccaggttgtaggtgacgtggacaccagcctcccacggaccctagacgagcttggcatccacctgacgaaggaggagctgaagctgaacatccgccccttgctcaggctggtctgcaaaaagttctttggcgagttcacaggctttgtggacatgtgtgtgcagcatatcccttctccaaaggtgggcgccaagcccaagattgagcacacctacaccggtggtgtggactccgacctcggcgaggctatgagtgactgtgaccctgatggccccctgatgtgccacactactaagatgtacagcacagatgatggagtccagtttcacgcctttggccgggtgctgagtggcaccattcatgctgggcagcctgtgaaggtactgggggagaactacaccctggaggatgaggaagactcccagatatgcaccgtgggccgcctttggatctctgtggccaggtaccacatcgaggtgaaccgtgttcctgctggcaactgggttctgattgaaggtgttgatcaaccaattgtgaagacagcaaccataaccgaaccccgaggcaatgaggaggctcagattttccgacccttgaagttcaataccacatctgttatcaagattgctgtggagccagtcaacccctcagagctgcccaagatgcttgatggcctgcgcaaggtcaacaagagctatccatccctcaccaccaaggtggaggagtctggcgagcatgtgatcctgggcactggggagctctacctggactgtgtgatgcatgatttgcggaagatgtactcagagatagacatcaaggtggctgacccagttgtcacgttttgtgagacggtggtggaaacatcctccctcaagtgctttgctgaaacgcctaataagaagaacaagatcaccatgattgctgagcctcttgagaagggcctggcagaggacatagagaatgaggtggtccagattacgtggaacaggaagaagctgggagagttcttccagaccaagtacgattgggatctgctggctgcccgttccatctgggcttttggccctgatgcgactggccccaacattctggtggatgatactctgccctctgaggtggacaaggctcttcttggttcagtgaaggacagcatcgttcaaggtttccagtggggaaccagggagggccccctctgtgatgaattgattcggaatgtcaagtttaagatcctggatgcggtggttgcccaggagcccctgcaccggggcgggggccagatcatccccacagccaggagagtcgtctactctgccttcctcatggctactcctcgtctgatggagccttactactttgtagaggtccaggcccctgcagattgcgtctctgcagtttataccgtcctggccaggcgcagggggcacgtgactcaggatgcacccatcccaggctcccctctgtacaccatcaaagcttttatcccggccatcgactcttttggctttgagactgatctccggactcacacccagggacaagccttttctctgtctgtcttccaccactggcagattgtgcctggtgatcccctggacaagagcattgtcatccgccccttggagccacagccagctcctcacctggcccgggaattcatgatcaaaacccgccgtaggaagggcctcagtgaagatgtgagcatcagcaaattcttcgatgatcctatgttgctggaacttgccaaacaggatgttgtgctcaattaccccatgtgagtgcgtggactcctgggagctcctgctccctacagtgggctgcaactcctgtacttgaagctgagacctcatatgacgtggccttcgtgttgtcagagagtgtctggaagctgctgttgccatcttgaacaactcaccaacctccaacccagagccccagtgagagaggagcatttggcctcctgcttccttctgtggcctctgccgggctccattcccaaggaaaagagaggagcttgggctcacagaaagagaaggggatgaaaccccaaggggccctatctttgggatttacatggaattttattttctacaagtttgaccttagccatggtttgcaagtgaacagaacattctgacctctgtcttgctctgctcctttcatcctcgtctcccctgccccgtctggtgcttacattctgaatatatgtcatctcccaagaggcttcactgcctctgcttccagctgcagcctccttcctgcctgggtccccagggaagccgcctgccttttaattcagtgttcccatgagcgccaaggccccattattgcccccttgctcccactccatgctgcttctgggtggaacctaagatggcttgggagttgttgggttcctgcgatcagaagtctaccccaccacctcctcaggaaactgctgcctcccctaagaatcttccttgccctggagtagggggccagagcactttgatttccagccatttactccaagtcctctccccagctaccaccagtcccttactctgttctcccccagtgaaaaagagtctgttgattttcctcaaaactgctttattaggaatgtaccagggattgagttaggggagttggacagccccggctcctataggagtcctacttctctccagcatcctgtgccatcctcttgacgtaatcgctgtacattgtgtacacagcacctgtgtgagagaaaagaaataatgccccttggcatcaaacccttcacccgtcctctggctctcaggcgtcctaggggttcacctctagctgctcccttgagagtccagcttcccgctcatctttctgccccaggtcccaacagctgcttcaagcatctgaccacacaacctggggaaaccacttatctgacagttcacgaaacactttcacatgtattgtgtatctgagaaacctcacagcagcctgcaaggtaggcaggccaggggtggttattgtcatgttacacatcaggaaactgaggctcagtgagaaagatttgtccactgtcacacagttagcaagtggctgtctgctttttaatctcaagaggaagagaaattcaacatct

SEQ ID NO: 129510 - DNA, 551 bp, Homo sapiens
  Payload ID: 5329
  Gene Symbol: EFTUD2
  Gene Name: elongation factor Tu GTP binding domain containing 2
  ENST ID: ENST00000593072
  CDS Start-End: 107-551
agcggcctgggaactcttagctgagcaggcgagagccgttctttgccaagttccctccgaagtcctctgagctcctgcattgtagcgggaagcggcagtgagcatcatggataccgacttatatgatgagtttgggaattatattggaccagagcttgattctgatgaagatgatgatgaattgggtagagagaccaaagatcttgatgagatggatgatgatgacgacgacgatgacgtaggagatcatgacgatgaccaccctgggatggaggtggtgctgcatgaggacaagaagtactacccaacagccgaggaggtgtatggtcctgaggtggagaccatagttcaagaggaagacactcagcctctcacagaacccattattaagccagtgaaaaccaagaaattcactctgatggagcagacattacctgttacggtgtatgagatggatttcttggcggatctgatggataactcagagctcatcagaaatgtgaccctttgtggacatctccaccatggcaagacatgttttgtggattgtt

SEQ ID NO: 129511 - DNA, 562 bp, Homo sapiens
  Payload ID: 5329
  Gene Symbol: EFTUD2
  Gene Name: elongation factor Tu GTP binding domain containing 2
  ENST ID: ENST00000592701
  CDS Start-End: 244-562
gctttcagccgttctttgccaagttccctccgaagtcctctgagctcctgcattgtagcgggaagcggcagtgaggtaacatcagacaacctcaaatcaagggacatccttaaggatttcatgacagtccttggaaggaaagactgaagattgtagatccaaagactgaagattgtagatccaaagagactagagacatgacaaccaaatgcaaacatgatcctggattggatccttagcatcatggataccgacttatatgatgagtttgggaattatattggaccagagcttgattctgatgaagatgatgatgaattgggtagagagaccaaagatcttgatgagatggatgatgatgacgacgacgatgacgtaggagatcatgacgatgaccaccctgggatggaggtggtgctgcatgaggacaagaagtactacccaacagccgaggaggtgtatggtcctgaggtggagaccatagttcaagaggaagacactcagcctctcacagaacccattattaagccagtgaaaaccaagaaattcactctgatggagc

SEQ ID NO: 129512 - DNA, 689 bp, Homo sapiens
  Payload ID: 5329
  Gene Symbol: EFTUD2
  Gene Name: elongation factor Tu GTP binding domain containing 2
  ENST ID: ENST00000589769
  CDS Start-End: 1-404
tccagaccaagtacgattgggatctgctggctgcccgttccatctgggcttttggccctgatgcgactggccccaacattctggtggatgatactctgccctctgaggtggacaaggctcttcttggttcagtgaaggacagcatcgttcaaggtttccagtggggaaccagggagggccccctctgtgatgaattgattcggaatgtcaagtttaagatcctggatgcggtggttgcccaggagcccctgcaccggggcgggggccagatcatccccacagccaggagagtcgtctactctgccttcctcatgggggcacgtgactcaggatgcacccatcccaggctcccctctgtacaccatcaaagcttttatcccggccatcgactcttttggctttgagactgatctccggactcacacccagggacaagccttttctctgtctgtcttccaccactggcagattgtgcctggtgatcccctggacaagagcattgtcatccgccccttggagccacagccagctcctcacctggcccgggaattcatgatcaaaacccgccgtaggaagggcctcagtgaagatgtgagcatcagcaaattcttcgatgatcctatgttgctggaacttgccaaacaggatgttgtgctcaattaccccatgtgagtgcgtggactcctggg

SEQ ID NO: 129513 - DNA, 3364 bp, Homo sapiens
  Payload ID: 5329
  Gene Symbol: EFTUD2
  Gene Name: elongation factor Tu GTP binding domain containing 2
  Uniprot ID: Q15029
  ENST ID: ENST00000592576
  CDS Start-End: 68-2956
ggcgtggggcggaagcacgatctccggcagcggcctgggaactcttagctgagcaggcgagagcatcatggataccgacttatatgatgagtttgggaattatattggaccagagcttgattctgatgaagatgatgatgaattgggtagagagaccaaagatcttgatgagatggatgatgatgacgacgacgatgacgtaggagatcatgacgatgaccaccctgggatggaggtggtgctgcatgaggacaagaagtactacccaacagccgaggaggtgtatggtcctgaggtggagaccatagttcaagaggaagacactcagcctctcacagaacccattattaagccagtgaaaaccaagaaattcactctgatggagcagacattacctgttacggtgtatgagatggatttcttggcggatctgatggataactcagagctcatcagaaatgtgaccctttgtggacatctccaccatggcaagactcacccggaaatcagaaagcgctatgaccaagatctgtgctatactgacatcctcttcacagagcaagagagaggtgtaggcatcaaaagcactcctgtgacagtggtcttgccagacaccaaaggaaaatcttatctcttcaatatcatggacactccaggacatgtgaatttctctgatgaggtcacagctggcttgcgcatctcagatggagtggtccttttcattgatgctgctgagggggtgatgctgaacacagagcggctgatcaagcatgcggtgcaggagaggctggcagtcactgtgtgcatcaacaagattgaccggctgatcctggagctgaagctgcctccaactgatgcttattacaagctgcgccacattgtggatgaggtcaatggattaataagcatgtattccactgatgagaacctgatcctttccccactcctgggtaacgtctgcttctccagctcccagtacagcatctgcttcacgctgggctcctttgccaagatctatgccgacacctttggtgacattaattaccaagaatttgctaaaagactctggggtgacatctacttcaaccctaagacgcgaaagttcaccaaaaaggccccaactagcagctcccagagaagtttcgtggagtttatcttggagcctctttataagatcctcgcccaggttgtaggtgacgtggacaccagcctcccacggaccctagacgagcttggcatccacctgacgaaggaggagctgaagctgaacatccgccccttgctcaggctggtctgcaaaaagttctttggcgagttcacaggctttgtggacatgtgtgtgcagcatatcccttctccaaaggtgggcgccaagcccaagattgagcacacctacaccggtggtgtggactccgacctcggcgaggctatgagtgactgtgaccctgatggccccctgatgtgccacactactaagatgtacagcacagatgatggagtccagtttcacgcctttggccgggtgctgagtggcaccattcatgctgggcagcctgtgaaggtactgggggagaactacaccctggaggatgaggaagactcccagatatgcaccgtgggccgcctttggatctctgtggccaggtaccacatcgaggtgaaccgtgttcctgctggcaactgggttctgattgaaggtgttgatcaaccaattgtgaagacagcaaccataaccgaaccccgaggcaatgaggaggctcagattttccgacccttgaagttcaataccacatctgttatcaagattgctgtggagccagtcaacccctcagagctgcccaagatgcttgatggcctgcgcaaggtcaacaagagctatccatccctcaccaccaaggtggaggagtctggcgagcatgtgatcctgggcactggggagctctacctggactgtgtgatgcatgatttgcggaagatgtactcagagatagacatcaaggtggctgacccagttgtcacgttttgtgagacggtggtggaaacatcctccctcaagtgctttgctgaaacgcctaataagaagaacaagatcaccatgattgctgagcctcttgagaagggcctggcagaggacatagagaatgaggtggtccagattacgtggaacaggaagaagctgggagagttcttccagaccaagtacgattgggatctgctggctgcccgttccatctgggcttttggccctgatgcgactggccccaacattctggtggatgatactctgccctctgaggtggacaaggctcttcttggttcagtgaaggacagcatcgttcaaggtttccagtggggaaccagggagggccccctctgtgatgaattgattcggaatgtcaagtttaagatcctggatgcggtggttgcccaggagcccctgcaccggggcgggggccagatcatccccacagccaggagagtcgtctactctgccttcctcatggctactcctcgtctgatggagccttactactttgtagaggtccaggcccctgcagattgcgtctctgcagtttataccgtcctggccaggcgcagggggcacgtgactcaggatgcacccatcccaggctcccctctgtacaccatcaaagcttttatcccggccatcgactcttttggctttgagactgatctccggactcacacccagggacaagccttttctctgtctgtcttccaccactggcagattgtgcctggtgatcccctggacaagagcattgtcatccgccccttggagccacagccagctcctcacctggcccgggaattcatgatcaaaacccgccgtaggaagggcctcagtgaagatgtgagcatcagcaaattcttcgatgatcctatgttgctggaacttgccaaacaggatgttgtgctcaattaccccatgtgagtgcgtggactcctgggagctcctgctccctacagtgggctgcaactcctgtacttgaagctgagacctcatatgacgtggccttcgtgttgtcagagagtgtctggaagctgctgttgccatcttgaacaactcaccaacctccaacccagagccccagtgagagaggagcatttggcctcctgcttccttctgtggcctctgccgggctccattcccaaggaaaagagaggagcttgggctcacagaaagagaaggggatgaaaccccaaggggccctatctttgggatttacatggaattttattttctacaagtttgaccttagccatggtttgcaagtgaacagaacattctgacctctgtcttgctctgctcctttcatcctcgtctcccctgccccgtctg

SEQ ID NO: 129514 - DNA, 899 bp, Homo sapiens
  Payload ID: 5329
  Gene Symbol: EFTUD2
  Gene Name: elongation factor Tu GTP binding domain containing 2
  ENST ID: ENST00000590124
  CDS Start-End: 1-672
gtggaaacatcctccctcaagtgctttgctgaaacgcctaataagaagaacaagatcaccatgattgctgagcctcttgagaagggcctggcagaggacatagagaatgaggtggtccagattacgtggaacaggaagaagctgggagagttcttccagaccaagtacgattgggatctgctggctgcccgttccatctgggcttttggccctgatgcgactggccccaacattctggtggatgatactctgccctctgaggtggacaaggctcttcttggttcagtgaaggacagcatcgttcaaggtttccagtggggaaccagggagggccccctctgtgatgaattgattcggaatgtcaagtttaagatcctggatgcggtggttgcccaggagcccctgcaccggggcgggggccagatcatccccacagccaggagagtcgtctactctgccttcctcatgattgtgcctggtgatcccctggacaagagcattgtcatccgccccttggagccacagccagctcctcacctggcccgggaattcatgatcaaaacccgccgtaggaagggcctcagtgaagatgtgagcatcagcaaattcttcgatgatcctatgttgctggaacttgccaaacaggatgttgtgctcaattaccccatgtgagtgcgtggactcctgggagctcctgctccctacagtgggctgcaactcctgtacttgaagctgagacctcatatgacgtggccttcgtgttgtcagagagtgtctggaagctgctgttgccatcttgaacaactcaccaacctccaacccagagccccagtgagagaggagcatttggcctcctgcttccttctgtggcctctgccgggctccattcccaaggaaaa

SEQ ID NO: 129515 - DNA, 524 bp, Homo sapiens
  Payload ID: 5329
  Gene Symbol: EFTUD2
  Gene Name: elongation factor Tu GTP binding domain containing 2
  ENST ID: ENST00000588374
  CDS Start-End: 1-102
tttgggaattatattggaccagagcttgattctgatgaagatgatgatgaattgggtagagagaccaaagatcttgatgagaacccattattaagccagtgaaaaccaagaaattcactctgatggagcagacattacctgttacggtgtatgagatggatttcttggcggatctgatggataactcagagctcatcagaaatgtgaccctttgtggacatctccaccatggcaagacatgttttgtggattgtttaattgaacagactcacccggaaatcagaaagcgctatgaccaagatctgtgctatactgacatcctcttcacagagcaagagagaggtgtaggcatcaaaagcactcctgtgacagtggtcttgccagacaccaaaggaaaatcttatctcttcaatatcatggacactccaggacatgtgaatttctctgatgaggtcacagctggcttgcgcatctcagatggagtggtccttttcattgatgctgctgagggggtgatgctgaac

SEQ ID NO: 129516 - DNA, 3675 bp, Homo sapiens
  Payload ID: 5329
  Gene Symbol: EFTUD2
  Gene Name: elongation factor Tu GTP binding domain containing 2
  Uniprot ID: Q15029
  ENST ID: ENST00000591382
  CDS Start-End: 399-3317
gtaagttgaagcgggtcagcggcacggaagggttgctccaggtgggataggaaattaaaaagcgtcagatctggaaggggccttatatgctattggcccctttcgctttacggatcggtaaattgaggcctggagcgggaaaaagaatggaagaccctgtcgtcctcgtgccttcccaaggcttccgaagcgcgcacacacgcacacacctcgatttcggggctgcctctatagcctcagtccgtaaaatcgtatcgctaggtaggagtggtgctctaactgtccagtcccctcgctcacttcctcttctatccgtgccgctttcagccgttctttgccaagttccctccgaagtcctctgagctcctgcattgtagcgggaagcggcagtgagcatcatggataccgacttatatgatgagtttgggaattatattggaccagagcttgattctgatgaagatgatgatgaattgggtagagagaccaaagatcttgatgagatggatgatgatgacgacgacgatgacgtaggagatcatgacgatgaccaccctgggatggaggtggtgctgcatgaggacaagaagtactacccaacagccgaggaggtgtatggtcctgaggtggagaccatagttcaagaggaagacactcagcctctcacagaacccattattaagccagtgaaaaccaagaaattcactctgatggagcagacattacctgttacggtgtatgagatggatttcttggcggatctgatggataactcagagctcatcagaaatgtgaccctttgtggacatctccaccatggcaagacatgttttgtggattgtttaattgaacagactcacccggaaatcagaaagcgctatgaccaagatctgtgctatactgacatcctcttcacagagcaagagagaggtgtaggcatcaaaagcactcctgtgacagtggtcttgccagacaccaaaggaaaatcttatctcttcaatatcatggacactccaggacatgtgaatttctctgatgaggtcacagctggcttgcgcatctcagatggagtggtccttttcattgatgctgctgagggggtgatgctgaacacagagcggctgatcaagcatgcggtgcaggagaggctggcagtcactgtgtgcatcaacaagattgaccggctgatcctggagctgaagctgcctccaactgatgcttattacaagctgcgccacattgtggatgaggtcaatggattaataagcatgtattccactgatgagaacctgatcctttccccactcctgggtaacgtctgcttctccagctcccagtacagcatctgcttcacgctgggctcctttgccaagatctatgccgacacctttggtgacattaattaccaagaatttgctaaaagactctggggtgacatctacttcaaccctaagacgcgaaagttcaccaaaaaggccccaactagcagctcccagagaagtttcgtggagtttatcttggagcctctttataagatcctcgcccaggttgtaggtgacgtggacaccagcctcccacggaccctagacgagcttggcatccacctgacgaaggaggagctgaagctgaacatccgccccttgctcaggctggtctgcaaaaagttctttggcgagttcacaggctttgtggacatgtgtgtgcagcatatcccttctccaaaggtgggcgccaagcccaagattgagcacacctacaccggtggtgtggactccgacctcggcgaggctatgagtgactgtgaccctgatggccccctgatgtgccacactactaagatgtacagcacagatgatggagtccagtttcacgcctttggccgggtgctgagtggcaccattcatgctgggcagcctgtgaaggtactgggggagaactacaccctggaggatgaggaagactcccagatatgcaccgtgggccgcctttggatctctgtggccaggtaccacatcgaggtgaaccgtgttcctgctggcaactgggttctgattgaaggtgttgatcaaccaattgtgaagacagcaaccataaccgaaccccgaggcaatgaggaggctcagattttccgacccttgaagttcaataccacatctgttatcaagattgctgtggagccagtcaacccctcagagctgcccaagatgcttgatggcctgcgcaaggtcaacaagagctatccatccctcaccaccaaggtggaggagtctggcgagcatgtgatcctgggcactggggagctctacctggactgtgtgatgcatgatttgcggaagatgtactcagagatagacatcaaggtggctgacccagttgtcacgttttgtgagacggtggtggaaacatcctccctcaagtgctttgctgaaacgcctaataagaagaacaagatcaccatgattgctgagcctcttgagaagggcctggcagaggacatagagaatgaggtggtccagattacgtggaacaggaagaagctgggagagttcttccagaccaagtacgattgggatctgctggctgcccgttccatctgggcttttggccctgatgcgactggccccaacattctggtggatgatactctgccctctgaggtggacaaggctcttcttggttcagtgaaggacagcatcgttcaaggtttccagtggggaaccagggagggccccctctgtgatgaattgattcggaatgtcaagtttaagatcctggatgcggtggttgcccaggagcccctgcaccggggcgggggccagatcatccccacagccaggagagtcgtctactctgccttcctcatggctactcctcgtctgatggagccttactactttgtagaggtccaggcccctgcagattgcgtctctgcagtttataccgtcctggccaggcgcagggggcacgtgactcaggatgcacccatcccaggctcccctctgtacaccatcaaagcttttatcccggccatcgactcttttggctttgagactgatctccggactcacacccagggacaagccttttctctgtctgtcttccaccactggcagattgtgcctggtgatcccctggacaagagcattgtcatccgccccttggagccacagccagctcctcacctggcccgggaattcatgatcaaaacccgccgtaggaagggcctcagtgaagatgtgagcatcagcaaattcttcgatgatcctatgttgctggaacttgccaaacaggatgttgtgctcaattaccccatgtgagtgcgtggactcctgggagctcctgctccctacagtgggctgcaactcctgtacttgaagctgagacctcatatgacgtggccttcgtgttgtcagagagtgtctggaagctgctgttgccatcttgaacaactcaccaacctccaacccagagccccagtgagagaggagcatttggcctcctgcttccttctgtggcctctgccgggctccattcccaaggaaaagagaggagcttgggctcacagaaagagaaggggatgaaaccccaaggggccctatctttgggatttacatggaattttattttctacaagtttgaccttagccatggtttgcaagtgaacagaacattctg

SEQ ID NO: 129517 - DNA, 366 bp, Homo sapiens
  Payload ID: 5329
  Gene Symbol: EFTUD2
  Gene Name: elongation factor Tu GTP binding domain containing 2
  ENST ID: ENST00000591856
  CDS Start-End: 1-117
gtaacgtctgcttctccagctcccagtacagcatctgcttcacgctgggctcctttgccaagatctatgccgacacctttgaaggaactgcctggaccctggaaaggaaagtgctagaagttctcagctatgaaccacctgtggcacctgaaacagaattttgaacgacactttgctaggcgaaagttcaccaaaaaggccccaactagcagctcccagagaagtttcgtggagtttatcttggagcctctttataagatcctcgcccaggttgtaggtgacgtggacaccagcctcccacggaccctagacgagcttggcatccacctgacgaaggaggagctgaagctgaacatccgccccttg

SEQ ID NO: 129518 - DNA, 6046 bp, Homo sapiens
  Payload ID: 5330
  Gene Symbol: ELL2
  Gene Name: elongation factor, RNA polymerase II, 2
  Uniprot ID: O00472
  ENST ID: ENST00000237853
  CDS Start-End: 351-2273
taagttggcgcgtcacctagacgtcagcctcttacctctcggacgtcccgtcccaggagcaaaactctagtgactttgggcccgcccccgtgagagtggagggcggccgatgagggcggttctgaagggaacaagaccaatgagacgagcccggggcggggcgcggggccggagggtggggcgggtggcggcggtggcagtccgaggtctggctccgcgcagtatatgacagtacgtcagcagcgggatggccctagcagtggcggcggctgcagaagcccaagcagccgcggccgcagtggaggctagagccggagcggcggcggcggcggcaccccggggagtttaagatggcggcgggggggacagggggcctgcgggaggagcagcgctatgggctgtcgtgcggacggctggggcaggacaacatcaccgtactgcatgtgaagctcaccgagacggcgatccgggcgctcgagacttaccagagccacaagaatttaattccttttcgaccttcaatccagttccaaggactccacgggcttgtcaaaattcccaaaaatgatcccctcaatgaagttcataactttaacttttatttgtcaaatgtgggcaaagacaaccctcagggcagctttgactgcatccagcaaacattctccagctctggagcctcccagctcaattgcctgggatttatacaagataaaattacagtgtgtgcaacaaacgactcgtatcagatgacacgagaaagaatgacccaggcagaggaggaatcccgcaaccgaagcacaaaagttatcaaacccggtggaccatatgtagggaaaagagtgcaaattcggaaagcacctcaagctgtttcagatacagttcctgagaggaaaaggtcaacccccatgaaccctgcaaatacaattcgaaagacacatagcagcagcaccatctctcagaggccatacagggacagggtgattcacttactggccctgaaggcctacaagaaaccggagctacttgctagactccagaaagatggtgtcaatcaaaaagacaagaactccctgggagcaattctgcaacaggtagccaatctgaattctaaggacctctcatataccttaaaggattatgtttttaaagagcttcaaagagactggcctggatacagtgaaatagacagacggtcattggagtcagtgctctctagaaaactaaatccgtctcagaatgctgcaggcaccagccgttcagaatctcctgtatgttctagtagagacgctgtatcttctcctcagaaacggcttttggattcagagtttattgatcctttaatgaataaaaaagcccgaatatctcacctgacgaacagagtaccaccaacactaaatggtcatttgaatcccaccagtgaaaaatctgctgcaggcctcccgctgccccctgcggctgctgccatccctacccctccaccgctgccttcaacctatctgcccatctcacatcctcctcagattgtaaattctaactccaactcccctagcactccagaaggccgggggactcaagacctacctgttgacagttttagtcaaaacgatagtatctatgaggaccagcaagacaaatatacctctaggacttctctggaaaccttaccccctggttccgttctactaaagtgtccaaagcctatggaagaaaaccattcaatgtctcacaaaaagtccaaaaagaagtctaaaaaacataaggaaaaggaccaaataaaaaagcacgacattgagactattgaggaaaaggaggaagatcttaagagagaagaggaaattgccaagctaaataactccagtccaaattccagtggaggagttaaagaggattgcactgcctccatggaaccttcagcaattgaactcccagattatttgataaaatatatcgctatcgtctcctatgagcaacgccagaattataaggatgacttcaatgcagagtatgatgagtacagagctttgcatgccaggatggagactgtagctagaagatttatcaaactagatgcacaaagaaagcgcctttctccaggctcaaaagagtatcagaatgttcatgaagaagtcttacaagaatatcagaagataaagcagtctagtcccaattaccatgaagaaaaatacagatgtgaatatcttcataacaagctggctcacatcaaaaggctaataggtgaatttgaccaacagcaagcagagtcatggtcctagaactctgcttggaccagaagatgtgaataaacttaagcttatttatttaaaattccaaatgagttgctctagattctaaaaaggtgaaactttggctgttgaaagtttcagtattagtaaacttgagttactttttcttttccattttactttgcttccctgcatttcgaagctgctctttctggtcctccccaccaccccacccccaagacttgtgtttgttaatagaaataatttttttaggtattggggatccattgtctatatttcaaatcagttttttttcctcaaaaacttgtgtttgttattagaaatgattttttagatattggggatccagtgtccacacttaaaagttgtatgtgtttaaaaaacaacaacagtaatgtgcaaggtgaaatgcttttggataaacgtaagcctattttctgacgtttcttaatgcaaactctttgccttaaatggtagaatatttagaaatttgcacaaaattaaaaaaataaacattgtcttggagggttaaaaaatagaaaggtgtatgtgtatagattcacatacacatatgtatatacaggctgacttgatctagaacattaaatccgccctgcaagttaaccccccattgcaatggttgccttaaggtgtttgctagttgtgtacatagtgtggttaatcattagctacactgcttcccacttgattagagcaatgggaagcatactgtggcctaccagcatctggaagtgtgtgctcgatctgtatgtgtgcagaggtggtgtggatgtgagcgtgcatgaaggaaaaaaagctgctactcctagtaggccaaacgctcaggttaaacaactgacgagtgttactgtagggtgtttttttgtttttttgttttttttcttctatcaaattgctacttttgttgtggaagacaaaagcatttccatttcaacgagtttgtcagctttattaatgttgggcaaaaattgatatgtcatgaaaatgaaacagatctatagttttgggacaaaattataaaatgaaatgtgtaggtaacctatttatatactgctataaagtattttttgaagagagatatgcaaagaagctattacctacataagaggtatatttaaagattttttttttcatcctggtgccaggaatataaaaaagagtggatatatttaaccataacatactgtgattcatcaaacagcacaaactttcatttcatggagtttatctgttgacattgatttaaactgtcacttgttttatcatgtgggaacataagttatgtggtcaaaaatataaggattttgaattaatgttgattcaagttgtattgtcttattgtattgtcttttcaaagtgctgccagttgaaaagggaagcattatgtttacaaatctgttttgaaatgtttgccaaaattttggtagtgtctttaataaagatgtttgtctccagcatccagaaaaataaatgaataactttgttgtgtatcactgtaaaccagaaaaatgttggttatctagaaaacttgagagagcatgtagattaacttttctctttggagttctaaaacattaactggaaagattagataatatactaaatgtatacagaagtatacagactatacaaagactgaaacaagtcccttttgcactacaactctataacattaccgcagaaattttggttctatgtagcatggacctcctaaggaattctgtttcttttagcattgagatccctggtgctctttttttacctcagaattggtacaatcattattaaacgttaatttatttcaaactttttaattgaaaaaaggaaagggaaacttaattggggataaattcaggcatcatattattatgatagagtctcctgagtggttcgtctataggtaatgaactcattggtgttatttcttggacatcttggccttttaatcaaagactgtgtgctgctatttgctatgagcaaggtttctcaaaagcaaaaggtgcttggaccatttggatcacctgagttagaatctctaggtatagggcccaagtatctgcattttcacaggtttcttgtaggtgactttctgcaagctaaagtatgagaaccattggcttggatgtagttctaaacttttaggtctgtaaatcttgaaatcttgaactgaaggtcaactattggcttttttttttttttaatgtccatcatgtcagcaggtgcaaatcacttttcccctttgcatgatctgaggcacctcctcagttgtttcactgccaactcttgtttcagaacctgtttacaaacaagccttccagttggtgaatggttagccattggagctcctaccctgtacatcagcacatcttctggtttacaagttgggtaacaatgaaagctggagatgctaaatggaaatccagcattgcatacccttagacctgatcacataccagtaaaagccttaatttagatgttagttgtatgtgttggacagatccttgcaaaagtgtgtctgtctattagttgtaaatttgaaaattataaatctctgaatctgctactatccaagtttcatcccttttgaagatgaggcatgagcctattaaaatatttataatcatttttcgtcccctactgcaagacttttagattcttacaaatgattactacaggaatagtggccacttaatgtcagttactccggtggaagaatttatctagttttttttcttttcttttttggaaggatggtgtgaaaaatagcaagattagagaatgagttgtatagttttttctatcacatttcatctaaaatgatttgaaggacttttgaagatttttaccaacatccttaaatcaactccaggttggatgaacaactgatttaaaacaaactaagagaacattaactagatgtgggctttttaaaatatataggtattgcatttcctaccttgttatttattccactttgaatactttagagggcttaactttcaactctttaaggtagtaatggatagttttatacttgttctcacaaaattgttatggtcagtttatatcattgctccatgcattgattataaaaattcagtattaattttttctgatcttataagctttataggagttttcttttctcttataaagtgtttcaccttatgtaaaacaaatgcctgcttgcatattggaagatgttgaaattagttttagacaaaagtggtccatcaattcagacactctgcttggatgccttacccttttcattagtgcattctttgcttctgaaacttggcagaaactcgttagccagtccactgcctttctgacaatgtgtggagtcacgtatgcttggtatatgcctttactacttttaaagttctacagtttattacttgcccaagtgttactaaatccttttcttatgtgtactggatggagaaaaaattatagccagcactttgagaggaaagttttcagaaacaatattaactggcactactaactgaaggccacaggagatgctatcaatgttatttgtaatctgaagattgaacaaggctgtgaggctcatttcaaactattttgaggtgttaaaatatatatatgctgtttctcagctgttccactcaaaccgtgttaggactctcaaaggtaaaatgtcacaggggcttttcagttgttacagagctcagcagctgtggttgcccctgttctacaccaatttcagttcaataaaaatgttaactttgcaa

SEQ ID NO: 129519 - DNA, 468 bp, Homo sapiens
  Payload ID: 5330
  Gene Symbol: ELL2
  Gene Name: elongation factor, RNA polymerase II, 2
  ENST ID: ENST00000508757
  CDS Start-End: 1-413
ttgaggaaaaggaggaagatcttaagagagaagaggaaattgccaagctaaataactccagtccaaattccagtggaggagttaaagaggattgcactgcctccatggaaccttcagcaattgaactcccagattatttgataaaatatatcgctatcgtctcctatgagcaacgccagaattataaggatgacttcaatgcagagtatgatgagtacagagctttgcatgccaggatggagactgtagctagaagatttatcaaactagatgcacaaagaaagcgcctttctccaggctcaaaagagtatcaggtaaatggatttgtaactagatgggctgactttcatattttaccttctttctttccctgccctgctcaacctcagccatcacagtggcctttagagtaagtactcttgcagaccagcctcgctgctgctttaggaaactaaatatttgaaatag

SEQ ID NO: 129520 - DNA, 582 bp, Homo sapiens
  Payload ID: 5330
  Gene Symbol: ELL2
  Gene Name: elongation factor, RNA polymerase II, 2
  ENST ID: ENST00000513343
  CDS Start-End: 128-582
atatgacagtacgtcagcagcgggatggccctagcagtggcggcggctgcagaagcccaagcagccgcggccgcagtggaggctagagccggagcggcggcggcggcggcaccccggggagtttaagatggcggcgggggggacagggggcctgcgggaggagcagcgctatgggctgtcgtgcggacggctggggcaggacaacatcaccgtactgcatgtgaagctcaccgagacggcgatccgggcgctcgagacttaccagagccacaagaatttaattccttttcgaccttcaatccagttccaaggactccacggggtagccaatctgaattctaaggacctctcatataccttaaaggattatgtttttaaagagcttcaaagagactggcctggatacagtgaaatagacagacggtcattggagtcagtgctctctagaaaactaaatccgtctcagaatgctgcaggcaccagccgttcagaatctcctgtatgttctagtagagacgctgtatcttctcctcagaaacggcttttggattcagagtttattgatcctttaatgaataaaaa

SEQ ID NO: 129521 - DNA, 467 bp, Homo sapiens
  Payload ID: 5330
  Gene Symbol: ELL2
  Gene Name: elongation factor, RNA polymerase II, 2
  ENST ID: ENST00000635633
  CDS Start-End: 1-196
gctgtcgtgcggacggctggggcaggacaacatcaccgtactgcatgtgaagctcaccgagacggcgatccgggcgctcgagacttaccagagccacaagaatttaattccttttcgaccttcaatccagttccaaggactccacgggatgcctgtcttctttaaaagaacattgcaaacgtctcacaaagcctagcggtatggatctctttttttcatggagcaatgctcttgtcaaaattcccaaaaatgatcccctcaatgaagttcataactttaacttttatttgtcaaatgtgggcaaagacaaccctcagggcagctttgactgcatccagcaaacattctccagctctggagcctcccagctcaattgcctgggatttatacaagataaaattacagtgtgtgcaacaaacgactcgtatcagatgacacgagaaagaatgacccaggcagaggaggaa

SEQ ID NO: 129522 - DNA, 2453 bp, Homo sapiens
  Payload ID: 5331
  Gene Symbol: ELP2
  Gene Name: elongator acetyltransferase complex subunit 2
  Uniprot ID: Q6IA86
  ENST ID: ENST00000351393
  CDS Start-End: 44-2446
ggaagtgcgcgtctcttgtttgtgcggctgaccagttggcgacatggtggcacccgtgctggagacttctcacgtgttttgctgcccaaaccgggtgcggggagtcctgaactggagctctgggcccagaggacttctggcctttggcacgtcctgctccgtggtgctctatgaccccctgaaaagggttgttgttaccaacttgaatggtcacaccgcccgagtcaattgcatacagtggatttgtaaacaggatggctccccttctactgaattagtttctggaggatctgataatcaagtgattcactgggaaatagaggataatcagcttttaaaagcagtgcatcttcaaggccatgaaggacctgtttatgcggtgcatgctgtttaccagaggaggacatcagatcctgcattatgtacactgatcgtttctgcagctgcagattctgctgttcgactctggtctaaaaagggtccagaagtaccaatattagcatgtggcaatgatgattgcagaattcacatatttgctcaacaaaatgatcagtttcagaaagtgctttctctctgtggacatgaggattggattagaggagtggaatgggcagcctttggtagagatcttttcctagcaagctgttcacaagattgcctgataagaatatggaagctgtatataaagtcaacatctttagaaactcaggatgacgataacataagactgaaagaaaatacttttaccatagaaaatgaaagtgttaaaatagcatttgctgttactctggagacagtgctagccggtcatgaaaactgggtaaatgcagttcactggcaacctgtgttttacaaagatggtgtcctacagcagccagtgagattattatctgcttccatggataaaaccatgattctctgggctccagatgaagagtcaggagtttggctagaacaggttcgagtaggtgaagtaggtgggaatactttgggattttatgattgccagttcaatgaagatggctccatgatcattgctcatgctttccacggagcgttgcacctttggaaacagaatacagttaacccaagagagtggactccagagattgtcatttcaggacactttgatggtgtccaagacctagtctgggatccagaaggagaatttattatcactgttggtactgatcagacaactagactttttgctccatggaagagaaaagaccaatcacaggtgacttggcatgaaattgcaaggcctcagatacatgggtatgacctgaaatgtttggcaatgattaatcggtttcagtttgtatctggagcagatgaaaaagttcttcgggttttttctgcacctcggaattttgtggaaaatttttgtgccattacaggacaatcactgaatcatgtgctctgtaatcaagatagtgatcttccagaaggagccactgtccctgcattgggattatcaaataaagctgtctttcagggagatatagcttctcagccttctgatgaagaggagctgttaactagtactggttttgagtatcagcaggtggcctttcagccctccatacttactgagcctcccactgaggatcatcttctgcagaatactttgtggcctgaagttcaaaaactatatgggcacggttatgaaatattttgtgttacttgtaacagttcaaagactctgcttgcctcagcttgtaaggcagctaagaaagagcatgcagctatcattctttggaacactacatcttggaaacaggtgcagaatttagttttccacagtttgacagtcacgcagatggccttctcacctaatgagaagttcttactagctgtttccagagatcgaacctggtcattgtggaaaaagcaggatacaatctcacctgagttcgagccagtttttagtctttttgccttcaccaacaaaattacttctgtgcacagtagaattatttggtcttgtgattggagtcctgacagcaagtatttcttcactgggagtcgagacaaaaaggtggttgtctggggtgagtgcgactccactgatgactgtattgagcacaacattggcccctgctcctcagtcctggacgtgggtggggctgtgacagctgtcagcgtctgcccagtgctccacccttctcaacgatacgtggttgcagtaggattggagtgtggaaagatttgcttatatacctggaaaaagactgatcaagttccagaaataaatgactggacccactgtgtagaaacaagtcaaagccaaagtcatacactggctatcagaaaattatgctggaagaattgcagtggaaaaactgaacagaaggaagcagaaggtgctgagtggttacactttgcaagctgtggtgaagatcacactgtgaagatacacagagtcaataaatgtgcactgtaatggactt

SEQ ID NO: 129523 - DNA, 2487 bp, Homo sapiens
  Payload ID: 5331
  Gene Symbol: ELP2
  Gene Name: elongator acetyltransferase complex subunit 2
  Uniprot ID: Q6IA86
  ENST ID: ENST00000350494
  CDS Start-End: 15-2480
gaccagttggcgacatggtggcacccgtgctggagacttctcacgtgttttgctgcccaaaccgggtgcggggagtcctgaactggagctctgggcccagaggacttctggcctttggcacgtcctgctccgtggtgctctatgaccccctgaaaagggttgttgttaccaacttgaatggtcacaccgcccgagtcaattgcatacagtggatttgtaaacaggatggctccccttctactgaattagtttctggaggatctgataatcaagtgattcactgggaaatagaggataatcagcttttaaaagcagtgcatcttcaaggccatgaaggacctgtttatgcggtgcatgctgtttaccagaggaggacatcagatcctgcattatgtacactgatcgtttctgcagctgcagattctgctgttcgactctggtctaaaaagggtccagaagttacctggaagactggccaggtggaacgaggcagggcctggaagccaccagcctctctcgccctctgtagcaggagctgcgactctatggtttcatgttacgcttccattctgtgcaaggctctgtggaaggagaagctgcacacattctggcatcataacagaatttcatttcttccatctgcattcaggccaataccaatattagcatgtggcaatgatgattgcagaattcacatatttgctcaacaaaatgatcagtttcagaaagtgctttctctctgtggacatgaggattggattagaggagtggaatgggcagcctttggtagagatcttttcctagcaagctgttcacaagattgcctgataagaatatggaagctgtatataaagtcaacatctttagaaactcaggatgacgataacataagactgaaagaaaatacttttaccatagaaaatgaaagtgttaaaatagcatttgctgttactctggagacagtgctagccggtcatgaaaactgggtaaatgcagttcactggcaacctgtgttttacaaagatggtgtcctacagcagccagtgagattattatctgcttccatggataaaaccatgattctctgggctccagatgaagagtcaggagtttggctagaacagagagagtggactccagagattgtcatttcaggacactttgatggtgtccaagacctagtctgggatccagaaggagaatttattatcactgttggtactgatcagacaactagactttttgctccatggaagagaaaagaccaatcacaggtgacttggcatgaaattgcaaggcctcagatacatgggtatgacctgaaatgtttggcaatgattaatcggtttcagtttgtatctggagcagatgaaaaagttcttcgggttttttctgcacctcggaattttgtggaaaatttttgtgccattacaggacaatcactgaatcatgtgctctgtaatcaagatagtgatcttccagaaggagccactgtccctgcattgggattatcaaataaagctgtctttcagggagatatagcttctcagccttctgatgaagaggagctgttaactagtactggttttgagtatcagcaggtggcctttcagccctccatacttactgagcctcccactgaggatcatcttctgcagaatactttgtggcctgaagttcaaaaactatatgggcacggttatgaaatattttgtgttacttgtaacagttcaaagactctgcttgcctcagcttgtaaggcagctaagaaagagcatgcagctatcattctttggaacactacatcttggaaacaggtgcagaatttagttttccacagtttgacagtcacgcagatggccttctcacctaatgagaagttcttactagctgtttccagagatcgaacctggtcattgtggaaaaagcaggatacaatctcacctgagttcgagccagtttttagtctttttgccttcaccaacaaaattacttctgtgcacagtagaattatttggtcttgtgattggagtcctgacagcaagtatttcttcactgggagtcgagacaaaaaggtggttgtctggggtgagtgcgactccactgatgactgtattgagcacaacattggcccctgctcctcagtcctggacgtgggtggggctgtgacagctgtcagcgtctgcccagtgctccacccttctcaacgatacgtggttgcagtaggattggagtgtggaaagatttgcttatatacctggaaaaagactgatcaagttccagaaataaatgactggacccactgtgtagaaacaagtcaaagccaaagtcatacactggctatcagaaaattatgctggaagaattgcagtggaaaaactgaacagaaggaagcagaaggtgctgagtggttacactttgcaagctgtggtgaagatcacactgtgaagatacacagagtcaataaatgtgcactgtaatggactt

SEQ ID NO: 129524 - DNA, 8459 bp, Homo sapiens
  Payload ID: 5331
  Gene Symbol: ELP2
  Gene Name: elongator acetyltransferase complex subunit 2
  Uniprot ID: Q6IA86
  ENST ID: ENST00000358232
  CDS Start-End: 64-2544
agtagttccgctccgagggcggaagtgcgcgtctcttgtttgtgcggctgaccagttggcgacatggtggcacccgtgctggagacttctcacgtgttttgctgcccaaaccgggtgcggggagtcctgaactggagctctgggcccagaggacttctggcctttggcacgtcctgctccgtggtgctctatgaccccctgaaaagggttgttgttaccaacttgaatggtcacaccgcccgagtcaattgcatacagtggatttgtaaacaggatggctccccttctactgaattagtttctggaggatctgataatcaagtgattcactgggaaatagaggataatcagcttttaaaagcagtgcatcttcaaggccatgaaggacctgtttatgcggtgcatgctgtttaccagaggaggacatcagatcctgcattatgtacactgatcgtttctgcagctgcagattctgctgttcgactctggtctaaaaagggtccagaagtaatgtgccttcagactttaaactttggaaatggatttgctttggctctctgcttatcttttttgccaaatactgatgtaccaatattagcatgtggcaatgatgattgcagaattcacatatttgctcaacaaaatgatcagtttcagaaagtgctttctctctgtggacatgaggattggattagaggagtggaatgggcagcctttggtagagatcttttcctagcaagctgttcacaagattgcctgataagaatatggaagctgtatataaagtcaacatctttagaaactcaggatgacgataacataagactgaaagaaaatacttttaccatagaaaatgaaagtgttaaaatagcatttgctgttactctggagacagtgctagccggtcatgaaaactgggtaaatgcagttcactggcaacctgtgttttacaaagatggtgtcctacagcagccagtgagattattatctgcttccatggataaaaccatgattctctgggctccagatgaagagtcaggagtttggctagaacaggttcgagtaggtgaagtaggtgggaatactttgggattttatgattgccagttcaatgaagatggctccatgatcattgctcatgctttccacggagcgttgcacctttggaaacagaatacagttaacccaagagagtggactccagagattgtcatttcaggacactttgatggtgtccaagacctagtctgggatccagaaggagaatttattatcactgttggtactgatcagacaactagactttttgctccatggaagagaaaagaccaatcacaggtgacttggcatgaaattgcaaggcctcagatacatgggtatgacctgaaatgtttggcaatgattaatcggtttcagtttgtatctggagcagatgaaaaagttcttcgggttttttctgcacctcggaattttgtggaaaatttttgtgccattacaggacaatcactgaatcatgtgctctgtaatcaagatagtgatcttccagaaggagccactgtccctgcattgggattatcaaataaagctgtctttcagggagatatagcttctcagccttctgatgaagaggagctgttaactagtactggttttgagtatcagcaggtggcctttcagccctccatacttactgagcctcccactgaggatcatcttctgcagaatactttgtggcctgaagttcaaaaactatatgggcacggttatgaaatattttgtgttacttgtaacagttcaaagactctgcttgcctcagcttgtaaggcagctaagaaagagcatgcagctatcattctttggaacactacatcttggaaacaggtgcagaatttagttttccacagtttgacagtcacgcagatggccttctcacctaatgagaagttcttactagctgtttccagagatcgaacctggtcattgtggaaaaagcaggatacaatctcacctgagttcgagccagtttttagtctttttgccttcaccaacaaaattacttctgtgcacagtagaattatttggtcttgtgattggagtcctgacagcaagtatttcttcactgggagtcgagacaaaaaggtggttgtctggggtgagtgcgactccactgatgactgtattgagcacaacattggcccctgctcctcagtcctggacgtgggtggggctgtgacagctgtcagcgtctgcccagtgctccacccttctcaacgatacgtggttgcagtaggattggagtgtggaaagatttgcttatatacctggaaaaagactgatcaagttccagaaataaatgactggacccactgtgtagaaacaagtcaaagccaaagtcatacactggctatcagaaaattatgctggaagaattgcagtggaaaaactgaacagaaggaagcagaaggtgctgagtggttacactttgcaagctgtggtgaagatcacactgtgaagatacacagagtcaataaatgtgcactgtaatggacttaataactacatgcttgcagtcactggtatcttaaaatattatcatgtaaacaggtcatctttaccttcataactgaattgagtttctgggttttttttttttttgagatggagtcttgctttgtcacaacctccacctcccaggttcaagcgattctctttcttcagcctcctgagtagctgggactagaggcacaccaccaattccggctaatttttgtatttttagtagagactgggtttcaccgttggccaggcgggtctcaaactcctcgtctcaggtgatctgcttgcctcggcctcccaaagtgctgggattacaggcgtgagccactgcgcccagcctgagtttcattttttaagtcacatagcagtagtccttatttcagtgctagaccctttgaaatgcgatgaaagctatatggacccttcgctttgttatataacatatgcacacatacccagaattttgcacatatgttcagagattcctagacctgcagacctgcctctgtgtgtcccaatttaagaacctctgttctttcttcatgactggatttgcccaattttgtgttattttgggacttaatttgtccctctttgggacatttccttatttattgccctcttcagagagtagatgtagaaaataaagagaggaaacctagattacttaattttattttaacattttctatagatagcataccacgccaagtgtgctctgtcttgatccccttctttctagcatctgccagacattgtagagtttcgcaagcagttgtaggtttgagctgcagccagtcatttcttttattctttaaaagtacatagatttgtctttttagggctttactgaaagtaaaatatcctgacatttaaactgacagatgtaggaggtaaaaaatagagttctgaaacatttgaatttatgtgacagctgaagtcacgagatgagggatatatgtcccccagggaggatgcagaaagaagaaaagggtactggaaacagcatgtcagtggtgccagctgagggctggaggcagccaggagagttgggagcctgggtgctgggtggagagaggttaacagggaagacatgggaagtattgtgaaggctggtgtgagcaggggactactccagccctgttggaacatagagccatttggcagattgacaatgcagtgacagctgtatataataaatgtgttgaaaggaggaaggtgaggattttcttggtgggagtttatgctgttatttaacatattttgcttccaaaggggttaagatgttttacctaaatggaggtttctaggtcagtgctatacaatatttctaatctgtgttttatagtgtgagctacatatgtaattttaaaattttcaagtagccacataataaaggaaacaggtgaaatttaatgacatatttcctttaatacggtatatccaaaatattattatgtcaacctataatcagtataaaaacctgttactgaaatattttatagggcccatctcagttcagactagccacatttaagtgcttcatagccacatgtggctcatggccatccatatttggacaatgtactttagactattgcatctgtatactcttgtgccgtcagctggggggtggggtgtgtgtgcgtgtataccaaggcagtgagcatctgagctttgaacctcaaagaccaaaatgccctgcccattttcctgcttatcagctgaggaatctttacccacattgacacatgggcttgttctgacccaagtgcatgcaggcttccagagcagattcagaggcctaacttagtcctttagctttcctcccagcacagaactcccaaggttatctgcaagtaggccttgcctagagagactgagttttcaagttgtcagttttcccaaattgtcctcaagcatcttcctctggaatcaccttactgtttagtaaacattcagaggacttgctacacatctgggcagtctgcattgtaattcatatgtgtttacacatttgtgtcttcatctgctaaagcacctttgaaccatattgtaattcataatatctgaagcaattattatgaattgtagtaattcataatattgaagcgattcataatatctgaagcaatccccagatacgggttaggcatggccctgctctgagcaggatggcaaaagtggcagtccgtgacgcagcccttgttaccccaggctattactaaatggtggtggtggttttatcttaattaaaatgacatcaccaacaatgggccctttcctgtctgccaggaaaagttttctgtagtgacgcacgtgttgtgtgtgtatgtgtgcgtttgaggctatattactcattgctacggcagttcaaaatgacttggaaaaaaacaatgaacgctggtcattgatatgtatactgacatgtttgagggaagttactgtggtctgtaacttatgaaatacataaaaaatatgatgggtggagtgacggacacatggacagatatgaagcaagcactgtaaaatattagtggtagtttttgtatgcccatactcacggcaccattattcacagtagctaagagatggaagcaatatgtgcccatcagtgggtgaatgatcaacaaaatgtggtatattcatacagtggaatattattcagcctctaaaaggaagatacgctgacatgtgctgcaacatggatgaatcttgaggacatgatgctaagtgaagtaagccagtcactggaagacaaatactctatgcttccatttatgtgaagtatctagagcagtcaaatgcatagaaacaagtagaatggtagttgccaaggactgggggaggaggaaatgaggagttgtttaatgggtatagtgtttcagttttgcaagataaaaagtcctgtggattggttgcacagttaagttatgtgaatgctgtatgccaactcaactgtacactctaaaatggttaagatggtaaatcttatctttattttaccacagttttttttaaagcatggtaaacaccatttcccaggatgtaaatcggtactaaaaaaaaagtgctccaaagtaagatatatttgggaaacacagggataactaaggttagataggtgttctttattgcaggaattctaagagcatttaacaaattaatttacactgggaattttcagtgtggagggtctggctcatagcatttcacaaacattatacttcagagtcccaaagcctttaaataaaatgttaatggtagaaactccttaaggggtgttcactgtacaattctttcaacttttctgcatgctgggagtttttttggtaacaacgtgttggggaaaatggccttggaatatttcattcaaattggagccaagctaacacaaagctgttgctgctagtgggaacagccctgatgtccatgtaacaagctgccctccccaactccctccttcctgtttctccctcctcggcacccacttctaggattaacaggcagggagacgggagagcccagctctgggtacagttgggccacagcagaaggagggccagggtagaggtttgggccttggctctgatgcttgaacataaacacacctagtcagaagtacatcagtacaaagtgggccctacaaaattatagggtcagaaaacaggtaagtggttaccaggggctgggaatggggagaggagtgactacagagggacctagattcttcaacaaatacattacaagaggaaaagggaagggaagggaagcctggagattgaaagatacttgagacgtgtgaatccagtgcaatgtatgaaccttgtttgcctcttgatctgaactagccaatcaatcttgtaaaaatgtgcttaagggacaaagcaaatttgaactctggctggatatttgatgatattaaggaaacaacatttaaacatatgacagtggggctatggttatgattggttttgttttttttttctctagagactgggttttgcagtgttacctaagctggtcttgaactcctgggctcaagcagttctcccacctcagccttggtttaagaaaaaaaaaaaaaaagttctcttgaatcataatttcagtatttatggatgaaatcaatttatgtcttgggttgtttcataatgattgtgtgtgtgtcaaggactagatgggttttagatgtgtggattattaatgaagctgggcagtgttggggtggtcatactattctaattttttaatatacttaaaatttccttataagaattgtttagaaagaatgagcatatccataagttaaatacaaaaattgttacattgtgaggagttcttccccttctagcatgtagtggatggtccagtattaaggctctgccatgcttaaacaagagactggcactccaaggacaatgaggctgaggccagaagagagacagcgtgttggatggctgcatgtggttggtggatagaggactctgagccccactctggtggactcagagatctgggacccgggccgggcgtggtggctcatgcctgtaatcccagcaatttgggaggctgaggcgggtggatcacttgaggtcaggagttcgagaccagcctggccaacatggtgaaaccccatctctactaaaaatacaaaaaaaaaaaaaaaattagtcgggcatggtggtgggcgcctgtaatcccagatgttccagaggctgaggcaggagaaccgcttgaacccaggaggaggaggaggttgcagtgggccgagatcgagccactgcactccagcctgggcaacagagtgagactccatctcaaaaaaaaaaaaaaaaaaaaaaaaaatctgggacccagtactgagtgaagacaccagagtgaaggagagaggccatgctgtgtccgagaagctcctactggggtggaagggacagctccacaaaggctgctcttgcaggggctctcctgcagcaaggtgcctgctgactgtccccagactgtctcccgacacagagggatgcaaaggcagcctcttcctgctcagtggaatagggaaattatatcacctttcacttcccactctcacttctgcccctgctacccttagtctttggcttttgctgacattttcccctcttatcttttctcctgaccaagttctaggtatttcatagggcagtctaggtgagggttggaaccccaatgagttgggcaacagaaacccagctcacactggctgtcactgtgggcaagctgttcccctcatctctaaaagtggagatgagattagtgtatgagtctggcttccattcaactgtgtgtgaaaaaaaattgtaaaattttctttctggtttacgcaagttaaaagtttatttctctcatatgaaaggagtcaaggcagacagaccaggatggggagggagatgtctacagggtcaaggacccaggctcttatttcgctgtctgacgtccttagtatgaggctttcaccttccaggatggctgcttggcctcctgccatggtctttgcgttccagccagcaaagaggaagaaggcatgaagaaaggcctgcccctgactttaaaaacatttcttggaagtcccatactattttgcttaatctcctcgggcagaatttagtgttgtggccataccgagcttcaggagaagctgggaaattaaatctttattgcagatgcccatgtgctcagcagagaactggggtgcttcattctggaagaaagggagaacaacagtaaccagtgtgtaggattgttctgagaattaaatgagccaatatatgaaaaacactagtttggtccctgggatataaataagacagcagtaatttgtatctggtactattatgattaaataaagctctgctcgtgtcaactcc

SEQ ID NO: 129525 - DNA, 2385 bp, Homo sapiens
  Payload ID: 5331
  Gene Symbol: ELP2
  Gene Name: elongator acetyltransferase complex subunit 2
  Uniprot ID: Q6IA86
  ENST ID: ENST00000423854
  CDS Start-End: 36-2306
gcgtctcttgtttgtgcggctgaccagttggcgacatggtggcacccgtgctggagacttctcacgtgttttgctgcccaaaccgggtgcggggagtcctgaactggagctctgggcccagaggacttctggcctttggcacgtcctgctccgtggtgctctatgaccccctgaaaagggttgttgttaccaacttgaatggtcacaccgcccgagtcaattgcatacagtggatttgtaaacaggatggctccccttctactgaattagtttctggaggatctgataatcaagtgattcactgggaaatagaggataatcagcttttaaaagcagtgcatcttcaaggccatgaaggacctgtttatgcggtgcatgctgtttaccagaggaggacatcagatcctgcattatgtacactgatcgtttctgcagctgcagattctgctgttcgactctggtctaaaaagggtccagaaggtagagatcttttcctagcaagctgttcacaagattgcctgataagaatatggaagctgtatataaagtcaacatctttagaaactcaggatgacgataacataagactgaaagaaaatacttttaccatagaaaatgaaagtgttaaaatagcatttgctgttactctggagacagtgctagccggtcatgaaaactgggtaaatgcagttcactggcaacctgtgttttacaaagatggtgtcctacagcagccagtgagattattatctgcttccatggataaaaccatgattctctgggctccagatgaagagtcaggagtttggctagaacaggttcgagtaggtgaagtaggtgggaatactttgggattttatgattgccagttcaatgaagatggctccatgatcattgctcatgctttccacggagcgttgcacctttggaaacagaatacagttaacccaagagagtggactccagagattgtcatttcaggacactttgatggtgtccaagacctagtctgggatccagaaggagaatttattatcactgttggtactgatcagacaactagactttttgctccatggaagagaaaagaccaatcacaggtgacttggcatgaaattgcaaggcctcagatacatgggtatgacctgaaatgtttggcaatgattaatcggtttcagtttgtatctggagcagatgaaaaagttcttcgggttttttctgcacctcggaattttgtggaaaatttttgtgccattacaggacaatcactgaatcatgtgctctgtaatcaagatagtgatcttccagaaggagccactgtccctgcattgggattatcaaataaagctgtctttcagggagatatagcttctcagccttctgatgaagaggagctgttaactagtactggttttgagtatcagcaggtggcctttcagccctccatacttactgagcctcccactgaggatcatcttctgcagaatactttgtggcctgaagttcaaaaactatatgggcacggttatgaaatattttgtgttacttgtaacagttcaaagactctgcttgcctcagcttgtaaggcagctaagaaagagcatgcagctatcattctttggaacactacatcttggaaacaggtgcagaatttagttttccacagtttgacagtcacgcagatggccttctcacctaatgagaagttcttactagctgtttccagagatcgaacctggtcattgtggaaaaagcaggatacaatctcacctgagttcgagccagtttttagtctttttgccttcaccaacaaaattacttctgtgcacagtagaattatttggtcttgtgattggagtcctgacagcaagtatttcttcactgggagtcgagacaaaaaggtggttgtctggggtgagtgcgactccactgatgactgtattgagcacaacattggcccctgctcctcagtcctggacgtgggtggggctgtgacagctgtcagcgtctgcccagtgctccacccttctcaacgatacgtggttgcagtaggattggagtgtggaaagatttgcttatatacctggaaaaagactgatcaagttccagaaataaatgactggacccactgtgtagaaacaagtcaaagccaaagtcatacactggctatcagaaaattatgctggaagaattgcagtggaaaaactgaacagaaggaagcagaaggtgctgagtggttacactttgcaagctgtggtgaagatcacactgtgaagatacacagagtcaataaatgtgcactgtaatggacttaataactacatgcttgcagtcactggtatcttaaaatattatcatgtaaacaggtcatctttaccttcataa

SEQ ID NO: 129526 - DNA, 2722 bp, Homo sapiens
  Payload ID: 5331
  Gene Symbol: ELP2
  Gene Name: elongator acetyltransferase complex subunit 2
  Uniprot ID: Q6IA86
  ENST ID: ENST00000442325
  CDS Start-End: 37-2712
cgcgtctcttgtttgtgcggctgaccagttggcgacatggtggcacccgtgctggagacttctcacgtgttttgctgcccaaaccgggtgcggggagtcctgaactggagctctgggcccagaggacttctggcctttggcacgtcctgctccgtggtgctctatgaccccctgaaaagggttgttgttaccaacttgaatggtcacaccgcccgagtcaattgcatacagtggatttgtaaacaggatggctccccttctactgaattagtttctggaggatctgataatcaagtgattcactgggaaatagaggataatcagcttttaaaagcagtgcatcttcaaggccatgaaggacctgtttatgcggtgcatgctgtttaccagaggaggacatcagatcctgcattatgtacactgatcgtttctgcagctgcagattctgctgttcgactctggtctaaaaagggtccagaagtaatgtgccttcagactttaaactttggaaatggatttgctttggctctctgcttatcttttttgccaaatactgatgttacctggaagactggccaggtggaacgaggcagggcctggaagccaccagcctctctcgccctctgtagcaggagctgcgactctatggtttcatgttacgcttccattctgtgcaaggctctgtggaaggagaagctgcacacattctggcatcataacagaatttcatttcttccatctgcattcaggccaataccaatattagcatgtggcaatgatgattgcagaattcacatatttgctcaacaaaatgatcagtttcagaaagtgctttctctctgtggacatgaggattggattagaggagtggaatgggcagcctttggtagagatcttttcctagcaagctgttcacaagattgcctgataagaatatggaagctgtatataaagtcaacatctttagaaactcaggatgacgataacataagactgaaagaaaatacttttaccatagaaaatgaaagtgttaaaatagcatttgctgttactctggagacagtgctagccggtcatgaaaactgggtaaatgcagttcactggcaacctgtgttttacaaagatggtgtcctacagcagccagtgagattattatctgcttccatggataaaaccatgattctctgggctccagatgaagagtcaggagtttggctagaacaggttcgagtaggtgaagtaggtgggaatactttgggattttatgattgccagttcaatgaagatggctccatgatcattgctcatgctttccacggagcgttgcacctttggaaacagaatacagttaacccaagagagtggactccagagattgtcatttcaggacactttgatggtgtccaagacctagtctgggatccagaaggagaatttattatcactgttggtactgatcagacaactagactttttgctccatggaagagaaaagaccaatcacaggtgacttggcatgaaattgcaaggcctcagatacatgggtatgacctgaaatgtttggcaatgattaatcggtttcagtttgtatctggagcagatgaaaaagttcttcgggttttttctgcacctcggaattttgtggaaaatttttgtgccattacaggacaatcactgaatcatgtgctctgtaatcaagatagtgatcttccagaaggagccactgtccctgcattgggattatcaaataaagctgtctttcagggagatatagcttctcagccttctgatgaagaggagctgttaactagtactggttttgagtatcagcaggtggcctttcagccctccatacttactgagcctcccactgaggatcatcttctgcagaatactttgtggcctgaagttcaaaaactatatgggcacggttatgaaatattttgtgttacttgtaacagttcaaagactctgcttgcctcagcttgtaaggcagctaagaaagagcatgcagctatcattctttggaacactacatcttggaaacaggtgcagaatttagttttccacagtttgacagtcacgcagatggccttctcacctaatgagaagttcttactagctgtttccagagatcgaacctggtcattgtggaaaaagcaggatacaatctcacctgagttcgagccagtttttagtctttttgccttcaccaacaaaattacttctgtgcacagtagaattatttggtcttgtgattggagtcctgacagcaagtatttcttcactgggagtcgagacaaaaaggtggttgtctggggtgagtgcgactccactgatgactgtattgagcacaacattggcccctgctcctcagtcctggacgtgggtggggctgtgacagctgtcagcgtctgcccagtgctccacccttctcaacgatacgtggttgcagtaggattggagtgtggaaagatttgcttatatacctggaaaaagactgatcaagttccagaaataaatgactggacccactgtgtagaaacaagtcaaagccaaagtcatacactggctatcagaaaattatgctggaagaattgcagtggaaaaactgaacagaaggaagcagaaggtgctgagtggttacactttgcaagctgtggtgaagatcacactgtgaagatacacagagtcaataaatgtgcactgtaatggacttaat

SEQ ID NO: 129527 - DNA, 569 bp, Homo sapiens
  Payload ID: 5331
  Gene Symbol: ELP2
  Gene Name: elongator acetyltransferase complex subunit 2
  ENST ID: ENST00000545632
  CDS Start-End: 40-195
gtgcgcgtctcttgtttgtgcggctgaccagttggcgacatggtggcacccgtgctggagacttctcacgtgttttgctgcccaaaccgggtgcggggagtcctgaactggagctctgggcccagaggacttctggcctttggcacgtcctgctccgtggtgctctatgaccccctgccccttctactgaattagtttctggaggatctgataatcaagtgattcactgggaaatagaggataatcagcttttaaaagcagtgcatcttcaaggccatgaaggacctgtttatgcggtgcatgctgtttaccagaggaggacatcagatcctgcattatgtacactgatcgtttctgcagctgcagattctgctgttcgactctggtctaaaaagggtccagaagtaccaatattagcatgtggcaatgatgattgcagaattcacatatttgctcaacaaaatgatcagtttcagaaagtgctttctctctgtggacatgaggattggattagaggagtggaatgggcagcctttggtagagatcttttcctagcaagctgttcacaa

SEQ ID NO: 129528 - DNA, 535 bp, Homo sapiens
  Payload ID: 5331
  Gene Symbol: ELP2
  Gene Name: elongator acetyltransferase complex subunit 2
  ENST ID: ENST00000543127
  CDS Start-End: 364-535
gcttttccgtgtgttcgccgacgccgcgggggcgtggcgcggccctagcgcattaaaagggttgttgttaccaacttgaatggtcacaccgcccgagtcaattgcatacagtggatttgtaaacaggatggctccccttctactgaattagtttctggaggatctgataatcaagtgattcactgggaaatagaggataatcagcttttaaaagcagtgcatcttcaaggccatgaaggacctgtttatgcggtgcatgctgtttaccagaggaggacatcagatcctgcattatgtacactgatcgtttctgcagctgcagattctgctgttcgactctggtctaaaaagggtccagaagtaatgtgccttcagactttaaactttggaaatggatttgctttggctctctgcttatcttttttgccaaatactgatgtaccaatattagcatgtggcaatgatgattgcagaattcacatatttgctcaacaaaatgatcagtttcagaaagtgctttctctctgtggacatg

SEQ ID NO: 129529 - DNA, 553 bp, Homo sapiens
  Payload ID: 5331
  Gene Symbol: ELP2
  Gene Name: elongator acetyltransferase complex subunit 2
  ENST ID: ENST00000544267
  CDS Start-End: 55-210
gctccgagggcggaagtgcgcgtctcttgtttgtgcggctgaccagttggcgacatggtggcacccgtgctggagacttctcacgtgttttgctgcccaaaccgggtgcggggagtcctgaactggagctctgggcccagaggacttctggcctttggcacgtcctgctccgtggtgctctatgaccccctgccccttctactgaattagtttctggaggatctgataatcaagtgattcactgggaaatagaggataatcagcttttaaaagcagtgcatcttcaaggccatgaaggacctgtttatgcggtgcatgctgtttaccagaggaggacatcagatcctgcattatgtacactgatcgtttctgcagctgcagattctgctgttcgactctggtctaaaaagggtccagaagtaatgtgccttcagactttaaactttggaaatggatttgctttggctctctgcttatcttttttgccaaatactgatgtaccaatattagcatgtggcaatgatgattgcagaattcacatatttgctcaaca

SEQ ID NO: 129530 - DNA, 1049 bp, Homo sapiens
  Payload ID: 5331
  Gene Symbol: ELP2
  Gene Name: elongator acetyltransferase complex subunit 2
  ENST ID: ENST00000540766
  CDS Start-End: 1-144
gatgaagaggagctgttaactagtactggttttgagtatcagcaggtggcctttcagccctccatacttactgagcctcccactgaggatcatcttctgcagaatactttgtggcctgaagttcaaaaactagccagtttttagtctttttgccttcaccaacaaaattacttctgtgcacagtagaattatttggtcttgtgattggagtcctgacagcaagtatttcttcactgggagtcgagacaaaaaggtggttgtctggggtgagtgcgactccactgatgactgtattgagcacaacattggcccctgctcctcagtcctggacgtgggtggggctgtgacagctgtcagcgtctgcccagtgctccacccttctcaacgatacgtggttgcagtaggattggagtgtggaaagatttgcttatatacctggaaaaagactgatcaagttccagaaataaatgactggacccactgtgtagaaacaagtcaaagccaaagtcatacactggctatcagaaaattatgctggaagaattgcagtggaaaaactgaacagaaggaagcagaaggtgctgagtggttacactttgcaagctgtggtgaagatcacactgtgaagatacacagagtcaataaatgtgcactgtaatggacttaataactacatgcttgcagtcactggtatcttaaaatattatcatgtaaacaggtcatctttaccttcataactgaattgagtttctgggttttttttttttttgagatggagtcttgctttgtcacaacctccacctcccaggttcaagcgattctctttcttcagcctcctgagtagctgggactagaggcacaccaccaattccggctaatttttgtatttttagtagagactgggtttcaccgttggccaggcgggtctcaaactcctcgtctcaggtgatctgcttgcctcggcctcccaaagtgctgggattacaggcgtgagccactgcgcccagcctgagtttcattttttaagtcacatagcagtagtccttatt

SEQ ID NO: 129531 - DNA, 649 bp, Homo sapiens
  Payload ID: 5331
  Gene Symbol: ELP2
  Gene Name: elongator acetyltransferase complex subunit 2
  ENST ID: ENST00000542430
  CDS Start-End: 18-380
gctgaccagttggcgacatggtggcacccgtgctggagacttctcacgtgttttgctgcccaaaccgggtgcggggagtcctgaactggagctctgggcccagaggacttctggcctttggcacgtcctgctccgtggtgctctatgaccccctgaaaagggttgttgttaccaacttgaatggtcacaccgcccgagtcaattgcatacagtggatttgtaaacaggatggctccccttctactgaattagtttctggaggatctgataatcaagtgattcactgggaaatagaggataatcaggccatgaaggacctgtttatgcggtgcatgctgtttaccagaggaggacatcagatcctgcattatgtacactgatcgtttctgcagctgcagattctgctgttcgactctggtctaaaaagggtccagaagtaatgtgccttcagactttaaactttggaaatggatttgctttggctctctgcttatcttttttgccaaatactgatgtaccaatattagcatgtggcaatgatgattgcagaattcacatatttgctcaacaaaatgatcagtttcagaaagtgctttctctctgtggacatgaggattggattagaggagtggaatgggcagcctttggt

SEQ ID NO: 129532 - DNA, 2542 bp, Homo sapiens
  Payload ID: 5331
  Gene Symbol: ELP2
  Gene Name: elongator acetyltransferase complex subunit 2
  Uniprot ID: Q6IA86
  ENST ID: ENST00000539560
  CDS Start-End: 34-2151
gtctcttgtttgtgcggctgaccagttggcgacatggtggcacccgtgctggagacttctcacgtgttttgctgcccaaaccgggtgcggggagtcctgaactggagctctgggcccagaggacttctggcctttggcacgtcctgctccgtggtgctctatgaccccctgaaaagggttgttgttaccaacttgaatggtcacaccgcccgagtcaattgcatacagtggatttgtaaacaggatggctccccttctactgaattagtttctggaggatctgataatcaagtgattcactgggaaatagaggataatcagcttttaaaagcagtgcatcttcaaggccatgaaggacctgtttatgcggtgcatgctgtttaccagaggaggacatcagatcctgcattatgtacactgatcgtttctgcagctgcagattctgctgttcgactctggtctaaaaagggtccagaagtaatgtgccttcagactttaaactttggaaatggatttgctttggctctctgcttatcttttttgccaaatactgatgtaccaatattagcatgtggcaatgatgattgcagaattcacatatttgctcaacaaaatgatcagtttcagaaagtgctttctctctgtggacatgaggattggattagaggagtggaatgggcagcctttggtagagatcttttcctagcaagctgttcacaagattgcctgataagaatatggaagctgtatataaagtcaacatctttagaaactcaggatgacgataacataagactgaaagaaaatacttttaccatagaaaatgaaagtgttaaaatagcatttgctgttactctggagacagtgctagccggtcatgaaaactgggtaaatgcagttcactggcaacctgtgttttacaaagatggtgtcctacagcagccagtgagattattatctgcttccatggataaaaccatgattctctgggctccagatgaagagtcaggagtttggctagaacaggttcgagtaggtgaagtaggtgggaatactttgggattttatgattgccagttcaatgaagatggctccatgatcattgctcatgctttccacggagcgttgcacctttggaaacagaatacagttaacccaagagagtggactccagagattgtcatttcaggacactttgatggtgtccaagacctagtctgggatccagaaggagaatttattatcactgttggtactgatcagacaactagactttttgctccatggaagagaaaagaccaatcacaggtgacttggcatgaaattgcaaggcctcagatacatgggtatgacctgaaatgtttggcaatgattaatcggtttcagtttgtatctggagcagatgaaaaagttcttcgggttttttctgcacctcggaattttgtggaaaatttttgtgccattacaggacaatcactgaatcatgtgctctgtaatcaagatagtgatcttccagaaggagccactgtccctgcattgggattatcaaataaagctgtctttcagggagatatagcttctcagccttctgatgaagaggagctgttaactagtactggttttgagtatcagcaggtggcctttcagccctccatacttactgagcctcccactgaggatcatcttctgcagaatactttgtggcctgaagttcaaaaactatatgggcacggttatgaaatattttgtgttacttgtaacagttcaaagactctgcttgcctcagcttgtaaggcagctaagaaagagcatgcagctatcattctttggaacactacatcttggaaacaggtgcagaatttagttttccacagtttgacagtcacgcagatggccttctcacctaatgagaagttcttactagctgtttccagagatcgaacctggtcattgtggaaaaagcaggatacaatctcacctgagttcgtagaattatttggtcttgtgattggagtcctgacagcaagtatttcttcactgggagtcgagacaaaaaggtggttgtctggggtgagtgcgactccactgatgactgtattgagcacaacattggcccctgctcctcagtcctggacgtgggtggggctgtgacagctgtcagcgtctgcccagtgctccacccttctcaacgatacgtggttgcagtaggattggagtgtggaaagatttgcttatatacctggaaaaagactgatcaagttccagaaataaatgactggacccactgtgtagaaacaagtcaaagccaaagtcatacactggctatcagaaaattatgctggaagaattgcagtggaaaaactgaacagaaggaagcagaaggtgctgagtggttacactttgcaagctgtggtgaagatcacactgtgaagatacacagagtcaataaatgtgcactgtaatggacttaataactacatgcttgcagtcactggtatcttaaaatattatcatgtaaacaggtcatctttaccttcataac

SEQ ID NO: 129533 - DNA, 2288 bp, Homo sapiens
  Payload ID: 5331
  Gene Symbol: ELP2
  Gene Name: elongator acetyltransferase complex subunit 2
  Uniprot ID: Q6IA86
  ENST ID: ENST00000542824
  CDS Start-End: 11-2281
agttggcgacatggtggcacccgtgctggagacttctcacgtgttttgctgcccaaaccgggtgcggggagtcctgaactggagctctgggcccagaggacttctggcctttggcacgtcctgctccgtggtgctctatgaccccctgaaaagggttgttgttaccaacttgaatggtcacaccgcccgagtcaattgcatacagtggatttgtaaacaggatggctccccttctactgaattagtttctggaggatctgataatcaagtgattcactgggaaatagaggataatcagcttttaaaagcagtgcatcttcaaggccatgaaggacctgtttatgcggtgcatgctgtttaccagaggaggacatcagatcctgcattatgtacactgatcgtttctgcagctgcagattctgctgttcgactctggtctaaaaagggtccagaagtaccaatattagcatgtggcaatgatgattgcagaattcacatatttgctcaacaaaatgatcagtttcagaaagtgctttctctctgtggacatgaggattggattagaggagtggaatgggcagcctttggtagagatcttttcctagcaagctgttcacaagattgcctgataagaatatggaagctgtatataaagtcaacatctttagaaactcaggatgacgataacataagactgaaagaaaatacttttaccatagaaaatgaaagtgttaaaatagcatttgctgttactctggagacagtgctagccggtcatgaaaactgggtaaatgcagttcactggcaacctgtgttttacaaagatggtgtcctacagcagccagtgagattattatctgcttccatggataaaaccatgattctctgggctccagatgaagagtcaggagtttggctagaacagagagagtggactccagagattgtcatttcaggacactttgatggtgtccaagacctagtctgggatccagaaggagaatttattatcactgttggtactgatcagacaactagactttttgctccatggaagagaaaagaccaatcacaggtgacttggcatgaaattgcaaggcctcagatacatgggtatgacctgaaatgtttggcaatgattaatcggtttcagtttgtatctggagcagatgaaaaagttcttcgggttttttctgcacctcggaattttgtggaaaatttttgtgccattacaggacaatcactgaatcatgtgctctgtaatcaagatagtgatcttccagaaggagccactgtccctgcattgggattatcaaataaagctgtctttcagggagatatagcttctcagccttctgatgaagaggagctgttaactagtactggttttgagtatcagcaggtggcctttcagccctccatacttactgagcctcccactgaggatcatcttctgcagaatactttgtggcctgaagttcaaaaactatatgggcacggttatgaaatattttgtgttacttgtaacagttcaaagactctgcttgcctcagcttgtaaggcagctaagaaagagcatgcagctatcattctttggaacactacatcttggaaacaggtgcagaatttagttttccacagtttgacagtcacgcagatggccttctcacctaatgagaagttcttactagctgtttccagagatcgaacctggtcattgtggaaaaagcaggatacaatctcacctgagttcgagccagtttttagtctttttgccttcaccaacaaaattacttctgtgcacagtagaattatttggtcttgtgattggagtcctgacagcaagtatttcttcactgggagtcgagacaaaaaggtggttgtctggggtgagtgcgactccactgatgactgtattgagcacaacattggcccctgctcctcagtcctggacgtgggtggggctgtgacagctgtcagcgtctgcccagtgctccacccttctcaacgatacgtggttgcagtaggattggagtgtggaaagatttgcttatatacctggaaaaagactgatcaagttccagaaataaatgactggacccactgtgtagaaacaagtcaaagccaaagtcatacactggctatcagaaaattatgctggaagaattgcagtggaaaaactgaacagaaggaagcagaaggtgctgagtggttacactttgcaagctgtggtgaagatcacactgtgaagatacacagagtcaataaatgtgcactgtaatggactt

SEQ ID NO: 129534 - DNA, 381 bp, Homo sapiens
  Payload ID: 5331
  Gene Symbol: ELP2
  Gene Name: elongator acetyltransferase complex subunit 2
  ENST ID: ENST00000540799
  CDS Start-End: 10-315
gttggcgacatggtggcacccgtgctggagacttctcacgtgttttgctgcccaaaccgggtgcggggagtcctgaactggagctctgggcccagaggacttctggcctttggcacgtcctgctccgtggtgctctatgaccccctgaaaagggttgttgttaccaacttgaatggtcacaccgcccgagtcaattgcatacagtggatttgtaaacaggatggctccccttctactgaattagtttctggaggatctgataatcaagtgattcactgggaaatagaggataatcagatatgggcacggttatgaaatattttgtgttacttgtaacagttcaaagactctgcttgcctcagcttgtaaggcagctaagaa

SEQ ID NO: 129535 - DNA, 3452 bp, Homo sapiens
  Payload ID: 5332
  Gene Symbol: ELP3
  Gene Name: elongator acetyltransferase complex subunit 3
  Uniprot ID: Q9H9T3
  ENST ID: ENST00000256398
  CDS Start-End: 378-2021
gagagaccatccacttccaccctttcacttaggcttcctggcgcagcctctatccaggaactctgtcccatagctgtactgcccaggtcgagctttctaaccccaagatgccactccgttcagacgttcccatcctccatccctgagacccggggcaggatcgcagcctaggggcctcacgggccgcctgctaccctgttagttgcaacacggggcggggcgtggctttgtgcacgtcggcttccgggaagagctttacgatacattgaccgacattttacgacaggcgggattgttttgtggctgtcagctttccccgtggtctgagtttgtggctgcatttttatctctggtggctctgctacggcggcgcagaaatgaggcagaagcggaaaggagatctcagccctgctgagctgatgatgctgactataggagatgttattaaacaactgattgaagcccacgagcaggggaaagacatcgatctaaataaggtgaaaaccaagacagctgccaaatatggcctttctgcccagccccgcctggtggatatcattgctgccgtccctcctcagtatcgcaaggtcttgatgcccaagttaaaggcgaaacccatcagaactgctagtgggattgctgtcgtggctgtgatgtgcaaaccccacagatgtccacacatcagttttacaggaaatatatgtgtatactgccctggtggacctgattctgattttgagtattccacccagtcttacactggctatgagccaacctccatgagagctatccgtgccagatatgaccctttcctacagacaagacaccgaatagaacagttaaaacaacttggtcatagtgtggataaagtggagtttattgtgatgggtggaacgtttatggcccttccagaagaatacagagattattttattcgaaatttacatgatgccttatcaggacatacttccaacaatatttacgaggcagtcaagtattctgagagaagcctcacaaagtgtattggaattactattgaaaccagaccagattactgcatgaagcgacatttaagtgacatgttgacctatggctgcacaaggctggagattggggtgcagagtgtttatgaagatgtggctagagacaccaacaggggccacactgtgaaggcagtgtgtgagtcatttcacctggccaaagattccggttttaaagtggtggcccatatgatgcctgacctgccaaacgtgggactagaaagagacattgaacagttcacagagttttttgagaaccctgcttttcgtcccgatgggctgaaactctatcctaccctggtgattcgtgggaccgggctttatgagctttggaaatcaggaagatataagagttactctcctagtgacctggttgaattggtggctcggatcctagccctcgtgcctccatggactcgagtgtaccgagtacagagggatattccaatgcctttagttagctcaggagtagagcatggtaacctgagagagctggcacttgcaagaatgaaagacctcggaatacagtgtcgagatgtgagaaccagagaagttggaatccaagaaattcatcacaaagtacggccataccaggttgaattggtaaggagagattatgttgcaaatggtggctgggaaacattcttgtcatacgaagacccagatcaagacattttgattggcctcctacgattacgcaagtgttcagaagaaactttccgtttcgaattgggtggaggtgtctccatagtacgagagctgcatgtgtatgggagtgtggtccctgtgagcagccgggatcctactaaatttcagcatcagggatttggcatgctgctgatggaggaagcagaaagaatagctagagaagaacatgggtctgggaaaatcgctgtgatatcaggggtcggcaccaggaattattatagaaagatcggctacagattacaaggcccgtacatggtgaagatgctgaaataatggccacaccagtccactcttctgcagtatcctccctggcagaacacggagaatcaggatttcttaaatactcaacagagaggctgagcagagcaaatggggggcttcaccctcatcccgcagctgcagagactggaaactgccttcaaggccacggctggtcatctgctgaccacaccccagatccgccctctcctgcgtgcaccccaaaaaatcacttgcgtttttgaggcttaaatcatctatccagtttctacattttgcatgaggcctgcaggtggcctattttgactcagacggtgaaaaaagcaaattaactcatttggacaccataactcatgcaataaaactgattgtcattcgaggagcaaacttaagagtagtttatttatataccctggggacagaaagtcaggttgaaacaggaaaaccaccagactctaatctcagccctttaacgacatacgcattggagcgcaagttaggaaaatgagcttttgttttcatggaaatcattctgattacagtgctgatgtttagaaataaatagcagtgtgactgggaaagaggaattgcagttgtgggggtgtgagcctggcagcagccagccagcagcctctcccaggcgggagtctaccatccgagacggcgatgacaaagagcttcattccacattctttgttatctctacttcccaccctcttggcaactacagagcagtgtgggcagccccaagtgtggtccccagagagcgtttggctttcctgtctgtctatcctgagcgggtggagtctcaggttgtgtgcccctaaatcaagatttgcttccacagaagccattacttgcaattttttttttttttctgagaaagtctcgctgtgtcacccaggctggagtgcagtggcgcaatctcactgcatcctccgcctcccgggttcaagcgattctcccgcctcagcctcctgagtagctgggattacaggcacccgccgctgctaatttttgtatttttagtagagatgggggtttcaccatattggtcaggctggtctcgaactcctgacctcaggtgatcaacccaccttggcctccctaaatgccgggattacaggcatgagccaccgctcccagcctttgattttttaaggtggattttggttgttataaatggagaaaggtaagagttcaagttcaacccgtgtgtgaaagcaaaacaatggaaaacaggattggcttcttcaaaggctcctcttgtagaactgcctctttgaaatttcgaggtaatctactttggagactctgcctggagagggtcagttcctaagttaaaagcatcgcttaaccttggctcctgtggcattttacaaaggtttaaaggaattgattcctctgaaagggcctgaaaataaaaagtctttaacatacaaagaa

SEQ ID NO: 129536 - DNA, 3078 bp, Homo sapiens
  Payload ID: 5332
  Gene Symbol: ELP3
  Gene Name: elongator acetyltransferase complex subunit 3
  Uniprot ID: Q9H9T3
  ENST ID: ENST00000380353
  CDS Start-End: 286-1653
gtgcacgtcggcttccgggaagagctttacgatacattgaccgacattttacgacaggcgggattgttttgtggctgtcagctttccccgtggtctgagtttgtggctgcatttttatctctggtggctctgctacggcggcgcagaaatgaggcagaagcggaaaggagatctcagccctgctgagctgatgatgctgactataggagatgttattaaacaactgattgaagcccacgagcaggggaaagacatcgatctaaataaattgctgtcgtggctgtgatgtgcaaaccccacagatgtccacacatcagttttacaggaaatatatgtgtatactgccctggtggacctgattctgattttgagtattccacccagtcttacactggctatgagccaacctccatgagagctatccgtgccagatatgaccctttcctacagacaagacaccgaatagaacagttaaaacaacttggtcatagtgtggataaagtggagtttattgtgatgggtggaacgtttatggcccttccagaagaatacagagattattttattcgaaatttacatgatgccttatcaggacatacttccaacaatatttacgaggcagtcaagtattctgagagaagcctcacaaagtgtattggaattactattgaaaccagaccagattactgcatgaagcgacatttaagtgacatgttgacctatggctgcacaaggctggagattggggtgcagagtgtttatgaagatgtggctagagacaccaacaggggccacactgtgaaggcagtgtgtgagtcatttcacctggccaaagattccggttttaaagtggtggcccatatgatgcctgacctgccaaacgtgggactagaaagagacattgaacagttcacagagttttttgagaaccctgcttttcgtcccgatgggctgaaactctatcctaccctggtgattcgtgggaccgggctttatgagctttggaaatcaggaagatataagagttactctcctagtgacctggttgaattggtggctcggatcctagccctcgtgcctccatggactcgagtgtaccgagtacagagggatattccaatgcctttagttagctcaggagtagagcatggtaacctgagagagctggcacttgcaagaatgaaagacctcggaatacagtgtcgagatgtgagaaccagagaagttggaatccaagaaattcatcacaaagtacggccataccaggttgaattggtaaggagagattatgttgcaaatggtggctgggaaacattcttgtcatacgaagacccagatcaagacattttgattggcctcctacgattacgcaagtgttcagaagaaactttccgtttcgaattgggtggaggtgtctccatagtacgagagctgcatgtgtatgggagtgtggtccctgtgagcagccgggatcctactaaatttcagcatcagggatttggcatgctgctgatggaggaagcagaaagaatagctagagaagaacatgggtctgggaaaatcgctgtgatatcaggggtcggcaccaggaattattatagaaagatcggctacagattacaaggcccgtacatggtgaagatgctgaaataatggccacaccagtccactcttctgcagtatcctccctggcagaacacggagaatcaggatttcttaaatactcaacagagaggctgagcagagcaaatggggggcttcaccctcatcccgcagctgcagagactggaaactgccttcaaggccacggctggtcatctgctgaccacaccccagatccgccctctcctgcgtgcaccccaaaaaatcacttgcgtttttgaggcttaaatcatctatccagtttctacattttgcatgaggcctgcaggtggcctattttgactcagacggtgaaaaaagcaaattaactcatttggacaccataactcatgcaataaaactgattgtcattcgaggagcaaacttaagagtagtttatttatataccctggggacagaaagtcaggttgaaacaggaaaaccaccagactctaatctcagccctttaacgacatacgcattggagcgcaagttaggaaaatgagcttttgttttcatggaaatcattctgattacagtgctgatgtttagaaataaatagcagtgtgactgggaaagaggaattgcagttgtgggggtgtgagcctggcagcagccagccagcagcctctcccaggcgggagtctaccatccgagacggcgatgacaaagagcttcattccacattctttgttatctctacttcccaccctcttggcaactacagagcagtgtgggcagccccaagtgtggtccccagagagcgtttggctttcctgtctgtctatcctgagcgggtggagtctcaggttgtgtgcccctaaatcaagatttgcttccacagaagccattacttgcaattttttttttttttctgagaaagtctcgctgtgtcacccaggctggagtgcagtggcgcaatctcactgcatcctccgcctcccgggttcaagcgattctcccgcctcagcctcctgagtagctgggattacaggcacccgccgctgctaatttttgtatttttagtagagatgggggtttcaccatattggtcaggctggtctcgaactcctgacctcaggtgatcaacccaccttggcctccctaaatgccgggattacaggcatgagccaccgctcccagcctttgattttttaaggtggattttggttgttataaatggagaaaggtaagagttcaagttcaacccgtgtgtgaaagcaaaacaatggaaaacaggattggcttcttcaaaggctcctcttgtagaactgcctctttgaaatttcgaggtaatctactttggagactctgcctggagagggtcagttcctaagttaaaagcatcgcttaaccttggctcctgtggcattttacaaaggtttaaaggaattgattcctctgaaagggcctgaaaataaaaagtctttaacatac

SEQ ID NO: 129537 - DNA, 874 bp, Homo sapiens
  Payload ID: 5332
  Gene Symbol: ELP3
  Gene Name: elongator acetyltransferase complex subunit 3
  ENST ID: ENST00000523357
  CDS Start-End: 1-423
agaaccagagaagttggaatccaagaaattcatcacaaagtacggccataccaggttgaattggtaaggagagattatgttgcaaatggtggctgggaaacattcttgtcatacgaagacccagatcaagacattttgattggcctcctacgattacgcaagtgttcagaagaaactttccgtttcgaattgggtggaggtgtctccatagtacgagagctgcatgtgtatgggagtgtggtccctgtgagcagccgggatcctactaaatttcagcatcagggatttggcatgctgctgatggaggaagcagaaagaatagctagagaagaacatgggtctgggaaaatcgctgtgatatcaggggtggatgtcctggggcagaggcagaggggaggccaccacagaagctgttcactctaggcactttgcaaggggtcggcaccaggaattattatagaaagatcggctacagattacaaggcccgtacatggtgaagatgctgaaataatggccacaccagtccactcttctgcagtatcctccctggcagaacacggagaatcaggatttcttaaatactcaacagagaggctgagcagagcaaatggggggcttcaccctcatcccgcagctgcagagactggaaactgccttcaaggccacggctggtcatctgctgaccacaccccagatccgccctctcctgcgtgcaccccaaaaaatcacttgcgtttttgaggcttaaatcatctatccagtttctacattttgcatgaggcctgcaggtggcctattttgactcagacggtgaaaaaagcaaattaactcatttggacaccataactcatgcaataaaactgattgtcattc

SEQ ID NO: 129538 - DNA, 1924 bp, Homo sapiens
  Payload ID: 5332
  Gene Symbol: ELP3
  Gene Name: elongator acetyltransferase complex subunit 3
  ENST ID: ENST00000519261
  CDS Start-End: 192-317
gctgtcagctttccccgtggtctgagtttgtggctgcatttttatctctggtggctctgctacggcggcgcagaaatgaggcagaagcggaaagggtgaaaaccaagacagctgccaaatatggcctttctgcccagccccgcctggtggatatcattgctgccgtccctcctcagtatcgcaaggtcttgatgcccaagttaaaggcgaaacccatcagaactgctagtgggattgctgtcgtggctgtgatgtgcaaaccccacagatgtccacacatcagttttacaggaaatatatgtgtccaacctccatgagagctatccgtgccagatatgaccctttcctacagacaagacaccgaatagaacagttaaaacaacttggtcatagtgtggataaagtggagtttattgtgatgggtggaacgtttatggcccttccagaagaatacagagattattttattcgaaatttacatgatgccttatcaggacatacttccaacaatatttacgaggcagtcaagtattctgagagaagcctcacaaagtgtattggaattactattgaaaccagaccagattactgcatgaagcgacatttaagtgacatgttgacctatggctgcacaaggctggagattggggtgcagagtgtttatgaagatgtggctagagacaccaacaggggccacactgtgaaggcagtgtgtgagtcatttcacctggccaaagattccggttttaaagtggtggcccatatgatgcctgacctgccaaacgtgggactagaaagagacattgaacagttcacagagttttttgagaaccctgcttttcgtcccgatgggctgaaactctatcctaccctggtgattcgtgggaccgggctttatgagctttggaaatcaggaagatataagagttactctcctagtgacctggttgaattggtggctcggatcctagccctcgtgcctccatggactcgagtgtaccgagtacagagggatattccaatgcctttagttagctcaggagtagagcatggtaacctgagagagctggcacttgcaagaatgaaagacctcggaatacagtgtcgagatgtgagaaccagagaagttggaatccaagaaattcatcacaaagtacggccataccaggttgaattggtaaggagagattatgttgcaaatggtggctgggaaacattcttgtcatacgaagacccagatcaagacattttgattggcctcctacgattacgcaagtgttcagaagaaactttccgtttcgaattgggtggaggtgtctccatagtacgagagctgcatgtgtatgggagtgtggtccctgtgagcagccgggatcctactaaatttcagcatcagggatttggcatgctgctgatggaggaagcagaaagaatagctagagaagaacatgggtctgggaaaatcgctgtgatatcaggggtcggcaccaggaattattatagaaagatcggctacagattacaaggcccgtacatggtgaagatgctgaaataatggccacaccagtccactcttctgcagtatcctccctggcagaacacggagaatcaggatttcttaaatactcaacagagaggctgagcagagcaaatggggggcttcaccctcatcccgcagctgcagagactggaaactgccttcaaggccacggctggtcatctgctgaccacaccccagatccgccctctcctgcgtgcaccccaaaaaatcacttgcgtttttgaggcttaaatcatctatccagtttctacattttgcatgaggcctgcaggtggcctattttgactcagacggtgaaaaaagcaaattaactcatttggacaccataactcatgcaataaaactgattgtcattcgaggagc

SEQ ID NO: 129539 - DNA, 3158 bp, Homo sapiens
  Payload ID: 5332
  Gene Symbol: ELP3
  Gene Name: elongator acetyltransferase complex subunit 3
  Uniprot ID: Q9H9T3
  ENST ID: ENST00000521015
  CDS Start-End: 126-1727
cgaagcttcaggagacctatcctcatctgtgcaaggaggagtggccaactctggagcccaggctgttgcttcctggtctggtggtgaatcctccatagtctggagatctcagccctgctgagctgatgatgctgactataggagatgttattaaacaactgattgaagcccacgagcaggggaaagacatcgatctaaataaggtgaaaaccaagacagctgccaaatatggcctttctgcccagccccgcctggtggatatcattgctgccgtccctcctcagtatcgcaaggtcttgatgcccaagttaaaggcgaaacccatcagaactgctagtgggattgctgtcgtggctgtgatgtgcaaaccccacagatgtccacacatcagttttacaggaaatatatgtgtatactgccctggtggacctgattctgattttgagtattccacccagtcttacactggctatgagccaacctccatgagagctatccgtgccagatatgaccctttcctacagacaagacaccgaatagaacagttaaaacaacttggtcatagtgtggataaagtggagtttattgtgatgggtggaacgtttatggcccttccagaagaatacagagattattttattcgaaatttacatgatgccttatcaggacatacttccaacaatatttacgaggcagtcaagtattctgagagaagcctcacaaagtgtattggaattactattgaaaccagaccagattactgcatgaagcgacatttaagtgacatgttgacctatggctgcacaaggctggagattggggtgcagagtgtttatgaagatgtggctagagacaccaacaggggccacactgtgaaggcagtgtgtgagtcatttcacctggccaaagattccggttttaaagtggtggcccatatgatgcctgacctgccaaacgtgggactagaaagagacattgaacagttcacagagttttttgagaaccctgcttttcgtcccgatgggctgaaactctatcctaccctggtgattcgtgggaccgggctttatgagctttggaaatcaggaagatataagagttactctcctagtgacctggttgaattggtggctcggatcctagccctcgtgcctccatggactcgagtgtaccgagtacagagggatattccaatgcctttagttagctcaggagtagagcatggtaacctgagagagctggcacttgcaagaatgaaagacctcggaatacagtgtcgagatgtgagaaccagagaagttggaatccaagaaattcatcacaaagtacggccataccaggttgaattggtaaggagagattatgttgcaaatggtggctgggaaacattcttgtcatacgaagacccagatcaagacattttgattggcctcctacgattacgcaagtgttcagaagaaactttccgtttcgaattgggtggaggtgtctccatagtacgagagctgcatgtgtatgggagtgtggtccctgtgagcagccgggatcctactaaatttcagcatcagggatttggcatgctgctgatggaggaagcagaaagaatagctagagaagaacatgggtctgggaaaatcgctgtgatatcaggggtcggcaccaggaattattatagaaagatcggctacagattacaaggcccgtacatggtgaagatgctgaaataatggccacaccagtccactcttctgcagtatcctccctggcagaacacggagaatcaggatttcttaaatactcaacagagaggctgagcagagcaaatggggggcttcaccctcatcccgcagctgcagagactggaaactgccttcaaggccacggctggtcatctgctgaccacaccccagatccgccctctcctgcgtgcaccccaaaaaatcacttgcgtttttgaggcttaaatcatctatccagtttctacattttgcatgaggcctgcaggtggcctattttgactcagacggtgaaaaaagcaaattaactcatttggacaccataactcatgcaataaaactgattgtcattcgaggagcaaacttaagagtagtttatttatataccctggggacagaaagtcaggttgaaacaggaaaaccaccagactctaatctcagccctttaacgacatacgcattggagcgcaagttaggaaaatgagcttttgttttcatggaaatcattctgattacagtgctgatgtttagaaataaatagcagtgtgactgggaaagaggaattgcagttgtgggggtgtgagcctggcagcagccagccagcagcctctcccaggcgggagtctaccatccgagacggcgatgacaaagagcttcattccacattctttgttatctctacttcccaccctcttggcaactacagagcagtgtgggcagccccaagtgtggtccccagagagcgtttggctttcctgtctgtctatcctgagcgggtggagtctcaggttgtgtgcccctaaatcaagatttgcttccacagaagccattacttgcaattttttttttttttctgagaaagtctcgctgtgtcacccaggctggagtgcagtggcgcaatctcactgcatcctccgcctcccgggttcaagcgattctcccgcctcagcctcctgagtagctgggattacaggcacccgccgctgctaatttttgtatttttagtagagatgggggtttcaccatattggtcaggctggtctcgaactcctgacctcaggtgatcaacccaccttggcctccctaaatgccgggattacaggcatgagccaccgctcccagcctttgattttttaaggtggattttggttgttataaatggagaaaggtaagagttcaagttcaacccgtgtgtgaaagcaaaacaatggaaaacaggattggcttcttcaaaggctcctcttgtagaactgcctctttgaaatttcgaggtaatctactttggagactctgcctggagagggtcagttcctaagttaaaagcatcgcttaaccttggctcctgtggcattttacaaaggtttaaaggaattgattcctctgaaagggcctgaaaataaaaagtctttaacatacaaagaa

SEQ ID NO: 129540 - DNA, 656 bp, Homo sapiens
  Payload ID: 5332
  Gene Symbol: ELP3
  Gene Name: elongator acetyltransferase complex subunit 3
  ENST ID: ENST00000521570
  CDS Start-End: 82-656
ccaactctggagcccaggatgttgcttcccggtctggtggtgaatcctccatagtctggagatctcagccctgctgagctgatgatgctgactataggagatgttattaaacaactgattgaagcccacgagcaggggaaagacatcgatctaaataaggtgaaaaccaagacagctgccaaatatggcctttctgcccagccccgcctggtggatatcattgctgccgtccctcctcagtatcgcaaggtcttgatgcccaagttaaaggcgaaacccatcagaactgctagtgggattgctgtcgtggctgtgatgtgcaaaccccacagatgtccacacatcagttttacaggaaatatatgtgtatactgccctggtggacctgattctgattttgagtattccacccagtcttacactggctatgagccaacctccatgagagctatccgtgccagatatgaccctttcctacagacaagacaccgaatagaacagttaaaacaacttggtcatagtgtggataaagtggagtttattgtgatgggtggaacgtttatggcccttccagaagaatacagagattattttattcgaaatttacatgatgccttatcaggacatacttccaacaatatttacgaggcagtcaa

SEQ ID NO: 129541 - DNA, 1914 bp, Homo sapiens
  Payload ID: 5332
  Gene Symbol: ELP3
  Gene Name: elongator acetyltransferase complex subunit 3
  ENST ID: ENST00000524103
  CDS Start-End: 220-1647
attttacgacaggcgggattgttttgtggctgtcagctttccccgtggtctgagtttgtggctgcatttttatctctggtggctctgctacggcggcgcagaaatgaggcagaagcggaaagggtgaaaaccaagacagctgccaaatatggcctttctgcccagccccgcctggtggatatcattgctgccgtccctcctcagtatcgcaaggtcttgatgcccaagttaaaggcgaaacccatcagaactgctagtgggattgctgtcgtggctgtgatgtgcaaaccccacagatgtccacacatcagttttacaggaaatatatgtgtatactgccctggtggacctgattctgattttgagtattccacccagtcttacactggctatgagccaacctccatgagagctatccgtgccagatatgaccctttcctacagacaagacaccgaatagaacagttaaaacaacttggtcatagtgtggataaagtggagtttattgtgatgggtggaacgtttatggcccttccagaagaatacagagattattttattcgaaatttacatgatgccttatcaggacatacttccaacaatatttacgaggcagtcaagtattctgagagaagcctcacaaagtgtattggaattactattgaaaccagaccagattactgcatgaagcgacatttaagtgacatgttgacctatggctgcacaaggctggagattggggtgcagagtgtttatgaagatgtggctagagacaccaacaggggccacactgtgaaggcagtgtgtgagtcatttcacctggccaaagattccggttttaaagtggtggcccatatgatgcctgacctgccaaacgtgggactagaaagagacattgaacagttcacagagttttttgagaaccctgcttttcgtcccgatgggctgaaactctatcctaccctggtgattcgtgggaccgggctttatgagctttggaaatcaggaagatataagagttactctcctagtgacctggttgaattggtggctcggatcctagccctcgtgcctccatggactcgagtgtaccgagtacagagggatattccaatgcctttagttagctcaggagtagagcatggtaacctgagagagctggcacttgcaagaatgaaagacctcggaatacagtgtcgagatgtgagaaccagagaagttggaatccaagaaattcatcacaaagtacggccataccaggttgaattggtaaggagagattatgttgcaaatggtggctgggaaacattcttgtcatacgaagacccagatcaagacattttgattggcctcctacgattacgcaagtgttcagaagaaactttccgtttcgaattgggtggaggtgtctccatagtacgagagctgcatgtgtatgggagtgtggtccctgtgagcagccgggatcctactaaatttcagcatcagggatttggcatgctgctgatggaggaagcagaaagaatagctagagaagaacatgggtctgggaaaatcgctgtgatatcaggggtcggcaccaggaattattatagaaagatcggctacagattacaaggcccgtacatggtgaagatgctgaaataatggccacaccagtccactcttctgcagtatcctccctggcagaacacggagaatcaggatttcttaaatactcaacagagaggctgagcagagcaaatggggggcttcaccctcatcccgcagctgcagagactggaaactgccttcaaggccacggctggtcatctgctgaccacaccccagatccgccctctcctgcgtgcaccccaaaaaatcacttgcgtttttgaggcttaaatcatctatccagtttctacattttgcatg

SEQ ID NO: 129542 - DNA, 566 bp, Homo sapiens
  Payload ID: 5332
  Gene Symbol: ELP3
  Gene Name: elongator acetyltransferase complex subunit 3
  ENST ID: ENST00000520288
  CDS Start-End: 163-566
agaagcggaaaggtgcgaaaggggaaggagatgggggaaaggggtggtccgaaaggggcgaacgcccaggcaatcaaatgctgaaccgaacttttaccgcgagaatccgctacccagtccagtcgccccgccacctagggagatctcagccctgctgagctgatgatgctgactataggagatgttattaaacaactgattgaagcccacgagcaggggaaagacatcgatctaaataaggtgaaaaccaagacagctgccaaatatggcctttctgcccagccccgcctggtggatatcattgctgccgtccctcctcagtatcgcaaggtcttgatgcccaagttaaaggcgaaacccatcagaactgctagtgggattgctgtcgtggctgtgatgtgcaaaccccacagatgtccacacatcagttttacaggaaatatatgtgtatactgccctggtggacctgattctgattttgagtattccacccagtcttacactggctatgagccaacctccatgagagctatccgtgccagatatgaccctttcctacagacaag

SEQ ID NO: 129543 - DNA, 545 bp, Homo sapiens
  Payload ID: 5332
  Gene Symbol: ELP3
  Gene Name: elongator acetyltransferase complex subunit 3
  ENST ID: ENST00000520270
  CDS Start-End: 207-545
aatagtaaactgacatggcatactggtgggcatcttatggaaagttgcttccacccctgccctgtttcagctagtcctcaacttgatccagtgtccaaactctgcctccagaacagagtcccacttcctacctcacatggtctgtgacagagccccaggggatcctgagaacatgtgtccaaggagatctcagccctgctgagctgatgatgctgactataggagatgttattaaacaactgattgaagcccacgagcaggggaaagacatcgatctaaataaggtgaaaaccaagacagctgccaaatatggcctttctgcccagccccgcctggtggatatcattgctgccgtccctcctcagtatcgcaaggtcttgatgcccaagttaaaggcgaaacccatcagaactgctagtgggattgctgtcgtggctgtgatgtgcaaaccccacagatgtccacacatcagttttacaggaaatatatgtgtatactgccctggtggacctgattctgattttgagtattccacccagtcttac

SEQ ID NO: 129544 - DNA, 2059 bp, Homo sapiens
  Payload ID: 5332
  Gene Symbol: ELP3
  Gene Name: elongator acetyltransferase complex subunit 3
  ENST ID: ENST00000518112
  CDS Start-End: 77-214
ggctgtcagctttccccgtggtctgagtttgtggctgcatttttatctctggtggctctgctacggcggcgcagaaatgaggcagaagcggaaaggagatctcagccctgctgagctgatgatgctgactataggagatgttattaaacaactgattgaagcccacgagcaggggaaagacatcgatctaaataaattgctgtcgtggctgtgatgtgcaaaccccacagatgtccacacatcagttttacaggaaatatatgtgtatactgccctggtggacctgattctgattttgagtattccacccagtcttacactggctatgagccaacctccatgagagctatccgtgccagatatgaccctttcctacagacaagacaccgaatagaacagttaaaacaacttggtcatagtgtggataaagtggagtttattgtgatgggtggaacgtttatggcccttccagaagaatacagagattattttattcgaaatttacatgatgccttatcaggacatacttccaacaatatttacgaggcagtcaagtattctgagagaagcctcacaaagtgtattggaattactattgaaaccagaccagattactgcatgaagcgacatttaagtgacatgttgacctatggctgcacaaggctggagattggggtgcagagtgtttatgaagatgtggctagagacaccaacaggggccacactgtgaaggcagtgtgtgagtcatttcacctggccaaagattccggttttaaagtggtggcccatatgatgcctgacctgccaaacgtgggactagaaagagacattgaacagttcacagagttttttgagaaccctgcttttcgtcccgatgggctgaaactctatcctaccctggtgattcgtgggaccgggctttatgagctttggaaatcaggaagatataagagttactctcctagtgacctggttgaattggtggctcggatcctagccctcgtgcctccatggactcgagtgtaccgagtacagagggatattccaatgcctttagttagctcaggagtagagcatggtaacctgagagagctggcacttgcaagaatgaaagacctcggaatacagtgtcgagatgtgagaaccagagaagttggaatccaagaaattcatcacaaagtacggccataccaggttgaattggtaaggagagattatgttgcaaatggtggctgggaaacattcttgtcatacgaagacccagatcaagacattttgattggcctcctacgattacgcaagtgttcagaagaaactttccgtttcgaattgggtggaggtgtctccatagtacgagagctgcatgtgtatgggagtgtggtccctgtgagcagccgggatcctactaaatttcagcatcagggatttggcatgctgctgatggaggaagcagaaagaatagctagagaagaacatgggtctgggaaaatcgctgtgatatcaggggtcggcaccaggaattattatagaaagatcggctacagattacaaggcccgtacatggtgaagatgctgaaataatggccacaccagtccactcttctgcagtatcctccctggcagaacacggagaatcaggatttcttaaatactcaacagagaggctgagcagagcaaatggggggcttcaccctcatcccgcagctgcagagactggaaactgccttcaaggccacggctggtcatctgctgaccacaccccagatccgccctctcctgcgtgcaccccaaaaaatcacttgcgtttttgaggcttaaatcatctatccagtttctacattttgcatgaggcctgcaggtggcctattttgactcagacggtgaaaaaagcaaattaactcatttggacaccataactcatgcaataaaactgattgtcattcgaggagcaaacttaagagtagtttatttatataccctggggacagaaagtcaggttgaaacaggaaaaccaccagactctaatctcagccctttaacgacatacgcattggagcgc

SEQ ID NO: 129545 - DNA, 545 bp, Homo sapiens
  Payload ID: 5332
  Gene Symbol: ELP3
  Gene Name: elongator acetyltransferase complex subunit 3
  ENST ID: ENST00000521099
  CDS Start-End: 227-545
ggcagtcacgtggtgtcttgtttgaatggcagggaaaccattattccaatatatgccctccgaggagttaacgtcgatttaacgggttgtaggacttttcatttgttaagatttgtttcacgacacatttgacgtgttagagagtttcttttaaagccttattttaagatattaaaaaaaccttaattatccttggattcagtgagatctcagccctgctgagctgatgatgctgactataggagatgttattaaacaactgattgaagcccacgagcaggggaaagacatcgatctaaataaggtgaaaaccaagacagctgccaaatatggcctttctgcccagccccgcctggtggatatcattgctgccgtccctcctcagtatcgcaaggtcttgatgcccaagttaaaggcgaaacccatcagaactgctagtgggattgctgtcgtggctgtgatgtgcaaaccccacagatgtccacacatcagttttacaggaaatatatgtgtatactgccctggtggacctgattctgattttg

SEQ ID NO: 129546 - DNA, 1923 bp, Homo sapiens
  Payload ID: 5332
  Gene Symbol: ELP3
  Gene Name: elongator acetyltransferase complex subunit 3
  ENST ID: ENST00000523687
  CDS Start-End: 114-251
attgaccgacattttacgacaggcgggattgttttgtggctgtcagctttccccgtggtctgagtttgtggctgcatttttatctctggtggctctgctacggcggcgcagaaatgaggcagaagcggaaaggagatctcagccctgctgagctgatgatgctgactataggagatgttattaaacaactgattgaagcccacgagcaggggaaagacatcgatctaaataaattgctgtcgtggctgtgatgtgcaaaccccacagatgtccacacatcagttttacaggaaatatatgtgtccaacctccatgagagctatccgtgccagatatgaccctttcctacagacaagacaccgaatagaacagttaaaacaacttggtcatagtgtggataaagtggagtttattgtgatgggtggaacgtttatggcccttccagaagaatacagagattattttattcgaaatttacatgatgccttatcaggacatacttccaacaatatttacgaggcagtcaagtattctgagagaagcctcacaaagtgtattggaattactattgaaaccagaccagattactgcatgaagcgacatttaagtgacatgttgacctatggctgcacaaggctggagattggggtgcagagtgtttatgaagatgtggctagagacaccaacaggggccacactgtgaaggcagtgtgtgagtcatttcacctggccaaagattccggttttaaagtggtggcccatatgatgcctgacctgccaaacgtgggactagaaagagacattgaacagttcacagagttttttgagaaccctgcttttcgtcccgatgggctgaaactctatcctaccctggtgattcgtgggaccgggctttatgagctttggaaatcaggaagatataagagttactctcctagtgacctggttgaattggtggctcggatcctagccctcgtgcctccatggactcgagtgtaccgagtacagagggatattccaatgcctttagttagctcaggagtagagcatggtaacctgagagagctggcacttgcaagaatgaaagacctcggaatacagtgtcgagatgtgagaaccagagaagttggaatccaagaaattcatcacaaagtacggccataccaggttgaattggtaaggagagattatgttgcaaatggtggctgggaaacattcttgtcatacgaagacccagatcaagacattttgattggcctcctacgattacgcaagtgttcagaagaaactttccgtttcgaattgggtggaggtgtctccatagtacgagagctgcatgtgtatgggagtgtggtccctgtgagcagccgggatcctactaaatttcagcatcagggatttggcatgctgctgatggaggaagcagaaagaatagctagagaagaacatgggtctgggaaaatcgctgtgatatcaggggtcggcaccaggaattattatagaaagatcggctacagattacaaggcccgtacatggtgaagatgctgaaataatggccacaccagtccactcttctgcagtatcctccctggcagaacacggagaatcaggatttcttaaatactcaacagagaggctgagcagagcaaatggggggcttcaccctcatcccgcagctgcagagactggaaactgccttcaaggccacggctggtcatctgctgaccacaccccagatccgccctctcctgcgtgcaccccaaaaaatcacttgcgtttttgaggcttaaatcatctatccagtttctacattttgcatgaggcctgcaggtggcctattttgactcagacggtgaaaaaagcaaattaactcatttggacaccataactcatgcaataaaactgattgtcattcgaggagc

SEQ ID NO: 129547 - DNA, 680 bp, Homo sapiens
  Payload ID: 5332
  Gene Symbol: ELP3
  Gene Name: elongator acetyltransferase complex subunit 3
  ENST ID: ENST00000517975
  CDS Start-End: 1-201
atccaagaaattcatcacaaagtacggccataccaggttgaattggtaaggagagattatgttgcaaatggtggctgggaaacattcttgtcatacgaagacccagatcaagacattttgattggcctcctacgattacgcaagtgttcagaagaaactttccgtttcgaattgggtggaggaagcagaaagaatagctagagaagaacatgggtctgggaaaatcgctgtgatatcaggggtcggcaccaggaattattatagaaagatcggctacagattacaaggcccgtacatggtgaagatgctgaaataatggccacaccagtccactcttctgcagtatcctccctggcagaacacggagaatcaggatttcttaaatactcaacagagaggctgagcagagcaaatggggggcttcaccctcatcccgcagctgcagagactggaaactgccttcaaggccacggctggtcatctgctgaccacaccccagatccgccctctcctgcgtgcaccccaaaaaatcacttgcgtttttgaggcttaaatcatctatccagtttctacattttgcatgaggcctgcaggtggcctattttgactcagacggtgaaaaaagcaaattaactcatttggacaccataactcatgcaataaaactgattgtcattcga

SEQ ID NO: 129548 - DNA, 3053 bp, Homo sapiens
  Payload ID: 5332
  Gene Symbol: ELP3
  Gene Name: elongator acetyltransferase complex subunit 3
  Uniprot ID: Q9H9T3
  ENST ID: ENST00000537665
  CDS Start-End: 342-1628
gtgcacgtcggcttccgggaagagctttacgatacattgaccgacattttacgacaggcgggattgttttgtggctgtcagctttccccgtggtctgagtttgtggctgcatttttatctctggtggctctgctacggcggcgcagaaatgaggcagaagcggaaagggtgaaaaccaagacagctgccaaatatggcctttctgcccagccccgcctggtggatatcattgctgccgtccctcctcagtatcgcaaggtcttgatgcccaagttaaaggcgaaacccatcagaactgctagtgggattgctgtcgtggctgtgatgtgcaaaccccacagatgtccacacatcagttttacaggaaatatatgtgtccaacctccatgagagctatccgtgccagatatgaccctttcctacagacaagacaccgaatagaacagttaaaacaacttggtcatagtgtggataaagtggagtttattgtgatgggtggaacgtttatggcccttccagaagaatacagagattattttattcgaaatttacatgatgccttatcaggacatacttccaacaatatttacgaggcagtcaagtattctgagagaagcctcacaaagtgtattggaattactattgaaaccagaccagattactgcatgaagcgacatttaagtgacatgttgacctatggctgcacaaggctggagattggggtgcagagtgtttatgaagatgtggctagagacaccaacaggggccacactgtgaaggcagtgtgtgagtcatttcacctggccaaagattccggttttaaagtggtggcccatatgatgcctgacctgccaaacgtgggactagaaagagacattgaacagttcacagagttttttgagaaccctgcttttcgtcccgatgggctgaaactctatcctaccctggtgattcgtgggaccgggctttatgagctttggaaatcaggaagatataagagttactctcctagtgacctggttgaattggtggctcggatcctagccctcgtgcctccatggactcgagtgtaccgagtacagagggatattccaatgcctttagttagctcaggagtagagcatggtaacctgagagagctggcacttgcaagaatgaaagacctcggaatacagtgtcgagatgtgagaaccagagaagttggaatccaagaaattcatcacaaagtacggccataccaggttgaattggtaaggagagattatgttgcaaatggtggctgggaaacattcttgtcatacgaagacccagatcaagacattttgattggcctcctacgattacgcaagtgttcagaagaaactttccgtttcgaattgggtggaggtgtctccatagtacgagagctgcatgtgtatgggagtgtggtccctgtgagcagccgggatcctactaaatttcagcatcagggatttggcatgctgctgatggaggaagcagaaagaatagctagagaagaacatgggtctgggaaaatcgctgtgatatcaggggtcggcaccaggaattattatagaaagatcggctacagattacaaggcccgtacatggtgaagatgctgaaataatggccacaccagtccactcttctgcagtatcctccctggcagaacacggagaatcaggatttcttaaatactcaacagagaggctgagcagagcaaatggggggcttcaccctcatcccgcagctgcagagactggaaactgccttcaaggccacggctggtcatctgctgaccacaccccagatccgccctctcctgcgtgcaccccaaaaaatcacttgcgtttttgaggcttaaatcatctatccagtttctacattttgcatgaggcctgcaggtggcctattttgactcagacggtgaaaaaagcaaattaactcatttggacaccataactcatgcaataaaactgattgtcattcgaggagcaaacttaagagtagtttatttatataccctggggacagaaagtcaggttgaaacaggaaaaccaccagactctaatctcagccctttaacgacatacgcattggagcgcaagttaggaaaatgagcttttgttttcatggaaatcattctgattacagtgctgatgtttagaaataaatagcagtgtgactgggaaagaggaattgcagttgtgggggtgtgagcctggcagcagccagccagcagcctctcccaggcgggagtctaccatccgagacggcgatgacaaagagcttcattccacattctttgttatctctacttcccaccctcttggcaactacagagcagtgtgggcagccccaagtgtggtccccagagagcgtttggctttcctgtctgtctatcctgagcgggtggagtctcaggttgtgtgcccctaaatcaagatttgcttccacagaagccattacttgcaattttttttttttttctgagaaagtctcgctgtgtcacccaggctggagtgcagtggcgcaatctcactgcatcctccgcctcccgggttcaagcgattctcccgcctcagcctcctgagtagctgggattacaggcacccgccgctgctaatttttgtatttttagtagagatgggggtttcaccatattggtcaggctggtctcgaactcctgacctcaggtgatcaacccaccttggcctccctaaatgccgggattacaggcatgagccaccgctcccagcctttgattttttaaggtggattttggttgttataaatggagaaaggtaagagttcaagttcaacccgtgtgtgaaagcaaaacaatggaaaacaggattggcttcttcaaaggctcctcttgtagaactgcctctttgaaatttcgaggtaatctactttggagactctgcctggagagggtcagttcctaagttaaaagcatcgcttaaccttggctcctgtggcattttacaaaggtttaaaggaattgattcctctgaaagggcctgaaaataaaaagtctttaacatac

SEQ ID NO: 129549 - DNA, 1784 bp, Homo sapiens
  Payload ID: 5333
  Gene Symbol: ELP4
  Gene Name: elongator acetyltransferase complex subunit 4
  Uniprot ID: Q96EB1
  ENST ID: ENST00000350638
  CDS Start-End: 36-1310
agagttcctattgggttaacactggaggctctaagatggcggcagtggcaacctgcggtagtgttgccgcgagtactgggtctgcagtggcgacagccagcaagagcaacgtcaccagtttccagaggaggggtcctagagccagcgtgaccaacgacagcggccctcgactggtgtccattgcgggcacgcgaccgtcggtgcggaatggacagctgctggtatcaaccgggctcccagccctagaccagctcttaggtggaggtttagccgttggaacagttcttctaattgaggaggataaatataatatttactcacctttgctcttcaagtatttcctggcagaaggaattgtcaatgggcatactttgttggttgcatctgctaaagaggatcctgccaacattttacaggaacttccagcaccattacttgatgataaatgtaaaaaggaatttgatgaagatgtatacaatcataaaacaccagaatctaatattaagatgaaaatagcttggcgttaccagttattacccaagatggagattggaccagtatcatcttcaagatttggtcactattatgatgcatcaaaaagaatgccacaagaactaattgaggcttcaaattggcatggattttttcttccagagaaaatatcttcaactctcaaagtagaaccctgttctttgacccctggctacacaaagctgcttcagtttatccagaacatcatttatgaggaaggatttgatggatccaatcctcagaaaaaacagagaaacattttaagaataggaattcagaatcttggctcacctttatggggagacgatatttgctgtgcagaaaatggtggcaacagtcacagccttaccaagttcctctatgttctccgtggtcttctgagaacctctctttcagcctgcatcatcacaatgccaacacatctgatccagaataaagccattattgcccgtgtcacaaccttgtcagatgtagtagttggtctggaatcatttattggttctgagagagaaactaacccattgtataaggattatcatggattgattcatatacggcagattcctcggcttaataacttgatctgtgatgaatcagatgtcaaagacttagcttttaaattaaaaaggaagctattcaccattgagcgactgcatttgcctccagacttgtcagacacagtgagccgctcaagcaaaatggatctggcagaatccgccaagcggctgggcccaggctgtggcatgatggccggaggcaagaagcacctggacttctagggattcctccttagtcgctgcatgcagaattctatgacactctaattatgattgctaatagcttatgtaaatatttttcttaacaatttgaccctccactccttgaaaaacacaggattataaaatggtgccgccatttctcattttttaactttttacagaactagcacagcagaaatacttttaaatttttccttcatgctctagagaaaataattttatttttaaataaacgccaaaaaatgtcaaaatctcaagattcctgacagtggtcattcgtgtgtgtactaaggcatttagtgtcatggtaaagtgcatgtcacagcaggtagcatacaaaacatgatgaaattcaagattgtatgtgaaaacatactttctctttattacagaaacagtcacttgccaccaaaaatgctgttttttaaatgaaaatgtgtttactaatatataaaataaatttgcatttatgta

SEQ ID NO: 129550 - DNA, 1679 bp, Homo sapiens
  Payload ID: 5333
  Gene Symbol: ELP4
  Gene Name: elongator acetyltransferase complex subunit 4
  Uniprot ID: Q96EB1
  ENST ID: ENST00000379163
  CDS Start-End: 16-1446
actggaggctctaagatggcggcagtggcaacctgcggtagtgttgccgcgagtactgggtctgcagtggcgacagccagcaagagcaacgtcaccagtttccagaggaggggtcctagagccagcgtgaccaacgacagcggccctcgactggtgtccattgcgggcacgcgaccgtcggtgcggaatggacagctgctggtatcaaccgggctcccagccctagaccagctcttaggtggaggtttagccgttggaacagttcttctaattgaggaggataaatataatatttactcacctttgctcttcaagtatttcctggcagaaggaattgtcaatgggcatactttgttggttgcatctgctaaagaggatcctgccaacattttacaggaacttccagcaccattacttgatgataaatgtaaaaaggaatttgatgaagatgtatacaatcataaaacaccagaatctaatattaagatgaaaatagcttggcgttaccagttattacccaagatggagcagattggaccagtatcatcttcaagatttggtcactattatgatgcatcaaaaagaatgccacaagaactaattgaggcttcaaattggcatggattttttcttccagagaaaatatcttcaactctcaaagtagaaccctgttctttgacccctggctacacaaagctgcttcagtttatccagaacatcatttatgaggaaggatttgatggatccaatcctcagaaaaaacagagaaacattttaagaataggaattcagaatcttggctcacctttatggggagacgatatttgctgtgcagaaaatggtggcaacagtcacagccttaccaagttcctctatgttctccgtggtcttctgagaacctctctttcagcctgcatcatcacaatgccaacacatctgatccagaataaagccattattgcccgtgtcacaaccttgtcagatgtagtagttggtctggaatcatttattggttctgagagagaaactaacccattgtataaggattatcatggattgattcatatacggcagattcctcggcttaataacttgatctgtgatgaatcagatgtcaaagacttagcttttaaattaaaaaggaagctattcaccattgagtgggtgcaagacaactacttgagacaagagaggaacatttatcctccaggcttctcatacttactcaagcagaaagactctgcatggggagaaggttctttacagcattccacatttttaatgagcttccttgcaaaggcgactgcatttgcctccagacttgtcagacacagtgagccgctcaagcaaaatggatctggcagaatccgccaagcggctgggcccaggctgtggcatgatggccggaggcaagaagcacctggacttctagggattcctccttagtcgctgcatgcagaattctatgacactctaattatgattgctaatagcttatgtaaatatttttcttaacaatttgaccctccactccttgaaaaacacaggattataaaatggtgccgccatttctcattttttaactttttacagaactagcacagcagaaatacttttaaatttttccttcatgctctagagaaaataattttatttttaaataaacgccaaaaaatgtc

SEQ ID NO: 129551 - DNA, 1961 bp, Homo sapiens
  Payload ID: 5333
  Gene Symbol: ELP4
  Gene Name: elongator acetyltransferase complex subunit 4
  ENST ID: ENST00000395934
  CDS Start-End: 8-1615
ctctaagatggcggcagtggcaacctgcggtagtgttgccgcgagtactgggtctgcagtggcgacagccagcaagagcaacgtcaccagtttccagaggaggggtcctagagccagcgtgaccaacgacagcggccctcgactggtgtccattgcgggcacgcgaccgtcggtgcggaatggacagctgctggtatcaaccgggctcccagccctagaccagctcttaggtggaggtttagccgttggaacagttcttctaattgaggaggataaatataatatttactcacctttgctcttcaagtatttcctggcagaaggaattgtcaatgggcatactttgttggttgcatctgctaaagaggatcctgccaacattttacaggaacttccagcaccattacttgatgataaatgtaaaaaggaatttgatgaagatgtatacaatcataaaacaccagaatctaatattaagatgaaaatagcttggcgttaccagttattacccaagatggagattggaccagtatcatcttcaagatttggtcactattatgatgcatcaaaaagaatgccacaagaactaattgaggcttcaaattggcatggattttttcttccagagaaaatatcttcaactctcaaagtagaaccctgttctttgacccctggctacacaaagctgcttcagtttatccagaacatcatttatgaggaaggatttgatggatccaatcctcagaaaaaacagagaaacattttaagaataggaattcagaatcttggctcacctttatggggagacgatatttgctgtgcagaaaatggtggcaacagtcacagccttaccaagttcctctatgttctccgtggtcttctgagaacctctctttcagcctgcatcatcacaatgccaacacatctgatccagaataaagccattattgcccgtgtcacaaccttgtcagatgtagtagttggtctggaatcatttattggttctgagagagaaactaacccattgtataaggattatcatggattgattcatatacggcagattcctcggcttaataacttgatctgtgatgaatcagatgtcaaagacttagcttttaaattaaaaaggaagctattcaccattgaggctggagtgcagtggcacgatctcggctcacggcaacctcgcctcctgggttcaagcaattctcccgcctcagcctccctagtagctgggattacaggcgcccaccaccacacccagctaatttttgtatttttagtagagatggggttccaccatgttggccaggctggtctcgaactcctgacctcaggtgattcatccgcctcagcctcccaaagtgctggaattacaggcatgagctaccgcgcccggcctagggctttgtatttcaaagagaacaagtctaaagtgggtgcaagacaactacttgagacaagagaggaacatttatcctccaggcttctcatacttactcaagcagaaagactctgcatggggagaaggttctttacagcattccacatttttaatgagcttccttgcaaaggcgactgcatttgcctccagacttgtcagacacagtgagccgctcaagcaaaatggatctggcagaatccgccaagcggctgggcccaggctgtggcatgatggccggaggcaagaagcacctggacttctagggattcctccttagtcgctgcatgcagaattctatgacactctaattatgattgctaatagcttatgtaaatatttttcttaacaatttgaccctccactccttgaaaaacacaggattataaaatggtgccgccatttctcattttttaactttttacagaactagcacagcagaaatacttttaaatttttccttcatgctctagagaaaataattttatttttaaataaacgccaaaaaatgtcaaaa

SEQ ID NO: 129552 - DNA, 1161 bp, Homo sapiens
  Payload ID: 5333
  Gene Symbol: ELP4
  Gene Name: elongator acetyltransferase complex subunit 4
  ENST ID: ENST00000474374
  CDS Start-End: 15-572
ctggaggctctaagatggcggcagtggcaacctgcggtagtgttgccgcgagtactgggtctgcagtggcgacagccagcaagagcaacgtcaccagtttccagaggaggggtcctagagccagcgtgaccaacgacagcggccctcgactggtgtccattgcgggcacgcgaccgtcggtgcggaatggacagctgctggtatcaaccgggctcccagccctagaccagctcttaggtggaggtttagccgttggaacagttcttctaattgaggaggataaatataatatttactcacctttgctcttcaagtatttcctggcagaaggaattgtcaatgggcatactttgttggttgcatctgctaaagaggatcctgccaacattttacaggaacttccagcaccattacttgatgataaatgtaaaaaggaatttgatgaagatgtatacaatcataaaacaccagaatctaatattaagatgaaaatagcttggcgttaccagttattacccaagatggaggcaaattggaccagtatcatcttcaagatttggtcactattatgatgcatcaaaaagaatgccacaagaactaattgaggcttcaaattggcatggattttttcttccagagaaaatatcttcaactctcaaagtagaaccctgttctttgacccctggctacacaaagctgcttcagtttatccagaacatcatttatgaggaaggatttgatggatccaatcctcagaaaaaacagagaaacattttaagaataggaattcagaatcttggctcacctttatggggagacgatatttgctgtgcagaaaatggtggcaacagtcacagccttaccaagttcctctatgttctccgtggtcttctgagaacctctctttcagcctgcatcatcacaatgccaacacatctgatccagaataaagccattattgcccgtgtcacaaccttgtcagatgtagtagttggtctggaatcatttattggttctgagagagaaactaacccattgtataaggattatcatggattgattcatatacggcagattcctcggcttaataacttgatctgtgatgaatcagatgtcaaagacttagcttttaaattaaaaaggaagctattcaccattgag

SEQ ID NO: 129553 - DNA, 1304 bp, Homo sapiens
  Payload ID: 5334
  Gene Symbol: ELP5
  Gene Name: elongator acetyltransferase complex subunit 5
  Uniprot ID: Q8TE02
  ENST ID: ENST00000354429
  CDS Start-End: 108-1058
actaagttcctcctgcgcggtctatggcggactatgttaggtcttaatggtgggaggacgcccgagtgctcggcccgtttcaccccgaggaggaaggacactgggtcatgacgccatcagagggcgccagagcagggaccggacgcgagttggagatgttggactcgctgttggccttgggcggcctggtgctgcttcgggattccgtggagtgggaggggcgcagtctcttgaaggcgcttgtcaagaaatctgcactgtgtggggagcaagtgcatatcctgggctgtgaagtgagcgaggaagagtttcgtgaaggttttgactctgatatcaacaatcggctggtttaccatgacttcttcagagaccctctcaactggtcaaaaactgaggaggcctttcctggggggccgctgggagccttgagagccatgtgcaagaggacagatcctgttcctgtcaccattgctctcgattcactcagctggctgctacttcgccttccctgcaccacactctgccaggtcctgcatgctgtgagccatcaggactcttgtcctggtgacagctcctcagtggggaaagtgagtgtgctgggcttgctacatgaagagcttcatggaccaggccctgtgggagctctcagcagccttgctcagactgaggtgaccctgggcggtaccatgggccaggcctcggcccacatcctgtgtcggaggccccgacagcgcccaactgaccagactcagtggttctccatccttccggacttcagcctggatctccaagaggggccctctgtagagtcccagccctactccgatcctcatatacccccggtggatcccacaactcatttgacctttaaccttcacctgtccaagaaagagagagaagccagagatagcctgatcctgcccttccagttcagttctgaaaaacagcaggctctcctgcggcctaggccagggcaggctaccagccacatcttctatgagccagatgcttatgatgacctggaccaagaagacccagatgacgacctggatatttgactggccagatttgattagattgtaattggagggggcgcgggaagactttgggcccagaaccatctttctattgtttgtgttagccttaccctgtccctgccccaccttggttccccttgtctatggagccccgccttgtgagccaggaagcagcgtctcatcaggacagaaggtaggatgaagacatggggtaatgtgagagagtagaacacccccgtacctaataaaaatctttatttttttatt

SEQ ID NO: 129554 - DNA, 2197 bp, Homo sapiens
  Payload ID: 5334
  Gene Symbol: ELP5
  Gene Name: elongator acetyltransferase complex subunit 5
  Uniprot ID: Q8TE02
  ENST ID: ENST00000356683
  CDS Start-End: 215-1054
gggagagtgacgtcacttggcccgcgcttagggccctcgcggggggcttgtgggtcctcctccccctcccactgacaactgccccaactgctcttcccgccccggtcacagtgaaaatgtagacggggtcgttgtccactatgttaggtcttaatggtgggaggacgcccgagtgctcggcccgtttcaccccgaggaggaaggacactgggtcatgacgccatcagagggcgccagagcagggaccggacgcgagttggagatgttggactcgctgttggccttgggcggcctggtgctgcttcgggattccgtggagtgggaggggcgcagtctcttgaaggcgcttgtcaagaaatctgcactgtgtggggagcaagtgcatatcctgggctgtgaagtgagcgaggaagagtttcgtgaaggttttgactctgatatcaacaatcggctggtttaccatgacttcttcagagaccctctcaactggtcaaaaactgaggaggcctttcctggggggccgctgggagccttgagagccatgtgcaagaggacagatcctgttcctgtcaccattgctctcgattcactcagctggctgctacttcgccttccctgcaccacactctgccaggtcctgcatgctgtgagccatcaggactcttgtcctggtgacagctcctcagtggggaaagtgagtgtgctgggcttgctacatgaagagcttcatggaccaggccctgtgggagctctcagcagccttgctcagactgaggtgaccctgggcggtaccatgggccaggcctcggcccacatcctgtgtcggaggccccgacagcgcccaactgaccagactcagtggttctccatccttccggacttcagcctggatctccaagaggggccctctgtagagtcccagccctactccgatcctcatatacccccggtatctaagaatgccaaggccagaacaaggaaatgtagtttagtatctggtcacgggagagaaaataaaagctgcagaggttgggggtggggtcagggattctagggatggggcagagtggcagcatcctttgtacctacaggtggatcccacaactcatttgacctttaaccttcacctgtccaagaaagagagagaagccagagatagcctgatcctgcccttccagttcagttctgaaaagtaaggttgggacctgggtacgtggatccctgagtagatcccagcatctgggccatggagaggttggggcaacaggttattgattaacctgactttatagggactgaagtccacctccagagacaagtccaagttcttgatccacccattccccctataatggcagaggacctttatgtctcttttctctcccttatacccttgggtcacagctccagttgtccccagagcaccctgggcctgggctgagccagaccagacccttgggaggtggccctatccctaggcagtggtgctaggaggacagaaggctatatgggcgtggcagaggctggttaacaagggcttagtacacgcttgctgttctgtgcccagtatgtgggcggatgacgcaagactacaagatccttgccctcaagctgctaggaacttacggttttattaggagagcagtacaagggtatctatcccagtaccaaatggtgcttcagctctaacatggaggtcagagaaagggacttggaccaataaaatgacatggaggcctaacaggttgcctgaatgagagtcacagtcacctggaagaaagtatccagacccaacctgttagctaccctcaccagcaccaaatcttcccttctcagacagcaggctctcctgcggcctaggccagggcaggctaccagccacatcttctatgagccagatgcttatgatgacctggaccaagaagacccagatgacgacctggatatttgactggccagatttgattagattgtaattggagggggcgcgggaagactttgggcccagaaccatctttctattgtttgtgttagccttaccctgtccctgccccaccttggttccccttgtctatggagccccgccttgtgagccaggaagcagcgtctcatcaggacagaaggtaggatgaagacatggggtaatgtgagagagtagaacacccccgtacctaataaaaatctttatttttttatt

SEQ ID NO: 129555 - DNA, 1389 bp, Homo sapiens
  Payload ID: 5334
  Gene Symbol: ELP5
  Gene Name: elongator acetyltransferase complex subunit 5
  Uniprot ID: Q8TE02
  ENST ID: ENST00000396627
  CDS Start-End: 184-1134
ggccctcgcggggggcttgtgggtcctcctccccctcccactgacaactgccccaactgctcttcccgccccggtcacagtgaaaatgtagacggggtcgttgtccactatgttaggtcttaatggtgggaggacgcccgagtgctcggcccgtttcaccccgaggaggaaggacactgggtcatgacgccatcagagggcgccagagcagggaccggacgcgagttggagatgttggactcgctgttggccttgggcggcctggtgctgcttcgggattccgtggagtgggaggggcgcagtctcttgaaggcgcttgtcaagaaatctgcactgtgtggggagcaagtgcatatcctgggctgtgaagtgagcgaggaagagtttcgtgaaggttttgactctgatatcaacaatcggctggtttaccatgacttcttcagagaccctctcaactggtcaaaaactgaggaggcctttcctggggggccgctgggagccttgagagccatgtgcaagaggacagatcctgttcctgtcaccattgctctcgattcactcagctggctgctacttcgccttccctgcaccacactctgccaggtcctgcatgctgtgagccatcaggactcttgtcctggtgacagctcctcagtggggaaagtgagtgtgctgggcttgctacatgaagagcttcatggaccaggccctgtgggagctctcagcagccttgctcagactgaggtgaccctgggcggtaccatgggccaggcctcggcccacatcctgtgtcggaggccccgacagcgcccaactgaccagactcagtggttctccatccttccggacttcagcctggatctccaagaggggccctctgtagagtcccagccctactccgatcctcatatacccccggtggatcccacaactcatttgacctttaaccttcacctgtccaagaaagagagagaagccagagatagcctgatcctgcccttccagttcagttctgaaaaacagcaggctctcctgcggcctaggccagggcaggctaccagccacatcttctatgagccagatgcttatgatgacctggaccaagaagacccagatgacgacctggatatttgactggccagatttgattagattgtaattggagggggcgcgggaagactttgggcccagaaccatctttctattgtttgtgttagccttaccctgtccctgccccaccttggttccccttgtctatggagccccgccttgtgagccaggaagcagcgtctcatcaggacagaaggtaggatgaagacatggggtaatgtgagagagtagaacacccccgtacctaataaaaatctttatttttttattaaaaaagaa

SEQ ID NO: 129556 - DNA, 1423 bp, Homo sapiens
  Payload ID: 5334
  Gene Symbol: ELP5
  Gene Name: elongator acetyltransferase complex subunit 5
  Uniprot ID: Q8TE02
  ENST ID: ENST00000396628
  CDS Start-End: 218-1168
aactgctcttcccgccccggtcacagtgaaaatgtagacggggtcgttgtccgtacgactgtgcgccagggctcggggaggggcgccctccgcgtgagcgcccccctgggaatattgaacataatcacctctcattccagactatgttaggtcttaatggtgggaggacgcccgagtgctcggcccgtttcaccccgaggaggaaggacactgggtcatgacgccatcagagggcgccagagcagggaccggacgcgagttggagatgttggactcgctgttggccttgggcggcctggtgctgcttcgggattccgtggagtgggaggggcgcagtctcttgaaggcgcttgtcaagaaatctgcactgtgtggggagcaagtgcatatcctgggctgtgaagtgagcgaggaagagtttcgtgaaggttttgactctgatatcaacaatcggctggtttaccatgacttcttcagagaccctctcaactggtcaaaaactgaggaggcctttcctggggggccgctgggagccttgagagccatgtgcaagaggacagatcctgttcctgtcaccattgctctcgattcactcagctggctgctacttcgccttccctgcaccacactctgccaggtcctgcatgctgtgagccatcaggactcttgtcctggtgacagctcctcagtggggaaagtgagtgtgctgggcttgctacatgaagagcttcatggaccaggccctgtgggagctctcagcagccttgctcagactgaggtgaccctgggcggtaccatgggccaggcctcggcccacatcctgtgtcggaggccccgacagcgcccaactgaccagactcagtggttctccatccttccggacttcagcctggatctccaagaggggccctctgtagagtcccagccctactccgatcctcatatacccccggtggatcccacaactcatttgacctttaaccttcacctgtccaagaaagagagagaagccagagatagcctgatcctgcccttccagttcagttctgaaaaacagcaggctctcctgcggcctaggccagggcaggctaccagccacatcttctatgagccagatgcttatgatgacctggaccaagaagacccagatgacgacctggatatttgactggccagatttgattagattgtaattggagggggcgcgggaagactttgggcccagaaccatctttctattgtttgtgttagccttaccctgtccctgccccaccttggttccccttgtctatggagccccgccttgtgagccaggaagcagcgtctcatcaggacagaaggtaggatgaagacatggggtaatgtgagagagtagaacacccccgtacctaataaaaatctttatttttttattaaaaaagaa

SEQ ID NO: 129557 - DNA, 473 bp, Homo sapiens
  Payload ID: 5334
  Gene Symbol: ELP5
  Gene Name: elongator acetyltransferase complex subunit 5
  ENST ID: ENST00000570500
  CDS Start-End: 187-473
tcgcggggggcttgtgggtcctcctccccctcccactgacaactgccccaactgctcttcccgccccggtcacagtgaaaatgtagacggggtcgttgtccgtacgactactatgttaggtcttaatggtgggaggacgcccgagtgctcggcccgtttcaccccgaggaggaaggacactgggtcatgacgccatcagagggcgccagagcagggaccggacgcgagttggagatgttggactcgctgttggccttgggcggcctggtgctgcttcgggattccgtggagtgggaggggcgcagtctcttgaaggcgcttgtcaagaaatctgcactgtgtggggagcaagtgcatatcctgggctgtgaagtgagcgaggaagagtttcgtgaaggttttgactctgatatcaacaatcggctggtttaccatgacttcttcagagaccctctcaactggtcaaaaactga

SEQ ID NO: 129558 - DNA, 937 bp, Homo sapiens
  Payload ID: 5334
  Gene Symbol: ELP5
  Gene Name: elongator acetyltransferase complex subunit 5
  ENST ID: ENST00000576496
  CDS Start-End: 1-788
tggactcgctgttggccttgggcggcctggtgctgcttcgggattccgtggagtgggaggggcgcagtctcttgaaggcgcttgtcaagaaatctgcactgtgtggggagcaagtgcatatcctgggctgtgaagtgagcgaggaagagtttcgtgaaggttttgactctgatatcaacaatcggctggtttaccatgacttcttcagagaccctctcaactggtcaaaaactgaggaggcctttcctggggggccgctgggagccttgagagccatgtgcaagaggacagatcctgttcctgtcaccattgctctcgattcactcagctggctgctacttcgccttccctgcaccacactctgccaggtcctgcatgctgtgagccatcaggactcttgtcctggtgacagctcctcagtggggaaagtgagtgtgctgggcttgctacatgaagagcttcatggaccaggccctgtgggagctctcagcagccttgctcagactgaggtgaccctgggcggtaccatgggccaggcctcggcccacatcctgtgtcggaggccccgacagcgcccaactgaccagactcagtggttctccatccttccggacttcagcctggatctccaagaggggccctctgtagagtcccagccctactccgatcctcatatacccccggtggatcccacaactcatttgacctttaaccttcacctgtccaagaaagagagagaagccagagatagcctgatcctgcccttccagttcagttctgaaaagtaaggttgggacctgggtacgtggatccctgagtagatcccagcatctgggccatggagaggttggggcaacaggttattgattaacctgactttatagggactgaagtccacctccagagacaagtccaagttcttgatccacccattccc

SEQ ID NO: 129559 - DNA, 416 bp, Homo sapiens
  Payload ID: 5334
  Gene Symbol: ELP5
  Gene Name: elongator acetyltransferase complex subunit 5
  ENST ID: ENST00000572104
  CDS Start-End: 1-325
gctggtttaccatgacttcttcagagaccctctcaactggtcaaaaactgaggaggcctttcctggggggccgctgggagccttgagagccatgtgcaagaggacagatcctgttcctgtcaccattgctctcgattcactcagctggctgctacttcgccttccctgcaccacactctgccaggtcctgcatgctgtgagccatcaggactcttgtcctgactcagtggttctccatccttccggacttcagcctggatctccaagaggggccctctgtagagtcccagccctactccgatcctcatatacccccggtatctaagaatgccaaggccagaacaaggaaatgtagtttagtatctggtcacgggagagaaaataaaagctgcagaggttgggggtggggtcaggga

SEQ ID NO: 129560 - DNA, 890 bp, Homo sapiens
  Payload ID: 5334
  Gene Symbol: ELP5
  Gene Name: elongator acetyltransferase complex subunit 5
  ENST ID: ENST00000571146
  CDS Start-End: 1-354
gattccgtggagtgggaggggcgcagtctcttgaaggcgcttgtcaagaaatctgcactgtgtggggagcaagtgcatatcctgggctgtgaagtgagcgaggaagagtttcgtgaaggttttgactctgatatcaacaatcggctggtttaccatgacttcttcagagaccctctcaactggtcaaaaactgaggaggcctttcctggggggccgctgggagccttgagagccatgtgcaagaggacagatcctgttcctgtcaccattgctctcgattcactcagctggctgctacttcgccttccctgcaccacactctgccaggtgacagctcctcagtggggaaagtgagtgtgctgggcttgctacatgaagagcttcatggaccaggccctgtgggagctctcagcagccttgctcagactgaggtgaccctgggcggtaccatgggccaggcctcggcccacatcctgtgtcggaggccccgacagcgcccaactgaccagactcagtggttctccatccttccggacttcagcctggatctccaagaggggccctctgtagagtcccagccctactccgatcctcatatacccccggtatctaagaatgccaaggccagaacaaggaaatgtagtttagtatctggtcacgggagagaaaataaaagctgcagaggttgggggtggggtcagggattctagggatggggcagagtggcagcatcctttgtacctacaggtggatcccacaactcatttgacctttaaccttcacctgtccaagaaagagagagaagccagagatagcctgatcctgcccttccagttcagttctgaaaagtaaggttgggacctgggtacgtggatccctgagtagatccc

SEQ ID NO: 129561 - DNA, 687 bp, Homo sapiens
  Payload ID: 5334
  Gene Symbol: ELP5
  Gene Name: elongator acetyltransferase complex subunit 5
  Uniprot ID: Q8TE02
  ENST ID: ENST00000573657
  CDS Start-End: 128-667
cgcgtgagcgcccccctgggaatattgaacataatcacctctcattccagactatgttaggtcttaatggtgggaggacgcccgagtgctcggcccgtttcaccccgaggaggaaggacactgggtcatgacgccatcagagggcgccagagcagggaccggacgcgagttggagatgttggactcgctgttggccttgggcggcctggtgctgcttcgggattccgtggagtgggaggggcgcagtctcttgaaggcgcttgtcaagaaatctgcactgtgtggggagcaagtgcatatcctgggctgtgaagtgagcgaggaagagtttcgtgaaggttttgactctgatatcaacaatcggctggtttaccatgacttcttcagagaccctctcaactggtcaaaaactgaggaggcctttcctggggggccgctgggagccttgagagccatgtgcaagaggacagatcctgttcctgtcaccattgctctcgattcactcagctggctgctacttcgccttccctgcaccacactctgccaggtcctgcatgctgtgagccatcaggactcttgtcctggtgagacccctccttcattgtttcccctcatacatctccctctgccaaggagtgtgccccttttcctttctaccctagaataaacatctgggttctccagtca

SEQ ID NO: 129562 - DNA, 2209 bp, Homo sapiens
  Payload ID: 5334
  Gene Symbol: ELP5
  Gene Name: elongator acetyltransferase complex subunit 5
  Uniprot ID: Q8TE02
  ENST ID: ENST00000574993
  CDS Start-End: 218-1057
aactgctcttcccgccccggtcacagtgaaaatgtagacggggtcgttgtccgtacgactgtgcgccagggctcggggaggggcgccctccgcgtgagcgcccccctgggaatattgaacataatcacctctcattccagactatgttaggtcttaatggtgggaggacgcccgagtgctcggcccgtttcaccccgaggaggaaggacactgggtcatgacgccatcagagggcgccagagcagggaccggacgcgagttggagatgttggactcgctgttggccttgggcggcctggtgctgcttcgggattccgtggagtgggaggggcgcagtctcttgaaggcgcttgtcaagaaatctgcactgtgtggggagcaagtgcatatcctgggctgtgaagtgagcgaggaagagtttcgtgaaggttttgactctgatatcaacaatcggctggtttaccatgacttcttcagagaccctctcaactggtcaaaaactgaggaggcctttcctggggggccgctgggagccttgagagccatgtgcaagaggacagatcctgttcctgtcaccattgctctcgattcactcagctggctgctacttcgccttccctgcaccacactctgccaggtcctgcatgctgtgagccatcaggactcttgtcctggtgacagctcctcagtggggaaagtgagtgtgctgggcttgctacatgaagagcttcatggaccaggccctgtgggagctctcagcagccttgctcagactgaggtgaccctgggcggtaccatgggccaggcctcggcccacatcctgtgtcggaggccccgacagcgcccaactgaccagactcagtggttctccatccttccggacttcagcctggatctccaagaggggccctctgtagagtcccagccctactccgatcctcatatacccccggtatctaagaatgccaaggccagaacaaggaaatgtagtttagtatctggtcacgggagagaaaataaaagctgcagaggttgggggtggggtcagggattctagggatggggcagagtggcagcatcctttgtacctacaggtggatcccacaactcatttgacctttaaccttcacctgtccaagaaagagagagaagccagagatagcctgatcctgcccttccagttcagttctgaaaagtaaggttgggacctgggtacgtggatccctgagtagatcccagcatctgggccatggagaggttggggcaacaggttattgattaacctgactttatagggactgaagtccacctccagagacaagtccaagttcttgatccacccattccccctataatggcagaggacctttatgtctcttttctctcccttatacccttgggtcacagctccagttgtccccagagcaccctgggcctgggctgagccagaccagacccttgggaggtggccctatccctaggcagtggtgctaggaggacagaaggctatatgggcgtggcagaggctggttaacaagggcttagtacacgcttgctgttctgtgcccagtatgtgggcggatgacgcaagactacaagatccttgccctcaagctgctaggaacttacggttttattaggagagcagtacaagggtatctatcccagtaccaaatggtgcttcagctctaacatggaggtcagagaaagggacttggaccaataaaatgacatggaggcctaacaggttgcctgaatgagagtcacagtcacctggaagaaagtatccagacccaacctgttagctaccctcaccagcaccaaatcttcccttctcagacagcaggctctcctgcggcctaggccagggcaggctaccagccacatcttctatgagccagatgcttatgatgacctggaccaagaagacccagatgacgacctggatatttgactggccagatttgattagattgtaattggagggggcgcgggaagactttgggcccagaaccatctttctattgtttgtgttagccttaccctgtccctgccccaccttggttccccttgtctatggagccccgccttgtgagccaggaagcagcgtctcatcaggacagaaggtaggatgaagacatggggtaatgtgagagagtagaacacccccgtacctaataaaaatctttatttttttattaaaaaagaa

SEQ ID NO: 129563 - DNA, 864 bp, Homo sapiens
  Payload ID: 5334
  Gene Symbol: ELP5
  Gene Name: elongator acetyltransferase complex subunit 5
  ENST ID: ENST00000573699
  CDS Start-End: 236-864
cagagaggggcacggagcgggcggctcagaaagccacccctggcgagggtaaagcccagcggaacggggagctgggggacaggcgtgggcagcccgcgggggcccacatgggctgggagtggcaccgacggcttcggggaggttgcgggccgagacagactatgttaggtcttaatggtgggaggacgcccgagtgctcggcccgtttcaccccgaggaggaaggacactgggtcatgacgccatcagagggcgccagagcagggaccggacgcgagttggagatgttggactcgctgttggccttgggcggcctggtgctgcttcgggattccgtggagtgggaggggcgcagtctcttgaaggcgcttgtcaagaaatctgcactgtgtggggagcaagtgcatatcctgggctgtgaagtgagcgaggaagagtttcgtgaaggttttgactctgatatcaacaatcggctggtttaccatgacttcttcagagaccctctcaactggtcaaaaactgaggaggcctttcctggggggccgctgggagccttgagagccatgtgcaagaggacagatcctgttcctgtcaccattgctctcgattcactcagctggctgctacttcgccttccctgcaccacactctgccaggtcctgcatgctgtgagccatcaggactcttgtcctggtgacagctcctcagtggggaaagtgagtgtgctgggcttgctacatgaagagcttcatggaccaggccctgtgggagctctcagcagccttgctcagactgaggtgaccctgggcggtaccatgggccaggcctcggcccacatcctgtgtcggaggccccgacagcgccc

SEQ ID NO: 129564 - DNA, 827 bp, Homo sapiens
  Payload ID: 5334
  Gene Symbol: ELP5
  Gene Name: elongator acetyltransferase complex subunit 5
  ENST ID: ENST00000573513
  CDS Start-End: 137-827
cggtggtgacgtgtattcgcttcaccgggactaagttcctcctgcgcggtctatggcggactatgttaggtcttaatggtgggaggacgcccgagtgctcggcccgtttcaccccgaggaggaaggacactgggtcatgacgccatcagagggcgccagagcagggaccggacgcgagttggagatgttggactcgctgttggccttgggcggcctggtgctgcttcgggattccgtggagtgggaggggcgcagtctcttgaaggcgcttgtcaagaaatctgcactgtgtggggagcaagtgcatatcctgggctgtgaagtgagcgaggaagagtttcgtgaaggttttgactctgatatcaacaatcggctggtttaccatgacttcttcagagaccctctcaactggtcaaaaactgaggaggcctttcctggggggccgctgggagccttgagagccatgtgcaagaggacagatcctgttcctgtcaccattgctctcgattcactcagctggctgctacttcgccttccctgcaccacactctgccaggtcctgcatgctgtgagccatcaggactcttgtcctggtgacagctcctcagtggggaaagtgagtgtgctgggcttgctacatgaagagcttcatggaccaggccctgtgggagctctcagcagccttgctcagactgaggtgaccctgggcggtaccatgggccaggcctcggcccacatcctgtgtcggaggccccgacagcgcccaactgaccagactcagtggttctccatccttccggacttcagcctggatctccaagaggggc

SEQ ID NO: 129565 - DNA, 1083 bp, Homo sapiens
  Payload ID: 5334
  Gene Symbol: ELP5
  Gene Name: elongator acetyltransferase complex subunit 5
  ENST ID: ENST00000570322
  CDS Start-End: 1-737
gagcagggaccggacgcgagttggagatgttggactcgctgttggccttgggcggcctggtgctgcttcgggattccgtggagtgggaggggcgcagtctcttgaaggcgcttgtcaagaaatctgcactgtgtggggagcaagtgcatatcctgggctgtgaagtgagcgaggaagagtttcgtgaaggttttgactctgatatcaacaatcggctggtttaccatgacttcttcagagaccctctcaactggtcaaaaactgaggaggcctttcctggggggccgctgggagccttgagagccatgtgcaagaggacagatcctgttcctgtcaccattgctctcgattcactcagctggctgctacttcgccttccctgcaccacactctgccaggtcctgcatgctgtgagccatcaggactcttgtcctggtgacagctcctcagtggggaaagtgagtgtgctgggcttgctacatgaagagcttcatggaccaggccctgtgggagctctcagcagccttgctcagactgaggtgaccctgggcggtaccatgggccaggcctcggcccacatcctgtgtcggaggccccgacagcgcccaactgaccagactcagtggttctccatccttccggacttcagcctggatctccaagaggggccctctgtagagtcccagccctactccgatcctcatatacccccgacagcaggctctcctgcggcctaggccagggcaggctaccagccacatcttctatgagccagatgcttatgatgacctggaccaagaagacccagatgacgacctggatatttgactggccagatttgattagattgtaattggagggggcgcgggaagactttgggcccagaaccatctttctattgtttgtgttagccttaccctgtccctgccccaccttggttccccttgtctatggagccccgccttgtgagccaggaagcagcgtctcatcaggacagaaggtaggatgaagacatggggtaatgtgagagagtagaacacccccgtacctaataaaaatctttatttttttattaaaaaagaa

SEQ ID NO: 129566 - DNA, 671 bp, Homo sapiens
  Payload ID: 5334
  Gene Symbol: ELP5
  Gene Name: elongator acetyltransferase complex subunit 5
  Uniprot ID: Q8TE02
  ENST ID: ENST00000574255
  CDS Start-End: 105-644
aagttcctcctgcgcggtctatggcggactatgttaggtcttaatggtgggaggacgcccgagtgctcggcccgtttcaccccgaggaggaaggacactgggtcatgacgccatcagagggcgccagagcagggaccggacgcgagttggagatgttggactcgctgttggccttgggcggcctggtgctgcttcgggattccgtggagtgggaggggcgcagtctcttgaaggcgcttgtcaagaaatctgcactgtgtggggagcaagtgcatatcctgggctgtgaagtgagcgaggaagagtttcgtgaaggttttgactctgatatcaacaatcggctggtttaccatgacttcttcagagaccctctcaactggtcaaaaactgaggaggcctttcctggggggccgctgggagccttgagagccatgtgcaagaggacagatcctgttcctgtcaccattgctctcgattcactcagctggctgctacttcgccttccctgcaccacactctgccaggtcctgcatgctgtgagccatcaggactcttgtcctggtgagacccctccttcattgtttcccctcatacatctccctctgccaaggagtgtgccccttttcctttctaccctagaataaacatctgggttctccagtcagaccttt

SEQ ID NO: 129567 - DNA, 510 bp, Homo sapiens
  Payload ID: 5334
  Gene Symbol: ELP5
  Gene Name: elongator acetyltransferase complex subunit 5
  ENST ID: ENST00000574841
  CDS Start-End: 381-510
gcggggggtgcggttcgggcctggctgaggggacggaagtgggcaggaagggccaggggtcacaggctaggtgtggaaatcgcgacgggttcgcgaaggcggtaatcccagcgctctcataccctttatccgtccctcgctctgcagattccgtggagtgggaggggcgcagtctcttgaaggcgcttgtcaagaaatctgcactgtgtggggagcaagtgcatatcctgggctgtgaagtgagcgaggaagagtttcgtgaaggttttgactctgatatcaacaatcggctggtttaccatgacttcttcagagaccctctcaactggtcaaaaactgaggaggcctttcctggggggccgctgggagccttgagagccatgtgcaagaggacagatcctgttcctgtcaccattgctctcgattcactcagctggctgctacttcgccttccctgcaccacactctgccaggtcctgcatgctgtgagccatcaggactcttgtcctg

SEQ ID NO: 129568 - DNA, 1401 bp, Homo sapiens
  Payload ID: 5335
  Gene Symbol: ELP6
  Gene Name: elongator acetyltransferase complex subunit 6
  Uniprot ID: Q0PNE2
  ENST ID: ENST00000296149
  CDS Start-End: 172-972
ggtcccatcgaggcacccgcctcattggctgtggctggctcgcaaaagtggcattgcgcatgcgcgcttccttgcgcgagccgggctgtcgggtgtgttttgctctccagcctccgtcgtctctgcagcactccgggttctcctccagagcgctagtcccaggagctcggaatgttcgtggaacttaataacctgcttaacaccacccccgacagggcggagcaggggaaactgactctactctgtgatgccaagacagatgggagtttccttgtacaccactttctctccttctatctcaaagctaattgtaaagtctgctttgtggcactcatccagtccttcagccactacagtatcgtgggacagaagctgggtgtcagcctgaccatggcgcgggagcgtgggcagcttgtgttccttgagggactcaagtctgcagtggacgtcgtcttccaggctcaaaaggagccacaccccctgcagtttctcagggaggctaatgctgggaacttgaaaccattgtttgagtttgtacgggaggccctgaagccagtagacagtggagaggctcggtggacgtacccggtgctgttggtggacgacctcagtgtgctcctgagcctgggcatgggggcggtggctgtgctagacttcattcactactgcagagccaccgtgtgctgggaactaaagggaaacatggtggtccttgtgcacgacagtggagatgcggaggatgaggagaatgacatcctgctgaatggcctcagtcatcagagccatctgatactgcgggctgagggcctggccactggcttctgcagggatgtgcacgggcagctgaggatcctgtggaggagaccatcgcagcccgcagtccaccgggatcagagcttcacttaccagtataagatacaggacaaaagcgtgtccttttttgccaaaggaatgtctcctgctgttctgtgacctgatttcggagcagctgaagctacataggactgtttttggacgtggaagatagagcaacatagcaagaatgggtctttctcctctgtagtaatatttcaggctggaccggcgactccactgtgaccagagggttgagtgctgcagtgatggcatgccttggctgccctgggccctgttcagaaaacacaagggaccacaatcctgcctttgctgagagagaggctggatgctagacccaagtgaaaggggtcctttggagcctttgtttaaatatgccttagccccagctgcccatttttggttgacaagcctttcagagccagagtgggtatagatgtgccagccaggagatggcaccggatggcaggtgtgcaaggtgacaactaggataatcatggctggaataaagtaagtttccacactgga

SEQ ID NO: 129569 - DNA, 1277 bp, Homo sapiens
  Payload ID: 5335
  Gene Symbol: ELP6
  Gene Name: elongator acetyltransferase complex subunit 6
  ENST ID: ENST00000442215
  CDS Start-End: 120-302
attgcgcatgcgcgcttccttgcgcgagccgggctgtcgggtgtgttttgctctccagcctccgtcgtctctgcagcactccgggttctcctccagagcgctagtcccaggagctcggaatgttcgtggaacttaataacctgcttaacaccacccccgacagggcggagcaggggaaactgactctactctgtgatgccaagacagatgggagtttccttgtacaccactttctctccttctatctcaaagggtgtcagcctgaccatggcgcgggagcgtgggcagcttgtgttccttgagggactcaagtctgcagtggacgtcgtcttccaggctcaaaaggagccacaccccctgcagtttctcagggaggctaatgctgggaacttgaaaccattgtttgagtttgtacgggaggccctgaagccagtagacagtggagaggctcggtggacgtacccggtgctgttggtggacgacctcagtgtgctcctgagcctgggcatgggggcggtggctgtgctagacttcattcactactgcagagccaccgtgtgctgggaactaaagggaaacatggtggtccttgtgcacgacagtggagatgcggaggatgaggagaatgacatcctgctgaatggcctcagtcatcagagccatctgatactgcgggctgagggcctggccactggcttctgcagggatgtgcacgggcagctgaggatcctgtggaggagaccatcgcagcccgcagtccaccgggatcagagcttcacttaccagtataagatacaggacaaaagcgtgtccttttttgccaaaggaatgtctcctgctgttctgtgacctgatttcggagcagctgaagctacataggactgtttttggacgtggaagatagagcaacatagcaagaatgggtctttctcctctgtagtaatatttcaggctggaccggcgactccactgtgaccagagggttgagtgctgcagtgatggcatgccttggctgccctgggccctgttcagaaaacacaagggaccacaatcctgcctttgctgagagagaggctggatgctagacccaagtgaaaggggtcctttggagcctttgtttaaatatgccttagccccagctgcccatttttggttgacaagcctttcagagccagagtgggtatagatgtgccagccaggagatggcaccggatggcaggtgtgcaaggtgacaactaggataatcatggctggaataaagtaagtttccacactgg

SEQ ID NO: 129570 - DNA, 1011 bp, Homo sapiens
  Payload ID: 5335
  Gene Symbol: ELP6
  Gene Name: elongator acetyltransferase complex subunit 6
  ENST ID: ENST00000445044
  CDS Start-End: 236-442
ggggattggactggaggcttgggcccgccgaaagtgggcttctgggccatctcgcatattctcaacggctgggaaactgactctactctgtgatgccaagacagatgggagtttccttgtacaccactttctctccttctatctcaaagctaattgtaaagtctgctttgtggcactcatccagtccttcagccactacagtatcgtgggacagaagctgggtgtcagcctgaccatggcgcgggagcgtgggcagcttgtgttccttgagggactcaagtctgcagtggacgtcgtcttccaggctcaaaaggagccacaccccctgcagtttctcagacatttaagaaaaaatttttcccctggtttggtattcaacatcacaggcctgagactggttttcctgcttttcctcctttctgaacattggccacaaacatagctctgtgaagactccccgcttggctgctgttcttcgtccactacaaagtggtccacacaggaacttcccccactgccttatctctcagacacacacacccttatgcagtgggtgtgaggccatgtttcctgaccctgtgtgtgacttcacacacatcccttagcatctctgacttggggtttcctcatttgaaggcaggggctggttatacctcatcccaagggaggctaatgctgggaacttgaaaccattgtttgagtttgtacgggaggccctgaagccagtagacagtggagaggctcggtggacgtacccggtgctgttggtggacgacctcagtgtgctcctgagcctgggcatgggggcggtggctgtgctagacttcattcactactgcagagccaccgtgtgctgggaactaaagggaaacatggtggtccttgtgcacgacagtggagatgcggaggatgaggagaatgacatcctgctgaatggcctcagtcatcagagccatctgatactgcgggctgagggcctggccactggcttctgcagggatgtgcacgggc

SEQ ID NO: 129571 - DNA, 594 bp, Homo sapiens
  Payload ID: 5335
  Gene Symbol: ELP6
  Gene Name: elongator acetyltransferase complex subunit 6
  ENST ID: ENST00000425291
  CDS Start-End: 255-594
taaggtgtggacacaattgactagatttctgcactaagctgacctctttccagggagtctaacctttttgtgttccttgtaacttttaggggaaactgactctactctgtgatgccaagacagatgggagtttccttgtacaccactttctctccttctatctcaaagctaattgtaaagtctgctttgtggcactcatccagtccttcagccactacagtatcgtgggacagaagctgggtgtcagcctgaccatggcgcgggagcgtgggcagcttgtgttccttgagggactcaagtctgcagtggacgtcgtcttccaggctcaaaaggagccacaccccctgcagtttctcagggaggctaatgctgggaacttgaaaccattgtttgagtttgtacgggaggccctgaagccagtagacagtggagaggctcggtggacgtacccggtgctgttggtggacgacctcagtgtgctcctgagcctgggcatgggggcggtggctgtgctagacttcattcactactgcagagccaccgtgtgctgggaactaaaggtactcatggaactgccttctctgcgcccacctg

SEQ ID NO: 129572 - DNA, 880 bp, Homo sapiens
  Payload ID: 5335
  Gene Symbol: ELP6
  Gene Name: elongator acetyltransferase complex subunit 6
  ENST ID: ENST00000439305
  CDS Start-End: 259-840
tgtagtccgcagaggatcgacccggggattggactggaggcttgggcccgccgaaagtgggcttctgggccatctcgcatattctcaacggctgggaaactgactctactctgtgatgccaagacagatgggagtttccttgtacaccactttctctccttctatctcaaagctaattgtaaagtctgctttgtggcactcatccagtccttcagccactacagtatcgtgggacagaagctgggtgtcagcctgaccatggcgcgggagcgtgggcagcttgtgttccttgagggactcaagtctgcagtggacgtcgtcttccaggctcaaaaggagccacaccccctgcagtttctcagggaggctaatgctgggaacttgaaaccattgtttgagtttgtacgggaggccctgaagccagtagacagtggagaggctcggtggacgtacccggtgctgttggtggacgacctcagtgtgctcctgagcctgggcatgggggcggtggctgtgctagacttcattcactactgcagagccaccgtgtgctgggaactaaagggaaacatggtggtccttgtgcacgacagtggagatgcggaggatgaggagaatgacatcctgctgaatggcctcagtcatcagagccatctgatactgcgggctgagggcctggccactggcttctgcagggatgtgcacgggcagctgaggatcctgtggaggagaccatcgcagcccgcagtccaccgggatcagagcttcacttaccagtataagatacaggacaaaagcgtgtccttttttgccaaaggaatgtctcctgctgttctgtgacctgatttcggagcagctgaagctacataggactgttttt

SEQ ID NO: 129573 - DNA, 557 bp, Homo sapiens
  Payload ID: 5335
  Gene Symbol: ELP6
  Gene Name: elongator acetyltransferase complex subunit 6
  ENST ID: ENST00000414236
  CDS Start-End: 318-557
atctcgcatattctcaacggctgtgcgtgtccttaaaagtccctgggaagcggccgggcgcggtggctcacccctgtaatcccagcagtttgggaggccgaggcgggtgcatcatctaaggtcaagagttcgagacaagtctggccaagatggggaaactgactctactctgtgatgccaagacagatgggagtttccttgtacaccactttctctccttctatctcaaagctaattgtaaagtctgctttgtggcactcatccagtccttcagccactacagtatcgtgggacagaagctgggtgtcagcctgaccatggcgcgggagcgtgggcagcttgtgttccttgagggactcaagtctgcagtggacgtcgtcttccaggctcaaaaggagccacaccccctgcagtttctcagggaggctaatgctgggaacttgaaaccattgtttgagtttgtacgggaggccctgaagccagtagacagtggagaggctcggtggacgtacccggtgctgttggtggacgacctcagtgtgctcctgagcctgggc

SEQ ID NO: 129574 - DNA, 1008 bp, Homo sapiens
  Payload ID: 5335
  Gene Symbol: ELP6
  Gene Name: elongator acetyltransferase complex subunit 6
  ENST ID: ENST00000444760
  CDS Start-End: 556-1008
actggaggcttgggcccgccgaaagtgggcttctgggccatctcgcatattctcaacggctgtgcgtgtccttaaaagtccctgggaagcggccgggcgcggtggctcacccctgtaatcccagcagtttgggaggccgaggcgggtgcatcatctaaggtcaagagttcgagacaagtctggccaagatggtgaaacccccgtctctacgaaaaatacaaaaattagccgggcgtggtggctcatgcctgtaatctcagctactcgggaggctgagacaggagaattgcttgaacccgggaggcggaggttgcagtgacccgagatctcgccaccgcactccagcctgggcgacagagcgggactccacctcaaaaaaaaaaaaaaaaagggaaactgactctactctgtgatgccaagacagatgggagtttccttgtacaccactttctctccttctatctcaaagctaattgtaaagtctgctttgtggcactcatccagtccttcagccactacagtatcgtgggacagaagctgggtgtcagcctgaccatggcgcgggagcgtgggcagcttgtgttccttgagggactcaagtctgcagtggacgtcgtcttccaggctcaaaaggagccacaccccctgcagtttctcagggaggctaatgctgggaacttgaaaccattgtttgagtttgtacgggaggccctgaagccagtagacagtggagaggctcggtggacgtacccggtgctgttggtggacgacctcagtgtgctcctgagcctgggcatgggggcggtggctgtgctagacttcattcactactgcagagccaccgtgtgctgggaactaaagggaaacatggtggtccttgtgcacgacagtggagatgcggaggatgaggagaatgacatcctgctgaatggcctcagtcatcagagccatctgatactgcgggctgagggcctggccactggcttctgcagggatgtgcacgggcag

SEQ ID NO: 129575 - DNA, 579 bp, Homo sapiens
  Payload ID: 5335
  Gene Symbol: ELP6
  Gene Name: elongator acetyltransferase complex subunit 6
  ENST ID: ENST00000449409
  CDS Start-End: 283-579
tcgcatattctcaacggctgtgcgtgtccttaaaagtccctgggaagcggccgggcgcggtggctcacccctgtaatcccagcagtttgggaggccgaggcgggtgcatcatctaaggggaaactgactctactctgtgatgccaagacagatgggagtttccttgtacaccactttctctccttctatctcaaagctaattgtaaagtctgctttgtggcactcatccagtccttcagccactacagtatcgtgggacagaagctgggtgtcagcctgaccatggcgcgggagcgtgggcagcttgtgttccttgagggactcaagtctgcagtggacgtcgtcttccaggctcaaaaggagccacaccccctgcagtttctcagggaggctaatgctgggaacttgaaaccattgtttgagtttgtacgggaggccctgaagccagtagacagtggagaggctcggtggacgtacccggtgctgttggtggacgacctcagtgtgctcctgagcctgggcatgggggcggtggctgtgctagacttcattcactactgcagagccaccgtgtgctgg

SEQ ID NO: 129576 - DNA, 894 bp, Homo sapiens
  Payload ID: 5335
  Gene Symbol: ELP6
  Gene Name: elongator acetyltransferase complex subunit 6
  ENST ID: ENST00000446787
  CDS Start-End: 190-771
tctactctgtgatgccaagacagatgggagtttccttgtacaccactttctctccttctatctcaaagctaattgtaaagtctgctttgtggcactcatccagtccttcagccactacagtatcgtgggacagaagctggtaaatattttggagctccatgatgaggtccctgaggtgtcagcctgaccatggcgcgggagcgtgggcagcttgtgttccttgagggactcaagtctgcagtggacgtcgtcttccaggctcaaaaggagccacaccccctgcagtttctcagggaggctaatgctgggaacttgaaaccattgtttgagtttgtacgggaggccctgaagccagtagacagtggagaggctcggtggacgtacccggtgctgttggtggacgacctcagtgtgctcctgagcctgggcatgggggcggtggctgtgctagacttcattcactactgcagagccaccgtgtgctgggaactaaagggaaacatggtggtccttgtgcacgacagtggagatgcggaggatgaggagaatgacatcctgctgaatggcctcagtcatcagagccatctgatactgcgggctgagggcctggccactggcttctgcagggatgtgcacgggcagctgaggatcctgtggaggagaccatcgcagcccgcagtccaccgggatcagagcttcacttaccagtataagatacaggacaaaagcgtgtccttttttgccaaaggaatgtctcctgctgttctgtgacctgatttcggagcagctgaagctacataggactgtttttggacgtggaagatagagcaacatagcaagaatgggtctttctcctctgtagtaatatttcaggctggaccggcgactccactg

SEQ ID NO: 129577 - DNA, 705 bp, Homo sapiens
  Payload ID: 5335
  Gene Symbol: ELP6
  Gene Name: elongator acetyltransferase complex subunit 6
  ENST ID: ENST00000412761
  CDS Start-End: 233-705
catcatttcagggtaccttagcatgtatgtcattaaaaaaataaactcttcaggtggagaaattaaggggaaactgactctactctgtgatgccaagacagatgggagtttccttgtacaccactttctctccttctatctcaaagctaattgtaaagtctgctttgtggcactcatccagtccttcagccactacagtatcgtgggacagaagctgggtgtcagcctgaccatggcgcgggagcgtgggcagcttgtgttccttgagggactcaagtctgcagtggacgtcgtcttccaggctcaaaaggagccacaccccctgcagtttctcagggaggctaatgctgggaacttgaaaccattgtttgagtttgtacgggaggccctgaagccagtagacagtggagaggctcggtggacgtacccggtgctgttggtggacgacctcagtgtgctcctgagcctgggcatgggggcggtggctgtgctagacttcattcactactgcagagccaccgtgtgctgggaactaaagggaaacatggtggtccttgtgcacgacagtggagatgcggaggatgaggagaatgacatcctgctgaatggcctcagtcatcagagccatctgatactgcgggctgagggcctggccactggcttctgcagggatgtgcacgggcaggtatgcaggggcctcctggg

SEQ ID NO: 129578 - DNA, 1477 bp, Homo sapiens
  Payload ID: 5336
  Gene Symbol: ELOVL1
  Gene Name: ELOVL fatty acid elongase 1
  Uniprot ID: Q9BW60
  ENST ID: ENST00000372458
  CDS Start-End: 119-958
gcccagcagatgaggaagtggcaggcaggcaggctggccccggggacttctctctggccctgctccctccgagcgctccgccgttgcccgcctggcccctacggagtccttagccaggatggaggctgttgtgaacttgtaccaagaggtgatgaagcacgcagatccccggatccagggctaccctctgatggggtcccccttgctaatgacctccattctcctgacctacgtgtacttcgttctctcacttgggcctcgcatcatggctaatcggaagcccttccagctccgtggcttcatgattgtctacaacttctcactggtggcactctccctctacattgtctatgagttcctgatgtcgggctggctgagcacctatacctggcgctgtgaccctgtggactattccaacagccctgaggcacttaggatggttcgggtggcctggctcttcctcttctccaagttcattgagctgatggacacagtgatctttattctccgaaagaaagacgggcaggtgaccttcctacatgtcttccatcactctgtgcttccctggagctggtggtggggggtaaagattgccccgggaggaatgggctctttccatgccatgataaactcttccgtgcatgtcataatgtacctgtactacggattatctgcctttggccctgtggcacaaccctacctttggtggaaaaagcacatgacagccattcagctgatccagtttgtcctggtctcactgcacatctcccagtactactttatgtccagctgtaactaccagtacccagtcattattcacctcatctggatgtatggcaccatcttcttcatgctgttctccaacttctggtatcactcttataccaagggcaagcggctgccccgtgcacttcagcaaaatggagctccaggtattgccaaggtcaaggccaactgagaagcatggcctagataggcgcccacctaagtgcctcaggactgcaccttagggcagtgtccgtcagtgccctctccacctacacctgtgaccaaggcttatgtggtcaggactgagcaggggactggccctcccctccccacagctgctctacagggaccacggctttggttcctcacccacttcccccgggcagctccagggatgtggcctcattgctgtctgccactccagagctgggggctaaaagggctgtacagttatttccccctccctgccttaaaacttgggagaggagcactcagggctggccccacaaagggtctcgtggcctttttcctcacacagaagaggtcagcaataatgtcactgtggacccagtctcactcctccaccccacacactgaagcagtagcttctgggccaaaggtcagggtgggcgggggcctgggaatacagcctgtggaggctgcttactcaacttgtgtcttaattaaaagtgacagaggaaaccacgga

SEQ ID NO: 129579 - DNA, 1451 bp, Homo sapiens
  Payload ID: 5336
  Gene Symbol: ELOVL1
  Gene Name: ELOVL fatty acid elongase 1
  Uniprot ID: Q9BW60
  ENST ID: ENST00000413844
  CDS Start-End: 175-933
aatcagcgggcgccccccgcgcggcccgcccctccccctctggtgacagaaagtcggcccagcagatgaggaagtggcaggcaggcaggctggccccggggacttctctctggccctgctccctccgagcgctccgccgttgcccgcctggcccctacggagtccttagccaggatggaggctgttgtgaacttgtaccaagaggtgatgaagcacgcagatccccggatccagggctaccctctgatggggtcccccttgctaatgacctccattctcctgacctacgtgtacttcgttctctcacttgggcctcgcatcatggctaatcggaagcccttccagctccgtggcttcatgattgtctacaacttctcactggtggcactctccctctacattgtctatgagatggttcgggtggcctggctcttcctcttctccaagttcattgagctgatggacacagtgatctttattctccgaaagaaagacgggcaggtgaccttcctacatgtcttccatcactctgtgcttccctggagctggtggtggggggtaaagattgccccgggaggaatgggctctttccatgccatgataaactcttccgtgcatgtcataatgtacctgtactacggattatctgcctttggccctgtggcacaaccctacctttggtggaaaaagcacatgacagccattcagctgatccagtttgtcctggtctcactgcacatctcccagtactactttatgtccagctgtaactaccagtacccagtcattattcacctcatctggatgtatggcaccatcttcttcatgctgttctccaacttctggtatcactcttataccaagggcaagcggctgccccgtgcacttcagcaaaatggagctccaggtattgccaaggtcaaggccaactgagaagcatggcctagataggcgcccacctaagtgcctcaggactgcaccttagggcagtgtccgtcagtgccctctccacctacacctgtgaccaaggcttatgtggtcaggactgagcaggggactggccctcccctccccacagctgctctacagggaccacggctttggttcctcacccacttcccccgggcagctccagggatgtggcctcattgctgtctgccactccagagctgggggctaaaagggctgtacagttatttccccctccctgccttaaaacttgggagaggagcactcagggctggccccacaaagggtctcgtggcctttttcctcacacagaagaggtcagcaataatgtcactgtggacccagtctcactcctccaccccacacactgaagcagtagcttctgggccaaaggtcagggtgggcgggggcctgggaatacagcctgtggaggctgcttactcaacttgtgtcttaattaaaagtgacagaggaaaccacgg

SEQ ID NO: 129580 - DNA, 1625 bp, Homo sapiens
  Payload ID: 5336
  Gene Symbol: ELOVL1
  Gene Name: ELOVL fatty acid elongase 1
  Uniprot ID: Q9BW60
  ENST ID: ENST00000621943
  CDS Start-End: 268-1107
ccccacacccccgtctctggcccccatttgcctacacccgggccttcctccaccacccctgcatttacctctctccctcctcctctcccctccctccccccgctaccctaactttgccaggcaccttttcccttccatccatcttaaaggaaggaagggacgggctgagttccccgacgagagacacacccagattttcctgcagcttggggagaggtcctcccaggagccttggtccctcctggcctgccggagtccttagccaggatggaggctgttgtgaacttgtaccaagaggtgatgaagcacgcagatccccggatccagggctaccctctgatggggtcccccttgctaatgacctccattctcctgacctacgtgtacttcgttctctcacttgggcctcgcatcatggctaatcggaagcccttccagctccgtggcttcatgattgtctacaacttctcactggtggcactctccctctacattgtctatgagttcctgatgtcgggctggctgagcacctatacctggcgctgtgaccctgtggactattccaacagccctgaggcacttaggatggttcgggtggcctggctcttcctcttctccaagttcattgagctgatggacacagtgatctttattctccgaaagaaagacgggcaggtgaccttcctacatgtcttccatcactctgtgcttccctggagctggtggtggggggtaaagattgccccgggaggaatgggctctttccatgccatgataaactcttccgtgcatgtcataatgtacctgtactacggattatctgcctttggccctgtggcacaaccctacctttggtggaaaaagcacatgacagccattcagctgatccagtttgtcctggtctcactgcacatctcccagtactactttatgtccagctgtaactaccagtacccagtcattattcacctcatctggatgtatggcaccatcttcttcatgctgttctccaacttctggtatcactcttataccaagggcaagcggctgccccgtgcacttcagcaaaatggagctccaggtattgccaaggtcaaggccaactgagaagcatggcctagataggcgcccacctaagtgcctcaggactgcaccttagggcagtgtccgtcagtgccctctccacctacacctgtgaccaaggcttatgtggtcaggactgagcaggggactggccctcccctccccacagctgctctacagggaccacggctttggttcctcacccacttcccccgggcagctccagggatgtggcctcattgctgtctgccactccagagctgggggctaaaagggctgtacagttatttccccctccctgccttaaaacttgggagaggagcactcagggctggccccacaaagggtctcgtggcctttttcctcacacagaagaggtcagcaataatgtcactgtggacccagtctcactcctccaccccacacactgaagcagtagcttctgggccaaaggtcagggtgggcgggggcctgggaatacagcctgtggaggctgcttactcaacttgtgtcttaattaaaagtgacagaggaaaccacgg

SEQ ID NO: 129581 - DNA, 3997 bp, Homo sapiens
  Payload ID: 5337
  Gene Symbol: ELOVL2
  Gene Name: ELOVL fatty acid elongase 2
  Uniprot ID: Q9NXB9
  ENST ID: ENST00000354666
  CDS Start-End: 85-975
gatagcgccgggcagagggacccggctaccctggacagcgcatcgccgcccgcccgggtcgccgcgccacagccgctgcggatcatggaacatctaaaggcctttgatgatgaaatcaatgcttttttggacaatatgtttggaccgcgagattctcgagtcagagggtggttcatgttggactcttaccttcctaccttttttcttactgtcatgtatctgctctcaatatggctgggtaacaagtatatgaagaacagacctgctctttctctcaggggtatcctcaccttgtataatcttggaatcacacttctctccgcgtacatgctggcagagctcattctctccacttgggaaggaggctacaacttacagtgtcaagatcttaccagcgcaggggaagctgacatccgggtagccaaggtgctttggtggtactatttctccaaatcagtagagttcctggacacaattttcttcgttttgcggaaaaaaacgagtcagattacttttcttcatgtatatcatcatgcttctatgtttaacatctggtggtgtgtcttgaactggataccttgtggacaaagtttctttggaccaacactgaacagttttatccacattcttatgtactcctactatggactttctgtgtttccatctatgcacaagtatctttggtggaagaaatatctcacacaggctcagctggtgcagttcgtgctcaccatcacgcacaccatgagcgccgtcgtgaaaccgtgtggcttccccttcggttgtctcatcttccagtcatcttatatgctaacgttagtcatcctcttcttaaatttttacgttcagacataccgaaaaaagccaatgaagaaagatatgcaagagccacctgcagggaaagaagtgaagaatggtttttccaaagcctacttcactgcagcaaatggagtgatgaacaagaaagcacaataaaaatgagtaacagaaaaagcacatatactagcctaacagattggcttgttttaaagcaaagactgaattgaaggttacatgttttaggataaactaatttcttttgagttcataaatcatttgtacccagaatgtattaatatattgctattaggttaatctgttaactgaatgctttgatcagcattgaggtgatgctcacctccgaggacctcagaactggtgcagcttctctctccctccctcccacagactgaacctttcgccagaagctgtccttataacgccttatacgcatacacagccaggaaacgtggagcattgtttctcacagagagtctccaaataaaaagggttttgttcagattaaaatgtttacaacaaaatgttaattatattctaaatacagggtatgttctaatctatattaagcaataatgccagtgcataatcattccatttgttcctttagcaatcaaccccagaaaatattaaaatgggatcatacacagaagatagaaaaatctagcaaaacttctctttctgtaagccagagtcttgtctatcagattcccacaaccactcctgattctaaatttagtgatatggtaatgaaattggtatttattttaaatattagttattctaaggagaaaaaaatgcttctgcaagattttcataattcaggggctgtggataggattgttcctctgtttccctaatcattcatctgttcatgtctccctcttgtgccagtcagcctaggttatacagatgccatgctccacaccacgagcagtgtacaaatctggctgcccgtttactttctgagcaagcactggagtccactccgacctttttctttgaacatgcatgctgctggaatatgtataaatcagaactagcagaagtagcagagtgatgggagcaaaataggcactgaattcgtcaactcttttttgtgagcctacttgtgaatattacctcagatacctgttgtcactcttcacaggttatttaagtttttgaagctgggaggaaaaagatggagtagcttggaaagattccagcactgagccgtgggccggtcatgagccacgataaaaaatgccagtttggcaaactcagcactcctgttccctgctcaggtatatgcgatctctaccgagaagcaagcacaaaagtagacaaaagtattaatgagtatttcctttctccataagtgcaggactgttactcactactaaactctaccaagaatggaaacaaagaatattttctgaagatttttttgaagattaatttataccctataaaataaaacttgttagcttcgatgaagtcacttcatcttctctcctgccttatttttttaaataagtttttaggtcctgacactgacatcaaatacatgcacaccagaaaggcatttccaccaccgtccccactcattagcgtccagagtgcctttctctctcggctttttttcccccctgagctctagttttaaactttctcctgttaaaaaaattgtacttttatttcatgtaaactgcccctctgaggatttgggcatattttttggaaggtgcctaatgcttaggatagtctctagggtgatgcactgcacctgcttccttcccttcagtgcggccgacccatttctgttgaacagatgtctcctgtgtgatgcccctgactcttacatttatctttctaaatcattttctgaagctgacttgctctagggtgcttcatcaccacttccatcttgcatcaccttataactgttctgtcttgttctctcccagcaatttattttaaaacaagggctagcttcaagcatgactgttaatggctcctctgtgacaaaacacaagttggaccaaggagaaagccctttggagaaactggaccctagttcagtttagatctcaaatataggctgaaatctcttaccaaagtgcgttccagataaaaatgagacttagaagacagactggtctaatatgctcactggtcatcacattcagcttattcttacgtgccagtgaggccctaaggtctcagtgcatagcatacctgccactctggatgttttcctgggcttcatatctgtatggcaaggagggagctgtccttcagcagacaaagtcaagcagctttaagtacaaggcagcttgaaacctctctgatgaaagtgaaaaatgtgggtagcttatactttcaaactaatgccagtgactagagagaggtttcattcatgatgtgtatttccaatttggtcttcaattcaagagatgcttcataaaacacttatagccttaaaccattcaagggctaattaaaaaaatagttatgaaatcttagccacaaaaaataaatcaggtaaacattttaacctgtcgttaagtgttgtaacttcaaaaaaccaaaatgcttattttaatgtgatttttctaaaactattgaaaaattaatatttctataatctattaaaaaaaatggagaatgttttctctcaaatttcctctgacccatgggaatgaaaatacttaaatactgtaaagcatatctattaataattcccccaattttttaaactaacaaaatggaatgttaactgaatggaattaaacatagcaattgtcaagccatcaaaattatatatcgaaccacttaggcatgttacggggtaaagtcctcacccctgcatttgagaaatattttattatttttattttaaggcaaaacagtgtttactgtgatgggcagaacagccttttgtatctaggagtccatttgagttctttccaatatttccatatcgttcataaatgtgtctgggggcttccttgtttggaaaatatggatatcgctttgttttcctttgaaagtaattatatcttaagaacatagtatcatgaatggagtagacagggaggctgcagaagccatttctctttgtagataaaaagcattatctatgattgttgtataataaattgatttttacattaaa

SEQ ID NO: 129582 - DNA, 1371 bp, Homo sapiens
  Payload ID: 5338
  Gene Symbol: ELOVL3
  Gene Name: ELOVL fatty acid elongase 3
  Uniprot ID: Q9HB03
  ENST ID: ENST00000370005
  CDS Start-End: 222-1034
ggcagctttgcaagtccgcgttatatatcgcagtggctgcgcccgggatagctggctgcgccgccgcgcacatgcctaggttcgacgccctcctccctttgcccaggagttccttctgtcccggctctgttccgtctcgccccgaggttcacgccatcctcggagccccagcctttcacccagcgcctccaagctttggaccttgacttctgcaaaactagatggtcacagccatgaatgtctcacatgaagtaaatcagctgttccagccctataacttcgagctgtccaaggacatgaggccctttttcgaggagtattgggcaacctcattccccatagccctgatctacctggttctcatcgctgtggggcagaactacatgaaggaacgcaagggcttcaacctgcaagggcctctcatcctctggtccttctgccttgcaatcttcagtatcctgggggcagtgaggatgtggggcattatggggactgtgctacttaccgggggcctaaagcaaaccgtgtgcttcatcaacttcatcgataattccacagtcaaattctggtcctgggtctttcttctcagcaaggtcatagaactcggagacacagccttcatcatcctgcgtaagcggccactcatctttattcactggtaccaccacagcacagtgctcgtgtacacaagctttggatacaagaacaaagtgcctgcaggaggctggttcgtcaccatgaactttggtgttcatgccatcatgtacacctactacactctgaaggctgccaacgtgaagccccccaagatgctgcccatgctcatcaccagcctgcagatcttgcagatgtttgtaggagccatcgtcagcatcctcacgtacatctggaggcaggatcagggatgccacaccacgatggaacacttattctggtccttcatcttgtatatgacctatttcatcctctttgcccacttcttctgccagacctacatcaggcccaaggtcaaagccaagaccaagagccagtgaaggtttggagagaacaatgaagctccaggctctctcttctccagggcaccaagaggctgggcttagttttgggagaatgattaggttgccttacctgcatggtttccccagaggatgtgtgccccaaggtggctggaatttttgacagacaagaagggtgaccttgggatgggggtgtggtctgttactttaatgtttctgtttttaatgtgaaggccaagcaggccctgggatgggagtggggcggaggagggtcctaagagctgattatttaatttctatccagaaatctttcttcttcttgctctgtttttttaaattaaagatttcaacaaaa

SEQ ID NO: 129583 - DNA, 3042 bp, Homo sapiens
  Payload ID: 5339
  Gene Symbol: ELOVL4
  Gene Name: ELOVL fatty acid elongase 4
  Uniprot ID: Q9GZR5
  ENST ID: ENST00000369816
  CDS Start-End: 302-1246
agattggaggggcggctgcgcgaggctgcagactggtgcagcgcactgtgctggcggctgggcctcctccacctcctcgtctttctcccgggaaccttgacgacgccttccgcttggccctgccttctgccgcatccccgccgccgcggcgccttgaggagcaggagaagacgcagccgggccgccgccgttagaggggttcccggccgccgctcgccccgtcggccgccaccgcctccggggtcagccctctctctgggtctccgctttctcctgccgccagcgcccgctcatcgccgcgatggggctcctggactcggagccgggtagtgtcctaaacgtagtgtccacggcactcaacgacacggtagagttctaccgctggacctggtccatcgcagataagcgtgtggaaaattggcctctgatgcagtctccttggcctacactaagtataagcactctttatctcctgtttgtgtggctgggtccaaaatggatgaaggaccgagaaccttttcagatgcgtctagtgctcattatctataattttgggatggttttgcttaacctctttatcttcagagagttattcatgggatcatataatgcgggatatagctatatttgccagagtgtggattattctaataatgttcatgaagtcaggatagctgctgctctgtggtggtactttgtatctaaaggagttgagtatttggacacagtgttttttattctgagaaagaaaaacaaccaagtttctttccttcatgtgtatcatcactgtacgatgtttaccttgtggtggattggaattaagtgggttgcaggaggacaagcattttttggagcccagttgaattcctttatccatgtgattatgtactcatactatgggttaactgcatttggcccatggattcagaaatatctttggtggaaacgatacctgactatgttgcaactgattcaattccatgtgaccattgggcacacggcactgtctctttacactgactgccccttccccaaatggatgcactgggctctaattgcctatgcaatcagcttcatatttctctttcttaacttctacattcggacatacaaagagcctaagaaaccaaaagctggaaaaacagccatgaatggtatttcagcaaatggtgtgagcaaatcagaaaaacaactcatgatagaaaatggaaaaaagcagaaaaatggaaaagcaaaaggagattaaattgaactgggccttaactgttgttgacagtgaggaaaaactcccatatcatataaaatttcagggaaaacagaagcaaaggagagcttgggggtggggagaaaagacaaatgtgctctatgtcctagtaactcttagactgagtaaagtgttaataccatacccagatgttttatttatgaagtttttattttaaacattttttttaaaaattagccttgatattctccagaccaaagcaatcattaagtgactttggggattctccccctgttcacatccagttgtctaaaggatgagatttttcatgtatcttatagtcactcattcttcggtctgaattttagacgatcacagaaacggtctttatgaattattttgataaattactaattatcttatctactgactgaaatcagtggtgttacattttcttgtccaaagctgaaaatgtgtatacacttaaacttgcacatttgaattcatttgctgaccggaatggtcaaatctctccacctctagtcagagtataattttggttgtaattaaatttttaaaatctgctgatctctgtagaatcttagaggcttgatgatgatggtgttggtgaaaataagaaagaattgcagtaaagtcttgtctggtgacccagagatcaccatgacttgaggcacaaatcactgtggggaaacaattttttgtgatgaaaaggcagcatttgaatactcctgttagtagcagaaatatattatgaaaattaagattattgtctgattgaaacatgaaacaactcatgtctttattagtaacatcataagatagttacatttatgtgctgttagaatatgttgatttttatcaggctttccttgttttgatttatggctgttcctgatttttcatatgtggaaatatacctacctcttccgttggaaagaacatttaaaattaaataaattttaattaaaaaatcaaggagtcttctaatgtaaattttaatgttaactttcaaatccactagtattttttttgcttttatgacaaatagcatacaccaaacatttctgtgaaactatccttctctttcaatgtgtttaattttggagtaacgttttccttgtgactaagttgcaagatcttatttattaactaggtatgaagtataaacccattttggtgcaatattcttgactccttggtgctaaagattgttaaattcaatgcttgatgttacaaggtgttgttaaaacacaaaatgaataaaagtgagagtagtcagaactataacattcaatttgctatttacaaatgaagtatttcatgtaatataagtgaacaactggaaataaagtaggaaagaatttgtatcatgttttactacataggttaattttttaagggatgttgcaaagggattactagagaaagacaaaatgtgaccaaaaaaaagcatgaatatttcttaagtatctcaacaacatgtcaaagctgcatgtgtaggatgtatgctgtttgtacaaactatttcagaatattttgtaagctataacatatttattgtgcattaaaattaaatactttttccccaaaggcatgcagtcatgagaattacagaaaatttgcaacatataaagtagtttgatctaagaggattcaacacctttgttttgttgctcagtgtgtaatgactgagatttgtaaatctttgtgaacattctgtactggttcccaagagctattcattccctgctacctgatttcagcacaataaatatacttctgctgtgggaaaaata

SEQ ID NO: 129584 - DNA, 2827 bp, Homo sapiens
  Payload ID: 5340
  Gene Symbol: ELOVL5
  Gene Name: ELOVL fatty acid elongase 5
  Uniprot ID: Q9NYP7
  ENST ID: ENST00000304434
  CDS Start-End: 200-1099
gcgccattgtgacgtcacggtcagcccacgttctgattgtagatagccggcgccttcctcttcccatcgcgcgggtcctagccaccggtgtctccttctacatccgcctctgcgccggctgccacccgcgctccctccgccgccgccgccttgctgctgctcaaagctgctgccgccccttgggctaaaaggttttcaaatggaacattttgatgcatcacttagtacctatttcaaggcattgctaggccctcgagatactagagtaaaaggatggtttcttctggacaattatatacccacatttatctgctctgtcatatatttactaattgtatggctgggaccaaaatacatgaggaataaacagccattctcttgccgggggattttagtggtgtataaccttggactcacactgctgtctctgtatatgttctgtgagttagtaacaggagtatgggaaggcaaatacaacttcttctgtcagggcacacgcaccgcaggagaatcagatatgaagattatccgtgtcctctggtggtactacttctccaaactcatagaatttatggacactttcttcttcatcctgcgcaagaacaaccaccagatcacggtcctgcacgtctaccaccatgcctcgatgctgaacatctggtggtttgtgatgaactgggtcccctgcggccactcttattttggtgccacacttaatagcttcatccacgtcctcatgtactcttactatggtttgtcgtcagtcccttccatgcgtccatacctctggtggaagaagtacatcactcaggggcagctgcttcagtttgtgctgacaatcatccagaccagctgcggggtcatctggccgtgcacattccctcttggttggttgtatttccagattggatacatgatttccctgattgctctcttcacaaacttctacattcagacctacaacaagaaaggggcctcccgaaggaaagaccacctgaaggaccaccagaatgggtccatggctgctgtgaatggacacaccaacagcttttcacccctggaaaacaatgtgaagccaaggaagctgcggaaggattgaagtcaaagaattgaaaccctccaaaccacgtcatctgattgtaagcacaatatgagttgtgccccaatgctcgttaacagctgctgtaactagtctggcctacaatagtgtgattcatgtaggacttctttcatcaattcaaaacccctagaaaacgtatacagattatataagtagggataagatttctaacatttctgggctctctgacccctgcgctagactgtggaaagggagtattattatagtatacaacactgctgttgccttattagttataacatgataggtgctgaattgtgattcacaatttaaaaacactgtaatccaaacttttttttttaactgtagatcatgcatgtgattgtaaatgtaaatttgtacaatgttgttatggtagagaaacacacatgccttaaaatttaaaaagcagggcccaaagcttattagtttaaattagggtatgtttcaagtttgtattaatttgtaatagctctgtttagaaaaaatcaaagaccatgatttatgaaactaatgtgacataatttccagtgacttgttgatgtgaaatcagacacggcaccttcagttttgtactattggctttgaatcaagcaggctcaaatctagtggaacagtcagtttaactttttaacagatcttatttttttattttgagtgccactattaatgtaaaaaggggggggctctacagcagtcgtgatgaaacttaaatatatattctttgtcctcgagattttaggaagggtgtagggtgagtaggccatttttaatttctgaagtgctaagtgtttttatacagcaaacaaaaagtcaattttgctttccaccagtgcgagagaggatgtatacttttcaagagagatgattgcctatttaccgtttgacagagtcccgtagatgagcaatggggaactggttgccagggtctaaatttggattgatttatgcactgttatctgttttgacacagatttccttgtaaaatgtgcctagtttaccaaaattaacaaagggggggaaaggaccttagaactttttaaggtaaaatcaaatatagctacagcataagagaatcgagaaatttgatagaggtaacttgtttaatgtaaatctaatagtacttgtaatttctttctgcttagaatctaaagatgtgtttagaacctcttgtttaaaaataatagactgcttatcataaaatcacatctcacacatttgaggcagtggtcaaacaggtaaagcctatgatgtgtgtcattttaaagtgtcggaatttagcctctgaataccttctccattgggggaaagatattcttggaaccactcatgacatatcttagaaggtcattgacaatgtataaactaattgttggtttgatatttatgtaaatatcagtttaccatgctttaattttgcacattcgtactatagggagcctattggttctctattagtcttgtgggttttctgtttgaaaaggagtcatggcatctgtttacatttaccttatcaaacctagaatgtgtatatttataaatgtatgtcttcattgctaggtactaatttgcagatgtctttacatatttcaatacagaaactataacattcaatagtgtgctgtcaaagtgtgcttagctcacctggatatacctacattgttaaatgtctaaacagtaatcattaaaacatttttgattacctgt

SEQ ID NO: 129585 - DNA, 580 bp, Homo sapiens
  Payload ID: 5340
  Gene Symbol: ELOVL5
  Gene Name: ELOVL fatty acid elongase 5
  Uniprot ID: Q9NYP7
  ENST ID: ENST00000370913
  CDS Start-End: 119-385
ccaccggtgtctccttctacatccgcctctgcgccggctgccacccgcgctccctccgccgccgccgccttgctgctgctcaaagctgctgccgccccttgggctaaaaggttttcaaatggaacattttgatgcatcacttagtacctatttcaaggcattgctaggccctcgaggtatcagcagctctgtcctcagaatgggtcccccacttcacacagttgtaggatggctacagcagctccaagcagcacattcagaggaagaagaaaaaatgtttcatttgtgtggttttaagcataaagaagttgtttcccagagctctttgccagctgtcatccctcaaaactcactggccacaattgcttcacatgcccctgcctgaaccagccaccagagggggttaggaccaccacagattgactagatcctaaggattctctacctggggctggagttcgggtcaggtgcccgggaagcactgtgcggtgtgggaggatgaatatgtgccaatttggaaagatgagtatttgtgggaaaatgaataaagcaaagtgtaaatcagaggtttaagttaaaa

SEQ ID NO: 129586 - DNA, 3081 bp, Homo sapiens
  Payload ID: 5340
  Gene Symbol: ELOVL5
  Gene Name: ELOVL fatty acid elongase 5
  Uniprot ID: Q9NYP7
  ENST ID: ENST00000370918
  CDS Start-End: 372-1352
aaaaaaatttcccagagacacgtggaaccgaggggccaaccccggcctaggctctccaccgcatcggattctggaatttacgatcacgaaagttctattgtcccgcgattggctcccgggccgcatgacatcatagcgcttgattcatccttcgggtcccgattggctggccgcgccattgtgacgtcacggtcagcccacgttctgattgtagatagccggcgccttcctcttcccatcgcgcgggtcctagccaccggtgtctccttctacatccgcctctgcgccggctgccacccgcgctccctccgccgccgccgccttgctgctgctcaaagctgctgccgccccttgggctaaaaggttttcaaatggaacattttgatgcatcacttagtacctatttcaaggcattgctaggccctcgagatactagagtaaaaggatggtttcttctggacaattatatacccacatttatctgctctgtcatatatttactaattgtatggctgggaccaaaatacatgaggaataaacagccattctcttgccgggggattttagtggtgtataaccttggactcacactgctgtctctgtatatgttctgtgagtccaaaagggagcaaccccgtcgatctgcctgtgcctcacgaactgatccttcgactcagcagcagctgccagaaaacaggttagtaacaggagtatgggaaggcaaatacaacttcttctgtcagggcacacgcaccgcaggagaatcagatatgaagattatccgtgtcctctggtggtactacttctccaaactcatagaatttatggacactttcttcttcatcctgcgcaagaacaaccaccagatcacggtcctgcacgtctaccaccatgcctcgatgctgaacatctggtggtttgtgatgaactgggtcccctgcggccactcttattttggtgccacacttaatagcttcatccacgtcctcatgtactcttactatggtttgtcgtcagtcccttccatgcgtccatacctctggtggaagaagtacatcactcaggggcagctgcttcagtttgtgctgacaatcatccagaccagctgcggggtcatctggccgtgcacattccctcttggttggttgtatttccagattggatacatgatttccctgattgctctcttcacaaacttctacattcagacctacaacaagaaaggggcctcccgaaggaaagaccacctgaaggaccaccagaatgggtccatggctgctgtgaatggacacaccaacagcttttcacccctggaaaacaatgtgaagccaaggaagctgcggaaggattgaagtcaaagaattgaaaccctccaaaccacgtcatctgattgtaagcacaatatgagttgtgccccaatgctcgttaacagctgctgtaactagtctggcctacaatagtgtgattcatgtaggacttctttcatcaattcaaaacccctagaaaacgtatacagattatataagtagggataagatttctaacatttctgggctctctgacccctgcgctagactgtggaaagggagtattattatagtatacaacactgctgttgccttattagttataacatgataggtgctgaattgtgattcacaatttaaaaacactgtaatccaaacttttttttttaactgtagatcatgcatgtgattgtaaatgtaaatttgtacaatgttgttatggtagagaaacacacatgccttaaaatttaaaaagcagggcccaaagcttattagtttaaattagggtatgtttcaagtttgtattaatttgtaatagctctgtttagaaaaaatcaaagaccatgatttatgaaactaatgtgacataatttccagtgacttgttgatgtgaaatcagacacggcaccttcagttttgtactattggctttgaatcaagcaggctcaaatctagtggaacagtcagtttaactttttaacagatcttatttttttattttgagtgccactattaatgtaaaaaggggggggctctacagcagtcgtgatgaaacttaaatatatattctttgtcctcgagattttaggaagggtgtagggtgagtaggccatttttaatttctgaagtgctaagtgtttttatacagcaaacaaaaagtcaattttgctttccaccagtgcgagagaggatgtatacttttcaagagagatgattgcctatttaccgtttgacagagtcccgtagatgagcaatggggaactggttgccagggtctaaatttggattgatttatgcactgttatctgttttgacacagatttccttgtaaaatgtgcctagtttaccaaaattaacaaagggggggaaaggaccttagaactttttaaggtaaaatcaaatatagctacagcataagagaatcgagaaatttgatagaggtaacttgtttaatgtaaatctaatagtacttgtaatttctttctgcttagaatctaaagatgtgtttagaacctcttgtttaaaaataatagactgcttatcataaaatcacatctcacacatttgaggcagtggtcaaacaggtaaagcctatgatgtgtgtcattttaaagtgtcggaatttagcctctgaataccttctccattgggggaaagatattcttggaaccactcatgacatatcttagaaggtcattgacaatgtataaactaattgttggtttgatatttatgtaaatatcagtttaccatgctttaattttgcacattcgtactatagggagcctattggttctctattagtcttgtgggttttctgtttgaaaaggagtcatggcatctgtttacatttaccttatcaaacctagaatgtgtatatttataaatgtatgtcttcattgctaggtactaatttgcagatgtctttacatatttcaatacagaaactataacattcaatagtgtgctgtcaaagtgtgcttagctcacctggatatacctacattgttaaatgtctaaacagtaatcattaaaacatttttgattacctgtg

SEQ ID NO: 129587 - DNA, 2875 bp, Homo sapiens
  Payload ID: 5340
  Gene Symbol: ELOVL5
  Gene Name: ELOVL fatty acid elongase 5
  ENST ID: ENST00000542638
  CDS Start-End: 372-1160
aaaaaaatttcccagagacacgtggaaccgaggggccaaccccggcctaggctctccaccgcatcggattctggaatttacgatcacgaaagttctattgtcccgcgattggctcccgggccgcatgacatcatagcgcttgattcatccttcgggtcccgattggctggccgcgccattgtgacgtcacggtcagcccacgttctgattgtagatagccggcgccttcctcttcccatcgcgcgggtcctagccaccggtgtctccttctacatccgcctctgcgccggctgccacccgcgctccctccgccgccgccgccttgctgctgctcaaagctgctgccgccccttgggctaaaaggttttcaaatggaacattttgatgcatcacttagtacctatttcaaggcattgctaggccctcgagatactagagtaaaaggatggtttcttctggacaattatatacccacatttatctgctctgtcatatatttactaattgtatggctgggaccaaaatacatgaggaataaacagccattctcttgccgggggattttagtggtgtataaccttggactcacactgctgtctctgtatatgttctgtgagttagtaacaggagtatgggaaggcaaatacaacttcttctgtcagggcacacgcaccgcaggagaatcagatatgaagattatccgtgtcctctggtggtactacttctccaaactcatagaatttatggacactttcttcttcatcctgcgcaagaacaaccaccagatcacggtcctgcacgtctaccaccatgcctcgatgctgaacatctggtggtttgtgatgaactgggtcccctgcggccactcttcagtttgtgctgacaatcatccagaccagctgcggggtcatctggccgtgcacattccctcttggttggttgtatttccagattggatacatgatttccctgattgctctcttcacaaacttctacattcagacctacaacaagaaaggggcctcccgaaggaaagaccacctgaaggaccaccagaatgggtccatggctgctgtgaatggacacaccaacagcttttcacccctggaaaacaatgtgaagccaaggaagctgcggaaggattgaagtcaaagaattgaaaccctccaaaccacgtcatctgattgtaagcacaatatgagttgtgccccaatgctcgttaacagctgctgtaactagtctggcctacaatagtgtgattcatgtaggacttctttcatcaattcaaaacccctagaaaacgtatacagattatataagtagggataagatttctaacatttctgggctctctgacccctgcgctagactgtggaaagggagtattattatagtatacaacactgctgttgccttattagttataacatgataggtgctgaattgtgattcacaatttaaaaacactgtaatccaaacttttttttttaactgtagatcatgcatgtgattgtaaatgtaaatttgtacaatgttgttatggtagagaaacacacatgccttaaaatttaaaaagcagggcccaaagcttattagtttaaattagggtatgtttcaagtttgtattaatttgtaatagctctgtttagaaaaaatcaaagaccatgatttatgaaactaatgtgacataatttccagtgacttgttgatgtgaaatcagacacggcaccttcagttttgtactattggctttgaatcaagcaggctcaaatctagtggaacagtcagtttaactttttaacagatcttatttttttattttgagtgccactattaatgtaaaaaggggggggctctacagcagtcgtgatgaaacttaaatatatattctttgtcctcgagattttaggaagggtgtagggtgagtaggccatttttaatttctgaagtgctaagtgtttttatacagcaaacaaaaagtcaattttgctttccaccagtgcgagagaggatgtatacttttcaagagagatgattgcctatttaccgtttgacagagtcccgtagatgagcaatggggaactggttgccagggtctaaatttggattgatttatgcactgttatctgttttgacacagatttccttgtaaaatgtgcctagtttaccaaaattaacaaagggggggaaaggaccttagaactttttaaggtaaaatcaaatatagctacagcataagagaatcgagaaatttgatagaggtaacttgtttaatgtaaatctaatagtacttgtaatttctttctgcttagaatctaaagatgtgtttagaacctcttgtttaaaaataatagactgcttatcataaaatcacatctcacacatttgaggcagtggtcaaacaggtaaagcctatgatgtgtgtcattttaaagtgtcggaatttagcctctgaataccttctccattgggggaaagatattcttggaaccactcatgacatatcttagaaggtcattgacaatgtataaactaattgttggtttgatatttatgtaaatatcagtttaccatgctttaattttgcacattcgtactatagggagcctattggttctctattagtcttgtgggttttctgtttgaaaaggagtcatggcatctgtttacatttaccttatcaaacctagaatgtgtatatttataaatgtatgtcttcattgctaggtactaatttgcagatgtctttacatatttcaatacagaaactataacattcaatagtgtgctgtcaaagtgtgcttagctcacctggatatacctacattgttaaatgtctaaacagtaatcattaaaacatttttgattacctgtg

SEQ ID NO: 129588 - DNA, 3090 bp, Homo sapiens
  Payload ID: 5341
  Gene Symbol: ELOVL6
  Gene Name: ELOVL fatty acid elongase 6
  Uniprot ID: Q9H5J4
  ENST ID: ENST00000302274
  CDS Start-End: 342-1139
cacgagggggaggagatttccctgtagacgagtaaaaagggtgatggacaaacgtgcgggcactaagaccgcaaggcattcatttcctcctacggtggatgcggacgccgggaggaggagagccccagagagaggagctgggagcggaggcgcaggcaatgctcagccctggatgtagctgagaggctgggagaagagacgaccgctggagaccgagcggcgtggggaagacctaggggggtgggtgggggaagcagacaggagaacactcgaaatcaagcgctttacagattattttattttgtatagagaacacgtagcgactccgaagatcagccccaatgaacatgtcagtgttgactttacaagaatatgaattcgaaaagcagttcaacgagaatgaagccatccaatggatgcaggaaaactggaagaaatctttcctgttttctgctctgtatgctgcctttatattcggtggtcggcacctaatgaataaacgagcaaagtttgaactgaggaagccattagtgctctggtctctgacccttgcagtcttcagtatattcggtgctcttcgaactggtgcttatatggtgtacattttgatgaccaaaggcctgaagcagtcagtttgtgaccagggtttttacaatggacctgtcagcaaattctgggcttatgcatttgtgctaagcaaagcacccgaactaggagatacaatattcattattctgaggaagcagaagctgatcttcctgcactggtatcaccacatcactgtgctcctgtactcttggtactcctacaaagacatggttgccgggggaggttggttcatgactatgaactatggcgtgcacgccgtgatgtactcttactatgccttgcgggcggcaggtttccgagtctcccggaagtttgccatgttcatcaccttgtcccagatcactcagatgctgatgggctgtgtggttaactacctggtcttctgctggatgcagcatgaccagtgtcactctcactttcagaacatcttctggtcctcactcatgtacctcagctaccttgtgctcttctgccatttcttctttgaggcctacatcggcaaaatgaggaaaacaacgaaagctgaatagtgttggaactgaggaggaagccatagctcagggtcatcaagaaaaataatagacaaaagaaaatggcacaaggaatcacacgtggtgcagctaaaacaaaacaaaacatgagcaaacacaaaacccaaggcagcttagggataattaggttgatttaacccagtaagtttatgatccttttagggtgaggactcactgagtgcacctccatctccaagcactgctgctggaagaccccattccctctttatctatcaactctaggacaagggagaacaaaagcaagccagaagcagaggagactaatcaaaggcaaacaaaggctattaacacataggaaaaaatgtatttactaagtgtcacatttctctaagatgaaagatttttactctagaaactgtgcgagcacaacacacacaatcctttctaactttatggacactaaactggagccaatagaaaagacaaaaatgaaagagacacagggtgtatatctagaacgataatgcttttgcagaaactaaagcctttttaagaaatgccagctgctgtagaccccatgagaaaagatgtcttaatcatccttatgaaaacagatgtaaacaactatatttcaactaacttcatcttcactgcatagcctcaggctagtgagtttgccaaaaccaaagggggtgaatacttccccaagattcttcctgggaggatggaaacagtgcagcccaggtcccatgggggcagctccatcccagagcatttctgatagttgaactgtaatttctactcttaagtgagatatgaagcattatccttttgttcagttgccccgggcttttgaacagaagagtaaatacagaattgaaaaagataaacactcaaccaaacaatgtgaaaacgggttctgtagtatttgtaaaaaggcccggcccaggaccactgtgagctggaaaagggagaaaggcagtgggaaaagaggtgagccgaagatcaattcgacagacagatggtgtgtatgcccctccctgtttgacttcacacacactcataactttccaaatgaaaccccacagtatagcgcatattttcgatatttttgtgaattccaaaaggaaatcacagggctgttcgaaatattgggggaacactgtgtttctgcatcatctgcatttgctccccaagcaatgtagaggtgtttaaagggccctctgctggctgagtggcaatactacaacaaacttcaaggcaagtttggctgaaaacagttgacaacaaagggcccccatacacttatccctcaaattttaagtgatatgaaatacttgtcatgtctttggccaaatcagaagatattcatcctgcttcaagtcagcttcagaaatgttttaaaagggactttagctctggaactcaaaatcaatttattaagagccatattctttaaaaaaaaaaagctggataatattctctgtaatatttcagtcctttacaagccaaatacatgtgtcaatgtttctagtatttcaaagaagcaattatgtaaagttgttcaatgtgacataatagtattataattggttaagtagcttaatgattaggcaaactagatgaaaagattaggggcttccacactgcatagattacacgcacatagccacgcatacacacacagacacacagatgtggggtacactgaacttcaaagcccaaatgaatagaaacacattttctggctagcagaaaaaaacaaaacaaaactgttgtttctctttcttgctttgagagtgtacagtaaaagggattttttcgaattatttttatattattttagctttaattgtgctgtcgttcatgaaacagagctgctctgcttttctgtcagagatggcaagggctttttcagcatctcgtttatgtgtggaatttaaaaagaataaagttttattccattctg

SEQ ID NO: 129589 - DNA, 6454 bp, Homo sapiens
  Payload ID: 5341
  Gene Symbol: ELOVL6
  Gene Name: ELOVL fatty acid elongase 6
  Uniprot ID: Q9H5J4
  ENST ID: ENST00000394607
  CDS Start-End: 165-962
gtagacgagtaaaaagggtgatggacaaacgtgcgggcactaagaccgcaaggcattcatttcctcctacggtggatgcggacgccgggaggaggagagccccagagagaggagctgggagcggaggcgcagagaacacgtagcgactccgaagatcagccccaatgaacatgtcagtgttgactttacaagaatatgaattcgaaaagcagttcaacgagaatgaagccatccaatggatgcaggaaaactggaagaaatctttcctgttttctgctctgtatgctgcctttatattcggtggtcggcacctaatgaataaacgagcaaagtttgaactgaggaagccattagtgctctggtctctgacccttgcagtcttcagtatattcggtgctcttcgaactggtgcttatatggtgtacattttgatgaccaaaggcctgaagcagtcagtttgtgaccagggtttttacaatggacctgtcagcaaattctgggcttatgcatttgtgctaagcaaagcacccgaactaggagatacaatattcattattctgaggaagcagaagctgatcttcctgcactggtatcaccacatcactgtgctcctgtactcttggtactcctacaaagacatggttgccgggggaggttggttcatgactatgaactatggcgtgcacgccgtgatgtactcttactatgccttgcgggcggcaggtttccgagtctcccggaagtttgccatgttcatcaccttgtcccagatcactcagatgctgatgggctgtgtggttaactacctggtcttctgctggatgcagcatgaccagtgtcactctcactttcagaacatcttctggtcctcactcatgtacctcagctaccttgtgctcttctgccatttcttctttgaggcctacatcggcaaaatgaggaaaacaacgaaagctgaatagtgttggaactgaggaggaagccatagctcagggtcatcaagaaaaataatagacaaaagaaaatggcacaaggaatcacacgtggtgcagctaaaacaaaacaaaacatgagcaaacacaaaacccaaggcagcttagggataattaggttgatttaacccagtaagtttatgatccttttagggtgaggactcactgagtgcacctccatctccaagcactgctgctggaagaccccattccctctttatctatcaactctaggacaagggagaacaaaagcaagccagaagcagaggagactaatcaaaggcaaacaaaggctattaacacataggaaaaaatgtatttactaagtgtcacatttctctaagatgaaagatttttactctagaaactgtgcgagcacaacacacacaatcctttctaactttatggacactaaactggagccaatagaaaagacaaaaatgaaagagacacagggtgtatatctagaacgataatgcttttgcagaaactaaagcctttttaagaaatgccagctgctgtagaccccatgagaaaagatgtcttaatcatccttatgaaaacagatgtaaacaactatatttcaactaacttcatcttcactgcatagcctcaggctagtgagtttgccaaaaccaaagggggtgaatacttccccaagattcttcctgggaggatggaaacagtgcagcccaggtcccatgggggcagctccatcccagagcatttctgatagttgaactgtaatttctactcttaagtgagatatgaagcattatccttttgttcagttgccccgggcttttgaacagaagagtaaatacagaattgaaaaagataaacactcaaccaaacaatgtgaaaacgggttctgtagtatttgtaaaaaggcccggcccaggaccactgtgagctggaaaagggagaaaggcagtgggaaaagaggtgagccgaagatcaattcgacagacagatggtgtgtatgcccctccctgtttgacttcacacacactcataactttccaaatgaaaccccacagtatagcgcatattttcgatatttttgtgaattccaaaaggaaatcacagggctgttcgaaatattgggggaacactgtgtttctgcatcatctgcatttgctccccaagcaatgtagaggtgtttaaagggccctctgctggctgagtggcaatactacaacaaacttcaaggcaagtttggctgaaaacagttgacaacaaagggcccccatacacttatccctcaaattttaagtgatatgaaatacttgtcatgtctttggccaaatcagaagatattcatcctgcttcaagtcagcttcagaaatgttttaaaagggactttagctctggaactcaaaatcaatttattaagagccatattctttaaaaaaaaaaagctggataatattctctgtaatatttcagtcctttacaagccaaatacatgtgtcaatgtttctagtatttcaaagaagcaattatgtaaagttgttcaatgtgacataatagtattataattggttaagtagcttaatgattaggcaaactagatgaaaagattaggggcttccacactgcatagattacacgcacatagccacgcatacacacacagacacacagatgtggggtacactgaacttcaaagcccaaatgaatagaaacacattttctggctagcagaaaaaaacaaaacaaaactgttgtttctctttcttgctttgagagtgtacagtaaaagggattttttcgaattatttttatattattttagctttaattgtgctgtcgttcatgaaacagagctgctctgcttttctgtcagagatggcaagggctttttcagcatctcgtttatgtgtggaatttaaaaagaataaagttttattccattctgtgtgaatggtttgagcagtgaacaaagaatccatgcaaaccaagtcatgactggaagaaatggggagtgggggacagtgcaggggaggaaagctgttacatctatgttaaatgattgtgagcagtctataatgtcttgatgttggttcataggtgagacacaactgatggaggaatgtattataaattatgcaaaatctgacatgagctgaaaagacaggtccttttataagagctaatagatgcttaggatgcaaatgttattttgagcttcgcaaatacatgataccgtgcaataagccttttttccttataacagaaaatgagaataattaaaatgaggagaaggccacataacagttgacttgaatttaattgaaggacccattggaggctcatctggttgatttaattatttaattgagtgatttattgcagatctcttaatgcaggttagaaacggaagtgagcataaaccttaaaaagactctaaatgatgcttccaaagcactttcattttggtattaggttcatgtttgtttgtctttacttgtaaaataatttggaatttttgtttacagggtgaatgtcttaatagttttaaaattagctaaatatatctaaaggcatttccaatgtttatcatgggaggaaaaaagccacattttttttaaaacaaaacaaaacaaaacaaaattttggtaatataggttcaatacactgtttttaacatctcagcttagccgctttaatcatatcaagatatgaggctggatcactggcccatgacaaatctgaaacctaccagagaattgactgctgcatagataatcctgctgccagttaacattccagaaaaacttgggcaggcaagtttttatagctgccccactatgctgcaatagagtatctttctattgaagattttccactgcatcccgatcctactatggtgaaagcattgttcttgggctaaaaaaaaatcctttatttcatacacacatgatttcatacactaggtctgagcatcaagccaagtccatgagtttgcaatgaagttctagtgagaaatgctctattcataaagcagggggtttacgtggaccttctagtgttgcttatgggaaaagagtaactaccatattacatctaacgcaaggccaaagtaccaaattaaaaccatggattgaggtggttattcgaagtcacttactcccatccttctaattatgctccactacaaaagtaaggggagaagagggaatactttacatgtacattgctagagggaaaagaaaggcttgattatatcccctcgcttctccacctctctgctcatgtaaagaaactgatgagaaaagagactaatatgtctagactgagttagaaacttcatatgagtgggttttgtagaattgatgggaaagacagtgggaacctagaagaacagaaagagacccacagaatgtctttctttttttttttttttttttttttgaggtggattcttgctgttgttgcccaggctggagtgcagtggcgcgatctagactcactgcaacctccgcctcccaggttccagcaattctcctgcctcagcctcccaaatagctgaggttacaggcgcccgccaccacacccagctaatttttgtatttttagtagagacagggtttcaccatgttggccaggctggtctcgagctcctgacctcaggggatccacccgccttggtctcccaaagtgctgggattataggcgtgagccaccgtgcctggcccagaatgtttttttaaatcagatgtagcatcttcataaggtaaagcctgtcacatcagagtaacaaagctcctggagtacagtgatgctagagtagaatgttccagaagtctggccatagccccagcttctgaattacctgggagagacaagatgctcaggttactattttttctttattctgatagtacagcctctactcagagaccacggtgtgtgtcacacaaccgaggcagctagggcatattctgagggcttttttttttttttggtttccttaatgattctttaacagagtaactggattggccaaggtctgattcaagaggctgtgaggagagtagagaacaaatagactttgcctctcagagttcagagctttaagttgtataagcatggtccatgtccacctcttgtagacacttattccttaaaagtttccatcatgaaaaataatatcatgtcaaaattttataagcacccagaatgtcccagtagtcaaatgtagtgtctttctccagtctctgttttcgataataaataccttgctctcaatttaggatgatcgtaaagcctatgttcatgctgtgagtcattgtctcccacagcttttgaaacatcgttctttgtcttttctatacaacacctgattctttgtgcctcagactcattgctatcaggaagagactttgccaagatccaccaccacatttggccagtagtgtatacacattaaagtgagagctgatgaaatcacaatgctctattttgttccgacaatcagtatgaaggggtaggtcccagtttgccaatgagcaacagcctctgtatgctggtgtccaagacttacacaaaacaagtgtcagtgcagtcacagcattttcttgaatgctgttgtgacagactccagttataaacatctgcgagccatatggcacaactcatagctaaagaggccggtacagggcacatgcacagagctttgaagaacatacacaaacctgttgaatcaagttactttcctcatcctcagagactttgacaattcagagctcacagatggcagggggaattctcaggcttcccttcctcctgattgacactttttaaaggaagtgatgtggaagttgttctagaagttagatggacagtgggagcacattcgtgagtggggcttgggagagctcaaaagtggcactttgattttaggctgggcaggcagaagtctcacagtaaaatatatttcactagacgtccaaaccaacactgcattgtagtaacctcttctgaagtaactggttaaattaataactggtcccataagtcagggtcaagccacatttataacccattcgggccggccatgaagggttctgactcgacattggtatttaaatgctgttactttcccaatgcttagtagcacttgagactttatttccatcgacaaaaactaagaaggccacagaagtagcctaacagtcctccctggtcatactcgtttcaaacaggtctgcctgtctagacatattcaggcaggaggttgcttgctgctatcttgaaaaccactggaagattcagcttcttggggacctcagagcccatattcatatggaagcccacccatataagcctcacagagcaaatcacagcaatgttgaagttgttattttcaagtgcttatttcacgacattaaaaaaaatattttttcctggtgtattaaaattaaaaataaaatcataacttttgatttaaaatcaaa

SEQ ID NO: 129590 - DNA, 607 bp, Homo sapiens
  Payload ID: 5341
  Gene Symbol: ELOVL6
  Gene Name: ELOVL fatty acid elongase 6
  ENST ID: ENST00000514184
  CDS Start-End: 113-409
ctctcgcctatccactatcctcacactcagcatcccctgtctgtacgagattaaggagctctgccgtccgcagggcctggagaacacgtagcgactccgaagatcagccccaatgaacatgtcagtgttgactttacaagaatatgaattcgaaaagcagttcaacgagaatgaagccatccaatggatgcaggaaaactggaagaaatctttcctgttttctgctctgtatgctgcctttatattcggtggtcggcacctaatgaataaacgagcaaagtttgaactgaggaagccattagtgctctggtctctgacccttgcagtcttcaggtgctataacaacttgaaacagctgacattatattcggtgctcttcgaactggtgcttatatggtgtacattttgatgaccaaaggcctgaagcagtcagtttgtgaccagggtttttacaatggacctgtcagcaaattctgggcttatgcatttgtgctaagcaaagcacccgaactaggagatacaatattcattattctgaggaagcagaagctgatcttcctgcactggtatcaccacatcactgtgctcctgtactcttggtactcct

SEQ ID NO: 129591 - DNA, 610 bp, Homo sapiens
  Payload ID: 5341
  Gene Symbol: ELOVL6
  Gene Name: ELOVL fatty acid elongase 6
  ENST ID: ENST00000506625
  CDS Start-End: 201-610
attcccttcactggtgatctcaacgtagatttgcccggagttctcttgcaagagagctggcaggttttactatttcccaatcgtttactcgccaagctctcgggtccacgcgccgcggggatgcgccctgcaagctgaaacttcattcaaagcaaggcggcccacgagagaacacgtagcgactccgaagatcagccccaatgaacatgtcagtgttgactttacaagaatatgaattcgaaaagcagttcaacgagaatgaagccatccaatggatgcaggaaaactggaagaaatctttcctgttttctgctctgtatgctgcctttatattcggtggtcggcacctaatgaataaacgagcaaagtttgaactgaggaagccattagtgctctggtctctgacccttgcagtcttcagtatattcggtgctcttcgaactggtgcttatatggtgtacattttgatgaccaaaggcctgaagcagtcagtttgtgaccagggtttttacaatggacctgtcagcaaattctgggcttatgcatttgtgctaagcaaagcacccgaactaggagatacaatattcattattctgaggaagcagaagct

SEQ ID NO: 129592 - DNA, 458 bp, Homo sapiens
  Payload ID: 5341
  Gene Symbol: ELOVL6
  Gene Name: ELOVL fatty acid elongase 6
  ENST ID: ENST00000503885
  CDS Start-End: 133-458
ccacttccggctactagcctctctcgcctatccactatcctcacactcagcatcccctgtctgtacgagattaaggagctctgccgtccgcagggcctggagaacacgtagcgactccgaagatcagccccaatgaacatgtcagtgttgactttacaagaatatgaattcgaaaagcagttcaacgagaatgaagccatccaatggatgcaggaaaactggaagaaatctttcctgttttctgctctgtatgctgcctttatattcggtggtcggcacctaatgaataaacgagcaaagtttgaactgaggaagccattagtgctctggtctctgacccttgcagtcttcagtatattcggtgctcttcgaactggtgcttatatggtgtacattttgatgaccaaaggcctgaagcagtcagtttgtgaccagggtttttacaatggacctgtcag

SEQ ID NO: 129593 - DNA, 3827 bp, Homo sapiens
  Payload ID: 5342
  Gene Symbol: ELOVL7
  Gene Name: ELOVL fatty acid elongase 7
  Uniprot ID: A1L3X0
  ENST ID: ENST00000425382
  CDS Start-End: 150-995
aacccagtcggcggccgggacagcgggggccgctgtgaggagctccgcgctcgcgctgccagtcgccgccctctctcccgcgcgcgcccggcgcttcggctccgctccctgtgcgaacccattaaaagagccagtaaatcctgtggaaaatggccttcagtgatcttacatcgaggactgtgcatctttatgataattggatcaaagatgctgatccaagagttgaagattggctcctcatgtcctcgcctctgccacaaaccatcctcctaggattctatgtctattttgtcacttccttgggaccaaagctcatggaaaatcgcaagccctttgaactcaagaaagcaatgataacgtacaattttttcatagtactcttttctgtgtatatgtgttatgagtttgtgatgtctggctggggtataggttattcatttcgatgtgacattgttgactattcacggtcacccacagctttgaggatggcacgtacctgctggctttattacttctccaaatttattgagctattagatacgatcttttttgttctgcgcaagaaaaatagccaagtgactttccttcatgtattccatcataccatcatgccgtggacctggtggtttggagtcaaatttgctgcaggtggtttgggaacattccatgcccttctaaatacagctgtacatgtagtcatgtattcctactatggactttctgcattggggccagcctaccagaagtatttgtggtggaaaaaatatttgacatcattacagcttgtccagtttgttattgtcgccatccacataagccagttctttttcatggaggattgcaagtatcagtttccagtctttgcgtgcatcattatgagttacagtttcatgtttctgctgctctttctccatttttggtaccgtgcttacaccaaaggtcagaggttgcccaaaactgtgaaaaatggaacttgcaaaaacaaagataattgaagcccaacataagtctatgatcgaaactgatacattgtcttccttgacaatcaagagatatttacctatgcagtgcattttgtatatttttcaaaactaagagcttgtatttttatggtaagttattgggatgtctgatatttgagagcccgaagcttccagataacagtcttctgataattagagcctacagcagccagaatttgtttttgtttttgtttttgtttttttagctgcttttaaacctaatccaaaggttttgtttaaaacattttgttgcagtgaaaaaaagatatgaagcaatacagtactcttcaaagaagtccaataaagatgaaaaatatcattaggtattttgagcacagacggagatccatgtgataaaatagattccttctgctgggtctggaaagtctggaaaccacctgtaggccctggctttgtcatttattgactgtattcagaagatactatatttgctctagagttaactcccattttagcaagctagcacaggtgaaaattgagtgagtttttgataacttgtcatttaaaatcattaatgataattttcaatggatcttttcagtagccatcaccagttttgctgataagacttcctcacaacccatttgttgtacaaactgtttcaaagtagcaatcctttgggttagtacacttgataccaagtttcattcagttgattattttcaaaacaaggtgatttgttttaatgggttaatgaatactttgctattactgttttacaattaactttgtatatctctggaaagaggtgaatttgtcaatgaaaaaagtattgtgtagttcagtgggaaaaacctgttgtctgttatagtatcacatcactttcttacattgtcatggtttaaattattatcttggtgaaatatataggttagatacttaaatgttcatattattagcacactacaggtactacccttaaatcataaataatattacccattgtacacagtttccagatatgagttagagtggctgtgaagcaactagaggcaaattgtggcacagagaatatccaggggaaaattgattatgtaagcaagggctgttctactttgagagagagacagacagactacataatagtaatatattatataattaatgttatagatacactgaacaataaaacattttctggaattatgaattaattaacaacctggatttctgtttccagacctataaaccatgtaatgaaggactgaaattcgtttggcatacactttgtttctttaaaattgctagtttctttctgttatttttacattttcttgtcagagaatcaaaactattagtcagtagagttttgtccatgaaataatatttggacatttgtgaatttttccctattttttttcttcttttatttatactcaattttgaagcactgtttatgtttgtaggactttaaacaattagtacttaaagccccagttaattttgaacacacagagatacttattgtactctgtgtacagtaagtatttttatgtttacacttaccagattcataaggttatttgcctttaagtgatcttttgtgattttacttgattacagcatgagaaggtaaaggttgataaatgggagtaattacatatatatatataatttattatttttttttctgaagcagagttttactcttgttgcccaggctagagtgcaatggcacaatctcggttcactgcaacctctgcctcccaggttcaagtgattctcctgtctcagcctcccaagtagctgggattacaggtgcccgccaccatgctcagctaatttttgtatttttagtagagacagggttggccaggctggtctcgagctcctgacctcaggtgatcctcccacctcggcctcccaaagttctgggattacaggggtgagccactgtgcccggccataattttatatttttagaaaataaagaatgaaggacaaaagagcacagctaaatgaaactgctgctctaatttattccactggaaaggtctcaggactccttaactgttttccaggtttggctcttcatatctaacctgtgctaaaatgagaaggtatgctaggtgctgttagaaatcacaccatttccaaagaacccaagtagtatagagaccaaaatgaggcaaaaataaaagagatgaaacaggagagtttatttcttgcatactttccgaccttcatcatacaacctctcctaacctccctgtagtctttaaaatgtttaacttgcctataagctaacatgtaataaaacacatactcaattatatgaatagaagtggagagccagaatgctacaaaagaaatcacagctgctagaagtatcctccatagaaacatcaacatgattgtggatcaaaatgattttcactggatatggaatttgtatgggccatatttattaaaagagttctgtgtggtcacatagagttcctttgggatttcatcccacttttcaggacttaatttgtttgggtttgcttacctaacaagcaacaacaacaacaaaataaatagttccaaaatctagtttattacataaatctctatgaatccttgagggcctatatctatattataaataaatacaaatatagatttttaaatatctatgggactttgccatttacagccttaagtataaaattacgagattatattctttccattaccctttatttctgctaactttttaaagactggaacattctgtggatgttgtcaaagtttgagtttgtttttccctgtgtattataataaatttgtggtattgcatgt

SEQ ID NO: 129594 - DNA, 4165 bp, Homo sapiens
  Payload ID: 5342
  Gene Symbol: ELOVL7
  Gene Name: ELOVL fatty acid elongase 7
  ENST ID: ENST00000505959
  CDS Start-End: 528-1334
cagtcgccgccctctctcccgcgcgcgcccggcgcttcggctccgctccctgtgcggcatttaaacttccctcttagaactgcttttgtggcatcccataagttttgaacccattaaaagagccagtaaatcctgtggaaaatggccttcagtgatcttacatcgaggactgtgcatctttatgataattggatcaaagatgctggttgattcttacctatcaactagaaattgcaagtctaccaaattcaggaaggaaatgcacacctcttggcacctaccacagatgaaattatagtcaaatttacaacgatttcagcaaagatacactgtttcatcatttgcagctttctcagcagactactaaagaccaaatttatctcactaaaagtgttcccaacagtttttcctttgaggaatgccaaggttctttcttcttcatttcattagtacttggaatcttaaagatgtactctttgagccagtacctgctacttaagaagagaatactctcttagaagcagctgatggaaaagcccattaatattctatatccaagagttgaagattggctcctcatgtcctcgcctctgccacaaaccatcctcctaggattctatgtctattttgtcacttccttgggaccaaagctcatggaaaatcgcaagccctttgaactcaagaaagcaatgataacgtacaattttttcatagtactcttttctgtgtatatgtgttatgagtttgtgatgtctggctggggtataggttattcatttcgatgtgacattgttgactattcacggtcacccacagctttgaggatggcacgtacctgctggctttattacttctccaaatttattgagctattagatacgatcttttttgttctgcgcaagaaaaatagccaagtgactttccttcatgtattccatcataccatcatgccgtggacctggtggtttggagtcaaatttgctgcaggtggtttgggaacattccatgcccttctaaatacagctgtacatgtagtcatgtattcctactatggactttctgcattggggccagcctaccagaagtatttgtggtggaaaaaatatttgacatcattacagcttgtccagtttgttattgtcgccatccacataagccagttctttttcatggaggattgcaagtatcagtttccagtctttgcgtgcatcattatgagttacagtttcatgtttctgctgctctttctccatttttggtaccgtgcttacaccaaaggtcagaggttgcccaaaactgtgaaaaatggaacttgcaaaaacaaagataattgaagcccaacataagtctatgatcgaaactgatacattgtcttccttgacaatcaagagatatttacctatgcagtgcattttgtatatttttcaaaactaagagcttgtatttttatggtaagttattgggatgtctgatatttgagagcccgaagcttccagataacagtcttctgataattagagcctacagcagccagaatttgtttttgtttttgtttttgtttttttagctgcttttaaacctaatccaaaggttttgtttaaaacattttgttgcagtgaaaaaaagatatgaagcaatacagtactcttcaaagaagtccaataaagatgaaaaatatcattaggtattttgagcacagacggagatccatgtgataaaatagattccttctgctgggtctggaaagtctggaaaccacctgtaggccctggctttgtcatttattgactgtattcagaagatactatatttgctctagagttaactcccattttagcaagctagcacaggtgaaaattgagtgagtttttgataacttgtcatttaaaatcattaatgataattttcaatggatcttttcagtagccatcaccagttttgctgataagacttcctcacaacccatttgttgtacaaactgtttcaaagtagcaatcctttgggttagtacacttgataccaagtttcattcagttgattattttcaaaacaaggtgatttgttttaatgggttaatgaatactttgctattactgttttacaattaactttgtatatctctggaaagaggtgaatttgtcaatgaaaaaagtattgtgtagttcagtgggaaaaacctgttgtctgttatagtatcacatcactttcttacattgtcatggtttaaattattatcttggtgaaatatataggttagatacttaaatgttcatattattagcacactacaggtactacccttaaatcataaataatattacccattgtacacagtttccagatatgagttagagtggctgtgaagcaactagaggcaaattgtggcacagagaatatccaggggaaaattgattatgtaagcaagggctgttctactttgagagagagacagacagactacataatagtaatatattatataattaatgttatagatacactgaacaataaaacattttctggaattatgaattaattaacaacctggatttctgtttccagacctataaaccatgtaatgaaggactgaaattcgtttggcatacactttgtttctttaaaattgctagtttctttctgttatttttacattttcttgtcagagaatcaaaactattagtcagtagagttttgtccatgaaataatatttggacatttgtgaatttttccctattttttttcttcttttatttatactcaattttgaagcactgtttatgtttgtaggactttaaacaattagtacttaaagccccagttaattttgaacacacagagatacttattgtactctgtgtacagtaagtatttttatgtttacacttaccagattcataaggttatttgcctttaagtgatcttttgtgattttacttgattacagcatgagaaggtaaaggttgataaatgggagtaattacatatatatatataatttattatttttttttctgaagcagagttttactcttgttgcccaggctagagtgcaatggcacaatctcggttcactgcaacctctgcctcccaggttcaagtgattctcctgtctcagcctcccaagtagctgggattacaggtgcccgccaccatgctcagctaatttttgtatttttagtagagacagggttggccaggctggtctcgagctcctgacctcaggtgatcctcccacctcggcctcccaaagttctgggattacaggggtgagccactgtgcccggccataattttatatttttagaaaataaagaatgaaggacaaaagagcacagctaaatgaaactgctgctctaatttattccactggaaaggtctcaggactccttaactgttttccaggtttggctcttcatatctaacctgtgctaaaatgagaaggtatgctaggtgctgttagaaatcacaccatttccaaagaacccaagtagtatagagaccaaaatgaggcaaaaataaaagagatgaaacaggagagtttatttcttgcatactttccgaccttcatcatacaacctctcctaacctccctgtagtctttaaaatgtttaacttgcctataagctaacatgtaataaaacacatactcaattatatgaatagaagtggagagccagaatgctacaaaagaaatcacagctgctagaagtatcctccatagaaacatcaacatgattgtggatcaaaatgattttcactggatatggaatttgtatgggccatatttattaaaagagttctgtgtggtcacatagagttcctttgggatttcatcccacttttcaggacttaatttgtttgggtttgcttacctaacaagcaacaacaacaacaaaataaatagttccaaaatctagtttattacataaatctctatgaatccttgagggcctatatctatattataaataaatacaaatatagatttttaaatatctatgggactttgccatttacagccttaagtataaaattacgagattatattctttccattaccctttatttctgctaactttttaaagactggaacattctgtggatgttgtcaaagtttgagtttgtttttccctgtgtattataataaatttgtggtattgcatg

SEQ ID NO: 129595 - DNA, 595 bp, Homo sapiens
  Payload ID: 5342
  Gene Symbol: ELOVL7
  Gene Name: ELOVL fatty acid elongase 7
  ENST ID: ENST00000514809
  CDS Start-End: 86-352
gccgccctctctcccgcgcgcgcccggcgcttcggctccgctccctgtgcgaacccattaaaagagccagtaaatcctgtggaaaatggccttcagtgatcttacatcgaggactgtgcatctttatgataattggatcaaagatgctgatccaagagttgaagattggctcctcatgtcctcgcctctgccacaaaccatcctcctaggattctatgtctattttgtcacttccttgggaccaaagctcatggaaaatcgcaagccctttgaactcaagaaagcaatgataacgtacaattttttcatagtactcttttctgtgtatatgtgttatgagatactgttttaaaagaagaccttcccaccatcagactgaaagaattttgtgatgtctggctggggtataggttattcatttcgatgtgacattgttgactattcacggtcacccacagctttgaggatggcacgtacctgctggctttattacttctccaaatttattgagctattagatacgatcttttttgttctgcgcaagaaaaatagccaagtgactttccttcatgtattccatcataccatcatgccg

SEQ ID NO: 129596 - DNA, 737 bp, Homo sapiens
  Payload ID: 5342
  Gene Symbol: ELOVL7
  Gene Name: ELOVL fatty acid elongase 7
  ENST ID: ENST00000511799
  CDS Start-End: 242-737
gagccgcatcctgtcttggtggctgctgctggccgggaggaggctgatgaatacagagccgtggaacaggtcgtgccggagatggaaacaggaaagcctgttgttttgtcgtcccagatacttaggaacttcaagcagtcgtcccagatataaaaggcatttaaacttccctcttagaactgcttttgtggcatcccataagttttgaacccattaaaagagccagtaaatcctgtggaaaatggccttcagtgatcttacatcgaggactgtgcatctttatgataattggatcaaagatgctgatccaagagttgaagattggctcctcatgtcctcgcctctgccacaaaccatcctcctaggattctatgtctattttgtcacttccttgggaccaaagctcatggaaaatcgcaagccctttgaactcaagaaagcaatgataacgtacaattttttcatagtactcttttctgtgtatatgtgttatgagtttgtgatgtctggctggggtataggttattcatttcgatgtgacattgttgactattcacggtcacccacagctttgaggatggcacgtacctgctggctttattacttctccaaatttattgagctattagatacgatcttttttgttctgcgcaagaaaaatagccaagtgactttccttcatgtattccatcataccatcatgccgtggacctggtggtttggagtcaaatttgctg

SEQ ID NO: 129597 - DNA, 3994 bp, Homo sapiens
  Payload ID: 5342
  Gene Symbol: ELOVL7
  Gene Name: ELOVL fatty acid elongase 7
  Uniprot ID: A1L3X0
  ENST ID: ENST00000508821
  CDS Start-End: 316-1161
tccctccggccctcggcgggcacctggcggcggcgggcagggggcggcgctgcgcgcgtcacgcggctgggtgggatagcgggcaggtgacacccggcggcctcctcccctttccaacccagtcggcggccgggacagcgggggccgctgtgaggagctccgcgctcgcgctgccagtcgccgccctctctcccgcgcgcgcccggcgcttcggctccgctccctgtgcggcatttaaacttccctcttagaactgcttttgtggcatcccataagttttgaacccattaaaagagccagtaaatcctgtggaaaatggccttcagtgatcttacatcgaggactgtgcatctttatgataattggatcaaagatgctgatccaagagttgaagattggctcctcatgtcctcgcctctgccacaaaccatcctcctaggattctatgtctattttgtcacttccttgggaccaaagctcatggaaaatcgcaagccctttgaactcaagaaagcaatgataacgtacaattttttcatagtactcttttctgtgtatatgtgttatgagtttgtgatgtctggctggggtataggttattcatttcgatgtgacattgttgactattcacggtcacccacagctttgaggatggcacgtacctgctggctttattacttctccaaatttattgagctattagatacgatcttttttgttctgcgcaagaaaaatagccaagtgactttccttcatgtattccatcataccatcatgccgtggacctggtggtttggagtcaaatttgctgcaggtggtttgggaacattccatgcccttctaaatacagctgtacatgtagtcatgtattcctactatggactttctgcattggggccagcctaccagaagtatttgtggtggaaaaaatatttgacatcattacagcttgtccagtttgttattgtcgccatccacataagccagttctttttcatggaggattgcaagtatcagtttccagtctttgcgtgcatcattatgagttacagtttcatgtttctgctgctctttctccatttttggtaccgtgcttacaccaaaggtcagaggttgcccaaaactgtgaaaaatggaacttgcaaaaacaaagataattgaagcccaacataagtctatgatcgaaactgatacattgtcttccttgacaatcaagagatatttacctatgcagtgcattttgtatatttttcaaaactaagagcttgtatttttatggtaagttattgggatgtctgatatttgagagcccgaagcttccagataacagtcttctgataattagagcctacagcagccagaatttgtttttgtttttgtttttgtttttttagctgcttttaaacctaatccaaaggttttgtttaaaacattttgttgcagtgaaaaaaagatatgaagcaatacagtactcttcaaagaagtccaataaagatgaaaaatatcattaggtattttgagcacagacggagatccatgtgataaaatagattccttctgctgggtctggaaagtctggaaaccacctgtaggccctggctttgtcatttattgactgtattcagaagatactatatttgctctagagttaactcccattttagcaagctagcacaggtgaaaattgagtgagtttttgataacttgtcatttaaaatcattaatgataattttcaatggatcttttcagtagccatcaccagttttgctgataagacttcctcacaacccatttgttgtacaaactgtttcaaagtagcaatcctttgggttagtacacttgataccaagtttcattcagttgattattttcaaaacaaggtgatttgttttaatgggttaatgaatactttgctattactgttttacaattaactttgtatatctctggaaagaggtgaatttgtcaatgaaaaaagtattgtgtagttcagtgggaaaaacctgttgtctgttatagtatcacatcactttcttacattgtcatggtttaaattattatcttggtgaaatatataggttagatacttaaatgttcatattattagcacactacaggtactacccttaaatcataaataatattacccattgtacacagtttccagatatgagttagagtggctgtgaagcaactagaggcaaattgtggcacagagaatatccaggggaaaattgattatgtaagcaagggctgttctactttgagagagagacagacagactacataatagtaatatattatataattaatgttatagatacactgaacaataaaacattttctggaattatgaattaattaacaacctggatttctgtttccagacctataaaccatgtaatgaaggactgaaattcgtttggcatacactttgtttctttaaaattgctagtttctttctgttatttttacattttcttgtcagagaatcaaaactattagtcagtagagttttgtccatgaaataatatttggacatttgtgaatttttccctattttttttcttcttttatttatactcaattttgaagcactgtttatgtttgtaggactttaaacaattagtacttaaagccccagttaattttgaacacacagagatacttattgtactctgtgtacagtaagtatttttatgtttacacttaccagattcataaggttatttgcctttaagtgatcttttgtgattttacttgattacagcatgagaaggtaaaggttgataaatgggagtaattacatatatatatataatttattatttttttttctgaagcagagttttactcttgttgcccaggctagagtgcaatggcacaatctcggttcactgcaacctctgcctcccaggttcaagtgattctcctgtctcagcctcccaagtagctgggattacaggtgcccgccaccatgctcagctaatttttgtatttttagtagagacagggttggccaggctggtctcgagctcctgacctcaggtgatcctcccacctcggcctcccaaagttctgggattacaggggtgagccactgtgcccggccataattttatatttttagaaaataaagaatgaaggacaaaagagcacagctaaatgaaactgctgctctaatttattccactggaaaggtctcaggactccttaactgttttccaggtttggctcttcatatctaacctgtgctaaaatgagaaggtatgctaggtgctgttagaaatcacaccatttccaaagaacccaagtagtatagagaccaaaatgaggcaaaaataaaagagatgaaacaggagagtttatttcttgcatactttccgaccttcatcatacaacctctcctaacctccctgtagtctttaaaatgtttaacttgcctataagctaacatgtaataaaacacatactcaattatatgaatagaagtggagagccagaatgctacaaaagaaatcacagctgctagaagtatcctccatagaaacatcaacatgattgtggatcaaaatgattttcactggatatggaatttgtatgggccatatttattaaaagagttctgtgtggtcacatagagttcctttgggatttcatcccacttttcaggacttaatttgtttgggtttgcttacctaacaagcaacaacaacaacaaaataaatagttccaaaatctagtttattacataaatctctatgaatccttgagggcctatatctatattataaataaatacaaatatagatttttaaatatctatgggactttgccatttacagccttaagtataaaattacgagattatattctttccattaccctttatttctgctaactttttaaagactggaacattctgtggatgttgtcaaagtttgagtttgtttttccctgtgtattataataaatttgtggtattgcatgta

SEQ ID NO: 129598 - DNA, 1034 bp, Homo sapiens
  Payload ID: 5342
  Gene Symbol: ELOVL7
  Gene Name: ELOVL fatty acid elongase 7
  ENST ID: ENST00000504455
  CDS Start-End: 69-284
attataaactcatttctgttttattttactgaagaacccattaaaagagccagtaaatcctgtggaaaatggccttcagtgatcttacatcgaggactgtgcatctttatgataattggatcaaagatgctgatccaagagttgaagattggctcctcatgtcctcgcctctgccacaaaccatcctcctaggattctatgtctattttgtcacttccttgggaccaaagctcatggaaaatcgcaagccctttgaactcaagaaagcaatgataactttgtgatgtctggctggggtataggttattcatttcgatgtgacattgttgactattcacggtcacccacagctttgaggatggcacgtacctgctggctttattacttctccaaatttattgagctattagatacgatcttttttgttctgcgcaagaaaaatagccaagtgactttccttcatgtattccatcataccatcatgccgtggacctggtggtttggagtcaaatttgctgcaggtggtttgggaacattccatgcccttctaaatacagctgtacatgtagtcatgtattcctactatggactttctgcattggggccagcctaccagaagtatttgtggtggaaaaaatatttgacatcattacagcttgtccagtttgttattgtcgccatccacataagccagttctttttcatggaggattgcaagtatcagtttccagtctttgcgtgcatcattatgagttacagtttcatgtttctgctgctctttctccatttttggtaccgtgcttacaccaaaggtcagaggttgcccaaaactgtgaaaaatggaacttgcaaaaacaaagataattgaagcccaacataagtctatgatcgaaactgatacattgtcttccttgacaatcaagagatatttacctatgcagtgcattttgtatatttttcaaaactaagagcttgtatttttatggtaagttattgggatgtctgatatttgagagcccgaagcttccagataa

SEQ ID NO: 129599 - DNA, 730 bp, Homo sapiens
  Payload ID: 5342
  Gene Symbol: ELOVL7
  Gene Name: ELOVL fatty acid elongase 7
  ENST ID: ENST00000507047
  CDS Start-End: 235-730
agtcggcggccgggacagcgggggccgctgtgaggagctccgcgctcgcgctgccagtcgccgccctctctcccgcgcgcgcccggcgcttcggctccgctccctgtgcgatacttaggaacttcaagcagtcgtcccagatataaaaggcatttaaacttccctcttagaactgcttttgtggcatcccataagttttgaacccattaaaagagccagtaaatcctgtggaaaatggccttcagtgatcttacatcgaggactgtgcatctttatgataattggatcaaagatgctgatccaagagttgaagattggctcctcatgtcctcgcctctgccacaaaccatcctcctaggattctatgtctattttgtcacttccttgggaccaaagctcatggaaaatcgcaagccctttgaactcaagaaagcaatgataacgtacaattttttcatagtactcttttctgtgtatatgtgttatgagtttgtgatgtctggctggggtataggttattcatttcgatgtgacattgttgactattcacggtcacccacagctttgaggatggcacgtacctgctggctttattacttctccaaatttattgagctattagatacgatcttttttgttctgcgcaagaaaaatagccaagtgactttccttcatgtattccatcataccatcatgccgtggacctggtggtttggagtcaaatttgctg

SEQ ID NO: 129600 - DNA, 4281 bp, Homo sapiens
  Payload ID: 5343
  Gene Symbol: EMB
  Gene Name: embigin
  Uniprot ID: Q6PCB8
  ENST ID: ENST00000303221
  CDS Start-End: 217-1200
gcataactgatggagggccgggcgcggtaagagcgtctcgggggagtggggcaaggcggccgggcccctcccattccgccttttcttcagcgtcctacccgcggcactggctgcgagcgccgggccacctgcgagtgtgcgcagggactctggacacccgcggcggcgagctgagggagcagtctccacgaggacccaggcggaccctctggcgccatgcgcgccctccccggcctgctggaggccagggcgcgtacgccccggctgctcctcctccagtgccttctcgctgccgcgcgcccaagctcggcggacggcagtgccccagattcgccttttacaagtccacctctcagagaagaaataatggcaaataacttttccttggagagtcataacatatcactgactgaacattctagtatgccagtagaaaaaaatatcactttagaaaggccttctaatgtaaatctcacatgccagttcacaacatctggggatttgaatgcagtaaatgtgacttggaaaaaagatggtgaacaacttgagaataattatcttgtcagtgcaacaggaagcaccttgtatacccaatacaggttcaccatcattaatagcaaacaaatgggaagttattcttgtttctttcgagaggaaaaggaacaaaggggaacatttaatttcaaagtccctgaacttcatgggaaaaacaagccattgatctcttacgtaggggattctactgtcttgacatgtaaatgtcaaaattgttttcctttaaattggacctggtacagtagtaatgggagtgtaaaggttcctgttggtgttcaaatgaataaatatgtgatcaatggaacatatgctaacgaaacaaagctgaagataacacaacttttggaggaagatggggaatcttactggtgccgtgcactattccaattaggcgagagtgaagaacacattgagcttgtggtgctgagctatttggtgcccctcaaaccatttcttgtaatagtggctgaggtgattcttttagtggccaccattctgctttgtgaaaagtacacacaaaagaaaaagaagcactcagatgaggggaaagaatttgagcagattgaacagctgaaatcagatgatagcaatggtatagaaaataatgtccccaggcatagaaaaaatgagtctctgggccagtgaatacaaaacatcatgtcgagaatcattggaagatatacagagttcgtatttcagctttgtttatccttcctgttaagagcctctgagtttttagttttaaaaggatgaaaagcttatgcaacatgctcagcaggagcttcatcaacgatatatgtcagatctaaaggtatattttcattctgtaattatgttacataaaagcaatgtaaatcagaataaatatgttagaccagaataaaattaattatattctggtcttcaaaggacacacagaacagatatcagcagaatcacttaatacttcatagaacaaaaatcactcaaaacctgtttataaccaaagaattcatgaaaaagaaagcctttgccatttgtcttagaaagttattttttaaaaaaaaatcatacttactattagtatctatggaagtatatgtaacaatttttatgtaaaggtcatctttctgtgatagtgaaaaaatatgtctttactaagttgaaatgaatactttctgcctttgctaatgatagttattctacaatctccacaagaaaaatataccttttatccggaaatattggtttaaggcaaataaataaaactgtgcttgctctaaagctctgcactacaaaagcaaattttccagtctttattccactcataaccactgctttccccaccaggctaaagtgcttcttagtcttaaatagggtttttaacttcataaggtacaccattgtttatgttttagggtgcaggtccatatagtcgtaatacttaaaacactgctacactgatgcttttgtggctcatggtttcctggttctttgatttaacacctggcttcctggtatctatggctggttaaatatctaaacctgcattattagtgctttacaataataattcccttgactgaagtccagaaatactaaagcacttcttttttattgctgtgaatgccttagacttatcttccaaaataggatacttcgtttctattgcatatataactgaaatattttataaactcactgtaatcaaatcttataaaatctgaatcaacatgaaaagttgtcaatgcttgaatgaatactaaaatcataccacaagatactagataacataaatgaccatgaagtgtcccactgctcaaagggcaacaactttaagaacagaagcaaagagtggtggtgtggaacccaagattcttggcgactagggaatttaaaggttggggaggaggaattcaatgatttgacaagaaatactttataaaaatttgctccatgtattggctaagaaaaatataataaaattttggtagtgaaaattgtatcactaatgtttaccaatattactagtatgaataatacacataaggtagtgacttggaagctgctcaatactttgttgctataacaaaatgcaatattttgttgtaaagcatcttaactacacatataagtttgctgaacttgaatacatcccggtaatggcaaacttcattttattcttggttttcattttattctggtctcagggccatacatttattttagtttaattaattattattttgacaacattacttgggtaatatctatataatggtagataaccaatcagttagcttaattaatctaagctatttgaattcagggaaatattagtcaaatctgctgtttgactaaatacaattcaaagcagtgtatttgtgacttggaatatagaacacaaacaaatgtgtaacccatctgcagtatgcattcttccattttaccaccactaaccattgaggctcatacaattttcaagcaacaagcattgcttcccaaaggtaaaataatcaggaatatttctatagtaaatggagtttttaattggcaatactgtttatttttttctagcaaagacaatttatctcagtaaccttaaataggaaaagtactcaaaaattaaagttgacttttggctttttgtagtctctctggaggacttccagaaaattaccactgttggattttaatctgcttccattaaccaatcttacagagatgataaatgaattaactaatattgaccaaatataaattgactgcaaataataagccgcataaaagttgaagtaggaaaactactccaagtttatatattaggcaccttggggaattctcttagtctttccagctaacaaggattttcagcataataagtagatttaatgatggcataaaattcccagatactttcatatacattttttgccaaagtgtaaatcttctccttttgcagtctttttgttattatcccaacatctagctgctcaggccctaatttagaactcattctgatattttcttcttctgtattaattaatacttatgggtcatgaatccctgctcctttgacctttttaatagctcatgaatccatcccattgcctccccaactctgcccacacctgctgcaacactaatgccttgattttcctacctcagtctccttttctattaatccctcttttgcgtggctgcctgagtccactttctcaaacacaaacctcactatgcaactttggaatctctgtaggctcacctttgccatttcttaatattgcattctccaaattgctaatctctatccagtctcttgaactagacttggcacatggagattccgctcagaaagtgctcttcacacttctacctgcttgactaaccccagattatctttcaagactttaatctgatcttgtgtcttagagaagcccccatacctggtagagcatgtaccatcttacatgcttaaataactccacatttatttgtgtttattactctgtgttataaatatacatttgttggtctctctcttggattattttgtttctttgtcctgtaactaccactgaaagggtgcaatacagctttcttgaaatgtgtattgaacggatgaatgtataaataaaaattaaattttgtaaatttctgcttattcttagaaaaagaatctaaattgtgacaaatcagaattgaaaaaagtattctaataaagaaaaacaagcttttataacttca

SEQ ID NO: 129601 - DNA, 1617 bp, Homo sapiens
  Payload ID: 5343
  Gene Symbol: EMB
  Gene Name: embigin
  ENST ID: ENST00000508934
  CDS Start-End: 200-1021
ccgggcgcggtaagagcgtctcgggggagtggggcaaggcggccgggcccctcccattccgccttttcttcagcgtcctacccgcggcactggctgcgagcgccgggccacctgcgagtgtgcgcagggactctggacacccgcggcggcgagctgagggagcagtctccacgaggacccaggcggaccctctggcgccatgcgcgccctccccggcctgctggaggccagggcgcgtacgccccggctgctcctcctccagtgccttctcgctgccgcgcgcccaagctcggcggacggcagtgccccagattcgccttttacaagtccacctctcagagaagaaataatggcaaataacttttccttggagagtcataacatatcactgactggaagcaccttgtatacccaatacaggttcaccatcattaatagcaaacaaatgggaagttattcttgtttctttcgagaggaaaaggaacaaaggggaacatttaatttcaaagtccctgaacttcatgggaaaaacaagccattgatctcttacgtaggggattctactgtcttgacatgtaaatgtcaaaattgttttcctttaaattggacctggtacagtagtaatgggagtgtaaaggttcctgttggtgttcaaatgaataaatatgtgatcaatggaacatatgctaacgaaacaaagctgaagataacacaacttttggaggaagatggggaatcttactggtgccgtgcactattccaattaggcgagagtgaagaacacattgagcttgtggtgctgagctatttggtgcccctcaaaccatttcttgtaatagtggctgaggtgattcttttagtggccaccattctgctttgtgaaaagtacacacaaaagaaaaagaagcactcagatgaggggaaagaatttgagcagattgaacagctgaaatcagatgatagcaatggtatagaaaataatgtccccaggcatagaaaaaatgagtctctgggccagtgaatacaaaacatcatgtcgagaatcattggaagatatacagagttcgtatttcagctttgtttatccttcctgttaagagcctctgagtttttagttttaaaaggatgaaaagcttatgcaacatgctcagcaggagcttcatcaacgatatatgtcagatctaaaggtatattttcattctgtaattatgttacataaaagcaatgtaaatcagaataaatatgttagaccagaataaaattaattatattctggtcttcaaaggacacacagaacagatatcagcagaatcacttaatacttcatagaacaaaaatcactcaaaacctgtttataaccaaagaattcatgaaaaagaaagcctttgccatttgtcttagaaagttattttttaaaaaaaaatcatacttactattagtatctatggaagtatatgtaacaatttttatgtaaaggtcatctttctgtgatagtgaaaaaatatgtctttactaagttgaaatgaatactttctgcctttgctaatgatagttattctacaatctccacaagaaaaatataccttttatccggaaatattggtttaaggcaaataa

SEQ ID NO: 129602 - DNA, 1475 bp, Homo sapiens
  Payload ID: 5343
  Gene Symbol: EMB
  Gene Name: embigin
  Uniprot ID: Q6PCB8
  ENST ID: ENST00000514111
  CDS Start-End: 308-1141
agaaaacaaatagcaacccaaactggcccgtcagccattttatcttctctgttccctggtgcccagtgctatctatttttttttttaattctctttattaaggtctgcctgtcgctcttctttcatcttctctctctgcctcttcatatctttccattttctggctctctcatctgattccttggtatcttcagtttatttatgttttgtaaagaaactataatagtagaataaaaatggaaggcgttatttaaaaaaagccatctgatattcgccttttacaagtccacctctcagagaagaaataatggcaaataacttttccttggagagtcataacatatcactgactgaacattctagtatgccagtagaaaaaaatatcactttagaaaggccttctaatgtaaatctcacatgccagttcacaacatctggggatttgaatgcagtaaatgtgacttggaaaaaagatggtgaacaacttgagaataattatcttgtcagtgcaacaggaagcaccttgtatacccaatacaggttcaccatcattaatagcaaacaaatgggaagttattcttgtttctttcgagaggaaaaggaacaaaggggaacatttaatttcaaagtccctgaacttcatgggaaaaacaagccattgatctcttacgtaggggattctactgtcttgacatgtaaatgtcaaaattgttttcctttaaattggacctggtacagtagtaatgggagtgtaaaggttcctgttggtgttcaaatgaataaatatgtgatcaatggaacatatgctaacgaaacaaagctgaagataacacaacttttggaggaagatggggaatcttactggtgccgtgcactattccaattaggcgagagtgaagaacacattgagcttgtggtgctgagctatttggtgcccctcaaaccatttcttgtaatagtggctgaggtgattcttttagtggccaccattctgctttgtgaaaagtacacacaaaagaaaaagaagcactcagatgaggggaaagaatttgagcagattgaacagctgaaatcagatgatagcaatggtatagaaaataatgtccccaggcatagaaaaaatgagtctctgggccagtgaatacaaaacatcatgtcgagaatcattggaagatatacagagttcgtatttcagctttgtttatccttcctgttaagagcctctgagtttttagttttaaaaggatgaaaagcttatgcaacatgctcagcaggagcttcatcaacgatatatgtcagatctaaaggtatattttcattctgtaattatgttacataaaagcaatgtaaatcagaataaatatgttagaccagaataaaattaattatattctggtcttcaaaggacacacagaacagatatcagcagaatcacttaatacttcatagaacaaaaatcactcaaaacctgttta

SEQ ID NO: 129603 - DNA, 3118 bp, Homo sapiens
  Payload ID: 5344
  Gene Symbol: EFS
  Gene Name: embryonal Fyn-associated substrate
  Uniprot ID: O43281
  ENST ID: ENST00000216733
  CDS Start-End: 609-2294
ctccaggcaacttggggcaagcgtctcagttctcgctctcccttcctcccagcggggtcgccgcagaccccagccctgggagcaccgctctgcagcgcggccggcgggtggagacggttggcccctaaactcgctcgtccagcccaaccgccccggcggcttctcccagccctcgaggctctcctgagcggcctggagaggcgtcgagcgcagcccagcgcccgcctgctcacccgccccggcccgggaagggaattttcggatcctgcgagcccggggcgcccccgcggcctagggcgggcagctcccggggcctggccgagccggtggcgcccgggaggccgcggggacagcacgcagcgcgcgcccttggatgccgtcccgcagcgacgccccggcccgccccgctcctcctcctgcctggctagcctgcctctcatttgggaagttttgtgggttttctttctcctcctccaaccttggcggaggccacgactcaggcgccacagctgggggctagaggccgcggaccatggtgcggggcagccaccgctgaagtcagcaaaaccgagcctggcctgaggcaggctgcgcgggaggccaaagccatggccattgccacgtcgacccagctggcccgggcactgtatgacaacaccgctgagtccccccaggagctgtccttccgccgaggggatgtcctacgggtcctgcagagagagggcgctggtggactggacggctggtgcctctgctccctacacggccagcagggcattgtgcccgccaacagggtgaagctcttgcctgctggcccagcacccaagcccagcctctctcctgcgtccccagcccagcctggctcaccatatccagccccagatcacagcaatgaggaccaggaggtgtatgtggtgccgcccccagctcggccctgtccaacctcaggacctccagctggaccttgcccaccctctcctgacctcatctacaaaatccccagagctagtgggacccagctggctgctcccagagatgccttggaggtctacgatgtgccccccaccgccctccgggtgccctccagtggcccctatgactgccctgcctccttttcccaccctctgacccgggttgccccgcagccccctggagaggatgatgctccctatgatgtgcctctgaccccaaagccacctgcagagctggaaccagatctggagtgggaaggaggccgggagccggggccccccatctatgctgccccctccaacctgaaacgagcgtcagccttactcaatttgtatgaagcacccgaggaactgctggcagacggggagggcgggggcactgatgaggggatctacgatgtgcctctgctggggccagaggctcccccttctccagagccccctggagccttggcctcccatgaccaggacaccctggcccagcttctggccagaagccccccacccccacacaggccccggctcccctcagctgagagcctgtcccgccgccctctgcctgccctgcctgtccctgaggcccccagcccctccccagtgccctctcctgccccaggccggaagggcagcatccaggaccggcctctgcccccacccccaccccgcctgcctggttatggaggccccaaggtcgagggggatccagagggcagggagatggaggatgacccagcaggacaccacaatgagtacgagggcattccgatggccgaggagtatgactatgtccacctgaagggcatggacaaagctcagggatctaggcccccggatcaggcctgcacaggggatcctgaactgcccgagagggggatgccggcgccgcaggaggccctgtccccaggggagccactggttgtgtccaccggagatctgcagctcctgtacttctatgctgggcaatgccagagccactactcagccctgcaggcagccgtggcagccctgatgtccagtacccaggctaatcagcccccgcgccttttcgtgccccacagcaagagggtggtggtggctgctcatcgcctggtgtttgttggggacaccctgggccggctggcagcctctgcccctctgagagcacaggtcagggctgcaggtacagcactgggccaggcattgcgggccactgtgctggctgtcaagggagctgccctgggctacccatccagccctgccatccaagagatggtgcagtgtgtaacagaactggcagggcaggccctgcaattcactaccctgctcactagcctggctccatgaaggtcctttggcacagctctgctcctcccctgcctgccaaagcccccctttaggccttgggtggctggaaggctttgttaagggactaggagaaatgggggtatctttcccctttcctgccctttctgctcatctcaacctctcacagaggtgtcttctccccctaacctacagctttttgtacaagccattttgtgtaaattatttatatttaatattattccctgctttgtcaggagcaggtactaggctctggggcagtgaggaactagatccttctctcctcagcctagggtggaggtcactgcactaccacccacctctggaagactggctgtgaaaagtcaggtggcagaaacctggggccacatagagcctctctcttttcctgtttcttggctctagaagatcagcactgcactgttagctgagagtgcgggcaagacataaactgtccagagtttgaaggttctcggaaagaccggagggcttctccccacagaaggcggagagagctggggctcagacatgggtgtgcaccttaataaaccctgctgtctgcctccctgactctgcttcttgggagcatggtgagcagccctggtgctcagcagccatacctatgggacacacactacgaaaaggatgcctttagggtttgggggagattttactcctttcttcaacaactattcactggacaagttctctgctcccatgacgcgccaggcacagttctgcaagtatattgtgaatgtattgttctagtgggatacacaaataagtcagttaaaatacataaataaaaacataaacctgccata

SEQ ID NO: 129604 - DNA, 2704 bp, Homo sapiens
  Payload ID: 5344
  Gene Symbol: EFS
  Gene Name: embryonal Fyn-associated substrate
  Uniprot ID: O43281
  ENST ID: ENST00000351354
  CDS Start-End: 728-2134
cgggcgcgctgagtgagtgcgcgcgtgaaaaccgccgcaccgccgggggtgcgagtgtctgggccgaagcggccactccagcgacccagccccacggccacgctctcgggggcctttggctccaggcaacttggggcaagcgtctcagttctcgctctcccttcctcccagcggggtcgccgcagaccccagccctgggagcaccgctctgcagcgcggccggcgggtggagacggttggcccctaaactcgctcgtccagcccaaccgccccggcggcttctcccagccctcgaggctctcctgagcggcctggagaggcgtcgagcgcagcccagcgcccgcctgctcacccgccccggcccgggaagggaattttcggatcctgcgagcccggggcgcccccgcggcctagggcgggcagctcccggggcctggccgagccggtggcgcccgggaggccgcggggacagcacgcagcgcgcgcccttggatgccgtcccgcagcgacgccccggcccgccccgctcctcctcctgcctggctagcctgcctctcatttgggaagttttgtgggttttctttctcctcctccaaccttggcggaggccacgactcaggcgccacagctgggggctagaggccgcggaccatggtgcggggcagccaccgctgaagtcagcaaaaccgagcctggcctgaggcaggctgcgcgggaggccaaagccatggccattgccacgtcggtgtatgtggtgccgcccccagctcggccctgtccaacctcaggacctccagctggaccttgcccaccctctcctgacctcatctacaaaatccccagagctagtgggacccagctggctgctcccagagatgccttggaggtctacgatgtgccccccaccgccctccgggtgccctccagtggcccctatgactgccctgcctccttttcccaccctctgacccgggttgccccgcagccccctggagaggatgatgctccctatgatgtgcctctgaccccaaagccacctgcagagctggaaccagatctggagtgggaaggaggccgggagccggggccccccatctatgctgccccctccaacctgaaacgagcgtcagccttactcaatttgtatgaagcacccgaggaactgctggcagacggggagggcgggggcactgatgaggggatctacgatgtgcctctgctggggccagaggctcccccttctccagagccccctggagccttggcctcccatgaccaggacaccctggcccagcttctggccagaagccccccacccccacacaggccccggctcccctcagctgagagcctgtcccgccgccctctgcctgccctgcctgtccctgaggcccccagcccctccccagtgccctctcctgccccaggccggaagggcagcatccaggaccggcctctgcccccacccccaccccgcctgcctggttatggaggccccaaggtcgagggggatccagagggcagggagatggaggatgacccagcaggacaccacaatgagtacgagggcattccgatggccgaggagtatgactatgtccacctgaagggcatggacaaagctcagggatctaggcccccggatcaggcctgcacaggggatcctgaactgcccgagagggggatgccggcgccgcaggaggccctgtccccaggggagccactggttgtgtccaccggagatctgcagctcctgtacttctatgctgggcaatgccagagccactactcagccctgcaggcagccgtggcagccctgatgtccagtacccaggctaatcagcccccgcgccttttcgtgccccacagcaagagggtggtggtggctgctcatcgcctggtgtttgttggggacaccctgggccggctggcagcctctgcccctctgagagcacaggtcagggctgcaggtacagcactgggccaggcattgcgggccactgtgctggctgtcaagggagctgccctgggctacccatccagccctgccatccaagagatggtgcagtgtgtaacagaactggcagggcaggccctgcaattcactaccctgctcactagcctggctccatgaaggtcctttggcacagctctgctcctcccctgcctgccaaagcccccctttaggccttgggtggctggaaggctttgttaagggactaggagaaatgggggtatctttcccctttcctgccctttctgctcatctcaacctctcacagaggtgtcttctccccctaacctacagctttttgtacaagccattttgtgtaaattatttatatttaatattattccctgctttgtcaggagcaggtactaggctctggggcagtgaggaactagatccttctctcctcagcctagggtggaggtcactgcactaccacccacctctggaagactggctgtgaaaagtcaggtggcagaaacctggggccacatagagcctctctcttttcctgtttcttggctctagaagatcagcactgcactgttagctgagagtgcgggcaagacataaactgtccagagtttgaaggttctcggaaagaccggagggcttctccccacagaaggcggagagagctggggctcagacatgggtgtgcaccttaataaaccctgctgtctgcctccctga

SEQ ID NO: 129605 - DNA, 2610 bp, Homo sapiens
  Payload ID: 5344
  Gene Symbol: EFS
  Gene Name: embryonal Fyn-associated substrate
  Uniprot ID: O43281
  ENST ID: ENST00000429593
  CDS Start-End: 609-1787
ctccaggcaacttggggcaagcgtctcagttctcgctctcccttcctcccagcggggtcgccgcagaccccagccctgggagcaccgctctgcagcgcggccggcgggtggagacggttggcccctaaactcgctcgtccagcccaaccgccccggcggcttctcccagccctcgaggctctcctgagcggcctggagaggcgtcgagcgcagcccagcgcccgcctgctcacccgccccggcccgggaagggaattttcggatcctgcgagcccggggcgcccccgcggcctagggcgggcagctcccggggcctggccgagccggtggcgcccgggaggccgcggggacagcacgcagcgcgcgcccttggatgccgtcccgcagcgacgccccggcccgccccgctcctcctcctgcctggctagcctgcctctcatttgggaagttttgtgggttttctttctcctcctccaaccttggcggaggccacgactcaggcgccacagctgggggctagaggccgcggaccatggtgcggggcagccaccgctgaagtcagcaaaaccgagcctggcctgaggcaggctgcgcgggaggccaaagccatggccattgccacgtcggtgtatgtggtgccgcccccagctcggccctgtccaacctcaggacctccagctggaccttgcccaccctctcctgacctcatctacaaaatccccagagctagtgggacccagctggctgctcccagagatgccttggaggtctacgatgtgccccccaccgccctccgggtgccctccagtggcccctatgactgccctgcctccttttcccaccctctgacccgggttgccccgcagccccctggagaggatgatgctcccccttctccagagccccctggagccttggcctcccatgaccaggacaccctggcccagcttctggccagaagccccccacccccacacaggccccggctcccctcagctgagagcctgtcccgccgccctctgcctgccctgcctgtccctgaggcccccagcccctccccagtgccctctcctgccccaggccggaagggcagcatccaggaccggcctctgcccccacccccaccccgcctgcctggttatggaggccccaaggtcgagggggatccagagggcagggagatggaggatgacccagcaggacaccacaatgagtacgagggcattccgatggccgaggagtatgactatgtccacctgaagggcatggacaaagctcagggatctaggcccccggatcaggcctgcacaggggatcctgaactgcccgagagggggatgccggcgccgcaggaggccctgtccccaggggagccactggttgtgtccaccggagatctgcagctcctgtacttctatgctgggcaatgccagagccactactcagccctgcaggcagccgtggcagccctgatgtccagtacccaggctaatcagcccccgcgccttttcgtgccccacagcaagagggtggtggtggctgctcatcgcctggtgtttgttggggacaccctgggccggctggcagcctctgcccctctgagagcacaggtcagggctgcaggtacagcactgggccaggcattgcgggccactgtgctggctgtcaagggagctgccctgggctacccatccagccctgccatccaagagatggtgcagtgtgtaacagaactggcagggcaggccctgcaattcactaccctgctcactagcctggctccatgaaggtcctttggcacagctctgctcctcccctgcctgccaaagcccccctttaggccttgggtggctggaaggctttgttaagggactaggagaaatgggggtatctttcccctttcctgccctttctgctcatctcaacctctcacagaggtgtcttctccccctaacctacagctttttgtacaagccattttgtgtaaattatttatatttaatattattccctgctttgtcaggagcaggtactaggctctggggcagtgaggaactagatccttctctcctcagcctagggtggaggtcactgcactaccacccacctctggaagactggctgtgaaaagtcaggtggcagaaacctggggccacatagagcctctctcttttcctgtttcttggctctagaagatcagcactgcactgttagctgagagtgcgggcaagacataaactgtccagagtttgaaggttctcggaaagaccggagggcttctccccacagaaggcggagagagctggggctcagacatgggtgtgcaccttaataaaccctgctgtctgcctccctgactctgcttcttgggagcatggtgagcagccctggtgctcagcagccatacctatgggacacacactacgaaaaggatgcctttagggtttgggggagattttactcctttcttcaacaactattcactggacaagttctctgctcccatgacgcgccaggcacagttctgcaagtatattgtgaatgtattgttctagtgggatacacaaataagtcagttaaaatacataaataaaaacataaacctgccat

SEQ ID NO: 129606 - DNA, 2223 bp, Homo sapiens
  Payload ID: 5345
  Gene Symbol: EED
  Gene Name: embryonic ectoderm development
  Uniprot ID: O75530
  ENST ID: ENST00000263360
  CDS Start-End: 687-2012
attcgccagatgggggaagccagggggaagcaggttactgtttttgcatttctatcttcaaggaagaattaggttatgaatagttccgtgaatagtcaggaagcgctgtcctccaagttcaagattaaggaaacgtggcatgcacagctaaagcaagaggtgacgtcttgtatcttcccccgtttcctgggacattggtggtgtagcccattccacagactttcgctccctagcagcgggtcggagatcgaaggaacgggccaattgcggctgaaacgtctttggaaggaggaagggggtgagggagcatccctttgagtttcgcctcttctcgaggcggtggtgggaagggagacatacttaatactgccctcttaatccaacggaccttacatcgtgtagactgccgggagggcggcgggaaaagggcaagacgggagttggggaagggaaggagccaggaagccgcgcgggagggcgcgcgcgcgcgcccctttttcagcagtgtggcggggtcgcacgcacgcccgcctcggcggctgggcgcgatttgcgacagtggggggggcggtggaggtggcggcggcagcggcaactttgcggcaagctcgggccgggcttgcttgacggcggtgtggcggaggccccgccccaggcggcaggaacctggagggaggcggaggaatatgtccgagagggaagtgtcgactgcgccggcgggaacagacatgcctgcggccaagaagcagaagctgagcagtgacgagaacagcaatccagacctctctggagacgagaatgatgacgctgtcagtatagaaagtggtacaaacactgaacgccctgatacacctacaaacacgccaaatgcacctggaaggaaaagttggggaaagggaaaatggaagtcaaagaaatgcaaatattctttcaaatgtgtaaatagtctcaaggaagatcataaccaaccattgtttggagttcagtttaactggcacagtaaagaaggagatccattagtgtttgcaactgtaggaagcaacagagttaccttgtatgaatgtcattcacaaggagaaatccggttgttgcaatcttacgtggatgctgatgctgatgaaaacttttacacttgtgcatggacctatgatagcaatacgagccatcctctgctggctgtagctggatctagaggcataattaggataataaatcctataacaatgcagtgtataaagcactatgttggccatggaaatgctatcaatgagctgaaattccatccaagagatccaaatcttctcctgtcagtaagtaaagatcatgctttacgattatggaatatccagacggacactctggtggcaatatttggaggcgtagaagggcacagagatgaagttctaagtgctgattatgatcttttgggtgaaaaaataatgtcctgtggtatggatcattctcttaaactttggaggatcaattcaaagagaatgatgaatgcaattaaggaatcttatgattataatccaaataaaactaacaggccatttatttctcagaaaatccattttcctgatttttctaccagagacatacataggaattatgttgattgtgtgcgatggttaggcgatttgatactttctaagtcttgtgaaaatgccattgtgtgctggaaacctggcaagatggaagatgatatagataaaattaaacccagtgaatctaatgtgactattcttgggcgatttgattacagccagtgtgacatttggtacatgaggttttctatggatttctggcaaaagatgcttgcattgggcaatcaagttggcaaactttatgtttgggatttagaagtagaagatcctcataaagccaaatgtacaacactgactcatcataaatgtggtgctgctattcgacaaaccagttttagcagggatagcagcattcttatagctgtttgtgatgatgccagtatttggcgctgggatcgacttcgataaaatacttttgcctaatcaaaattagagtgtgtttgttgtctgtgtaaaatagaattaatgtatcttgctagtaagggcacgtagagcatttagagttgtctttcagcattcaatcaggctgagctgaatgtagtgatgtttacattgtttacattctttgtactgtcttcctgctcagactctactgcttttaataaaaatttatttttgt

SEQ ID NO: 129607 - DNA, 2033 bp, Homo sapiens
  Payload ID: 5345
  Gene Symbol: EED
  Gene Name: embryonic ectoderm development
  Uniprot ID: O75530
  ENST ID: ENST00000327320
  CDS Start-End: 91-1293
tttgcggcaagctcgggccgggcttgcttgacggcggtgtggcggaggccccgccccaggcggcaggaacctggagggaggcggaggaatatgtccgagagggaagtgtcgactgcgccggcgggaacagacatgcctgcggccaagaagcagaagctgagcagtgacgagaacagcaatccagacctctctggagacgagaatgatgacgctgtcagtatagaaagtggtacaaacactgaacgccctgatacacctacaaacacgccaaatgcacctggaaggaaaagttggggaaagggaaaatggaagtcaaagaaatgcaaatattctttcaaatgtgtaaatagtctcaaggaagatcataaccaaccattgtttggagttcagtttaactggcacagtaaagaaggagatccattagtgtttgcaactgtaggaagcaacagagttaccttgtatgaatgtcattcacaaggagaaatccggttgttgcaatcttacgtggatgctgatgctgatgaaaacttttacacttgtgcatggacctatgatagcaatacgagccatcctctgctggctgtagctggatctagaggcataattaggataataaatcctataacaatgcagtgtataaagcactatgttggccatggaaatgctatcaatgagctgaaattccatccaagagatccaaatcttctcctgtcagtaagtaaagatcatgctttacgattatggaatatccagacggacactctggtggcaatatttggaggcgtagaagggcacagagatgaagttctaagtgctgattatgatcttttgggtgaaaaaataatgtcctgtggtatggatcattctcttaaactttggaggatcaattcaaagagaatgatgaatgcaattaaggaatcttatgattataatccaaataaaactaacaggccatttatttctcagaaaatccattttcctgatttttctaccagagacatacataggaattatgttgattgtgtgcgatggttaggcgatttgatactttctaagtcttgtgaaaatgccattgtgtgctggaaacctggcaagatggaagatgatatagataaaattaaacccagtgaatctaatgtgactattcttgggcgatttgattacagccagtgtgacatttggtacatgaggttttctatggatttctggcaaaagatgcttgcattgggcaatcaagttggcaaactttatgtttgggatttagaagtagaagatcctcataaagccaagtaagtatttagaaatttctgttcaaaatttcaggctttttctccacacttgtatgccaatgtagagaagatcatttatatttgcagtgccatccttaagtcatttttaacatttactgttttcagagttaaagttattcttttttattccaataatttttgtttttcctaagtaccttggtgacaagtcatttcttgtttttatacaaattatgtagtgcttgttgaacttaaaatatatctaaattttataaaatttgagactgagctcttagtgaagtatattctggttttaagtgcttttcgtatgacttggaacatctgcttattttctaatccgctgttttagggtagacactgacaacgttatgtgtggtctttaacctgttgtcatgttttttccctagatgtacaacactgactcatcataaatgtggtgctgctattcgacaaaccagttttagcagggatagcagcattcttatagctgtttgtgatgatgccagtatttggcgctgggatcgacttcgataaaatacttttgcctaatcaaaattagagtgtgtttgttgtctgtgtaaaatagaattaatgtatcttgctagtaagggcacgtagagcatttagagttgtctttcagcattcaatcaggctgagctgaatgtagtgatgtttacattgtttacattctttgtactgtcttcctgctcagactctactgcttttaataaaaatttatttttg

SEQ ID NO: 129608 - DNA, 1696 bp, Homo sapiens
  Payload ID: 5345
  Gene Symbol: EED
  Gene Name: embryonic ectoderm development
  Uniprot ID: O75530
  ENST ID: ENST00000351625
  CDS Start-End: 8-1408
gaggaatatgtccgagagggaagtgtcgactgcgccggcgggaacagacatgcctgcggccaagaagcagaagctgagcagtgacgagaacagcaatccagacctctctggagacgagaatgatgacgctgtcagtatagaaagtggtacaaacactgaacgccctgatacacctacaaacacgccaaatgcacctggaaggaaaagttggggaaagggaaaatggaagtcaaagaaatgcaaatattctttcaaatgtgtaaatagtctcaaggaagatcataaccaaccattgtttggagttcagtttaactggcacagtaaagaaggagatccattagtgtttgcaactgtaggaagcaacagagttaccttgtatgaatgtcattcacaaggagaaatccggttgttgcaatcttacgtggatgctgatgctgatgaaaacttttacacttgtgcatggacctatgatagcaatacgagccatcctctgctggctgtagctggatctagaggcataattaggataataaatcctataacaatgcagtgtataaagcactatgttggccatggaaatgctatcaatgagctgaaattccatccaagagatccaaatcttctcctgtcagtaagtaaagatcatgctttacgattatggaatatccagacggacactctggtggcaatatttggaggcgtagaagggcacagagatgaagttctaagtgctgattatgatcttttgggtgaaaaaataatgtcctgtggtatggatcattctcttaaactttggaggatcaattcaaagagaatgatgaatgcaattaaggaatcttatgattataatccaaataaaactaacaggccatttatttctcagaaaatccattttcctgatttttctaccagagacatacataggaattatgttgattgtgtgcgatggttaggcgatttgatactttctaagagtggccgtgccattttacattcccaccagcaatgtatgagagatccagtgtctccgaatcttcgccagcatttgtcttgtgaaaatgccattgtgtgctggaaacctggcaagatggaagatgatatagataaaattaaacccagtgaatctaatgtgactattcttgggcgatttgattacagccagtgtgacatttggtacatgaggttttctatggatttctggcaaaagatgcttgcattgggcaatcaagttggcaaactttatgtttgggatttagaagtagaagatcctcataaagccaaatgtacaacactgactcatcataaatgtggtgctgctattcgacaaaccagttttagcagggatagcagcattcttatagctgtttgtgatgatgccagtatttggcgctgggatcgacttcgataaaatacttttgcctaatcaaaattagagtgtgtttgttgtctgtgtaaaatagaattaatgtatcttgctagtaagggcacgtagagcatttagagttgtctttcagcattcaatcaggctgagctgaatgtagtgatgtttacattgtttacattctttgtactgtcttcctgctcagactctactgcttttaataaaaatttatttttgtaaagctgtgtgtttagttactttcattgtggtgaaaaaaagttaaaagtaataaaattatgccttatctttttataa

SEQ ID NO: 129609 - DNA, 1745 bp, Homo sapiens
  Payload ID: 5345
  Gene Symbol: EED
  Gene Name: embryonic ectoderm development
  ENST ID: ENST00000528180
  CDS Start-End: 478-1563
attccacagactttcgctccctagcagcgggtcggagatcgaaggaacgggccaattgcggctgaaacgtctttggaaggaggaagggggtgagggagcatccctttgagtttcgcctcttctcgaggcggtggtgggaagggagacatacttaatactgccctcttaatccaacggaccttacatcgtgtagactgccgggagggcggcgggaaaagggcaagacgggagttggggaagggaaggagccaggaagccgcgcgggagggcgcgcgcgcgcgcccctttttcagcagtgtggcggggtcgcacgcacgcccgcctcggcggctgggcgcgatttgcgacagtggggggggcggtggaggtggcggcggcagcggcaactttgcggcaagctcgggccgggcttgcttgacggcggtgtggcggaggccccgccccaggcggcaggaacctggagggaggcggaggaatatgtccgagagggaagtgtcgactgcgccggcgggaacagacatgcctgcggccaagaagcagaagctgagcagtgacgagaacagcaatccagacctctctggagacgagaatgatgacgctgtcagtatagaaagtggtacaaacactgaacgccctgatacacctacaaacacgccaaatgcacctggaaggaaaagttggggaaagggaaaatggaagtcaaagaaatgcaaatattctttcaaatgtgtaaatagtctcaaggaagatcataaccaaccattgtttggagttcagtttaactggcacagtaaagaaggagatccattagtgtttgcaactgtaggaagcaacagagttaccttgtatgaatgtcattcacaaggagaaatccggttgttgcaatcttacgtggatgctgatgctgatgaaaacttttacacttgtgcatggacctatgatagcaatacgagccatcctctgctggctgtagctggatctagaggcataattaggataataaatcctataacaatgcagtgtataaagcactatgttggccatggaaatgctatcaatgagctgaaattccatccaagagatccaaatcttctcctgtcagtaagtaaagatcatgctttacgattatggaatatccagacggacactctggtggcaatatttggaggcgtagaagggcacagagatgaagttctaagtgcttcttgtgaaaatgccattgtgtgctggaaacctggcaagatggaagatgatatagataaaattaaacccagtgaatctaatgtgactattcttgggcgatttgattacagccagtgtgacatttggtacatgaggttttctatggatttctggcaaaagatgcttgcattgggcaatcaagttggcaaactttatgtttgggatttagaagtagaagatcctcataaagccaaatgtacaacactgactcatcataaatgtggtgctgctattcgacaaaccagttttagcagggatagcagcattcttatagctgtttgtgatgatgccagtatttggcgctgggatcgacttcgataaaatacttttgcctaatcaaaattagagtgtgtttgttgtctgtgtaaaatagaattaatgtatcttgctagtaagggcacgtagagcatttagagttgtctttcagcattcaatcaggctgagctgaatgtagtgatgtttacattgtttacattctttgtactgtcttcctgctcagactc

SEQ ID NO: 129610 - DNA, 713 bp, Homo sapiens
  Payload ID: 5345
  Gene Symbol: EED
  Gene Name: embryonic ectoderm development
  ENST ID: ENST00000534595
  CDS Start-End: 1-347
ccgagagggaagtgtcgactgcgccggcgggaacagacatgcctgcggccaagaagcagaagctgagcagtgacgagaacagcaatccagacctctctggagacgagaattcttgtgaaaatgccattgtgtgctggaaacctggcaagatggaagatgatatagataaaattaaacccagtgaatctaatgtgactattcttgggcgatttgattacagccagtgtgacatttggtacatgaggttttctatggatttctggcaaaagatgcttgcattgggcaatcaagttggcaaactttatgtttgggatttagaagtagaagatcctcataaagccaagtaagtatttagaaatttctgttcaaaatttcaggctttttctccacacttgtatgccaatgtagagaagatcatttatatttgcagtgccatccttaagtcatttttaacatttactgttttcagagttaaagttattcttttttattccaataatttttgtttttcctaagtaccttggtgacaagtcatttcttgtttttatacaaattatgtagtgcttgttgaacttaaaatatatctaaattttataaaatttgagactgagctcttagtgaagtatattctggttttaagtgcttttcgtatgacttggaacatctgcttattttctaatccgctgttttagggtagacactgacaacgttat

SEQ ID NO: 129611 - DNA, 1422 bp, Homo sapiens
  Payload ID: 5345
  Gene Symbol: EED
  Gene Name: embryonic ectoderm development
  ENST ID: ENST00000527888
  CDS Start-End: 888-1208
atctttggcctctacccattagagcacagacacattgtcaaatgtcccttcgtgggcaaaccactgacctagacagtaatatgaatagtgcccacagttttgcaattttttctcattgtattctttaccacttactgcttaggtatgtgcatacaaatttgattttataggataggaaaagtataagtttgaagcctatttcaatcctatccccatatgagtgtcttgatgttaaacaactgctttacttgccttcgattgccctatttataaactgaattctaaggctatttatgtgagttcatcaactttcctaagatacctgttgagtacctactgtgtggcacagatactggatgaaggaataatagttaataaggtaaaggaaaccacctgtgattagaagcgaaatgggagactgcatggggaaagatgaaactagtgaagtaagcaagagccagattaatgccggattctgaaaagccatgtattctaattctgtgtgtttgtaattgacctgtgctataaaacacttaaagtctctgggtgtcagagtatctagagctgaacttggtttaacttgaaagagaaatgttgacttccaaaatgaatatttcagacaatgtgattcttttgtattatcgaattctgttgataatcagatttcttgtccttaagtatggtcattgactgtaaatataaatgaatgtacatcactgtacttgatagatggattaaccaggttctaagagctgtgaattccaaaacaatagaaaagccttgtttttactttgtaagattcagttcctcattaacatttctttttctcatttctctctctgttttagtcttgtgaaaatgccattgtgtgctggaaacctggcaagatggaagatgatatagataaaattaaacccagtgaatctaatgtgactattcttgggcgatttgattacagccagtgtgacatttggtacatgaggttttctatggatttctggcaaaagatgcttgcattgggcaatcaagttggcaaactttatgtttgggatttagaagtagaagatcctcataaagccaaatgtacaacactgactcatcataaatgtggtgctgctattcgacaaaccagttttagcagggatagcagcattcttatagctgtttgtgatgatgccagtatttggcgctgggatcgacttcgataaaatacttttgcctaatcaaaattagagtgtgtttgttgtctgtgtaaaatagaattaatgtatcttgctagtaagggcacgtagagcatttagagttgtctttcagcattcaatcaggctgagctgaatgtagtgatgtttacattgtttacattctttgtactgtcttcctgctcagactctactgcttttaataaaaatttatttttgtaaa

SEQ ID NO: 129612 - DNA, 966 bp, Homo sapiens
  Payload ID: 5346
  Gene Symbol: EMD
  Gene Name: emerin
  ENST ID: ENST00000369835
  CDS Start-End: 213-872
tcccgccccgcgcagcgcgcgcagcctgcggagccagcggccgtgacgcgacaacgattcggctgtgacgcgacaacgattcggctgtgacgcgagcgcggccgctcccgatgcgctcgtgccgcccccgccgtgctcctcggcagccgttgctcggccggttttggtaggcccgggccgccgccaggcctccgcctgagcccgcacccgccatggacaactacgcagatctttcggataccgagctgaccaccttgctgcgccggtacaacatcccgcacgggcctgtagtagacttgaattcgactagaggggatgcagatatgtatgatcttcccaagaaagaggacgctttactctaccagagcaagggctacaatgacgactactatgaagagagctacttcaccaccaggacttatggggagcccgagtctgccggcccgtccagggctgtccgccagtcagtgacttcattcccagatgctgacgctttccatcaccaggtgcatgatgacgatcttttgtcttcttctgaagaggagtgcaaggatagggaacgccccatgtacggccgggacagtgcctaccagagcatcacgcactaccgccctgtttcagcctccaggagctccctggacctgtcctattatcctacttcctcctccacctcttttatgtcctcctcatcatcttcctcttcatggctcacccgccgtgccatccggcctgaaaaccgtgctcctggggctgggctgggccaggatcgccaggtcccgctctggggccagctgctgcttttcctggtctttgtgatcgtcctcttcttcatttaccacttcatgcaggctgaagaaggcaaccccttctagagggagccatgagggtctgggcttcagagctaggtctttggggaagtcctggctgactgccttagcagtgggggtgggggtgggggcaggggca

SEQ ID NO: 129613 - DNA, 1379 bp, Homo sapiens
  Payload ID: 5346
  Gene Symbol: EMD
  Gene Name: emerin
  Uniprot ID: P50402
  ENST ID: ENST00000369842
  CDS Start-End: 289-1053
gacgtttgggctcgcggccccagcctcccagctctcagggcacggccggtctgtgccggctgctcccgcggttaggtcccgccccgcgcagcgcgcgcagcctgcggagccagcggccgtgacgcgacaacgattcggctgtgacgcgacaacgattcggctgtgacgcgagcgcggccgctcccgatgcgctcgtgccgcccccgccgtgctcctcggcagccgttgctcggccggttttggtaggcccgggccgccgccaggcctccgcctgagcccgcacccgccatggacaactacgcagatctttcggataccgagctgaccaccttgctgcgccggtacaacatcccgcacgggcctgtagtaggatcaactcgtaggctttacgagaagaagatcttcgagtacgagacccagaggcggcggctctcgccccccagctcgtccgccgcctcctcttatagcttctctgacttgaattcgactagaggggatgcagatatgtatgatcttcccaagaaagaggacgctttactctaccagagcaagggctacaatgacgactactatgaagagagctacttcaccaccaggacttatggggagcccgagtctgccggcccgtccagggctgtccgccagtcagtgacttcattcccagatgctgacgctttccatcaccaggtgcatgatgacgatcttttgtcttcttctgaagaggagtgcaaggatagggaacgccccatgtacggccgggacagtgcctaccagagcatcacgcactaccgccctgtttcagcctccaggagctccctggacctgtcctattatcctacttcctcctccacctcttttatgtcctcctcatcatcttcctcttcatggctcacccgccgtgccatccggcctgaaaaccgtgctcctggggctgggctgggccaggatcgccaggtcccgctctggggccagctgctgcttttcctggtctttgtgatcgtcctcttcttcatttaccacttcatgcaggctgaagaaggcaaccccttctagagggagccatgagggtctgggcttcagagctaggtctttggggaagtcctggctgactgccttagcagtgggggtgggggtgggggcaggggcaggggctttatgtgtttttgcttggggggcgctgggcctagcccagagtagtgcttgctccccctgccttgtcccaccagggaggcagcagactcaggccctccatggtcctctttgtcattttgttgacatgcattcctccttttgtcatcttgttggggggaggggattaaccaaaggccaccctgactttgtttttgtggacacacaataaaagccccgtttatttgtaa

SEQ ID NO: 129614 - DNA, 946 bp, Homo sapiens
  Payload ID: 5346
  Gene Symbol: EMD
  Gene Name: emerin
  ENST ID: ENST00000428228
  CDS Start-End: 125-190
gacgcgagcgcggccgctcccgatgcgctcgtgccgcccccgccgtgctcctcggcagccgttgctcggccggttttggtaggcccgggccgccgccaggcctccgcctgagcccgcacccgccatggacaactacgcagatctttcggataccgagctgaccaccttgctgcgccggatcaactcgtaggctttacgagaagaagatcttcgagtacgagacccagaggcggcggctctcgccccccagctcgtccgccgcctcctcttatagcttctctgacttgaattcgactagaggggatgcagatatgtatgatcttcccaagaaagaggacgctttactctaccagagcaagggctacaatgacgactactatgaagagagctacttcaccaccaggacttatggggagcccgagtctgccggcccgtccagggctgtccgccagtcagtgacttcattcccagatgctgacgctttccatcaccaggtgcatgatgacgatcttttgtcttcttctgaagaggagtgcaaggatagggaacgccccatgtacggccgggacagtgcctaccagagcatcacgcactaccgccctgtttcagcctccaggagctccctggacctgtcctattatcctacttcctcctccacctcttttatgtcctcctcatcatcttcctcttcatggctcacccgccgtgccatccggcctgaaaaccgtgctcctggggctgggctgggccaggatcgccaggtcccgctctggggccagctgctgcttttcctggtctttgtgatcgtcctcttcttcatttaccacttcatgcaggctgaagaaggcaaccccttctagagggagccatgagggtctgggcttcagagctaggtctttggggaagtcctggctgactgccttagcagtgggggtgggggtggggg

SEQ ID NO: 129615 - DNA, 4898 bp, Homo sapiens
  Payload ID: 5347
  Gene Symbol: EMG1
  Gene Name: EMG1 N1-specific pseudouridine methyltransferase
  Uniprot ID: Q92979
  ENST ID: ENST00000599672
  CDS Start-End: 32-766
gcgttagcgcaacttccggtattgttgcaagatggccgcgcccagtgatggattcaagcctcgtgaacgaagcggtggggagcaggcacaggactgggatgctctgccacccaagcggccccgactaggggcaggaaacaagatcggaggccgtaggcttattgtggtgctggaaggggccagtctggagacagtcaaggtagggaagacatatgagctactcaactgtgacaagcacaagtctatattgttgaagaatggacgggaccctggggaagcgcggccagatatcacccaccagagtttgctgatgctgatggatagtcccctgaaccgagctggcttgctacaggtttatatccatacacagaagaatgttctgattgaagtgaatccccagacccgaattcccagaacctttgaccgcttttgtggcctcatggttcaacttttacacaagctcagtgttcgagcagctgatggcccccagaagcttttgaaggtaattaagaatccagtatcagatcactttccagttggatgtatgaaagttggcacttctttttccatcccggttgtcagtgatgtgcgtgagctggtgcccagcagtgatcctattgtttttgtggtaggggcctttgcccatggcaaggtcagtgtggagtatacagagaagatggtgtccatcagtaactaccccctttctgctgccctcacctgtgcaaaacttaccacagcctttgaggaagtatggggggtcatttgacagtagtagaacctgttctgaaaccagaaactgttgatgtcacatcctttgaccctggtctgagctgactgctggaagatgatctttctgcactgagactgtggagtttggggaagccaaggctgtacatttgctatttgtttatcctatgaatactgttcttgcaaacctggttgttttggggttcctaaagtatccagtggtgtaaaactgtttgttccccgggacttcagggacagataggaggttacagagtttgcagtttggttccatgctttgaaggcaggctttagctcccagattcccatgtgctaaaggagagaaccctgatgatggagaagaactgtgaaagagagcagtcaggaatgctagtggtgaaaaactgaacaaacagaagtgattttatctaatacagttccaaggtagaaaaagtggagcaggcagggccttgcacccctctccacccccccatggggggggtggtggtagcggcacatacacaatcatagtaaattggcagaagaaaaacacaatagattcctggctagatggggagagataaggcaatgtgcatgggggaatcagaggggagatgtgagcccctctgctcctcccacaagagtttcccctttgggccgggcacggtggctcacgcctgtaatcccagcactttgggaggcggaggcgggtggatcacttgcggtcaggagttcgagaccagcctggccaacgtggtgaaatcccgtttctactgaaaatacaaaaattagctgggcatggtggcgtgcctgtattcccagctacttgggaggctgaggcaggaaaatcacttgaacccaggaggtggaggttgcggtgagctgagatcccgccactgcattccagcgtgggtgacaaagcaagacgccttctccaaaaaaaagtttcccctttggccccaaatgaagacttggctggcagcagaggcacagctggaagcatcgatcttccacctccctggcttttccattctctgctctggggcaaaggagtgctgtgaaaagggagacgagtagtttctgcaccagtcccgcacaggccacctgcaagacaagaggagtttggaaggctggttagttactcctgtaattcctggtctatagcccttccagatgtttcctagcatgcctcaataagtcacagtagtcattgcccatactgtgttccttagtagccaggctaatccttggaattcaccccagatttctaatactattgtttttttccagtctgttgctctattctgtaacctggtggtagttttagtttagctgtattaacttaccagggaaatggattattccatcttctttaacttctctttccttggcaccattgctttgtgaatataaggcaatatgaatagtaggctcaggaagaagatgtggccaaggaaatagatggatttatacacctgtggagagagaggccactaaggtagacaggcctggagtgtcctttgcaacctttgaggttgcagtgagtccctcccagtctcacaagcaggccttcacttgccttaagccatttgtcccacgtgaagaggcagaaggcagtcatggagtaacccatgaagagccagtggatggtctgttgcaccaaatagtagaagggctggaggacagtaatggcggccagcttgctcagggtggggctctcttgaatgagcctggcagcctggggagggaggaggagctcatcagcatcttgtcccttatattccccttcacccccaccctggaggcctacctgtctttccacaataacaatgaggaattccatctggaagcagaccaggtatcctgagtgcaggccgtgccagagggccaggaatagcaacgagagaccctgagagagttctttatttccaaggaacttgagtcgtttgaagatgtagctggagaaaagggtgggtggggcgaccctcaaactgactggtccttgcatcccgccacctgcctctgggtcctcaccctgaggattggattggagtgctggtgggttcccacgtgtagcccccagagggtacaggaggcagtgctgactgattacttttagagatggaaagcagacccaaggcggagctggagaccgtgtgcgcacgagccacttggttcagcagcagtgactgaggctgatgctgagatcagtggtgaaccagacactctactcaagctgcccacactctagtggtggggacaaacaagtaaagctgttgataaacagggcagtggaggacataagtccattggcagagctggagtaacacccaggtcttaacgcacttttatatcttgcctttttttcaaatatgacagtaatggtttttttgggaggggggtataggtgggggtcaaagtcagtgtgagcgacagggggttctgcccagatgggaaagacgcataggggtgacatggtacacccctgccctccaatctgggaagacagtggaaggaaggaaccagggtccaggctccccaccagcagctcaccgggccacccaggcgttggtgttgatgttgaatgaggcaatggtgccagtgaagcgggggtttgtttcaaagagccacaccttcatgttggcacaggcatcccactttgccttgcccttttcttcaaagccattgaagcccaggcccgtcaaaatgcatactccttcctgagagggaatagctcagttagggctcttgccactccccatactggcccccatggcttgtctaaataggaccttgtttcaacttttctacttactgtgaccagccaacaggtgacatatttgtacagcacaaacttgccccagatcagcatgtacatgcagcggaaccagaaggggtggttcttgagggaagaaagcacagtgcattagggatatcacatgactaggcagtttctctcagcactcttccttttcacacttgtggctggctacttcatacctgcctgagtcctgctgccagatgccctcaatagtctggcctgattgccttcacaataggcagagaggaataagcagagggcctggagaatattcattcgcctttcccttggagagcctcaagggcagcactgtatttaacttctctactgtttgccttcgttggcaaagtgtttggaatgagcatttggaatgttaagtacagaggggcccatattggattttaatttaaggagagaaacctgcccagaattactgaactgttttcaagcctttcagctgggcaggagcaaaagccagcacttccccccttcccttggtttctgaattccctagaagtgcccaaatgtatcagtcaagagaagaaaataggatggagaatcagaagctgctgtgctctgaggggtcacgtggatgtgataaggcaagctaggagcggctcctagagaaggcaacgggtgctaaatgtgcacctggcacagccctgtgcccgcgaaggttgttcagtgctggctgatgaacatgtcccagcacggctggcattgacaactcacagatctagagcaaaaccaacatgcacttgtagatgatatttcctacttctctgctatctgtagggatccttgcctgtccattttctagctctggtgcagtcatgctgctgctgctttagtagacactcacgtcatagtcttcagtgaggagatagtcttctgtgatgtgggggctgagcagtgtgtagcccactaggtagaaaaggcccagactcaggcgcttgagagcaggaatgatgctggaaaggaacgagtgaagttcctggtcacagagagcagagactattcccttcaccctctgaccttcagttatggagaggagtgtttaggggtgtggttgtctacctggaatgggatgagaagctctgctgcccaaagtgtttcctgtttcagggaaagatttctatggctggctatgaggaatggggactgcaaacctcttaagagttgtaggaaagtcagggcagcagacagtggaccagtcttgtgtttacccctcagggatgctactgatctcaaggtcttgccaggtctcacaatctccattgggactgaaaacccagtggaggtaagataataaaaataaccactttgaatctgc

SEQ ID NO: 129616 - DNA, 616 bp, Homo sapiens
  Payload ID: 5347
  Gene Symbol: EMG1
  Gene Name: EMG1 N1-specific pseudouridine methyltransferase
  ENST ID: ENST00000539196
  CDS Start-End: 1-448
gctggaaggggccagtctggagacagtcaaggtagggaagacatatgagctactcaactgtgacaagcacaagtctatattgttgaagaatggacgggaccctggggaagcgcggccagatatcacccaccagagtttgctgatgctgatggatagtcccctgaaccgagctggcttgctacaggtttatatccatacacagaagaatgttctgattgaagtgaatccccagacccgaattcccagaacctttgaccgcttttgtggcctcatggttcaacttttacacaagctcagtgttcgagcagctgatggcccccagaagcttttgaaggtcagtgtggagtatacagagaagatggtgtccatcagtaactaccccctttctgctgccctcacctgtgcaaaacttaccacagcctttgaggaagtatggggggtcatttgacagtagtagaacctgttctgaaaccagaaactgttgatgtcacatcctttgaccctggtctgagctgactgctggaagatgatctttctgcactgagactgtggagtttggggaagccaaggctgtacatttgctatttgtttatcctatgaatactgttcttgcaaa

SEQ ID NO: 129617 - DNA, 2173 bp, Homo sapiens
  Payload ID: 5348
  Gene Symbol: EMID1
  Gene Name: EMI domain containing 1
  Uniprot ID: Q96A84
  ENST ID: ENST00000334018
  CDS Start-End: 189-1520
gggccgggcgaggccgggagcgcgcgcccccgcccccgcccgcccgcctcctgcccgccctccggccgcggagctggaaaccgggctccgcgcgtccggggcggctggcggcgcgggcaggcaggcggggaggacaggctgggggcggcgaccgcgaggggccgcgcgcggagggcgcctggtgcagcatgggcggcccgcgggcttgggcgctgctctgcctcgggctcctgctcccgggaggcggcgctgcgtggagcatcggggcagctccgttctccggacgcaggaactggtgctcctatgtggtgacccgcaccatctcatgccatgtgcagaatggcacctaccttcagcgagtgctgcagaactgcccctggcccatgagctgtccggggagcagctacagaactgtggtgagacccacatacaaggtgatgtacaagatagtgaccgcccgtgagtggaggtgctgccctgggcactcaggagtgagctgcgaggaagttgcagcttcctctgcctccttggagcccatgtggtcgggcagtaccatgcggcggatggcgcttcggcccacagccttctcaggttgtctcaactgcagcaaagtgtcagagctgacagagcggctgaaggtgctggaggccaagatgaccatgctgactgtcatagagcagccagtacctccaacaccagctacccctgaggaccctgccccgctctggggtccccctcctgcccagggcagccccggagatggaggcctccaggaccaagtcggtgcttgggggcttcccgggcccaccggccccaagggagatgccggcagtcggggcccaatggggatgagaggcccaccaggtccacagggccccccagggagccctggccgggctggagctgtgggcacccctggagagaggggacctcctgggccaccagggcctcctggcccccctgggcccccagcccctgttgggccaccccatgcccggatctcccagcatggagacccattgctgtccaacaccttcactgagaccaacaaccactggccccagggacccactgggcctccaggccctccagggcccatgggtccccctgggcctcctggccccacaggtgtccctgggagtcctggtcacataggacccccaggccccactggacccaaaggaatctctggccacccaggagagaagggcgagagaggactgcgtggggagcctggcccccaaggctctgctgggcagcggggggaacctggccctaagggagaccctggtgagaagagccactggggggaggggttgcaccagctacgcgaggctttgaagattttagctgagagggttttaatcttggaaacaatgattgggctctatgaaccagagctggggtctggggcgggccctgccggcacaggcacccccagcctccttcggggcaagaggggcggacatgcaaccaactaccggatcgtggcccccaggagccgggacgagagaggctgagggtggtggcggcccctgaggcagaccaggccaggcttcccctcctacctggactcggccagctgcctccagggaccgcccgtccatatttattaatgtcctcagggtcccttctgccatctaggccttaggggtaagcaggtctcagtcctggcaccatgcacatgtctgaggctgagcaagggctgagaggagaggcttgggcctcagtttccctctgtgaagtggggggaggcaggccttcaaggagggatagaggtacaaggcttcgtctcatctgctgtctgagcatccaggcccaaaggcactgagggagtcaggagctggggctcggcacatgcagagatgacagggcagggggcagtcttcctccccctccccgaccaaacctcggggagccctcctgtgcccctccctccttgttgtccagtgctgggctccccaccccgaggtcaggctgcccaatcctctgactggatcaccgggggcttcttgcctcagttcttccctctgagcccccaggccctcccgcatctcaggttggggatggggacatggagaggaaggggccgcctactcctgcaaatgcttgtgacagatgccaggaggtagatgtgtgctggccaataaaggcccctacctgattccccgca

SEQ ID NO: 129618 - DNA, 2118 bp, Homo sapiens
  Payload ID: 5348
  Gene Symbol: EMID1
  Gene Name: EMI domain containing 1
  ENST ID: ENST00000404820
  CDS Start-End: 128-1465
ccggccgcggagctggaaaccgggctccgcgcgtccggggcggctggcggcgcgggcaggcaggcggggaggacaggctgggggcggcgaccgcgaggggccgcgcgcggagggcgcctggtgcagcatgggcggcccgcgggcttgggcgctgctctgcctcgggctcctgctcccgggaggcggcgctgcgtggagcatcggggcagctccgttctccggacgcaggaactggtgctcctatgtggtgacccgcaccatctcatgccatgtgcagaatggcacctaccttcagcgagtgctgcagaactgcccctggcccatgagctgtccggggagcagctacagaactgtggtgagacccacatacaaggtgatgtacaagatagtgaccgcccgtgagtggaggtgctgccctgggcactcaggagtgagctgcgaggaagttgcagcttcctctgcctccttggagcccatgtggtcgggcagtaccatgcggcggatggcgcttcggcccacagccttctcaggttgtctcaactgcagcaaagtgtcagagctgacagagcggctgaaggtgctggaggccaagatgaccatgctgactgtcatagagcagccagtacctccaacaccagctacccctgaggaccctgccccgctctggggtccccctcctgcccagggcagccccggagatggaggcctccaggaccaagtcggtgcttgggggcttcccgggcccaccggccccaagggagatgccggcagtcggggcccaatggggatgagaggcccaccaggtccacagggccccccagggagccctggccgggctggagctgtgggcacccctggagagaggggacctcctgggccaccagggcctcctggcccccctgggcccccagcccctgttgggccaccccatgcccggatctcccagcatggagacccattgctgtccaacaccttcactgagaccaacaaccactggccccagggacccactgggcctccaggccctccagggcccatgggtccccctgggcctcctggccccacaggtgtccctgggagtcctggtcacataggacccccaggccccactggacccaaaggaatctctggccacccaggagagaagggcgagagaggactgcgtggggagcctggcccccaaggctctgctgggcagcggggggaacctggccctaagggagaccctggtgagaagagccactgggctcctagcttacagagcttcctgcagcagcaggctcagctggagctcctggccagacgggtcaccctcctggaagccatcatctggccagaaccagagctggggtctggggcgggccctgccggcacaggcacccccagcctccttcggggcaagaggggcggacatgcaaccaactaccggatcgtggcccccaggagccgggacgagagaggctgagggtggtggcggcccctgaggcagaccaggccaggcttcccctcctacctggactcggccagctgcctccagggaccgcccgtccatatttattaatgtcctcagggtcccttctgccatctaggccttaggggtaagcaggtctcagtcctggcaccatgcacatgtctgaggctgagcaagggctgagaggagaggcttgggcctcagtttccctctgtgaagtggggggaggcaggccttcaaggagggatagaggtacaaggcttcgtctcatctgctgtctgagcatccaggcccaaaggcactgagggagtcaggagctggggctcggcacatgcagagatgacagggcagggggcagtcttcctccccctccccgaccaaacctcggggagccctcctgtgcccctccctccttgttgtccagtgctgggctccccaccccgaggtcaggctgcccaatcctctgactggatcaccgggggcttcttgcctcagttcttccctctgagcccccaggccctcccgcatctcaggttggggatggggacatggagaggaaggggccgcctactcctgcaaatgcttgtgacagatgccaggaggtagatgtgtgctggccaataaaggcccctacctgattccccgca

SEQ ID NO: 129619 - DNA, 2049 bp, Homo sapiens
  Payload ID: 5348
  Gene Symbol: EMID1
  Gene Name: EMI domain containing 1
  ENST ID: ENST00000404755
  CDS Start-End: 128-1396
ccggccgcggagctggaaaccgggctccgcgcgtccggggcggctggcggcgcgggcaggcaggcggggaggacaggctgggggcggcgaccgcgaggggccgcgcgcggagggcgcctggtgcagcatgggcggcccgcgggcttgggcgctgctctgcctcgggctcctgctcccgggaggcggcgctgcgtggagcatcggggcagctccgttctccggacgcaggaactggtgctcctatgtggtgacccgcaccatctcatgccatgtgcagaatggcacctaccttcagcgagtgctgcagaactgcccctggcccatgagctgtccggggagcagctacagaactgtggtgagacccacatacaaggtgatgtacaagatagtgaccgcccgtgagtggaggtgctgccctgggcactcaggagtgagctgcgaggaagttgcagcttcctctgcctccttggagcccatgtggtcgggcagtaccatgcggcggatggcgcttcggcccacagccttctcaggttgtctcaactgcagcaaagtgtcagagctgacagagcggctgaaggtgctggaggccaagatgaccatgctgactgtcatagagcagccagtacctccaacaccagctacccctgaggaccctgccccgctctggggtccccctcctgcccagggcagccccggagatggaggcctccaggaccaagtcggtgcttgggggcttcccgggcccaccggccccaagggagatgccggcagtcggggcccaatggggatgagaggcccaccaggtccacagggccccccagggagccctggccgggctggagctgtgggcacccctggagagaggggacctcctgggccaccagggcctcctggcccccctgggcccccagcccctgttgggccaccccatgcccggatctcccagcatggagacccattgctgtccaacaccttcactgagaccaacaaccactggccccagggacccactgggcctccaggccctccagggcccatgggtccccctgggcctcctggccccacaggtgtccctgggagtcctggtcacataggactgcgtggggagcctggcccccaaggctctgctgggcagcggggggaacctggccctaagggagaccctggtgagaagagccactggggggaggggttgcaccagctacgcgaggctttgaagattttagctgagagggttttaatcttggaaacaatgattgggctctatgaaccagagctggggtctggggcgggccctgccggcacaggcacccccagcctccttcggggcaagaggggcggacatgcaaccaactaccggatcgtggcccccaggagccgggacgagagaggctgagggtggtggcggcccctgaggcagaccaggccaggcttcccctcctacctggactcggccagctgcctccagggaccgcccgtccatatttattaatgtcctcagggtcccttctgccatctaggccttaggggtaagcaggtctcagtcctggcaccatgcacatgtctgaggctgagcaagggctgagaggagaggcttgggcctcagtttccctctgtgaagtggggggaggcaggccttcaaggagggatagaggtacaaggcttcgtctcatctgctgtctgagcatccaggcccaaaggcactgagggagtcaggagctggggctcggcacatgcagagatgacagggcagggggcagtcttcctccccctccccgaccaaacctcggggagccctcctgtgcccctccctccttgttgtccagtgctgggctccccaccccgaggtcaggctgcccaatcctctgactggatcaccgggggcttcttgcctcagttcttccctctgagcccccaggccctcccgcatctcaggttggggatggggacatggagaggaaggggccgcctactcctgcaaatgcttgtgacagatgccaggaggtagatgtgtgctggccaataaaggcccctacctgattccccgca

SEQ ID NO: 129620 - DNA, 641 bp, Homo sapiens
  Payload ID: 5348
  Gene Symbol: EMID1
  Gene Name: EMI domain containing 1
  ENST ID: ENST00000430127
  CDS Start-End: 117-641
gctggaaaccgggctccgcgcgtccggggcggctggcggcgcgggcaggcaggcggggaggacaggctgggggcggcgaccgcgaggggccgcgcgcggagggcgcctggtgcagcatgggcggcccgcgggcttgggcgctgctctgcctcgggctcctgctcccgggaggcggcgctgcgtggagcatcggggcagctccgttctccggacgcaggaactggtgctcctatgtggtgacccgcaccatctcatgccatgtgcagaatggcacctaccttcagcgagtgctgcagaactgcccctggcccatgagctgtccggggagcagctacagaactgtggtgagacccacatacaaggtgatgtacaagatagtgaccgcccgtgagtggaggtgctgccctgggcactcaggagtgagctgcgaggaaggttgtctcaactgcagcaaagtgtcagagctgacagagcggctgaaggtgctggaggccaagatgaccatgctgactgtcatagagcagccagtacctccaacaccagctacccctgaggaccctgccccgctctggggtccccctcctgcccagggcagccccggagatggaggcctccaggaccaagtcggtgcttgggggctt

SEQ ID NO: 129621 - DNA, 482 bp, Homo sapiens
  Payload ID: 5348
  Gene Symbol: EMID1
  Gene Name: EMI domain containing 1
  ENST ID: ENST00000435427
  CDS Start-End: 81-185
cggcgcgggcaggcaggcggggaggacaggctgggggcggcgaccgcgaggggccgcgcgcggagggcgcctggtgcagcatgggcggcccgcgggcttgggcgctgctctgcctcgggctcctgctcccgggaggcggcgctgcgtggagcatcggggcagctccgttctccggacgcagatgaccatgctgactgtcatagagcagccagtacctccaacaccagctacccctgaggaccctgccccgctctggggtccccctcctgcccagggcagccccggagatggaggcctccaggaccaagtcggtgcttgggggcttcccgggcccaccggccccaagggagatgccggcagtcggggcccaatggggatgagaggcccaccaggtccacagggccccccagggagccctggccgggctggagctgtgggcacccctggagagaggggacctcctgggccaccagggcctcctg

SEQ ID NO: 129622 - DNA, 769 bp, Homo sapiens
  Payload ID: 5348
  Gene Symbol: EMID1
  Gene Name: EMI domain containing 1
  ENST ID: ENST00000429226
  CDS Start-End: 134-769
cgccctccggccgcggagctggaaaccgggctccgcgcgtccggggcggctggcggcgcgggcaggcaggcggggaggacaggctgggggcggcgaccgcgaggggccgcgcgcggagggcgcctggtgcagcatgggcggcccgcgggcttgggcgctgctctgcctcgggctcctgctcccgggaggcggcgctgcgtggagcatcggggcagctccgttctccggacgcaggaactggtgctcctatgtggtgacccgcaccatctcatgccatgtgcagaatggcacctaccttcagcgagtgctgcagaactgcccctggcccatgagctgtccggggagcagctacagaactgtggtgagacccacatacaaggtgatgtacaagatagtgaccgcccgtgagtggaggtgctgccctgggcactcaggagtgagctgcgaggaagttgcagcttcctctgcctccttggagcccatgtggtcgggcagtaccatgcggcggatggcgcttcggcccacagccttctcaggttgtctcaactgcagcaaagtgtcagagctgacagagcggctgaaggtgctggaggccaagatgaccatgctgactgtcatagagcagccagtacctccaacaccagctacccctgaggaccctgccccgctctggggtccccctcctgcccagggcagccccggagatggaggcctccagggagacccattgctgtccaacaccttcactgagaccaacaaccactggccc

SEQ ID NO: 129623 - DNA, 707 bp, Homo sapiens
  Payload ID: 5348
  Gene Symbol: EMID1
  Gene Name: EMI domain containing 1
  ENST ID: ENST00000433143
  CDS Start-End: 1-707
agatgaccatgctgactgtcatagagcagccagtacctccaacaccagctacccctgaggaccctgccccgctctggggtccccctcctgcccagggcagccccggagatggaggcctccaggggctgccaggagccatagagagtgtgagggtcccgctgcttccccgaaatgaccaagtcggtgcttgggggcttcccgggcccaccggccccaagggagatgccggcagtcggggcccaatggggatgagaggcccaccaggtccacagggccccccagggagccctggccgggctggagctgtgggcacccctggagagaggggacctcctgggccaccagggcctcctggcccccctgggcccccagcccctgttgggccaccccatgcccggatctcccagcatggagacccattgctgtccaacaccttcactgagaccaacaaccactggccccagggacccactgggcctccaggccctccagggcccatgggtccccctgggcctcctggccccacaggtgtccctgggagtcctggtcacataggacccccaggccccactggacccaaaggaatctctggccacccaggagagaagggcgagagaggactgcgtggggagcctggcccccaaggctctgctgggcagcggggggaacctggccctaagggagaccctggtgagaagagccactgg

SEQ ID NO: 129624 - DNA, 714 bp, Homo sapiens
  Payload ID: 5349
  Gene Symbol: EBP
  Gene Name: emopamil binding protein (sterol isomerase)
  ENST ID: ENST00000446158
  CDS Start-End: 234-714
cctaaagagagcccggagccagcgtgggaggccgctgccgtcgcgcgccttgcgctgcacgccagacaccggcctttcaatatccgtctcttccctgcaggttgacggcgttgcacgctctcgcggggaggctctggctttccaaacgctggcaccgagggtttttctgttccttttttttttttttttttaacttcctgcctatacacacgcagccatcagcccacaaagacatgactaccaacgcgggccccttgcacccatactggcctcagcacctaagactggacaactttgtacctaatgaccgccccacctggcatatactggctggcctcttctctgtcacaggggtcttagtcgtgaccacatggctgttgtcaggtcgtgctgcggttgtcccattggggacttggcggcgactgtccctgtgctggtttgcagtgtgtgggttcattcacctggtgatcgagggctggttcgttctctactacgaagacctgcttggagaccaagccttcttatctcaactctggaaagagtatgccaagggagacagccgatacatcctgggtgacaacttcacagtgtgcatggaaaccatcacagcttgcctgtggggaccactcagcctgtgggtggtgatcgcctttctccgccagcatcccctccgcttcattctacagcttgtggtctctgtgggccagatctatg

SEQ ID NO: 129625 - DNA, 609 bp, Homo sapiens
  Payload ID: 5349
  Gene Symbol: EBP
  Gene Name: emopamil binding protein (sterol isomerase)
  ENST ID: ENST00000414061
  CDS Start-End: 173-609
cggagccagcgtgggaggccgctgccgtcgcgcgccttggttgacggcgttgcacgctctcgcggggaggctctggctttccaaacgctggcaccgagggtttttctgttccttttttttttttttttttaacttcctgcctatacacacgcagccatcagcccacaaagacatgactaccaacgcgggccccttgcacccatactggcctcagcacctaagactggacaactttgtacctaatgaccgccccacctggcatatactggctggcctcttctctgtcacaggggtcttagtcgtgaccacatggctgttgtcaggtcgtgctgcggttgtcccattggggacttggcggcgactgtccctgtgctggtttgcagtgtgtgggttcattcacctggtgatcgagggctggttcgttctctactacgaagacctgcttggagaccaagccttcttatctcaactctggaaagagtatgccaagggagacagccgatacatcctgggtgacaacttcacagtgtgcatggaaaccatcacagcttgcctgtggggaccactcagcctgtgggtggtgatcgcctttctccgccagcatcccct

SEQ ID NO: 129626 - DNA, 1775 bp, Homo sapiens
  Payload ID: 5349
  Gene Symbol: EBP
  Gene Name: emopamil binding protein (sterol isomerase)
  Uniprot ID: Q15125
  ENST ID: ENST00000495186
  CDS Start-End: 824-1516
tctaattggatgggaggtctgggatgggtctggattctgattgattgctccatctgggggcccactggtggttaggcgtttgattggctttttagaactggcatatggagattgagggtcttcatgccaattggtcagtaggactgagaggcctgggttctaactagttcttctgacttgaggtcgggagaagagagaatgaccgctgctattaggactgaggagttctgagcactgaagagctggggagggggtggttgcagtgtatagcgtgtgatctgcttgtaacagtttcgttgcattatactaagggttactctacctagaaaagggcggaggtgaaaggatgcaacgcaacgctaatttcaccagcggaagaagcgggtacagaccttaatgagtccccgttttgatcgactgataagggaatggggaaattgaagccaggactcgatgcagattggctacggatccaaaacgcccactaaccttggcgcgtcccagtctccaccccaaacctaactcaggtgaaaatggcgccacgcgcgggggcggggctagaggtacaaagagagtgtctattggttgggagcggcacgggccgccttcttcgcttcaccattggctcgctccgtaaggcaagagaacccactaggggatgagcccgaactagggatgtgacagagcgcgagacccagcctaaagagagcccggagccagcgtgggaggccgctgccgtcgcgcgccttggtttttctgttccttttttttttttttttttaacttcctgcctatacacacgcagccatcagcccacaaagacatgactaccaacgcgggccccttgcacccatactggcctcagcacctaagactggacaactttgtacctaatgaccgccccacctggcatatactggctggcctcttctctgtcacaggggtcttagtcgtgaccacatggctgttgtcaggtcgtgctgcggttgtcccattggggacttggcggcgactgtccctgtgctggtttgcagtgtgtgggttcattcacctggtgatcgagggctggttcgttctctactacgaagacctgcttggagaccaagccttcttatctcaactctggaaagagtatgccaagggagacagccgatacatcctgggtgacaacttcacagtgtgcatggaaaccatcacagcttgcctgtggggaccactcagcctgtgggtggtgatcgcctttctccgccagcatcccctccgcttcattctacagcttgtggtctctgtgggccagatctatggggatgtgctctacttcctgacagagcaccgcgacggattccagcacggagagctgggccaccctctctacttctggttttactttgtcttcatgaatgccctgtggctggtgctgcctggagtccttgtgcttgatgctgtgaagcacctcactcatgcccagagcacgctggatgccaaggccacaaaagccaagagcaagaagaactgaggagtggtggaccaggctcgaacactggccgaggaggagctctctgcctgccagaagagtctagtcctgctcccacagtttggagggacaaagctaattgatctgtcacactcaggctcatgggcaggcacaagaaggggaataaaggggctgtgtgaaggcactgctgggagccattagaacacagatacaagagaagccaggaggtctatgatggtgacgatttttaaaatcaggaaataaaagatcttgactctaa

SEQ ID NO: 129627 - DNA, 914 bp, Homo sapiens
  Payload ID: 5350
  Gene Symbol: EBPL
  Gene Name: emopamil binding protein-like
  Uniprot ID: Q9BY08
  ENST ID: ENST00000242827
  CDS Start-End: 52-672
tgctttcctctgccgcatggtcctgggccgttggcgtcggaagcctgaagcatgggcgctgagtgggagctgggggccgaggctggcggttcgctgctgctgtgcgccgcgctgctggcggcgggctgcgccctgggcctgcgcctgggccgcgggcagggggcggcggaccgcggggcgctcatctggctctgctacgacgcgctggtgcacttcgcgctggaaggcccttttgtctacttgtctttagtaggaaacgttgcaaattccgatggcttgattgcttctttatggaaagaatatggcaaagctgatgcaagatgggtttattttgatccaaccattgtgtctgtggaaattctgaccgtcgccctggatgggtctctggcattgttcctcatttatgccatagtcaaagaaaaatattaccggcatttcctgcagatcaccctgtgcgtgtgcgagctgtatggctgctggatgaccttcctcccagagtggctcaccagaagccccaacctcaacaccagcaactggctgtactgttggctttacctgtttttttttaacggtgtgtgggttctgatcccaggactgctactgtggcagtcatggctagaactcaagaaaatgcatcagaaagaaaccagttcagtgaagaagtttcagtgaactttcaaaaccataaacaccattatctaacttcatgaaccagaatgaatcaaatctttttgtttggccaaaatgtaatacattccagtctacactttgtttttgtattgttgctcctgaacaacctgtttcaaattggttttaaggcgaccagttttcgttgtattgttgttcaattaaatggtgatatagggaaaagagaacaaatttgaatttgtaataataaaatgtttaattataca

SEQ ID NO: 129628 - DNA, 680 bp, Homo sapiens
  Payload ID: 5350
  Gene Symbol: EBPL
  Gene Name: emopamil binding protein-like
  Uniprot ID: Q9BY08
  ENST ID: ENST00000378268
  CDS Start-End: 40-498
ccgcatggtcctgggccgttggcgtcggaagcctgaagcatgggcgctgagtgggagctgggggccgaggctggcggttcgctgctgctgtgcgccgcgctgctggcggcgggctgcgccctgggcctgcgcctgggccgcgggcagggggcggcggaccgcggggcgctcatctggctctgctacgacgcgctggtgcacttcgcgctggaaggcccttttgtctacttgtctttagtaggaaacgttgcaaattccgatggcttgattgcttctttatgcgagtctcgctctgtcccccaggctggagcacagtggcaccatctcggctcactgcaagctccgcctcccaggttcacgccattctcctgcctcagcctcccgagtagctgggactacaggcgcccgccaccacgcctagctaatttttttgtatttttagtagagacggggtttcaccatgttagccaggatggtctcgatctcctgacctcgtgatctgcccacctcggcctcccaaagtgctggggttataggcatgagccaccgcgcctggcccatatatctcatttctttgtgactctaaaatcatctccagctaggatctgtgtgggggactcctgtttaccactagtgttaggaaacatctagagaattgagtaggctcattagtacttccc

SEQ ID NO: 129629 - DNA, 579 bp, Homo sapiens
  Payload ID: 5350
  Gene Symbol: EBPL
  Gene Name: emopamil binding protein-like
  Uniprot ID: Q9BY08
  ENST ID: ENST00000378270
  CDS Start-End: 34-342
ggtcctgggccgttggcgtcggaagcctgaagcatgggcgctgagtgggagctgggggccgaggctggcggttcgctgctgctgtgcgccgcgctgctggcggcgggctgcgccctgggcctgcgcctgggccgcgggcagggggcggcggaccgcggggcgctcatctggctctgctacgacgcgctggtgcacttcgcgctggcatttcctgcagatcaccctgtgcgtgtgcgagctgtatggctgctggatgaccttcctcccagagtggctcaccagaagccccaacctcaacaccagcaactggctgtactgttggctttacctgtttttttttaacggtgtgtgggttctgatcccaggactgctactgtggcagtcatggctagaactcaagaaaatgcatcagaaagaaaccagttcagtgaagaagtttcagtgaactttcaaaaccataaacaccattatctaacttcatgaaccagaatgaatcaaatctttttgtttggccaaaatgtaatacattccagtctacactttgtttttgtattgttgctcctgaacaacctgtttcaa

SEQ ID NO: 129630 - DNA, 766 bp, Homo sapiens
  Payload ID: 5350
  Gene Symbol: EBPL
  Gene Name: emopamil binding protein-like
  Uniprot ID: Q9BY08
  ENST ID: ENST00000378272
  CDS Start-End: 40-333
ccgcatggtcctgggccgttggcgtcggaagcctgaagcatgggcgctgagtgggagctgggggccgaggctggcggttcgctgctgctgtgcgccgcgctgctggcggcgggctgcgccctgggcctgcgcctgggccgcgggcagggggcggcggaccgcggggcgctcatctggctctgctacgacgcgctggtgcacttcgcgctggaaggcccttttgtctacttgtctttagtaggaaacgttgcaaattccgatggcttgattgcttctttatgcatttcctgcagatcaccctgtgcgtgtgcgagctgtatggctgctggatgaccttcctcccagagtggctcaccagaagccccaacctcaacaccagcaactggctgtactgttggctttacctgtttttttttaacggtgtgtgggttctgatcccaggactgctactgtggcagtcatggctagaactcaagaaaatgcatcagaaagaaaccagttcagtgaagaagtttcagtgaactttcaaaaccataaacaccattatctaacttcatgaaccagaatgaatcaaatctttttgtttggccaaaatgtaatacattccagtctacactttgtttttgtattgttgctcctgaacaacctgtttcaaattggttttaaggcgaccagttttcgttgtattgttgttcaattaaatggtgatatagggaaaagagaacaaatttgaatttgtaataataaaatgtttaattatacattt

SEQ ID NO: 129631 - DNA, 967 bp, Homo sapiens
  Payload ID: 5350
  Gene Symbol: EBPL
  Gene Name: emopamil binding protein-like
  ENST ID: ENST00000378284
  CDS Start-End: 40-444
ccgcatggtcctgggccgttggcgtcggaagcctgaagcatgggcgctgagtgggagctgggggccgaggctggcggttcgctgctgctgtgcgccgcgctgctggcggcgggctgcgccctgggcctgcgcctgggccgcgggcagggggcggcggaccgcggggcgctcatctggctctgctacgacgcgctggtgcacttcgcgctggaaggcccttttgtctacttgtctttagtaggaaacgttgcaaattccgatggcttgattgcttctttatggaaagaatatggcaaagctgatgcaagatgggtttattttgatccaaccattgtgtctgtggaaattctgaccgtcgccctggatgggtctctggcattgttcctcatttatgccatagtcaaagaaaaatattaccgggacagagtggcctggggtgaatagattgctatcctgagatgaatccctaaaacaatttcaagcatttcctgcagatcaccctgtgcgtgtgcgagctgtatggctgctggatgaccttcctcccagagtggctcaccagaagccccaacctcaacaccagcaactggctgtactgttggctttacctgtttttttttaacggtgtgtgggttctgatcccaggactgctactgtggcagtcatggctagaactcaagaaaatgcatcagaaagaaaccagttcagtgaagaagtttcagtgaactttcaaaaccataaacaccattatctaacttcatgaaccagaatgaatcaaatctttttgtttggccaaaatgtaatacattccagtctacactttgtttttgtattgttgctcctgaacaacctgtttcaaattggttttaaggcgaccagttttcgttgtattgttgttcaattaaatggtgatatagggaaaagagaacaaatttgaatttgtaataataaaatgtttaattatacattt

SEQ ID NO: 129632 - DNA, 2188 bp, Homo sapiens
  Payload ID: 5351
  Gene Symbol: EMX1
  Gene Name: empty spiracles homeobox 1
  Uniprot ID: Q04741
  ENST ID: ENST00000258106
  CDS Start-End: 379-1251
aggtgagcggcggccaatgggcgagcgcggggcaggtgcccgctaactcgcgcctcgcagcgctgggcggccggggctgggcagggcagtgcggggacaccgggggctggggtcggtcccagcgggactccgaaaggagggagacgagctcaaccctcgggccttactggcagctcgcagcctagcacggagcccgcgcctgtgcgggcgcctggagctgcccgctccgccgcagcagccgccgcgcctggccgtacgctgtggccggaccccgcggtcgctcgctcacacacccctcgccgctccgcgcctggctcgcccgcgggggccgagcgcgagcgggcgggcgggggaggtgaggggtgcgggcgggtgtgcatgtgcctggctgggtgcacaccccgcaaggcggcggcgccaggacgcggagcgctccccagagcccggctgcctcgcacagctcccgcggctgcgaccatgttccagcccgcggccaagcgcggctttaccatagagtccttggtggccaaggacggcggcaccggcgggggcactggcggcgggggcgcgggctcccatctcctggcggcggccgcctccgaggaaccgctccggcccacggcgctcaactaccctcaccccagcgcggccgaggcggccttcgtgagtggcttccctgccgcggccgccgcgggcgcgggccgctcgctctacggtgggcccgagctcgtgttccccgaggccatgaaccaccccgcgctgaccgtgcatccggcgcaccagctgggcgcctccccgctgcagcccccgcactccttcttcggcgcccagcaccgggaccctctccatttctacccctgggtcctgcggaaccgcttcttcggccaccgcttccaggccagcgacgtgccccaggacgggctgcttctgcacggccccttcgcacgcaagcccaagcggatccgcacggccttctcgccctcgcagctgctgcggctggagcgcgccttcgagaagaaccactacgtggtgggcgccgagcggaagcagctggccggcagtctcagcctctccgagacgcaggtgaaggtgtggttccagaaccggaggacaaagtacaaacggcagaagctggaggaggaagggcctgagtccgagcagaagaagaagggctcccatcacatcaaccggtggcgcattgccacgaagcaggccaatggggaggacatcgatgtcacctccaatgactagggtgggcaaccacaaacccacgagggcagagtgctgcttgctgctggccaggcccctgcgtgggcccaagctggactctggccactccctggccaggctttggggaggcctggagtcatggccccacagggcttgaagcccggggccgccattgacagagggacaagcaatgggctggctgaggcctgggaccacttggccttctcctcggagagcctgcctgcctgggcgggcccgcccgccaccgcagcctcccagctgctctccgtgtctccaatctcccttttgttttgatgcatttctgttttaatttattttccaggcaccactgtagtttagtgatccccagtgtcccccttccctatgggaataataaaagtctctctcttaatgacacgggcatccagctccagccccagagcctggggtggtagattccggctctgagggccagtgggggctggtagagcaaacgcgttcagggcctgggagcctggggtggggtactggtggagggggtcaagggtaattcattaactcctctcttttgttgggggaccctggtctctacctccagctccacagcaggagaaacaggctagacatagggaagggccatcctgtatcttgagggaggacaggcccaggtctttcttaacgtattgagaggtgggaatcaggcccaggtagttcaatgggagagggagagtgcttccctctgcctagagactctggtggcttctccagttgaggagaaaccagaggaaaggggaggattggggtctgggggagggaacaccattcacaaaggctgacggttccagtccgaagtcgtgggcccaccaggatgctcacctgtccttggagaaccgctgggcaggttgagactgcagagacagggcttaaggctgagcctgcaaccagtccccagtgactc

SEQ ID NO: 129633 - DNA, 480 bp, Homo sapiens
  Payload ID: 5351
  Gene Symbol: EMX1
  Gene Name: empty spiracles homeobox 1
  ENST ID: ENST00000473732
  CDS Start-End: 39-480
cgctctacggtgggcccgagctcgtgttccccgaggccatgaaccaccccgcgctgaccgtgcatccggcgcaccagctgggcgcctccccgctgcagcccccgcactccttcttcggcgcccagcaccgggaccctctccatttctacccctgggtcctgcggaaccgcttcttcggccaccgcttccaggccagcgacgtgccccaggacgggctgcttctgcacggccccttcgcacgcaagcccaagcggatccgcacggccttctcgccctcgcagctgctgcggctggagcgcgccttcgagaagaaccactacgtggtgggcgccgagcggaagcagctggccggcagtctcagcctctccgagacgcaggtccgacgtgttggagtggggctcagcgaccctcagcctagctgctgccctggaggtggatttcagtctctgcgtgccggccggctcccagagttgcgagagg

SEQ ID NO: 129634 - DNA, 1528 bp, Homo sapiens
  Payload ID: 5351
  Gene Symbol: EMX1
  Gene Name: empty spiracles homeobox 1
  ENST ID: ENST00000394111
  CDS Start-End: 425-1054
gagttgcgcggcgcacggaccccgtggccttggggcgtcaggaggcccaacccagatctgcgcgcccaggcagcgctcaggccgctagaatggaccccggcagcggcgaggaagcggaactctctgcggctccctctccgcagtgcgccggcaaggtccaggtcccagcctccccaccgccgcccgcgccctcctaggcctcggagcggcgcctttctgcggcctcgaaggtggggtgggaaagtttggggagtcccggctctcacagcctgtcgtgagaactgcccccggggaattcgtccgccgtacggaaaaactggccggagcagagtcgtccgcggttccgcggtcgcgggtggaaggtgaaggtcgagggaggtcaggctgcttctgcgtgtcctgacggctggcgtgttctcttgagatgggctcgggctacttggccagcttcaatttaagccacagtgtctccgaggccctgacctggtccggcccgccgacacttgagcccccagagcctcagagaaggcgagggggtggatctcccagtgccgaggcccgccgtcctggtccaagccggtcgcggcaccgtgtctgggcactggagctgcttccagccccgcgaacagctggagggtggcagtgggaccgctccggcggcttctcccgcgcagtgccccgcctggccccttgtgaagggagtgagcgtcccctttccagagctgtcccccgtgacatccagaaaacgcgaaacctcaggaacaaggtcgcagcttcagaccgcggcccaggaggccgatgccagcgacgtgccccaggacgggctgcttctgcacggccccttcgcacgcaagcccaagcggatccgcacggccttctcgccctcgcagctgctgcggctggagcgcgccttcgagaagaaccactacgtggtgggcgccgagcggaagcagctggccggcagtctcagcctctccgagacgcaggtgaaggtgtggttccagaaccggaggacaaagtacaaacggcagaagctggaggaggaagggcctgagtccgagcagaagaagaagggctcccatcacatcaaccggtggcgcattgccacgaagcaggccaatggggaggacatcgatgtcacctccaatgactagggtgggcaaccacaaacccacgagggcagagtgctgcttgctgctggccaggcccctgcgtgggcccaagctggactctggccactccctggccaggctttggggaggcctggagtcatggccccacagggcttgaagcccggggccgccattgacagagggacaagcaatgggctggctgaggcctgggaccacttggccttctcctcggagagcctgcctgcctgggcgggcccgcccgccaccgcagcctcccagctgctctccgtgtctccaatctcccttttgttttgatgcatttctgttttaatttattttccaggcaccactgtagtttagtgatccccagtgtcccccttccctatgggaataat

SEQ ID NO: 129635 - DNA, 2897 bp, Homo sapiens
  Payload ID: 5352
  Gene Symbol: EMX2
  Gene Name: empty spiracles homeobox 2
  Uniprot ID: Q04743
  ENST ID: ENST00000553456
  CDS Start-End: 825-1583
gcgggcgccgcaggagcgagtgagctgggagcgaggggcgaaggcgcggagaagcccggccgcccggtgggcggcagaaggctcagccgaggcggcggcgccgactccgttccactctcggcccggatccaggcctccgggttcccaggcgctcacctccctctgacgcactttaaagagtctccccccttccacctcagggcgagtaatagcgaccaatcatcaagccatttaccaggcttcggaggaagctgtttatgtgatccccgcactaattaggctcatgaactaacaaatcgtttgcacaacttgtgaagaagcgaacacttccatggattgtccttggacttagggcgccctgcccgccttttgcagaggagaaaaaacttttttttttttttgcctcccccgagaactttccccccttctcctccctgcctctaactccgatccccccacgccatctcgccaaaaaaaaaaaaaaaaaaaaaaaagaaaaaaaaagaaaaaaaaagaaaaaaaattaccccaatccacgcctgcaaattcttctggaaggattttcccccctctcttcaggttgggcgcgtttggtgcaagattctcgggatcctcggctttgcctctccctctccctcccccctcctttcctttttcctttcctttcctttctttcttcctttccttccccccacccccacccccaccccaaacaaacgagtccccaattctcgtccgtcctcgccgcgggcagcgggcggcggaggcagcgtgcggcggtcgccaggagctgggagcccagggcgcccgctcctcggcgcagcatgttccagccggcgcccaagcgctgcttcaccatcgagtcgctggtggccaaggacagtcccctgcccgcctcgcgctccgaggaccccatccgtcccgcggcactcagctacgctaactccagccccataaatccgttcctcaacggcttccactcggccgccgccgccgccgccggtaggggcgtctactccaacccggacttggtgttcgccgaggcggtctcgcacccgcccaaccccgccgtgccagtgcacccggtgccgccgccgcacgccctggccgcccaccccctaccctcctcgcactcgccacaccccctattcgcctcgcagcagcgggatccgtccaccttctacccctggctcatccaccgctaccgatatctgggtcatcgcttccaagggaacgacactagccccgagagtttccttttgcacaacgcgctggcccgaaagcccaagcggatccgaaccgccttctccccgtcccagcttctaaggctggaacacgcctttgagaagaatcactacgtggtgggcgccgaaaggaagcagctggcacacagcctcagcctcacggaaactcaggtaaaagtatggtttcagaaccgaagaacaaagttcaaaaggcagaagctggaggaagaaggctcagattcgcaacaaaagaaaaaagggacgcaccatattaaccggtggagaatcgccaccaagcaggcgagtccggaggaaatagacgtgacctcagatgattaaaaacataaacctaaccccacagaaacggacaacatggagcaaaagagacagggagaggtggagaaggaaaaaaccctacaaaacaaaaacaaaccgcatacacgttcaccgagaaagggagagggaatcggagggagcagcggaatgcggcgaagactctggacagcgagggcacagggtcccaaaccgaggccgcgccaagatggcagaggatggaggctccttcatcaacaagcgaccctcgtctaaagaggcagctgagtgagagacacagagagaaggagaaagagggagggagagagagaaagagagagaaagagagagagagagagagagagagaaagctgaacgtgcactctgacaaggggagctgtcaatcaaacaccaaaccggggagacaagatgattggcaggtattccgtttatcacagtccacttaaaaaatgatgatgatgataaaaaccacgacccaaccaggcacaggacttttttgttttttgcacttcgctgtgtttcccccccatctttaaaaataattagtaataaaaaacaaaaattccatatctagccccatcccacacctgtttcaaatccttgaaatgcatgtagcagttgttgggcgaatggtgtttaaagaccgaaaatgaattgtaattttcttttccttttaaagacaggttctgtgtgctttttattttgattttttttcccaagaaatgtgcagtctgtaaacactttttgataccttctgatgtcaaagtgattgtgcaagctaaatgaagtaggctcagcgatagtggtcctcttacagagaaacggggagcaggacgacgggggggctgggggtggcgggggagggtgcccacaaaaagaatcaggacttgtactgggaaaaaaacccctaaattaattatatttcttggacattccctttcctaacatcctgaggcttaaaaccctgatgcaaacttctcctttcagtggttggagaaattggccgagttcaaccattcactgcaatgcctattccaaactttaaatctatctattgcaaaacctgaaggactgtagttagcggggatgatgttaagtgtggccaagcgcacggcggcaagttttcaagcactgagtttctattccaagatcatagacttactaaagagagtgacaaatgcttccttaatgtcttctataccagaatgtaaatatttttgtgttttgtgttaatttgttagaattctaacacactatatacttccaagaagtatgtcaatgtcaatattttgtcaataaagatttatcaatatgccctca

SEQ ID NO: 129636 - DNA, 2710 bp, Homo sapiens
  Payload ID: 5352
  Gene Symbol: EMX2
  Gene Name: empty spiracles homeobox 2
  Uniprot ID: Q04743
  ENST ID: ENST00000442245
  CDS Start-End: 824-1333
cgggcgccgcaggagcgagtgagctgggagcgaggggcgaaggcgcggagaagcccggccgcccggtgggcggcagaaggctcagccgaggcggcggcgccgactccgttccactctcggcccggatccaggcctccgggttcccaggcgctcacctccctctgacgcactttaaagagtctccccccttccacctcagggcgagtaatagcgaccaatcatcaagccatttaccaggcttcggaggaagctgtttatgtgatccccgcactaattaggctcatgaactaacaaatcgtttgcacaacttgtgaagaagcgaacacttccatggattgtccttggacttagggcgccctgcccgccttttgcagaggagaaaaaacttttttttttttttgcctcccccgagaactttccccccttctcctccctgcctctaactccgatccccccacgccatctcgccaaaaaaaaaaaaaaaaaaaaaaaagaaaaaaaaagaaaaaaaaagaaaaaaaattaccccaatccacgcctgcaaattcttctggaaggattttcccccctctcttcaggttgggcgcgtttggtgcaagattctcgggatcctcggctttgcctctccctctccctcccccctcctttcctttttcctttcctttcctttctttcttcctttccttccccccacccccacccccaccccaaacaaacgagtccccaattctcgtccgtcctcgccgcgggcagcgggcggcggaggcagcgtgcggcggtcgccaggagctgggagcccagggcgcccgctcctcggcgcagcatgttccagccggcgcccaagcgctgcttcaccatcgagtcgctggtggccaaggacagtcccctgcccgcctcgcgctccgaggaccccatccgtcccgcggcactcagctacgctaactccagccccataaatccgttcctcaacggcttccactcggccgccgccgccgccgccggtaggggcgtctactccaacccggacttggtgttcgccgaggcggtctcgcacccgcccaaccccgccgtgccagtgcacccggtgccgccgccgcacgccctggccgcccaccccctaccctcctcgcactcgccacaccccctattcgcctcgcagcagcgggatccgtccaccttctacccctggctcatccaccgctaccgatatctgggtcatcgcttccaaggtaaaagtatggtttcagaaccgaagaacaaagttcaaaaggcagaagctggaggaagaaggctcagattcgcaacaaaagaaaaaagggacgcaccatattaaccggtggagaatcgccaccaagcaggcgagtccggaggaaatagacgtgacctcagatgattaaaaacataaacctaaccccacagaaacggacaacatggagcaaaagagacagggagaggtggagaaggaaaaaaccctacaaaacaaaaacaaaccgcatacacgttcaccgagaaagggagagggaatcggagggagcagcggaatgcggcgaagactctggacagcgagggcacagggtcccaaaccgaggccgcgccaagatggcagaggatggaggctccttcatcaacaagcgaccctcgtctaaagaggcagctgagtgagagacacagagagaaggagaaagagggagggagagagagaaagagagagaaagagagagagagagagagagagagaaagctgaacgtgcactctgacaaggggagctgtcaatcaaacaccaaaccggggagacaagatgattggcaggtattccgtttatcacagtccacttaaaaaatgatgatgatgataaaaaccacgacccaaccaggcacaggacttttttgttttttgcacttcgctgtgtttcccccccatctttaaaaataattagtaataaaaaacaaaaattccatatctagccccatcccacacctgtttcaaatccttgaaatgcatgtagcagttgttgggcgaatggtgtttaaagaccgaaaatgaattgtaattttcttttccttttaaagacaggttctgtgtgctttttattttgattttttttcccaagaaatgtgcagtctgtaaacactttttgataccttctgatgtcaaagtgattgtgcaagctaaatgaagtaggctcagcgatagtggtcctcttacagagaaacggggagcaggacgacgggggggctgggggtggcgggggagggtgcccacaaaaagaatcaggacttgtactgggaaaaaaacccctaaattaattatatttcttggacattccctttcctaacatcctgaggcttaaaaccctgatgcaaacttctcctttcagtggttggagaaattggccgagttcaaccattcactgcaatgcctattccaaactttaaatctatctattgcaaaacctgaaggactgtagttagcggggatgatgttaagtgtggccaagcgcacggcggcaagttttcaagcactgagtttctattccaagatcatagacttactaaagagagtgacaaatgcttccttaatgtcttctataccagaatgtaaatatttttgtgttttgtgttaatttgttagaattctaacacactatatacttccaagaagtatgtcaatgtcaatattttgtcaataaagatttatcaatatgccctc

SEQ ID NO: 129637 - DNA, 1584 bp, Homo sapiens
  Payload ID: 5352
  Gene Symbol: EMX2
  Gene Name: empty spiracles homeobox 2
  ENST ID: ENST00000616794
  CDS Start-End: 1-210
tcctcgcactcgccacaccccctattcgcctcgcagcagcgggatccgtccaccttctacccctggctcatccaccgctaccgatatctgggtcatcgcttccaaggtaaaagtatggtttcagaaccgaagaacaaagttcaaaaggcagaagctggaggaagaaggctcagattcgcaacaaaagaaaaaagggacgcaccatattaaccggtggagaatcgccaccaagcaggcgagtccggaggaaatagacgtgacctcagatgattaaaaacataaacctaaccccacagaaacggacaacatggagcaaaagagacagggagaggtggagaaggaaaaaaccctacaaaacaaaaacaaaccgcatacacgttcaccgagaaagggagagggaatcggagggagcagcggaatgcggcgaagactctggacagcgagggcacagggtcccaaaccgaggccgcgccaagatggcagaggatggaggctccttcatcaacaagcgaccctcgtctaaagaggcagctgagtgagagacacagagagaaggagaaagagggagggagagagagaaagagagagaaagagagagagagagagagagagagaaagctgaacgtgcactctgacaaggggagctgtcaatcaaacaccaaaccggggagacaagatgattggcaggtattccgtttatcacagtccacttaaaaaatgatgatgatgataaaaaccacgacccaaccaggcacaggacttttttgttttttgcacttcgctgtgtttcccccccatctttaaaaataattagtaataaaaaacaaaaattccatatctagccccatcccacacctgtttcaaatccttgaaatgcatgtagcagttgttgggcgaatggtgtttaaagaccgaaaatgaattgtaattttcttttccttttaaagacaggttctgtgtgctttttattttgattttttttcccaagaaatgtgcagtctgtaaacactttttgataccttctgatgtcaaagtgattgtgcaagctaaatgaagtaggctcagcgatagtggtcctcttacagagaaacggggagcaggacgacgggggggctgggggtggcgggggagggtgcccacaaaaagaatcaggacttgtactgggaaaaaaacccctaaattaattatatttcttggacattccctttcctaacatcctgaggcttaaaaccctgatgcaaacttctcctttcagtggttggagaaattggccgagttcaaccattcactgcaatgcctattccaaactttaaatctatctattgcaaaacctgaaggactgtagttagcggggatgatgttaagtgtggccaagcgcacggcggcaagttttcaagcactgagtttctattccaagatcatagacttactaaagagagtgacaaatgcttccttaatgtcttctataccagaatgtaaatatttttgtgttttgtgttaatttgttagaattctaacacactatatacttccaagaagtatgtcaatgtcaatattttgtcaataaagatttatcaatatgcc

SEQ ID NO: 129638 - DNA, 665 bp, Homo sapiens
  Payload ID: 5353
  Gene Symbol: ENAH
  Gene Name: enabled homolog (Drosophila)
  ENST ID: ENST00000284563
  CDS Start-End: 27-665
ggggaagcctctgcgccgccggcaccatgagtgaacagagtatctgtcaggcaagagctgctgtgatggtttatgatgatgccaataagaagtgggtgccagctggtggctcaactggattcagcagagttcatatctatcaccatacaggcaacaacacattcagagtggtgggcaggaagattcaggaccatcaggtcgtgataaactgtgccattcctaaagggttgaagtacaatcaagctacacagaccttccaccagtggcgagatgctagacaggtgtatggtctcaactttggcagcaaagaggatgccaatgtcttcgcaagtgccatgatgcatgccttagaagtgttaaattcacaggaaacagcccagagcaaggttactgctacccaggacagcactaatttgcgatgtattttctgtgggccaacattgcctagacaaaactcacaactacctgctcaagttcaaaatggcccatcccaagaagaattggaaattcaaagaagacaactacaagaacagcaacggcaaaaggagctggagcgggaaaggctggagcgagaaagaatggaaagagaaaggttggagagagagaggttagaaagggaaaggctggagagggagcgactggaacaagaacagctggagagagag

SEQ ID NO: 129639 - DNA, 2758 bp, Homo sapiens
  Payload ID: 5353
  Gene Symbol: ENAH
  Gene Name: enabled homolog (Drosophila)
  Uniprot ID: Q8N8S7
  ENST ID: ENST00000366843
  CDS Start-End: 356-2068
cggcggccgggcgcgcggccccggcgggcacccctcagagggcggccgaggaagctccgggaggaggagcaggaccacgaggaggtgggaggcggcggccgcctggggaccagctccgcgcctcggcctctccgccccctccccagcctttctctcgccctcttctcccacactcccggccggcgcctcggctttgtgcgaggagatggtgtagccccctggccgccgaaggaggagccggacacttgtctcccgtctccgagctgctccccacccctggaggagagacccccccctcggctcggcgccttctgcgtctcccggctggtggggaagcctctgcgccgccggcaccatgagtgaacagagtatctgtcaggcaagagctgctgtgatggtttatgatgatgccaataagaagtgggtgccagctggtggctcaactggattcagcagagttcatatctatcaccatacaggcaacaacacattcagagtggtgggcaggaagattcaggaccatcaggtcgtgataaactgtgccattcctaaagggttgaagtacaatcaagctacacagaccttccaccagtggcgagatgctagacaggtgtatggtctcaactttggcagcaaagaggatgccaatgtcttcgcaagtgccatgatgcatgccttagaagtgttaaattcacaggaaacagggccaacattgcctagacaaaactcacaactacctgctcaagttcaaaatggcccatcccaagaagaattggaaattcaaagaagacaactacaagaacagcaacggcaaaaggagctggagcgggaaaggctggagcgagaaagaatggaaagagaaaggttggagagagagaggttagaaagggaaaggctggagagggagcgactggaacaagaacagctggagagagagagacaagaacgggaacggcaggaacgcctggagcggcaggaacgcctggagcggcaggaacgcctggagcggcaggaacgcctggatcgggagaggcaagaaagacaagaacgagagaggctggagagactggaacgggagaggcaagaaagggagcgacaagagcagttagaaagggaacagctggaatgggagagagagcgcagaatatcaagtgctgctgcccctgcctctgttgagactcctctaaactctgtgctgggagactcttctgcttctgagccaggcttgcaggcagcctctcagccggccgagactccatcccaacagggcattgtcttgggaccacttgcacctccacctcctccaccactcccaccagggcctgcacaggcttcagtagccctccctcctcccccagggccccctccacctcctccactcccatccaccgggcctccaccgccccctcctccccctcctctccctaatcaagtaccccctcctcctccaccacctcctgccccacccctccctgcatctggattctttttggcatccatgtcagaagacaatcgccctttaactggacttgcagctgcaattgccggagcaaaacttaggaaagtgtcacggatggaggatacctctttcccaagtggagggaatgctattggtgtgaactccgcctcatctaaaacagatacaggccgtggaaatggaccccttcctttagggggtagtggtttaatggaagaaatgagtgccctgctggccaggaggagaagaattgctgaaaagggatcaacaatagaaacagaacaaaaagaggacaaaggtgaagattcagagcctgtaacttctaaggcctcttcaacaagtacacctgaaccaacaagaaaaccttgggaaagaacaaatacaatgaatggcagcaagtcacctgttatctccagaccaaaatccacacccttatcacagcccagtgccaatggagtccagacggaaggacttgactatgacaggctgaagcaggacattttagatgaaatgagaaaagaattaacaaagctaaaagaagagctcattgatgcaatcaggcaggaactgagcaagtcaaatactgcatagaggaacagactaaggagagataggactttaatctggaggaaaaatatcctacaaacaacaactgttcacaacagcaaacccctacatttatgagctgtaagaagaaaatggagacaaacagaaggagggaaaaaccaacctactctgaaagccttcagacattatgactctggtgataagctctttccctctccgtttgctgcttttttctggcctttacaacagaatggaagagaatcatttaagagttcctgtaacagttatgcagaaaatactaaaacccatcaggcaagatcaccacgcattgaaatattttcatatcaagataaagtcgcacattttccacaatacattgctaaaataaagaggagaaaggcttaggaagtttttttgcagagagtgctggtaaagaattgagcaagtttgctattgtattgtaatgtttctctcaggtttgttcttcctatcatgtttgatattccatgaataattgagatcagccctatgtaagttaagatcataatatgtggaacaaatggaattgtaagtgctttcaaagggtaatatttataagaaagtgtccgaaaaatgtttcttcagcttgagaaattttagaatgataggaagtttctcgagttagccttcatgcaattttgtagattaaaacataaaatttgtccagaacttaaa

SEQ ID NO: 129640 - DNA, 13168 bp, Homo sapiens
  Payload ID: 5353
  Gene Symbol: ENAH
  Gene Name: enabled homolog (Drosophila)
  Uniprot ID: Q8N8S7
  ENST ID: ENST00000366844
  CDS Start-End: 453-2228
ggttcctcgcggcgatcccgactctcctcccgcggctgcagcagctgccggttgcacacggcctcggcggcggcgcggcgagcgcgggcctgtggagcggcggccgggcgcgcggccccggcgggcacccctcagagggcggccgaggaagctccgggaggaggagcaggaccacgaggaggtgggaggcggcggccgcctggggaccagctccgcgcctcggcctctccgccccctccccagcctttctctcgccctcttctcccacactcccggccggcgcctcggctttgtgcgaggagatggtgtagccccctggccgccgaaggaggagccggacacttgtctcccgtctccgagctgctccccacccctggaggagagacccccccctcggctcggcgccttctgcgtctcccggctggtggggaagcctctgcgccgccggcaccatgagtgaacagagtatctgtcaggcaagagctgctgtgatggtttatgatgatgccaataagaagtgggtgccagctggtggctcaactggattcagcagagttcatatctatcaccatacaggcaacaacacattcagagtggtgggcaggaagattcaggaccatcaggtcgtgataaactgtgccattcctaaagggttgaagtacaatcaagctacacagaccttccaccagtggcgagatgctagacaggtgtatggtctcaactttggcagcaaagaggatgccaatgtcttcgcaagtgccatgatgcatgccttagaagtgttaaattcacaggaaacagggccaacattgcctagacaaaactcacaactacctgctcaagttcaaaatggcccatcccaagaagaattggaaattcaaagaagacaactacaagaacagcaacggcaaaaggagctggagcgggaaaggctggagcgagaaagaatggaaagagaaaggttggagagagagaggttagaaagggaaaggctggagagggagcgactggaacaagaacagctggagagagagagacaagaacgggaacggcaggaacgcctggagcggcaggaacgcctggagcggcaggaacgcctggagcggcaggaacgcctggatcgggagaggcaagaaagacaagaacgagagaggctggagagactggaacgggagaggcaagaaagggagcgacaagagcagttagaaagggaacagctggaatgggagagagagcgcagaatatcaagtgctgctgcccctgcctctgttgagactcctctaaactctgtgctgggagactcttctgcttctgagccaggcttgcaggcagcctctcagccggccgagactccatcccaacagggcattgtcttgggaccacttgcacctccacctcctccaccactcccaccagggcctgcacaggcttcagtagccctccctcctcccccagggccccctccacctcctccactcccatccaccgggcctccaccgccccctcctccccctcctctccctaatcaagtaccccctcctcctccaccacctcctgccccacccctccctgcatctggattctttttggcatccatgtcagaagacaatcgccctttaactggacttgcagctgcaattgccggagcaaaacttaggaaagtgtcacggatggaggatacctctttcccaagtggagggaatgctattggtgtgaactccgcctcatctaaaacagatacaggccgtggaaatggaccccttcctttagggggtagtggtttaatggaagaaatgagtgccctgctggccaggaggagaagaattgctgaaaagggatcaacaatagaaacagaacaaaaagaggacaaaggtgaagattcagagcctgtaacttctaaggcctcttcaacaagtacacctgaaccaacaagaaaaccttgggaaagaacaaatacaatgaatggcagcaagtcacctgttatctccagacgggattctccaaggaaaaatcagattgtttttgacaacaggtcctatgattcattacacagaccaaaatccacacccttatcacagcccagtgccaatggagtccagacggaaggacttgactatgacaggctgaagcaggacattttagatgaaatgagaaaagaattaacaaagctaaaagaagagctcattgatgcaatcaggcaggaactgagcaagtcaaatactgcatagaggaacagactaaggagagataggactttaatctggaggaaaaatatcctacaaacaacaactgttcacaacagcaaacccctacatttatgagctgtaagaagaaaatggagacaaacagaaggagggaaaaaccaacctactctgaaagccttcagacattatgactctggtgataagctctttccctctccgtttgctgcttttttctggcctttacaacagaatggaagagaatcatttaagagttcctgtaacagttatgcagaaaatactaaaacccatcaggcaagatcaccacgcattgaaatattttcatatcaagataaagtcgcacattttccacaatacattgctaaaataaagaggagaaaggcttaggaagtttttttgcagagagtgctggtaaagaattgagcaagtttgctattgtattgtaatgtttctctcaggtttgttcttcctatcatgtttgatattccatgaataattgagatcagccctatgtaagttaagatcataatatgtggaacaaatggaattgtaagtgctttcaaagggtaatatttataagaaagtgtccgaaaaatgtttcttcagcttgagaaattttagaatgataggaagtttctcgagttagccttcatgcaattttgtagattaaaacataaaatttgtccagaacttaaagatttagatgccttcctaaattgttacaatgctttaccaaatctatgacttctacataacacaaaccagtggtcaaatgtaaacactatattgtagatttactgtaggttttcaaccttttttagatttatgcatgtggacatttttataatgtaattacaatcaccacaaggttagcttttttaattgcagacagtaatgcatgtcacactaatatgtagtggccttttcaaggcctagtcccagggaaaacattttgtagagtataggggagtgggaggaaggggaggaataattttttatttaaagttgatttctgcactatctttttctcagttacctgcatgaataaataatgagaaatattttgtgactttaattggtaaatatgttacaaaaccaagtacttaatcttttacatcatgtcttcagctatttgtattttaaccagtaatttcaatggtctgaaacatgattctgagcttcacataatatcttaactgtggaactcaaaagtttgatcactgaatttggcagttattattacctaggtacccccgctgttacacaggtgtttagatacgtgttcctgaatgaagctgcttttgaattttgttatgttgaaatgcaagaaataacaatgatggcagcaattaaggtcacagaaatcattaggtaaaggaaaaccaatgaggagttctgcagttttcttttaataagtaaagtgagacttgggtggtgggaagaaggaaggtgggaagaaggaattagacactctgcctgccactctgcgtgtgtgtgctctcgcgcacgtgctgtctatatggaagccactcccttttctttcctttgaaactggtaaggttaaaataggggagaaatcctacatgttggaatgatagctttttggaaaatttaagaaactctccaggctctccatcttgatttatgcttgagttgttatgtgccatatttgctttgaactctgattatcagaagttttactaaaactttgaaataattcactttcatctgctttctagattttgtacatctcagtccataaagcaaagcttgttgatagtgtagttttctaaacgctgcaaatttgcagcctttaccactacaaagaagtttggatgagggattttttttttctttgtcaaaatagttcctgtttctgtagaaatttcatttttagattaaactgtgatggatgagctatcataattcaagtatacatttcttttttctatcagatattcattgtcatgcagtagtagtaaaaacatcaaagatgcagcaagcttattaagtattattttctaaaagaaataggaggcattttcatctttattattgtacttttggttatgcaaacactttgataatataaacagttatgtcccctataaatctggtcagcaacctcttttgattttgttgggtaagttaaatagtctgtagtaggtagagtactgggtacaagtggtccaaactaagataagagactaaaataaaatgctaaatcttaaaagaaactgggtttatgcactaaacgttttgtgccttggtctaatattaacatgatgtatgtgtaaactgacaaaaaaaaaaaaaaaaaaaaaccagtgttgaatcatgctatatttcccatcatcccagattgctaaatgttctttccaagaagtctgaatgaattattatatacatttgctatcatacatgacagttgtgtcattattagagatttcagtaattaaaatgggaaacagaagcctaagttatttaccttatcaaaaccacgttccttggaaccacattattatgatggtttttgtgctcttgtacgttggatgtcttaagctgagtacagtttaggggatcctttctaatgacaggaaggcactgctttcctcaacactgtgatctgacctgtgacaagtctgtactatccactatgtaaatggctcacaagtcaattgcaaacaaactgaatgtacaaatcttagtgctggtgctgaaatctcttcagaatagtcatcatgatttaaaagtttgtttaaaaatttgcaagcatcaagtgtcaatcaaaactgaagatgaaacactaatgaatgttgaattctcatgcttttaggtgtacttcctttttagaattttcagttttctgctatttttaccgtaactatttcgtttaaatttgtttcatttaagtttcctacacgctaacttcgtttgtgcgattgaaataaaattgcagtatatatatgttgcttgtttgtgacacttagataatcttctgaaataatttgttttaaagtaagttatattggatgtgaaaaacaccttttaaagtccaagactttactacttaaaagtttacatgtcacgtcactattctttacagatttcatagaagtcgtgaatactaagtaatgtatacaaaagaaatatgtgatgatgtgtctactttttgtttgaaataactgttgggtgttccctcttcttattttctctctgcccaccttgacacagtaacttcctcttatagtcaagatgatgattaagtgtttaatttttattccattttgttctgcaacacgttcaggtacttaaaactcattcatgcagttagaattatcctttatgtagtttgcatggtaaaggacattgtgtggtaaagggcattattgagtaatgaattttaagtatagcaaaatatgtatagtgtttatacatgatgctgatttcttaaaacctacatataagcagtagtactttttctctattataaagtattaattttgagttccattttataattctgatgtcttcattagaaatacaaaaatacaatccttgtattttttctttgaccagacccaaattttccccttcccccctccattctcctctccacttctcgtggaccgcgtgttcccaatattcattaacatttgcagccattacagagttacagttgtaaaattttcagctgtttttttttttttttttttgctctagcctgtctcatgttcttgcttctcttcatatgtaagtcagtatttttgtctacaaattaaaagtcacttgtcattcaaaaatgagttaagtaacatgataatcttttaaatttacctagctacaacttttatgtctcttgtaaatttatatatactttcagtgccattgtgaagaattggccttttaattctaagtagtattaccctatgaagcacagtgtgcaaaggtatgctacaaggtctctttaattcctgtgtggccattataattttataacaccattaccctttaaattctaccgattataagcagcgtaaaagtaactatataaagcaaacatcgcaaaggaactctgcaggagctcttaattcctttatgtagctatcataaaattcactttcctgaagacatttactctcattcacttccaaactccaaacctttttctggtagcaccacttttgtttttaatagaaagatgagttcatatctgtacatctctccaaagctctaaggaatgagaaaaggatcctagtatattgaaattactgatgtttaatacctctgccttttcactaaaagccatttaatatttttaaagtcaaaacttgacatacaggtatttataaggaatctccatgactctgaaggaatgaaattgatgtaggtagctttggctatgtaaagacatagtagaggacaattacttaaagaagagttttcttttgaggatttgtagatttgactaagcagctgaagtcagtaacccctcaagaaagtccgtttatagaagccaagaactgttggaggtctgtgatgcaggtttttctgttcccaacatcaaaagctgtggattatttggtgtgttcccctttatgttatctctcgataatttttgagacatcaagattttttaaaatatcaatactggaaagatgaaaccttcaaattaaaacctaaaattgattagaaagaaaagtaaaatattaatgcagtaaatttaggatggttacagatactcaccatcaacataaataaatggagttctaggataaattatttgtggaatactaatggtcaagtcacataagagtaaaatcttttggtgaggagacacatttgacaactgctaaagaattaactaaatttgtctttctaaatagttttctttataaagtaacagaaacattgtaaaaggataaatgactgtcataatgacttaggatgttgtaagaatgtctgccacatttattggttatttctgttgaaatctgaaggaatcgatacatctgaaaattgagaaagggaaataggactgtccccgttacagatactctgtgatgcacacaaccttctaaacggaagtgttagtatcatttaaagcacatagtaggccttgagtatttgcagattaacatgcagaaaaaatcaaagatgaagccccaattaagtgtttgaaccaaagaatcacagtcactgagctgcacccccgttctgtgaagcatgttaaatactcataaagagcagagagcagggcccgtagacgcttctggtgtaggacacaggaattctaggcagagggagaaaattaggggccccagttggtggctgagagtaaaaagaatataccatttgagtagtgctgttctttttcctcagtttttaaagacatataattcctagtagttaggacatctaaatagctcggtaaactggtcagaggcgggaggattgcttgaggccagaagttttgagatcagcctgggtaacagggagactcatttctacaaaaaaatttaaaaatttaggccaggcatggtggtgcacacctgtaatcccagctactcaggagactgaagcgggaggatcacctgagcccagggaggacgcggctgcagtgagccgttatcatgccactgtactccagcctgggtgacagagcgagaacctgtctctaaaaaaaaaaaaaaaaaattctaagagaatatagcttttcatagaaattattagaaaagcttacatatttcattagagagcccagtttgttagactacatttattccgtaaaagttctatatacaaatgacaacccatagtttatcatgtaaatctgatttaactgttcccttcaattccaagaaagatttcttcagcagtagatgacaattctaaaagcataaagaaataactaataaaggagatggatgatgttataggttggtttggttgggttttagtaaatagttattcttctaagaaggcttagaaaatcgagaattgaatagttggtactttgaattccataggaaaaagcactcagaagaaaaagtctacattggctagtgtttagattgagagttaattttcccatcaagtccaaaagtttccatccaagtctatagaaactgagagaaaaggttcttggcttacacttaaaatacacattgttgcaaccatataagagagatacattacagaacgcttttaaaaatttggtctcttaagcgcctaacagtccatgctttagtcacatctgtgaaacctcttttctttttttctttttcttttatttttttttttaaagattaaaggcattttaaaaataaatgtttcatggccgggcatggtggctcacgcctgtaatcccagcactttgggaggctgaggtgggcagatcacctgaggtcaggagtttgagaccagcctggccaacatgatgaaaccccatctctactaaaaatacaaaaaaattggctgggcatagtggtgggcacctgtaatcccagctcttcgggaggctgagacagaagagtcgcttgaatccaggaggtggaggttgcagtgagctaagaccgcgccactgtactccagcctgggcgacagagcgagattccatctctaaataaataaatgtttttcaacgtgttttatgtgagaaataccagcttttcattattactaccagttgatctcaggtgtcacttggttggttctgctgaccgaggcactgggcattttaaatatggagtttccctccacccattgatcaagtctgaggtttgtccatccttggtggcaggctagcttaaccatggattcacaaaccccatttgattgtcgtaagtcataaggccaccccagtgccagtggttgggcatcacagtgagtctgaggtgatgaatttgagttagctgtaggctagttccgcaactcagcaatagcccatggatggttggtaaaagacgttgactttgccacttaaatttccaggagaagaatagcttatagtttatctgaggaaagtaattgggaaggcttagatattgagaagaaagccctgttaaaatctaggtagcatttcctttcttctttattactagagggatgggaggttcaggcctgagtcaggactttacaatttggtgtccttcccagaggtactttgggcttgatcattttaagtttcaattgcaaaaaaaaatttttgacggagtgttgctctgtcactcaggttggagtgcagtggtgcgatctcggctcactgcaacttcccccccctgggttcaaagggattttcctgcctcagcctcccaagtagctgggactacaggcgcgtgccaccatgcccgactaatttttgtatttttagtagagatggggtttcaccatgttgcccaggctggtcttgaactcctgagctcaggtgatctgcccgcctcggccttcaattgcagaagtttttgaagggagaatatttgatcctcacataaaatgtccttgtttctgaaagaaaacatggtaaaaattgttattgagtccatgtctttgccaccttgttggacttgatttccctttctctgtgttcctcccgccctcagtctctctcagtctgtccttttttgtgtgtggagttgtgggcaggtcattggactgggactgactttaccagttttcaggctgtggggctagtcagtcattctctctgagccttctacctctaaagttgagttctttttttaaattctttttgttttgtttttattttttccttgccactatacaagcaaggatagataaagctttttattattattgttattattattatttcgagacagtctcgctctgtcatccaggctggagtgcagtggtgtgatttcagctcactgcaacctctgcctcccgggttcaagcgattctcctacctcagcctccttagtagctgggactacaggcatgcgccaccacacccggctaatttttgtatttttagtagagacagggtttcaccgtattggccaggctggtctcgaactcctgacctcaggtgatccacccaccttggcctcccaaagtgttgggattacaggcataagcgaccgtgcccatccccgataaagttgagttctgaatttcctctttcactgtattctcggcagctactggttggtttattctttttttttaatcttttttggtttattcttcttttgatctttgaagagaaggagaaaaaagatctgagtttggctctcccatcttaagtgcagcttttagttgttttatagtcatagacgctattgcactggacagcatgcatcctggatgtaaacaatgcggaaaaatcaatggagtgaccatcttggggtcagtggtgttgcataaagcaccagtggtgtgctgttctgtgtcagtttcctctgcgccacgtgctttcacagtttgaattaccagcatctctgtggtggcttcagtacattctccattgtgcttcaacctggaagcacattctgccgttcagaaagactgattccaatcatgtaatgggaccacacgagatccatgctccaattatatgaatagcagaaggtccatttgactcttgtagttcaagagctgtttctaagtaaacagactttccagagctcgatgaagtgaagaagcccttctttcaattcctgggcagaattcagtggttttcatatcatctgaacctgctgtgctgctgtttattctatcactgtcagccttgaaaggaaaaaaggaataatcttaccctcctgcccttcttattttatatcttccatcttatccatctatatccatgtagtcattccttccgagttccctggttttaatccaaaagactctgtttaacagcaatgtcttggcagaccaggtgccgcttccgtgccatttgagggctctgagtctttgcttcgtcttaggaagataaagataatttggcagaaagtcagagatggaaatagcagtttgggatgataaaagatgggtcctgttttgctgacattcttttactttggttcttggtgcgtgtcctttgggattcatttcttgctagcatgaataggacatgcttttcgttaggtgcttttcttttttggagaacatgaagtgtttctaacaaaactgaatgagctagaaagaattctattttgagacatctgtagttgatgcaaagtatttctgtaatcctcaatgacagtacttacatatttgcatagaattttttttttaatttttgaggaaacctctctggagtctgtatttataggagcatcctgaaagtccctattatgtagctggtgggagcgagagagggacagccacactcgtgctgtgagcagagcacaacttcaggcagagtgaatgccttctgagttctcattggaagctttctgttgctcagcctctggcagatttcagaaccttctacttaagccaggtgtggtggtgcgtgctcctaggcacagcgactcggggggctgaggcagaaggatcacttgagcccaaagttggaggccagcctgggcaacatagcgaggcctgtctccttaaaaaataaataaataaataataaataaataaataaataaaaaccttgtccttgactattgtgctgtctgctgcccctttgtagggatggggttggggtcagaataagcatgtgcatgaatggcggaaagctttggtggtgtttgtttgtttgtttgttttttgagaggtgggggagtcagcagtgaacctttctggttaaagaacaacgtacataatttctattatgagatttagaaggttaaatacttttttttttcaggcctaccaagttgatagaccaaaagtatatagtagaacagcacagtagaaaaaatttaaaagtgaatttcttatggtccaaaaggatggatagtcacagtccataacctttcataatatatgctggaattggaatctcttgtcatcttgctttgctctgaattttagaactagaagtgtgcatgtatgtcaaaagattatgcagagctattttctttgctaacaatgtaaacatttgcaccccatgaatgggactttataatctggaagtgagcctaaggttgcgtatactgaagtcatgttttaaaagttaaggttgacttaaacatatacaaggctgtattttaattgtaactagaaatcatttactatgcatacagaacctcatgtatcttatcatggaatttgtgaattaatgggccttgccgaattcaagggtaagggaaactggtaacaacttgttttaaatcaacatactataagctcctgcttgcttgactcaagttgtttgaaaatctgaattaaacaggatctcattgtcaggaaacatcttctaagcttgacatctacgtttaagaagggaacgtggaagagaaggtgagacatgaaactaaaacagctgggagggtaggatcagactgcacctgatttttggaccaaagtttcatataggaataaataaaaaggaggaccacttgtgagccaacctaggaaggacttgccagaaagtagcagctcctgctgcaaaatacagtgccttcaaaatgattctctgtgtgaattgcatgcaatttcatgtaaccataaagtgtaacctgtatgtgcatgacatgtgtctagaatgtgtaaagttaggattcagcaggaaggggcctggccctgtcactgtggtggatcagtggacctgctgaagtcactggactcatgtgacttaggtttgcagcatcagacccctgtgtttgcattaagtggccacatcgttgaaatcggatcaatctctccctcagctttctttcctactttgcagctttgctggttttaactgcttcattcttctgcttcttggtatccttttttcttttgaaataaaaacatgaaatacttaa

SEQ ID NO: 129641 - DNA, 807 bp, Homo sapiens
  Payload ID: 5353
  Gene Symbol: ENAH
  Gene Name: enabled homolog (Drosophila)
  ENST ID: ENST00000497899
  CDS Start-End: 1-727
caggaagattcaggaccatcaggtcgtgataaactgtgccattcctaaagggttgaagtacaatcaagctacacagaccttccaccagtggcgagatgctagacaggtgtatggtctcaactttggcagcaaagaggatgccaatgtcttcgcaagtgccatgatgcatgccttagaagtgttaaattcacaggaaacagggccaacattgcctagacaaaactcacaactacctgctcaagttcaaaatggcccatcccaagaagaattggaaattcaaagaagacaactacaagaacagcaacggcaaaaggagctggagcgggaaaggctggagcgagaaagaatggaaagagaaaggttggagagagagaggttagaaagggaaaggctggagagggagcgactggaacaagaacagctggagagagagagacaagaacgggaacggcaggaacgcctggagcggcaggaacgcctggagcggcaggaacgcctggagcggcaggaacgcctggatcgggagaggcaagaaagacaagaacgagagaggctggagagactggaacgggagaggcaagaaagggagcgacaagagcagttagaaagggaacagctggaatgggagagagagcgcagaatatcaagtgctggtaagaagtttacaaactcttctgtgttcttgtatctgagcttggatgatgtctcttgtgcagtcatgtgttaaaatatttcacatttgagatgtttgggattaagccatacaatttgaaattatgaataaatatgcagcaattactactttaa

SEQ ID NO: 129642 - DNA, 3308 bp, Homo sapiens
  Payload ID: 5353
  Gene Symbol: ENAH
  Gene Name: enabled homolog (Drosophila)
  ENST ID: ENST00000635051
  CDS Start-End: 10-2418
gccggcaccatgagtgaacagagtatctgtcaggcaagagctgctgtgatggtttatgatgatgccaataagaagtgggtgccagctggtggctcaactggattcagcagagttcatatctatcaccatacaggcaacaacacattcagagtggtgggcaggaagattcaggaccatcaggtcgtgataaactgtgccattcctaaagggttgaagtacaatcaagctacacagaccttccaccagtggcgagatgctagacaggtgtatggtctcaactttggcagcaaagaggatgccaatgtcttcgcaagtgccatgatgcatgccttagaagtgttaaattcacaggaaacagtgttctatttagggccaacattgcctagacaaaactcacaactacctgctcaagttcaaaatggcccatcccaagaagaattggaaattcaaagaagacaactacaagaacagcaacggcaaaaggagctggagcgggaaaggctggagcgagaaagaatggaaagagaaaggttggagagagagaggttagaaagggaaaggctggagagggagcgactggaacaagaacagctggagagagagagacaagaacgggaacggcaggaacgcctggagcggcaggaacgcctggagcggcaggaacgcctggagcggcaggaacgcctggatcgggagaggcaagaaagacaagaacgagagaggctggagagactggaacgggagaggcaagaaagggagcgacaagagcagttagaaagggaacagctggaatgggagagagagcgcagaatatcaagtgctgctccatcttcagacagctccctgtataacgctccacttcctgagtattccagttgccagcctccttcagcacctcctccatcatacgctaaagtcatctcagctccagtgtcagatgccactcctgattatgctgtagtgactgctttgccacctacttccacaccccctacaccaccactgcgacactcagcgacacgttttgcaacatctttaggttcagccttccaccctgttcttccccattacgctacagttcctcgtcctctgaacaaaaactctcgaccttcttctcctgtgaacacaccctcttctcagcctccagctacgaagccctgtgcctggtctacttccaatttttcgcccctccctccatctcctccaataatgattagcagccccccaggcaaagctactggtccaaggcctgtcctccctgtttgtgtttcttctcctgtgccccaaatgcctccatcaccgacagcacccaatgggctggttgactctgtaacatatccagtgtctccaccgcctacctcagggccagcagctcctccgccgccgcctccactgccttccctcgcatcactctcacactgtggatctcaagcttctcctcctccaagcacccctattgcctcaactccctcatccaagcctagtgttctcccttctccctctgcagctgcccctgcctctgttgagactcctctaaactctgtgctgggagactcttctgcttctgagccaggcttgcaggcagcctctcagccggccgagactccatcccaacagggcattgtcttgggaccacttgcacctccacctcctccaccactcccaccagggcctgcacaggcttcagtagccctccctcctcccccagggccccctccacctcctccactcccatccaccgggcctccaccgccccctcctccccctcctctccctaatcaagtaccccctcctcctccaccacctcctgccccacccctccctgcatctggattctttttggcatccatgtcagaagacaatcgccctttaactggacttgcagctgcaattgccggagcaaaacttaggaaagtgtcacggatggaggatacctctttcccaagtggagggaatgctattggtgtgaactccgcctcatctaaaacagatacaggccgtggaaatggaccccttcctttagggggtagtggtttaatggaagaaatgagtgccctgctggccaggaggagaagaattgctgaaaagggatcaacaatagaaacagaacaaaaagaggacaaaggtgaagattcagagcctgtaacttctaaggcctcttcaacaagtacacctgaaccaacaagaaaaccttgggaaagaacaaatacaatgaatggcagcaagtcacctgttatctccagaccaaaatccacacccttatcacagcccagtgccaatggagtccagacggaaggacttgactatgacaggctgaagcaggacattttagatgaaatgagaaaagaattaacaaagctaaaagaagagctcattgatgcaatcaggcaggaactgagcaagtcaaatactgcatagaggaacagactaaggagagataggactttaatctggaggaaaaatatcctacaaacaacaactgttcacaacagcaaacccctacatttatgagctgtaagaagaaaatggagacaaacagaaggagggaaaaaccaacctactctgaaagccttcagacattatgactctggtgataagctctttccctctccgtttgctgcttttttctggcctttacaacagaatggaagagaatcatttaagagttcctgtaacagttatgcagaaaatactaaaacccatcaggcaagatcaccacgcattgaaatattttcatatcaagataaagtcgcacattttccacaatacattgctaaaataaagaggagaaaggcttaggaagtttttttgcagagagtgctggtaaagaattgagcaagtttgctattgtattgtaatgtttctctcaggtttgttcttcctatcatgtttgatattccatgaataattgagatcagccctatgtaagttaagatcataatatgtggaacaaatggaattgtaagtgctttcaaagggtaatatttataagaaagtgtccgaaaaatgtttcttcagcttgagaaattttagaatgataggaagtttctcgagttagccttcatgcaattttgtagattaaaacataaaatttgtccagaacttaaagatttagatgccttcctaaattgttacaatgctttaccaaatctatgacttctacataacacaaaccagtggtcaaatgtaaacactatattgtagatttactgtaggttttcaaccttttttagatttatgcatgtggacatttttataatgtaattacaatcaccacaaggttagcttttttaattgcagacagtaat

SEQ ID NO: 129643 - DNA, 1978 bp, Homo sapiens
  Payload ID: 5354
  Gene Symbol: EVL
  Gene Name: Enah/Vasp-like
  Uniprot ID: Q9UI08
  ENST ID: ENST00000392920
  CDS Start-End: 224-1480
gtgttagcttcttgtttctctattttctacctaggtttcagtttttcacttgggtttgtttcccctttgtctctggttcagcttccttttcctgtttggttttaagtaggctataaaaatcaagttgctgtcttcagagggtctgtggtcctctgatcaacataggctggtgggagtacaggactcgcctcctcagggttccctgtgctgccacttttcagccatggccacaagtgaacagagtatctgccaagcccgggcttccgtgatggtctacgatgacaccagtaagaaatgggtaccaatcaaacctggccagcagggattcagccggatcaacatctaccacaacactgccagcaacaccttcagagtcgttggagtcaagttgcaggatcagcaggttgtgatcaattattcaatcgtgaaagggctgaagtacaatcaggccacgccaaccttccaccagtggcgagatgcccgccaggtctacggcttaaactttgcaagtaaagaagaggcaaccacgttctccaatgcaatgctgtttgccctgaacatcatgaattcccaagaaggaggcccctccagccagcgtcaggtgcagaatggcccctctcctgatgagatggacatccagagaagacaagtgatggagcagcaccagcagcagcgtcaggaatctctagaaagaagaacctcggccacagggcccatcctcccaccaggacatccttcatctgcagccagcgcccccgtctcatgtagtgggcctccaccgccccccccacccccagtcccacctccacccactggggctaccccacctcccccacccccactgccagccggaggagcccaggggtccagccacgacgagagctccatgtcaggactggccgctgccatagctggggccaagctgagaagagtccaacggccagaagacgcatctggaggctccagtcccagtgggacctcaaagtccgatgccaaccgggcaagcagcgggggtggcggaggaggcctcatggaggaaatgaacaaactgctggccaagaggagaaaagcagcctcccagtcagacaagccagccgagaagaaggaagatgaaagccaaatggaagatcctagtacctccccctctccggggacccgagcagccagccagccacctaactcctcagaggctggccggaagccctgggagcggagcaactcggtggagaagcctgtgtcctcgattctgtccagaaccccgtctgtggcaaagagccccgaagctaagagcccccttcagtcgcagcctcactctaggatgaagcctgctgggagcgtgaatgacatggccctggatgccttcgacttggaccggatgaagcaggagatcctagaggaggtggtgagagagctccacaaggtgaaggaggagatcatcgacgccatcaggcaggagctgagtgggatcagcaccacgtaaggggccggcctcgctgcgctgattcgtcgagcccatccggcgacagaggacagccagaagcccagccagccccagactccagtgcaccagagcacgcacaggagcctgggcgcgctgctgtgaaacgtcctgacctgtgatcacacatgacagtgaggaaaccaagtgcaactcctgggtttttttagattctgcctgacacggaacaccaggtctgctcgtcttttttgtgttttatatttgcttatttaaggtacatttctttgggtttctagagacgcccctaagtcacctgcttcattagacggtttccaggttttctcccaggtgacgctgttagcgcctcagctggcggtgacagccggcccagcgtggcgccaccacacaccgcagagctgtccaggcacagctccgtccccagcgctcatggtgttgaaactgtctgtcatgcaccacggtgtctgtgtccacacagtaataaacggtttactgtccgca

SEQ ID NO: 129644 - DNA, 2353 bp, Homo sapiens
  Payload ID: 5354
  Gene Symbol: EVL
  Gene Name: Enah/Vasp-like
  Uniprot ID: Q9UI08
  ENST ID: ENST00000402714
  CDS Start-End: 605-1855
ggtggggccccgcgccttttgtgtcgggctttgaccgccgcgcgcgctcattcacctcagcggccgcgggcggaggggcgcacgcgcgcgcagtcccctcggagggcggtggggcgaacagcaacgcgcgtaccctagctcttggctgctgtgctgagactagcccgcgcgcccgcgcgcctctccctcgaggactcggagccgcccgcgcactcgccaggggccgccgccccgagtctcaggcggacgcgcacgcgttcccgccgcccggaccccagccggctcgccccccgcccccccatcccccggcggcggcccccaggcacgcgcccgcgcacacgccggcccgggcacgcgcccgccaagatggcaggggccggggcccagctgtcagtcgccgccgccgcggcccttccccgcagctagcggccccgacgcccacccggagaagatgagcccccgctgccccccgcagcccagtcagacgcggagccgccgcgcccggggccggctcccccgctagcgcccgcgtcccgcgccccgccgccgccgccgccgccgccgggtcgcccctggcccggcgcgcccgtccccggcagcgacaatgagtgaacagagtatctgccaagcccgggcttccgtgatggtctacgatgacaccagtaagaaatgggtaccaatcaaacctggccagcagggattcagccggatcaacatctaccacaacactgccagcaacaccttcagagtcgttggagtcaagttgcaggatcagcaggttgtgatcaattattcaatcgtgaaagggctgaagtacaatcaggccacgccaaccttccaccagtggcgagatgcccgccaggtctacggcttaaactttgcaagtaaagaagaggcaaccacgttctccaatgcaatgctgtttgccctgaacatcatgaattcccaagaaggaggcccctccagccagcgtcaggtgcagaatggcccctctcctgatgagatggacatccagagaagacaagtgatggagcagcaccagcagcagcgtcaggaatctctagaaagaagaacctcggccacagggcccatcctcccaccaggacatccttcatctgcagccagcgcccccgtctcatgtagtgggcctccaccgccccccccacccccagtcccacctccacccactggggctaccccacctcccccacccccactgccagccggaggagcccaggggtccagccacgacgagagctccatgtcaggactggccgctgccatagctggggccaagctgagaagagtccaacggccagaagacgcatctggaggctccagtcccagtgggacctcaaagtccgatgccaaccgggcaagcagcgggggtggcggaggaggcctcatggaggaaatgaacaaactgctggccaagaggagaaaagcagcctcccagtcagacaagccagccgagaagaaggaagatgaaagccaaatggaagatcctagtacctccccctctccggggacccgagcagccagccagccacctaactcctcagaggctggccggaagccctgggagcggagcaactcggtggagaagcctgtgtcctcgattctgtccagaaccccgtctgtggcaaagagccccgaagctaagagcccccttcagtcgcagcctcactctaggatgaagcctgctgggagcgtgaatgacatggccctggatgccttcgacttggaccggatgaagcaggagatcctagaggaggtggtgagagagctccacaaggtgaaggaggagatcatcgacgccatcaggcaggagctgagtgggatcagcaccacgtaaggggccggcctcgctgcgctgattcgtcgagcccatccggcgacagaggacagccagaagcccagccagccccagactccagtgcaccagagcacgcacaggagcctgggcgcgctgctgtgaaacgtcctgacctgtgatcacacatgacagtgaggaaaccaagtgcaactcctgggtttttttagattctgcctgacacggaacaccaggtctgctcgtcttttttgtgttttatatttgcttatttaaggtacatttctttgggtttctagagacgcccctaagtcacctgcttcattagacggtttccaggttttctcccaggtgacgctgttagcgcctcagctggcggtgacagccggcccagcgtggcgccaccacacaccgcagagctgtccaggcacagctccgtccccagcgctcatggtgttgaaactgtctgtcatgcaccacggtgtctgtgtccacacagtaataaacggtttactgtccgca

SEQ ID NO: 129645 - DNA, 3704 bp, Homo sapiens
  Payload ID: 5354
  Gene Symbol: EVL
  Gene Name: Enah/Vasp-like
  Uniprot ID: Q9UI08
  ENST ID: ENST00000544450
  CDS Start-End: 284-1456
agttcccagcctggagcctaagcatacactgcattaatcagacttgctggaatgatcacatggttttctagctgcctcccctgttagctgccgcttgtcagcagctggcggagctggaggctgcaggcccctgtctgcagaaagccttttacttcagaatattggggggtgtggaaaccccgcctcatttttctgcactttgcaccatctgactaactaaatggttgtcctccataccaaaaagactaccacacaatctaaggaaattgtctctgactaggtcatgtttgcatttgaagaattcagtgaacagagtatctgccaagcccgggcttccgtgatggtctacgatgacaccagtaagaaatgggtaccaatcaaacctggccagcagggattcagccggatcaacatctaccacaacactgccagcaacaccttcagagtcgttggagtcaagttgcaggatcagcaggttgtgatcaattattcaatcgtgaaagggctgaagtacaatcaggccacgccaaccttccaccagtggcgagatgcccgccaggtctacggcttaaactttgcaagtaaagaagaggcaaccacgttctccaatgcaatgctgtttgccctgaacatcatgaattcccaagaaggaggcccctccagccagcgtcaggtgcagaatggcccctctcctgatgagatggacatccagagaagacaagtgatggagcagcaccagcagcagcgtcaggaatctctagaaagaagaacctcggccacagggcccatcctcccaccaggacatccttcatctgcagccagcgcccccgtctcatgtagtgggcctccaccgccccccccacccccagtcccacctccacccactggggctaccccacctcccccacccccactgccagccggaggagcccaggggtccagccacgacgagagctccatgtcaggactggccgctgccatagctggggccaagctgagaagagtccaacggccagaagacgcatctggaggctccagtcccagtgggacctcaaagtccgatgccaaccgggcaagcagcgggggtggcggaggaggcctcatggaggaaatgaacaaactgctggccaagaggagaaaagcagcctcccagtcagacaagccagccgagaagaaggaagatgaaagccaaatggaagatcctagtacctccccctctccggggacccgagcagccagccagccacctaactcctcagaggctggccggaagccctgggagcggagcaactcggtggagaagcctgtgtcctcgattctgtccagaaccccgtctgtggcaaagagccccgaagctaagagcccccttcagtcgcagcctcactctaggtaccgaacaaccctcctgctcacatgtcccccagggtttggggctcctctgtcccccgtcccgtgactaacacccttgcacgctgtctcacgtcctggcatttaacaacttgctctgcgaaggtggtctgttctttcagacccaggacctcggggtcctgtcagtcagctgctccgtcttttccctctgagagagagaccaagggcaaggagggcagtgacctgtccacagaggtagtgcaggggggggccaacatggagtcccagctctggactcactacgtgtgacagtgggcaagttaggggacctctccaagcctctgttttccccccacaaagtgaggtctgttaacccctgctgcacagggtggtggtggggacagctgtgagcaacagctggacatggggtgtggtcactagccagggctgcaccctacagttcaaccagtcctagcactggcgctgagccctacccctttcctccagcccagagtccttcctctgcggccggcacacagaatcagtttccccacagacatactgaccatatttcccaagccaaaagctggcatgacaacatgatagaatatttggaactgagattgcccaaaaaggcagaggcagccagccacatagtatctggaggtacatgtggcctgaattggaaggcctctagaacctgcgtcaagaatgtctccatcgccaccacaaattgaagggaaaccacccttatcacagagcaggaggcattgaaactggccttgcagagctgaacaggtggtgagagcagagcagtgcaggtggacagagatgaggaagtcttagcagtcagctggggtttgtccaaggcttgtggtcagccaggccgtgtgctggggacagtccctgcctgcaaagagcaccgtgtgaacaaggccactgtggtcctgaggggtgctctggacagggtgcagggccacatggtggaagggacagggtgctttgcggagtggggtggggcaagcctctgtcgggagctggcattttcgttgacccggacgaggaggagtctgctctgcggagatcatggggacagcctcccaagctgaaggaagggtaagtgccagggccctgagcctgcagccacccgccaagctcccccgcacctccacctggaagcagacaggccatggggcaggggaacgggaagggtgaggaagagggtgtgggggagcgcggagttagaagtttgcattgtgttcatgcgcagggcccagtcatggaacttgaggcacagggtgccatggtggaggctgggaaggggaaggcaaccagagtgggcaaaacgagggccctggagcagacacggcagcaaggggagcctgcagcgctcccagcggactccgccacgtcctgctggtggagcaaaggcgggctgccatgttgtgagtggccaagggtcgctcactgggcaggaacattgtcaaggccattcatgcttggaatagggtctctcttcagctctgaggcaaatctgttctctaattttcagatgacttcaaggggaacgtgtaccaccacccctctggtgcgtcacattgcttaggaagcctgctgtgtttatcactgggtggctgtcagggctgagatggagagggccagggcctggcgaggtggagcagtcggcccaggtgtcccagcaattgttgctggaacagggtctggaacccacaggagaggcctgaaggacccagggccctctggctggatgcgtttgcctatcaggacccagaattacttacagacctgtttagggctaggcttggcctctttcttgagctcatctggaggggtgtggcaacactcattcttcatccttattctccctggctgtgggcaacactggtcctcagtgtcaccagatggtcctcctctgtgcccatgacccctcagcagccaaggctggccctgccagataaatgtgtgtgcccatgatcacacccaggggcacaggccacatacgtttccctgaaaccttgggctccagcctccatcccgtccatgtgggagggaacttgggtcccagcagtgtgtctttcagcaccaagtcatgtttaaaagaccagagagacaagcattttgccaagatcttccagggaagatgcatgtgtgacacattaacattcaaatcaggccagcgcggtgctcatgcctgtcatcccagcactttgggaggccgaggcgggaggatcacttgagcccaggacttggagaccagtctgggcaacacagtgagaccccatctctacaaaaagttaaaaaagaaaaaaaaaagg

SEQ ID NO: 129646 - DNA, 583 bp, Homo sapiens
  Payload ID: 5354
  Gene Symbol: EVL
  Gene Name: Enah/Vasp-like
  ENST ID: ENST00000555706
  CDS Start-End: 239-583
tgtggtcctctgatcaacataggctggtgggagtacaggactcgcctcctcagggttccctgtgctgccacttttcagccatggccacaagagctgtaaacttacctccctgaagtcttgttgctggcaaacaatagagccagacctggggcagagctggagctgttgtccacagtgttctcacttccccgcgctgactccatgtgaacagagtatctgccaagcccgggcttccgtgatggtctacgatgacaccagtaagaaatgggtaccaatcaaacctggccagcagggattcagccggatcaacatctaccacaacactgccagcaacaccttcagagtcgttggagtcaagttgcaggatcagcaggttgtgatcaattattcaatcgtgaaagggctgaagtacaatcaggccacgccaaccttccaccagtggcgagatgcccgccaggtctacggcttaaactttgcaagtaaagaagaggcaaccacgttctccaatgcaatgctgtttgccctgaacatcatgaattcccaagaaggaggcccctccagccagcgtcaggtgcagaatggc

SEQ ID NO: 129647 - DNA, 883 bp, Homo sapiens
  Payload ID: 5354
  Gene Symbol: EVL
  Gene Name: Enah/Vasp-like
  ENST ID: ENST00000557384
  CDS Start-End: 238-883
tattaatgcattcaaagtactagacactatgcagagggctataggaggcataaatatgaattatagaagacttgcccttaggagctttatatctagaaggttgtgatcaattattcaatcgtgaaagggctgaagtacaatcaggccacgccaaccttccaccagtggcgagatgcccgccaggtctacggcttaaactttgcaagtaaagaagaggcaaccacgttctccaatgcaatgctgtttgccctgaacatcatgaattcccaagaaggaggcccctccagccagcgtcaggtgcagaatggcccctctcctgatgagatggacatccagagaagacaagtgatggagcagcaccagcagcagcgtcaggaatctctagaaagaagaacctcggccacagggcccatcctcccaccaggacatccttcatctgcagccagcgcccccgtctcatgtagtgggcctccaccgccccccccacccccagtcccacctccacccactggggctaccccacctcccccacccccactgccagccggaggagcccaggggtccagccacgacgagagctccatgtcaggactggccgctgccatagctggggccaagctgagaagagtccaacggccagaagacgcatctggaggctccagtcccagtgggacctcaaagtccgatgccaaccgggcaagcagcgggggtggcggaggaggcctcatggaggaaatgaacaaactgctggccaagaggagaaaagcagcctcccagtcagacaagccagccgagaagaaggaagatgaaagccaaatggaagatcctagtacctccccctctccggggacccgagcagccagccagccacctaactcctcag

SEQ ID NO: 129648 - DNA, 1754 bp, Homo sapiens
  Payload ID: 5354
  Gene Symbol: EVL
  Gene Name: Enah/Vasp-like
  ENST ID: ENST00000554045
  CDS Start-End: 70-435
gatcaacataggctggtgggagtacaggactcgcctcctcagggttccctgtgctgccacttttcagccatggccacaagtgaacagagtatctgccaagcccgggcttccgtgatggtctacgatgacaccagtaagaaatgggtaccaatcaaacctggccagcagggattcagccggatcaacatctaccacaacactgccagcaacaccttcagagtcgttggagtcaagttgcaggatcagcaggttgtgatcaattattcaatcgtgaaagggctgaagtacaatcaggccacgccaaccttccaccagtggcgagatgcccgccaggtctacggcttaaactttgcaagtaaagaagaggcaaccacgttctccaatgcaatgctgtttgccctgaacatcatgaattcccaagaaggagacaagtgatggagcagcaccagcagcagcgtcaggaatctctagaaagaagaacctcggccacagggcccatcctcccaccaggacatccttcatctgcagccagcgcccccgtctcatgtagtgggcctccaccgccccccccacccccagtcccacctccacccactggggctaccccacctcccccacccccactgccagccggaggagcccaggggtccagccacgacgagagctccatgtcaggactggccgctgccatagctggggccaagctgagaagagtccaacggccagaagacgcatctggaggctccagtcccagtgggacctcaaagtccgatgccaaccgggcaagcagcgggggtggcggaggaggcctcatggaggaaatgaacaaactgctggccaagaggagaaaagcagcctcccagtcagacaagccagccgagaagaaggaagatgaaagccaaatggaagatcctagtacctccccctctccggggacccgagcagccagccagccacctaactcctcagaggctggccggaagccctgggagcggagcaactcggtggagaagcctgtgtcctcgattctgtccagaaccccgtctgtggcaaagagccccgaagctaagagcccccttcagtcgcagcctcactctaggatgaagcctgctgggagcgtgaatgacatggccctggatgccttcgacttggaccggatgaagcaggagatcctagaggaggtggtgagagagctccacaaggtgaaggaggagatcatcgacgccatcaggcaggagctgagtgggatcagcaccacgtaaggggccggcctcgctgcgctgattcgtcgagcccatccggcgacagaggacagccagaagcccagccagccccagactccagtgcaccagagcacgcacaggagcctgggcgcgctgctgtgaaacgtcctgacctgtgatcacacatgacagtgaggaaaccaagtgcaactcctgggtttttttagattctgcctgacacggaacaccaggtctgctcgtcttttttgtgttttatatttgcttatttaaggtacatttctttgggtttctagagacgcccctaagtcacctgcttcattagacggtttccaggttttctcccaggtgacgctgttagcgcctcagctggcggtgacagccggcccagcgtggcgccaccacacaccgcagagctgtccaggcacagctccgtccccagcgctcatggtgttgaaactgtctgtcatgcaccacggtgtctgtgtccacacagtaataaacggtttactg

SEQ ID NO: 129649 - DNA, 819 bp, Homo sapiens
  Payload ID: 5354
  Gene Symbol: EVL
  Gene Name: Enah/Vasp-like
  ENST ID: ENST00000554031
  CDS Start-End: 1-314
ctggggctaccccacctcccccacccccactgccagccggaggagcccaggggtccagccacgacgagagctccatgtcaggactggccgctgccatagctggggccaagctgagaagagtccaacggccagaagacgcatctggaggctccagtcccagtgggacctcaaagtccgatgccaaccgggcaagcagcgggggtggcggaggaggcctcatggaggaaatgaacaaactgctggccaagaggagaaaagcagcctcccagtcagacaagccagccgagaagaaggaagatgaaagccaaatgtgaacatgcactaagtttatcattaacagagaagaaagaaggcttatttgaaagacgaaaagagccccaaatgtggagtccggtgacttgggcaggccctctgccatggcagagctggccctgggccaatggagttactgctccgaggaccagttccaccacctgaaaacctgcacccaggcatggccgcctcacagactgtgcgactgccagaggaagatcctagtacctccccctctccggggacccgagcagccagccagccacctaactcctcagaggctggccggaagccctgggagcggagcaactcggtggagaagcctgtgtcctcgattctgtccagaaccccgtctgtggcaaagagccccgaagctaagagcccccttcagtcgcagcctcactctaggatgaagcctgctgggagcgtgaatgacatggccctggatgccttcgacttggaccggatgaagcaggagatcctagaggaggtggtgagagagctcca

SEQ ID NO: 129650 - DNA, 1119 bp, Homo sapiens
  Payload ID: 5354
  Gene Symbol: EVL
  Gene Name: Enah/Vasp-like
  ENST ID: ENST00000554695
  CDS Start-End: 1-639
ccgccccccccacccccagtcccacctccacccactggggctaccccacctcccccacccccactgccagccggaggagcccaggggtccagccacgacgagagctccatgtcaggactggccgctgccatagctggggccaagctgagaagagtccaacggccagaagacgcatctggaggctccagtcccagtgggacctcaaagtccgatgccaaccgggcaagcagcgggggtggcggaggaggcctcatggaggaaatgaacaaactgctggccaagaggagaaaagcagcctcccagtcagacaagccagccgagaagaaggaagatgaaagccaaatggaagatcctagtacctccccctctccggggacccgagcagccagccagccacctaactcctcagaggctggccggaagccctgggagcggagcaactcggtggagaagcctgtgtcctcgattctgtccaggatgaagcctgctgggagcgtgaatgacatggccctggatgccttcgacttggaccggatgaagcaggagatcctagaggaggtggtgagagagctccacaaggtgaaggaggagatcatcgacgccatcaggcaggagctgagtgggatcagcaccacgtaaggggccggcctcgctgcgctgattcgtcgagcccatccggcgacagaggacagccagaagcccagccagccccagactccagtgcaccagagcacgcacaggagcctgggcgcgctgctgtgaaacgtcctgacctgtgatcacacatgacagtgaggaaaccaagtgcaactcctgggtttttttagattctgcctgacacggaacaccaggtctgctcgtcttttttgtgttttatatttgcttatttaaggtacatttctttgggtttctagagacgcccctaagtcacctgcttcattagacggtttccaggttttctcccaggtgacgctgttagcgcctcagctggcggtgacagccggcccagcgtggcgccaccacacaccgcagagctgtccaggcacagctccgtccccagcgctcatggtgttgaaactgtctgtcatgcaccacggtgtctgtgtccacacagtaata

SEQ ID NO: 129651 - DNA, 837 bp, Homo sapiens
  Payload ID: 5354
  Gene Symbol: EVL
  Gene Name: Enah/Vasp-like
  ENST ID: ENST00000553875
  CDS Start-End: 72-446
ctgatcaacataggctggtgggagtacaggactcgcctcctcagggttccctgtgctgccacttttcagccatggccacaagtgaacagagtatctgccaagcccgggcttccgtgatggtctacgatgacaccagtaagaaatgggtaccaatcaaacctggccagcagggattcagccggatcaacatctaccacaacactgccagcaacaccttcagagtcgttggagtcaagttgcaggatcagcaggttgtgatcaattattcaatcgtgaaagggctgaagtacaatcaggccacgccaaccttccaccagtggcgagatgcccgccaggtctacggcttaaactttgcaagtaaagaagaggcaaccacgttctccaatgcaatgctgtttgccctgaacatcatgaattcccaagaaggaggtgcgtgcatcctctaatgacaaagcaaccttgtatttccttccacaaatgaatggaggcagcctaacgtcatgtggcccctccagccagcgtcaggtgcagaatggcccctctcctgatgagatggacatccagagaagacaagtgatggagcagcaccagcagcagcgtcaggaatctctagaaagaagaacctcggccacagggcccatcctcccaccaggacatccttcatctgcagccagcgcccccgtctcatgtagtgggcctccaccgccccccccacccccagtcccacctccacccactggggctaccccacctcccccacccccactgccagccggaggagcccaggggtccagccacgacgagagctccatgtcaggactggccgctgccatagct

SEQ ID NO: 129652 - DNA, 590 bp, Homo sapiens
  Payload ID: 5354
  Gene Symbol: EVL
  Gene Name: Enah/Vasp-like
  ENST ID: ENST00000557153
  CDS Start-End: 86-590
ctcatccggtggttttcgcagcacgctacacaggcacagaagcagcttgcatgaacagagtatctgccaagcccgggcttccgtgatggtctacgatgacaccagtaagaaatgggtaccaatcaaacctggccagcagggattcagccggatcaacatctaccacaacactgccagcaacaccttcagagtcgttggagtcaagttgcaggatcagcaggttgtgatcaattattcaatcgtgaaagggctgaagtacaatcaggccacgccaaccttccaccagtggcgagatgcccgccaggtctacggcttaaactttgcaagtaaagaagaggcaaccacgttctccaatgcaatgctgtttgccctgaacatcatgaattcccaagaaggaggcccctccagccagcgtcaggtgcagaatggcccctctcctgatgagatggacatccagagaagacaagtgatggagcagcaccagcagcagcgtcaggaatctctagaaagaagaacctcggccacagggcccatcctcccaccaggacatccttcatctgcagccagcgcccccgtctcatgtagtgggc

SEQ ID NO: 129653 - DNA, 1715 bp, Homo sapiens
  Payload ID: 5354
  Gene Symbol: EVL
  Gene Name: Enah/Vasp-like
  ENST ID: ENST00000555048
  CDS Start-End: 77-928
gtcctctgatcaacataggctggtgggagtacaggactcgcctcctcagggttccctgtgctgccacttttcagccatggccacaagtgaacagagtatctgccaagcccgggcttccgtgatggtctacgatgacaccagtaagaaatgggtaccaatcaaacctggccagcagggattcagccggatcaacatctaccacaacactgccagcaacaccttcagagtcgttggagtcaagttgcaggatcagcaggttgtgatcaattattcaatcgtgaaagggctgaagtacaatcaggccacgccaaccttccaccagtggcgagatgcccgccaggtctacggcttaaactttgcaagtaaagaagaggcaaccacgttctccaatgcaatgctgtttgccctgaacatcatgaattcccaagaaggagccaggaaaactgagccccagagggaggaagtttgtacttggcccaaaccacttcctgatatgacccagtcaggaagagaagccaggatgagaacatgctcctcttctcctccagtgcctggaagtgtggtgggagcagcttggtctagcaggaagagtgcatgtcctggagccgggctacgttgggtctgtgtgaccctgagcaagtcacctcctccatcagcaggtggaatgacaccacaggcccgtggcagttcacatgacacgaagatgcccggtgcctggtatgtggccttcagggccgtgccccatgctgctcctctttttgtccccacatccagcagttttccattaaaccactgtaggtcctctcagaacttactagagtcatcgtgtcatcgtctcccattactccaggagagcagggccctggtggcacttgaggcaagaccccaagctgatggcactcgaccacatagtgggagtgaattttaaagaaaatccccctcaaagcctctgctggtgtagaaggcagatagtctaggccggggtagggccagtgagtgggagccagggaaggaggcttgggtgtcatgagactgggtttacatttacagatgacaaaaccaagacccagtgagggggaggatgtgtgcaggccacaggacaagtctgagcagaaccatggccacgcccaacgttcctccactagcattccctcatgaaagatcactttttccaggccaaggaccagaaaaggaccaggctttaggaagagggccgaggtgcatggaaagcagtgctggtgaggagagggttgagtaactggattttgactgtttcttcgcatttggttctcactaatgaaatcttgtcagacgtgcccctgctgctggattgggtgggggtgggacagaagcatgtgtggtcaaaggcaagtttatttgcagtttgggggttgaatgcagtggatttcaaactggatattttgaggagttccaggggtccaccaaggtataccagggtcctcgccctgatgcaaccagagtagttcttcatcgactttatacagtgggactctgaagaaaagaaaaaggaaaaccccatagcttagtgggaatccgggcgaattaaaacacaggatgaagtgcttgttctctttggctcttggagcataatgtatgtccttttcctacttggtttgcgtgtaataacatcattggtatatttcaaaatatgaagctcctggtgctggataataaatgttttcccagtttttcaa

SEQ ID NO: 129654 - DNA, 5679 bp, Homo sapiens
  Payload ID: 5355
  Gene Symbol: ENAM
  Gene Name: enamelin
  Uniprot ID: Q9NRM1
  ENST ID: ENST00000396073
  CDS Start-End: 282-3710
ctttttattttgagcctttttgatactgaacatgatatctgagtgaagaatttttgttttattattaagaaataaatgtatcttgcttcttgagatctccctggcttcagcaatttgtagttatttccactatagaccattaagaatatatttcaaaggcaagctaacaaagttcaagtaaaaattattttttatatattacagcttctaattggcattggtttcttctcaggttaaagctgtatttttcttaaaggcttataaaaattttgctgaaaaaaatgttggtgcttcggtgcaggcttggaacctcttttcctaaactagataacttggtaccaaaaggcaaaatgaagattctcctggtctttctagggcttcttggtaattctgttgctatgccaatgcacatgccccgaatgcctggatttagcagtaaaagtgaggagatgatgcggtataatcaattcaactttatgaacggcccacatatggcacacctggggcccttctttggaaacggtctccctcagcaatttccacagtaccagatgcccatgtggcctcagccaccacccaacacatggcatccacggaaatcctcagcacccaaacgtcataacaagactgatcagacccaagaaacccagaaacccaaccagactcagtcaaaaaagccaccacaaaagcggcctttgaagcagccatcacataatcaacctcagcccgaagaggaagctcaaccccctcaggcattcccaccatttggaaatgggctattcccctatcaacaaccaccatggcaaattccacagaggttaccaccaccaggttatggacgcccaccaatcagcaatgaagaaggggggaatccttactttggatattttggatatcatggctttgggggtcgccctccttattattcagaagaaatgtttgaacaagattttgaaaaacccaaagaagaagatcctcctaaagcagaaagtccaggcacagaacccacagctaattcaacagtcactgagacgaattctacccaaccaaatcctaaagggagtcagggaggaaatgacaccagccccacaggaaacagtaccccaggactaaacactgggaacaaccctccagctcaaaatgggattggcccactccctgcagtcaacgcttcaggccagggagggccaggaagtcaaatcccatggagaccaagtcagccaaatattcgtgaaaatcatccatatcctaatataagaaattttccttcaggaagacagtggtatttcactggtactgtcatggggcacagacagaataggcctttttacagaaatcaacaagttcaaaggggtcctcggtggaacttctttgcttgggaacgtaaacaagtagctcgtccaggaaatccagtttatcacaaagcttaccctcctacttcaagaggcaattatcccaattatgcaggaaatccagcaaatctcagaagaaagcctcaggggccaaataaacaccctgtaggaactactgttgccccactgggtcccaaacctggccctgttgttcgcaatgaaaaaatccaaaatccaaaggagaagcccctgggtccaaaagaacaaataatagttcctacaaagaatccaaccagcccctggagaaactctcaacagtatgaagttaataaatcaaattataaactgcctcactctgagggttatatgccagtcccaaattttaattctgttgatcaacatgaaaactcctattacccaagaggagattccagaaaagtcccaaattctgatggacaaacccaaagccagaatttgcccaaagggattgttttagggtcaagaaggatgccatatgaatcagaaactaatcagtcagaattaaagcacagctcatatcagcctgctgtataccctgaggaaatcccttctcctgcaaaagaacattttcctgctggaagaaatacttgggaccaccaagaaatctctccaccttttaaggaagatccagggaggcaagaagaacatttaccccatccttcccatggttctagaggaagtgttttctaccctgaatataacccatatgatcccagggaaaactcaccataccttagaggcaatacatgggatgagagagatgattctcccaatactatggggcaaaaagaaagtccactctaccccataaataccccagaccagaaggagatagtcccttataatgaagaggacccagttgatccaactggagatgaagtctttcctggacaaaatagatggggtgaagagttgagcttcaaaggaggcccaacagttaggcactatgaaggtgaacaatatacctcaaatcagccaaaggaatatcttccctattctttagataatccatcaaaaccaagggaggatttttattacagtgaattttacccatggagcccggatgagaattttccatcatataatacagcttctactatgccaccacctatagagagcaggggctactacgttaataatgccgctggaccagaagaaagcactctatttccttcacggaattcctgggaccacaggatacaagcccaagggcagagagaaagaaggccgtattttaacagaaatatctgggatcaggcaacacatttacaaaaagccccagctaggccaccagaccagaaaggtaaccagccctattacagtaacaccccagctgggcttcagaaaaatccaatatggcatgaaggtgagaatttgaactatggcatgcaaataactaggatgaattctccagagagagaacattcatctttccctaacttcatcccaccaagttacccatcaggtcaaaaagaagcacatttatttcacctaagccagagaggctcttgctgtgctggtagctccacagggcccaaggacaatccactagctctacaagactacactccatcctatggtcttgcacctggggagaaccaagacaccagtcctctgtatacagacggtagtcataccaagcagacaagagatatcatctccccaacaagcatcctaccaggccaaagaaacagctcagagaagagggaaagccaaaacccttttagagatgatgtgtccacgctgaggaggaacacaccatgttctataaagaatcaactgggccaaaaggaaattatgccctttcctgaagccagttcccttcaatcaaagaatacaccttgtctcaaaaatgatcttggaggagatgggaacaacattctggaacaagtttttgaagacaaccagctcaatgaaagaactgttgaccttactcctgagcagcttgttattggtacacctgatgaaggctccaatccagaaggcatccaaagtcaagtccaagaaaatgagagtgagaggcaacagcaaagaccatctaacattctgcatttgccatgctttggctccaaattagcaaagcatcactcttccaccaccggaactccatctagcgatggaaggcaaagcccatttgatggggattcaattacgcctactgaaaatcctaacacattggttgagttagctactgaggaacaatttaagagtataaatgtagacccacttgatgcagatgaacacagtccatttgaattccttcaaagagggaccaatgtacaggaccaggtacaagactgcttactacttcaggcctaggggttatccaaccaagcattcttggggaaagagaaatcactgacattctataccaatggttcccaaaattttttccccaagacttaattaagtgtctgactgtcttggtgatccttaagttttctcccctctcagcaataggagtagcgacccaggtggagctgagattaggcctctggggatcaccagatctagcactttcacagattagtgcagaccttaaaaaagcaagaaggccatgaccatccctgcctcgaaacttgcaagtcacttgtctgagttagtttccttttgcttgatgacttcttttgctctcaaagttccatacttgcaaaattggtttttcaagactgaaaggcagattaactttccattctacttatggagatccacacatcagtatagtcctgatgcactgtacgttttttgcttgtgttgatcttgtcaggtttttttcctactcaatattctcttcaagcattttttttcttccactgccactctctttacctttatcatttctttttcttagctttcttccttcttttctctctccctcaaccattctgtatttagctttctaatcctcatctttttctctctgtatatcacttcttacatattaaattagctattttaaccatttctagtctcttctttatgtctacctcctccattatgtcttcgtctcttccaacctatctgttctgtctcccaatgtaccacttatcaactaatccctctcctctctgattcctttcttcccttcaatttatctttttccctgttacaccattttcatcttaagactgcatgtcactctcttcctttttgtatccactctccaaatcgtaccctaaatttttcttgacccagcttaaccatcattacagaatatattttggaaatggtagacactgatagctactttgtttttagttatcttagggtctctaccaagtagacacagttcagttagagagacgtatttaaggagaagggaaggcaggatacccagaactagcagcctagggaaaaggcttaggaagatggagaatgaggaactgaagaaactgccgctctgagactgcacatccaggaaaaaagactaggacttgccacacactgccaattcataatccgcaggatctgtagaagacattttgggaaacactgtcttaaataaaaactcaatgtttagttgtttttttttttttttactagttcagcataagggattctaccagtatgtgctactactaacattcttcatgtccatgcagaattacttacagacactctttcttggtatcttgaataaattgtgtaaattattttgaaaagtggatatttctatatgccttgcttataatacatcagggattattattcttattaataacatgttggcctattatctggatgtcccttgcctagagcaggaaaaaagtctcagaattacctaaaaacatactttataactttaagagatttcttaggatacatcttcaggggcagatttcataacaacatctcaaaaatttggggaaacacaacgttgaaaacttcctaagaaaaggaatcttgcccttgaatcttctgaagtacctagcacagtgtcttcaacatagaaggtacccaataaatatatatcaattcattttttaatgactttcaacactcccatgaaaacaccgtagtctgcttttcctgaaaggtgactgtctaggatgctgaatgagccaccactccgtagctttatatattcagcaacatttccatcatagaatttcagcgttagaagggatcttagaggtagattatccaggccatcccctactgcttacattcccctccccctggccagttttatattttaatcacacattgaaaaattcattaacttattctgtataaaactgtcttttaagaattatcctttcaaaataaaaatgttattgtttcacta

SEQ ID NO: 129655 - DNA, 2792 bp, Homo sapiens
  Payload ID: 5356
  Gene Symbol: EXOG
  Gene Name: endo/exonuclease (5'-3'), endonuclease G-like
  Uniprot ID: Q9Y2C4
  ENST ID: ENST00000287675
  CDS Start-End: 97-1203
agcttggcgggcggtgaggcgtggggtgacggggggatggcgggggccggcatgcgcgcgcatgcgccgtggtaaaaggccggtacctcgggcaagatggctatcaagagtatcgcttcccgcctccggggttcccgtcgttttctgagcggcttcgtggctggggctgtagtgggcgctgcgggagctgggctcgcggccctgcagttcttccggagtcagggcgctgagggagcgttgacagggaagcagccggatggatctgcagaaaaggctgtcttggaacaatttggattccctttaactggaacagaggcaaggtgttacactaatcacgctttgtcttatgatcaggcaaagcgggtgcctagatgggttcttgaacatatttccaaaagcaagataatgggtgatgcagacagaaagcattgtaaatttaagcctgatcccaatatccctccaaccttcagtgccttcaatgaagattatgttggaagtgggtggtcacgaggacacatggctccagcaggaaataacaaattttcaagtaaagccatggctgaaaccttttacctttctaacattgtgcctcaggattttgataataattctggatattggaacagaatagaaatgtactgtcgagagctgacagaaaggtttgaagatgtttgggtggtatctgggcctttgaccttacctcagactagaggcgatggaaagaaaatagttagttaccaggtgattggcgaggacaacgtggcagtcccctcacacctttataaggtaatcctggcccgcagaagctcagtatctaccgaaccactggcgctaggggcctttgtggtacccaatgaagccatcggcttccagccccagttaactgaattccaagtgagcctccaggacctagagaagttgtcaggactggtgttttttcctcatttggatagaactagtgatatccggaatatctgctctgtggacacctgtaagctcctggatttccaggagttcaccttgtacttgagtacaagaaagattgaaggagcccgatcagtgctcagactggaaaagatcatggaaaacttgaagaatgcagagattgaaccagatgattactttatgagtcgctatgagaagaagctagaagaactcaaagctaaggagcagtcaggaacccagataagaaagccatcctagtttttatctcaagatgtgtcataccgtctgtaatgaagcaggcatgccctctttaggctaacatattttagtggctttgctttttgctttttaaaaagtttttctctttaagagatgtggtctcgccgtgtcatccaggctggagtgcagtggtggaatcatagctcactatagcctcaaacttctgggcttaagcaatcctcctgcctctgccccctgagcagctgggactacaggcacacaccatcaccctcagctactagtggctttgctttaaagaaacagtggaatcctaaatttatgactaaaaattcccccaaaagatgaaagatctacaatgtttttgtcagtattatatttgactcaggaactaattattaagggagctttgacacctgcagatggagggctgatcttgtgtcaagttaacaggaagactgcccacagatgacactgcatttgtatccctgtggatgtagagtattgggaaggcatttgtttagtttcatgcctccaaaccatgcattgtctgtgatgtatctgcccagccttctcagaactcaatgttgtacatttttccctctaggacctgaattggtcttggaggcagcttttagaaatcctctgtgtagttcctgtccacatgcactatatatttgtttcttttttctcctctcatgaatctgctcgtttctctacttctgtctacgtagaagcactcagcaactagtttctgctcattaaatgtgttctatatactaggctcagtgctttacatgtgttgtctcacaatgactctctgaggtaaatacactatccccattttacctgtgagaaaattgaggcttagagagcttagtgtcttacctgagtttcacttttccaaagtagtcatccacaaagtatgaggcagacagatctaagagaagaaagacagctgaggtagattcaaatcttttctgacatggatggtggctttttactcagaaatatatacctatttccatgggtatttgtgggcctgaggcatgcttggcaagaagagtctggtttctcgtctgctatgcaagccaaagggactttaatgttctttgaattgaaccctccttagctctgtggaaagagacagtcaggaatatttgggaattagacggcaatactttgtggggtttattagagcccatgcttgcctccagagatacagttcttttagtgaccagatactgccaaattgatgtgttcttgctttccaggtgagctttttgttcttaagattaagaaacctatgaaggatctgcagccaggcatggtggctcaggcctataatctcagcactttgggaaatcgaggtgggtggatcgcttgagcccaggagtttgagaccagcctgggcaacataatgaaaccctatctttacaaaaaaatacaaaaattagctgggcgtggtggtgcacacctgtagtcccagctactcgggaggctgaaatgggaggattgcttgagcctggcaggtcaaggctgcgatgggacatggtcatgccactggacgccagcctgggccacagagggagaccctgtctcaaaaaaag

SEQ ID NO: 129656 - DNA, 1255 bp, Homo sapiens
  Payload ID: 5356
  Gene Symbol: EXOG
  Gene Name: endo/exonuclease (5'-3'), endonuclease G-like
  ENST ID: ENST00000431472
  CDS Start-End: 27-350
ggtaaaaggccggtacctcgggcaagatggctatcaagagtatcgcttcccgcctccggggttcccgtcgttttctgagcggcttcgtggctggggctgtagtgggcgctgcgggagctgggctcgcggccctgcagttcttccggagtcagggcgctgagggagcgttgacagggaagcagccggatggatctgcagaaaaggctgtcttggaacaatttggattccctttaactggaacagaggcaaggtgttacactaatcacgctttgtcttatgatcaggcaaagcgggtgcctagatgggttcttgaacatatttccaaaagcaagataatgggctggtcttgaatttctgggttcaagtgaccctcctgcctcagcctcctgagtagctgggattacaggtgatgcagacagaaagcattgtaaatttaagcctgatcccaatatccctccaaccttcagtgccttcaatgaagattatgttggaagtgggtggtcacgaggacacatggctccagcaggaaataacaaattttcaagtaaagccatggctgaaaccttttacctttctaacattgtgcctcaggattttgataataattctggatattggaacagaatagaaatgtactgtcgagagctgacagaaaggtttgaagatgtttgggtggtatctgggcctttgaccttacctcagactagaggcgatggaaagaaaatagttagttaccaggtgattggcgaggacaacgtggcagtcccctcacacctttataaggtaatcctggcccgcagaagctcagtatctaccgaaccactggcgctaggggcctttgtggtacccaatgaagccatcggcttccagccccagttaactgaattccaagtgagcctccaggacctagagaagttgtcaggactggtgttttttcctcatttggatagaactagtgatatccggaatatctgctctgtggacacctgtaagctcctggatttccaggagttcaccttgtacttgagtacaagaaagattgaaggagcccgatcagtgctcagactggaaaagatcatggaaaacttgaagaatgcagagattgaaccagatgattactttatgagtcgctatgagaagaagctagaagaactcaaagctaaggagcagtcaggaacccagataagaaagccatcctagtttttatctcaagatgtgtcataccgtctgtaatgaagcaggcatgccctcttta

SEQ ID NO: 129657 - DNA, 576 bp, Homo sapiens
  Payload ID: 5356
  Gene Symbol: EXOG
  Gene Name: endo/exonuclease (5'-3'), endonuclease G-like
  ENST ID: ENST00000453767
  CDS Start-End: 1-562
cttccggagtcagggcgctgagggagcgttgacagggaagcagccggatggatctgcagaaaaggctgtcttggaacaatttggattccctttaactggaacagaggcaaggtgttacactaatcacgctttgtcttatgatcaggcaaagcgggtgcctagatgggttcttgaacatatttccaaaagcaagataatgggtgatgcagacagaaagcattgtaaatttaagcctgatcccaatatccctccaaccttcagtgccttcaatgaagattatgttggaagtgggtggtcacgaggacacatggctccagcaggaaataacaaattttcaagtaaagccatggctgaaaccttttacctttctaacattgtgcctcaggattttgataataattctggatattggaacagaatagaaatgtactgtcgagagctgacagaaaggtttgaagatgtttgggtggtatctgggcctttgaccttacctcagactagaggcgatggaaagaaaatagttagttaccagagctgggagtacccaagcctgcagttttgacctttgaatgtttg

SEQ ID NO: 129658 - DNA, 1467 bp, Homo sapiens
  Payload ID: 5356
  Gene Symbol: EXOG
  Gene Name: endo/exonuclease (5'-3'), endonuclease G-like
  ENST ID: ENST00000412107
  CDS Start-End: 242-412
attttcttctcatgactatatatagcataccactaagccctctagacatcatattccccatccatcgccccgtccagtggaccagggatgaagcggggatgcgctaggcatcccggtttgtcaccagggggcgtgcgaggccctcagcttggcgggcggtgaggcgtggggtgacggggggatggcgggggccggcatgcgcgcgcatgcgccgtggtaaaaggccggtacctcgggcaagatggctatcaagagtatcgcttcccgcctccggggttcccgtcgttttctgagcggcttcgtggctggggctgtagtgggcgctgcgggagctgggctcgcggccctgcagttcttccggagtcagggcgctgagggagcgttgacagggaagcagccggatgattgttagctccataagacttgagactatgtctgttttggtctccatcatctaaccagcacagtacctggtacataattggcattcagatctgcagaaaaggctgtcttggaacaatttggattccctttaactggaacagaggcaagggaactaaaagagtgccagtagatgaatgagggggaaggtgatgtgaaatgatgctggagaagtaagcaggtgatgcagacagaaagcattgtaaatttaagcctgatcccaatatccctccaaccttcagtgccttcaatgaagattatgttggaagtgggtggtcacgaggacacatggctccagcaggaaataacaaattttcaagtaaagccatggctgaaaccttttacctttctaacattgtgcctcaggattttgataataattctggatattggaacagaatagaaatgtactgtcgagagctgacagaaaggtttgaagatgtttgggtggtatctgggcctttgaccttacctcagactagaggcgatggaaagaaaatagttagttaccaggtgattggcgaggacaacgtggcagtcccctcacacctttataaggtaatcctggcccgcagaagctcagtatctaccgaaccactggcgctaggggcctttgtggtacccaatgaagccatcggcttccagccccagttaactgaattccaagtgagcctccaggacctagagaagttgtcaggactggtgttttttcctcatttggatagaactagtgatatccggaatatctgctctgtggacacctgtaagctcctggatttccaggagttcaccttgtacttgagtacaagaaagattgaaggagcccgatcagtgctcagactggaaaagatcatggaaaacttgaagaatgcagagattgaaccagatgattactttatgagtcgctatgagaagaagctagaagaactcaaagctaaggagcagtcaggaacccagataagaaagccatcctagtttttatctcaagatgtgtcataccgtctgtaatgaagcaggcatgccctc

SEQ ID NO: 129659 - DNA, 2075 bp, Homo sapiens
  Payload ID: 5356
  Gene Symbol: EXOG
  Gene Name: endo/exonuclease (5'-3'), endonuclease G-like
  ENST ID: ENST00000457367
  CDS Start-End: 4-435
aagatggctatcaagagtatcgcttcccgcctccggggttcccgtcgttttctgagcggcttcgtggctggggctgtagtgggcgctgcgggagctgggctcgcggccctgcagttcttccggagtcagggcgctgagggagcgttgacagggaagcagccggatggatctgcagaaaaggctgtcttggaacaatttggattccctttaactggaacagaggcaaggtgttacactaatcacgctttgtcttatgatcaggcaaagcgggtgcctagatgggttcttgaacatatttccaaaagcaagataatgggtagattcttcaagtttacactcctagcatcattgtttcttctctctctcaaccttcacctatggctggtcttgaatttctgggttcaagtgaccctcctgcctcagcctcctgagtagctgggattacagggactacatggaaggttgtcttggcactgaacggagaaaggtcaaaaggaagataaaaagtttgttccagagaaggtgatgcagacagaaagcattgtaaatttaagcctgatcccaatatccctccaaccttcagtgccttcaatgaagattatgttggaagtgggtggtcacgaggacacatggctccagcaggaaataacaaattttcaagtaaagccatggctgaaaccttttacctttctaacattgtgcctcaggattttgataataattctggatattggaacagaatagaaatgtactgtcgagagctgacagaaaggtttgaagatgtttgggtggtatctgggcctttgaccttacctcagactagaggcgatggaaagaaaatagttagttaccaggtgattggcgaggacaacgtggcagtcccctcacacctttataaggtaatcctggcccgcagaagctcagtatctaccgaaccactggcgctaggggcctttgtggtacccaatgaagccatcggcttccagccccagttaactgaattccaagtgagcctccaggacctagagaagttgtcaggactggtgttttttcctcatttggatagaactagtgatatccggaatatctgctctgtggacacctgtaagctcctggatttccaggagttcaccttgtacttgagtacaagaaagattgaaggagcccgatcagtgctcagactggaaaagatcatggaaaacttgaagaatgcagagattgaaccagatgattactttatgagtcgctatgagaagaagctagaagaactcaaagctaaggagcagtcaggaacccagataagaaagccatcctagtttttatctcaagatgtgtcataccgtctgtaatgaagcaggcatgccctctttaggctaacatattttagtggctttgctttttgctttttaaaaagtttttctctttaagagatgtggtctcgccgtgtcatccaggctggagtgcagtggtggaatcatagctcactatagcctcaaacttctgggcttaagcaatcctcctgcctctgccccctgagcagctgggactacaggcacacaccatcaccctcagctactagtggctttgctttaaagaaacagtggaatcctaaatttatgactaaaaattcccccaaaagatgaaagatctacaatgtttttgtcagtattatatttgactcaggaactaattattaagggagctttgacacctgcagatggagggctgatcttgtgtcaagttaacaggaagactgcccacagatgacactgcatttgtatccctgtggatgtagagtattgggaaggcatttgtttagtttcatgcctccaaaccatgcattgtctgtgatgtatctgcccagccttctcagaactcaatgttgtacatttttccctctaggacctgaattggtcttggaggcagcttttagaaatcctctgtgtagttcctgtccacatgcactatatatttgtttcttttttctcctctcatgaatctgctcgtttctctacttctgtctacgtagaagcactcagcaactagtttctgctcattaaatgtgttctatatac

SEQ ID NO: 129660 - DNA, 1317 bp, Homo sapiens
  Payload ID: 5356
  Gene Symbol: EXOG
  Gene Name: endo/exonuclease (5'-3'), endonuclease G-like
  Uniprot ID: Q9Y2C4
  ENST ID: ENST00000422077
  CDS Start-End: 24-980
aaaaggccggtacctcgggcaagatggctatcaagagtatcgcttcccgcctccggggttcccgtcgttttctgagcggcttcgtggctggggctgtagtgggcgctgcgggagctgggctcgcggccctgcagttcttccggagtcagggcgctgagggagcgttgacagggaagcagccggatggtgatgcagacagaaagcattgtaaatttaagcctgatcccaatatccctccaaccttcagtgccttcaatgaagattatgttggaagtgggtggtcacgaggacacatggctccagcaggaaataacaaattttcaagtaaagccatggctgaaaccttttacctttctaacattgtgcctcaggattttgataataattctggatattggaacagaatagaaatgtactgtcgagagctgacagaaaggtttgaagatgtttgggtggtatctgggcctttgaccttacctcagactagaggcgatggaaagaaaatagttagttaccaggtgattggcgaggacaacgtggcagtcccctcacacctttataaggtaatcctggcccgcagaagctcagtatctaccgaaccactggcgctaggggcctttgtggtacccaatgaagccatcggcttccagccccagttaactgaattccaagtgagcctccaggacctagagaagttgtcaggactggtgttttttcctcatttggatagaactagtgatatccggaatatctgctctgtggacacctgtaagctcctggatttccaggagttcaccttgtacttgagtacaagaaagattgaaggagcccgatcagtgctcagactggaaaagatcatggaaaacttgaagaatgcagagattgaaccagatgattactttatgagtcgctatgagaagaagctagaagaactcaaagctaaggagcagtcaggaacccagataagaaagccatcctagtttttatctcaagatgtgtcataccgtctgtaatgaagcaggcatgccctctttaggctaacatattttagtggctttgctttttgctttttaaaaagtttttctctttaagagatgtggtctcgccgtgtcatccaggctggagtgcagtggtggaatcatagctcactatagcctcaaacttctgggcttaagcaatcctcctgcctctgccccctgagcagctgggactacaggcacacaccatcaccctcagctactagtggctttgctttaaagaaacagtggaatcctaaatttatgactaaaaattcccccaaaagatgaaagatctaca

SEQ ID NO: 129661 - DNA, 1750 bp, Homo sapiens
  Payload ID: 5356
  Gene Symbol: EXOG
  Gene Name: endo/exonuclease (5'-3'), endonuclease G-like
  ENST ID: ENST00000447573
  CDS Start-End: 26-196
gtaaaaggccggtacctcgggcaagatggctatcaagagtatcgcttcccgcctccggggttcccgtcgttttctgagcggcttcgtggctggggctgtagtgggcgctgcgggagctgggctcgcggccctgcagttcttccggagtcagggcgctgagggagcgttgacagggaagcagccggatgattgttagctccataagacttgagactatgtctgttttggtctccatcatctaaccagcacagtacctggtacataattggcattcagatctgcagaaaaggctgtcttggaacaatttggattccctttaactggaacagaggcaaggtgttacactaatcacgctttgtcttatgatcaggcaaagcgggtgcctagatgggttcttgaacatatttccaaaagcaagataatggggactacatggaaggttgtcttggcactgaacggagaaaggtcaaaaggaagataaaaagtttgttccagagaaggtgatgcagacagaaagcattgtaaatttaagcctgatcccaatatccctccaaccttcagtgccttcaatgaagattatgttggaagtgggtggtcacgaggacacatggctccagcaggaaataacaaattttcaagtaaagccatggctgaaaccttttacctttctaacattgtgcctcaggattttgataataattctggatattggaacagaatagaaatgtactgtcgagagctgacagaaaggtttgaagatgtttgggtggtatctgggcctttgaccttacctcagactagaggcgatggaaagaaaatagttagttaccaggtgattggcgaggacaacgtggcagtcccctcacacctttataaggtaatcctggcccgcagaagctcagtatctaccgaaccactggcgctaggggcctttgtggtacccaatgaagccatcggcttccagccccagttaactgaattccaagtgagcctccaggacctagagaagttgtcaggactggtgttttttcctcatttggatagaactagtgatatccggaatatctgctctgtggacacctgtaagctcctggatttccaggagttcaccttgtacttgagtacaagaaagattgaaggagcccgatcagtgctcagactggaaaagatcatggaaaacttgaagaatgcagagattgaaccagatgattactttatgagtcgctatgagaagaagctagaagaactcaaagctaaggagcagtcaggaacccagataagaaagccatcctagtttttatctcaagatgtgtcataccgtctgtaatgaagcaggcatgccctctttaggctaacatattttagtggctttgctttttgctttttaaaaagtttttctctttaagagatgtggtctcgccgtgtcatccaggctggagtgcagtggtggaatcatagctcactatagcctcaaacttctgggcttaagcaatcctcctgcctctgccccctgagcagctgggactacaggcacacaccatcaccctcagctactagtggctttgctttaaagaaacagtggaatcctaaatttatgactaaaaattcccccaaaagatgaaagatctacaatgtttttgtcagtattatatttgactcaggaactaattattaagggagctttgacacctgcagatggagggctgatcttgtgtcaagttaacaggaagactgcccacagatgacactg

SEQ ID NO: 129662 - DNA, 1440 bp, Homo sapiens
  Payload ID: 5356
  Gene Symbol: EXOG
  Gene Name: endo/exonuclease (5'-3'), endonuclease G-like
  ENST ID: ENST00000438992
  CDS Start-End: 4-174
aagatggctatcaagagtatcgcttcccgcctccggggttcccgtcgttttctgagcggcttcgtggctggggctgtagtgggcgctgcgggagctgggctcgcggccctgcagttcttccggagtcagggcgctgagggagcgttgacagggaagcagccggatgattgttagctccataagacttgagactatgtctgttttggtctccatcatctaaccagcacagtacctggtacataattggcattcagatctgcagaaaaggctgtcttggaacaatttggattccctttaactggaacagaggtagattcttcaagtttacactcctagcatcattgtttcttctctctctcaaccttcacctatggctggtcttgaatttctgggttcaagtgaccctcctgcctcagcctcctgagtagctgggattacaggtgatgcagacagaaagcattgtaaatttaagcctgatcccaatatccctccaaccttcagtgccttcaatgaagattatgttggaagtgggtggtcacgaggacacatggctccagcaggaaataacaaattttcaagtaaagccatggctgaaaccttttacctttctaacattgtgcctcaggattttgataataattctggatattggaacagaatagaaatgtactgtcgagagctgacagaaaggtttgaagatgtttgggtggtatctgggcctttgaccttacctcagactagaggcgatggaaagaaaatagttagttaccaggtgattggcgaggacaacgtggcagtcccctcacacctttataaggtaatcctggcccgcagaagctcagtatctaccgaaccactggcgctaggggcctttgtggtacccaatgaagccatcggcttccagccccagttaactgaattccaagtgagcctccaggacctagagaagttgtcaggactggtgttttttcctcatttggatagaactagtgatatccggaatatctgctctgtggacacctgtaagctcctggatttccaggagttcaccttgtacttgagtacaagaaagattgaaggagcccgatcagtgctcagactggaaaagatcatggaaaacttgaagaatgcagagattgaaccagatgattactttatgagtcgctatgagaagaagctagaagaactcaaagctaaggagcagtcaggaacccagataagaaagccatcctagtttttatctcaagatgtgtcataccgtctgtaatgaagcaggcatgccctctttaggctaacatattttagtggctttgctttttgctttttaaaaagtttttctctttaagagatgtggtctcgccgtgtcatccaggctggagtgcagtggtggaatcatagctcactatagcctcaaacttctgggcttaagcaatcctcctg

SEQ ID NO: 129663 - DNA, 1548 bp, Homo sapiens
  Payload ID: 5356
  Gene Symbol: EXOG
  Gene Name: endo/exonuclease (5'-3'), endonuclease G-like
  ENST ID: ENST00000454803
  CDS Start-End: 24-464
aaaaggccggtacctcgggcaagatggctatcaagagtatcgcttcccgcctccggggttcccgtcgttttctgagcggcttcgtggctggggctgtagtgggcgctgcgggagctgggctcgcggccctgcagttcttccggagtcagggcgctgagggagcgttgacagggaagcagccggatggatctgcagaaaaggctgtcttggaacaatttggattccctttaactggaacagaggtgatgcagacagaaagcattgtaaatttaagcctgatcccaatatccctccaaccttcagtgccttcaatgaagattatgttggaagtgggtggtcacgaggacacatggctccagcaggaaataacaaattttcaagtaaagccatggctgaaaccttttacctttctaacattgtgcctcaggattttgataataattctggatattggaacagaatagaaatgtactgtcgagagctgacagaaaggtttgaagatgtttgggtggtatctgggcctttgaccttacctcagactagaggcgatggaaagaaaatagttagttaccagagacttaactaagcttttactaggtacctggtgctgttctgggtgcttctgatacagcattaaacaaggcagaaaagagtaccctcatggagcatgcattatagtggaggagatacctagtgattggcgaggacaacgtggcagtcccctcacacctttataaggtaatcctggcccgcagaagctcagtatctaccgaaccactggcgctaggggcctttgtggtacccaatgaagccatcggcttccagccccagttaactgaattccaagtgagcctccaggacctagagaagttgtcaggactggtgttttttcctcatttggatagaactagtgatatccggaatatctgctctgtggacacctgtaagctcctggatttccaggagttcaccttgtacttgagtacaagaaagattgaaggagcccgatcagtgctcagactggaaaagatcatggaaaacttgaagaatgcagagattgaaccagatgattactttatgagtcgctatgagaagaagctagaagaactcaaagctaaggagcagtcaggaacccagataagaaagccatcctagtttttatctcaagatgtgtcataccgtctgtaatgaagcaggcacacaccatcaccctcagctactagtggctttgctttaaagaaacagtggaatcctaaatttatgactaaaaattcccccaaaagatgaaagatctacaatgtttttgtcagtattatatttgactcaggaactaattattaagggagctttgacacctgcagatggagggctgatcttgtgtcaagttaacaggaagactgcccacagatgacactgcatttgtatccctgtggatgtagagtattgggaaggcatttgtttagtttcatgcctccaaaccatgcattgtctgtgatgtatctgcccagccttctcagaactcaatgttgtacatttttccctctagga

SEQ ID NO: 129664 - DNA, 576 bp, Homo sapiens
  Payload ID: 5356
  Gene Symbol: EXOG
  Gene Name: endo/exonuclease (5'-3'), endonuclease G-like
  ENST ID: ENST00000443942
  CDS Start-End: 29-199
gtggtaaaaggccggtacctcgggcaagatggctatcaagagtatcgcttcccgcctccggggttcccgtcgttttctgagcggcttcgtggctggggctgtagtgggcgctgcgggagctgggctcgcggccctgcagttcttccggagtcagggcgctgagggagcgttgacagggaagcagccggatgattgttagctccataagacttgagactatgtctgttttggtctccatcatctaaccagcacagtacctggtacataattggcattcagatctgcagaaaaggctgtcttggaacaatttggattccctttaactggaacagaggcaaggtgttacactaatcacgctttgtcttatgatcaggcaaagcgggtgcctagatgggttcttgaacatatttccaaaagcaagataatgggtgatgcagacagaaagcattgtaaatttaagcctgatcccaatatccctccaaccttcagtgccttcaatgaagattatgttggaagtgggtggtcacgaggacacatggctccagcaggaaataacaaattttcaagtgtaggcat

SEQ ID NO: 129665 - DNA, 1679 bp, Homo sapiens
  Payload ID: 5356
  Gene Symbol: EXOG
  Gene Name: endo/exonuclease (5'-3'), endonuclease G-like
  ENST ID: ENST00000436414
  CDS Start-End: 97-342
agcttggcgggcggtgaggcgtggggtgacggggggatggcgggggccggcatgcgcgcgcatgcgccgtggtaaaaggccggtacctcgggcaagatggctatcaagagtatcgcttcccgcctccggggttcccgtcgttttctgagcggcttcgtggctggggctgtagtgggcgctgcgggagctgggctcgcggccctgcagttcttccggagtcagggcgctgagggagcgttgacagggaagcagccggatggatctgcagaaaaggctgtcttggaacaatttggattccctttaactggaacagaggtagattcttcaagtttacactcctagcatcattgtttcttctctctctcaaccttcacctatggtgatgcagacagaaagcattgtaaatttaagcctgatcccaatatccctccaaccttcagtgccttcaatgaagattatgttggaagtgggtggtcacgaggacacatggctccagcaggaaataacaaattttcaagtaaagccatggctgaaaccttttacctttctaacattgtgcctcaggattttgataataattctggatattggaacagaatagaaatgtactgtcgagagctgacagaaaggtttgaagatgtttgggtggtatctgggcctttgaccttacctcagactagaggcgatggaaagaaaatagttagttaccaggtgattggcgaggacaacgtggcagtcccctcacacctttataaggtaatcctggcccgcagaagctcagtatctaccgaaccactggcgctaggggcctttgtggtacccaatgaagccatcggcttccagccccagttaactgaattccaagtgagcctccaggacctagagaagttgtcaggactggtgttttttcctcatttggatagaactagtgatatccggaatatctgctctgtggacacctgtaagctcctggatttccaggagttcaccttgtacttgagtacaagaaagattgaaggagcccgatcagtgctcagactggaaaagatcatggaaaacttgaagaatgcagagattgaaccagatgattactttatgagtcgctatgagaagaagctagaagaactcaaagctaaggagcagtcaggaacccagataagaaagccatcctagtttttatctcaagatgtgtcataccgtctgtaatgaagcaggcatgccctctttaggctaacatattttagtggctttgctttttgctttttaaaaagtttttctctttaagagatgtggtctcgccgtgtcatccaggctggagtgcagtggtggaatcatagctcactatagcctcaaacttctgggcttaagcaatcctcctgcctctgccccctgagcagctgggactacaggcacacaccatcaccctcagctactagtggctttgctttaaagaaacagtggaatcctaaatttatgactaaaaattcccccaaaagatgaaagatctacaatgtttttgtcagtattatatttgactcaggaactaattattaagggagctttgacacctgcagatggagggctgatcttgtgtcaagttaacaggaagactgcccacagatgacactgcatttgtatccctgtggatgtagagtattgggaaggcatttgtttagttt

SEQ ID NO: 129666 - DNA, 710 bp, Homo sapiens
  Payload ID: 5356
  Gene Symbol: EXOG
  Gene Name: endo/exonuclease (5'-3'), endonuclease G-like
  ENST ID: ENST00000450732
  CDS Start-End: 1-324
cggagtcagggcgctgagggagcgttgacagggaagcagccggatggatctgcagaaaaggctgtcttggaacaatttggattccctttaactggaacagaggtgatgcagacagaaagcattgtaaatttaagcctgatcccaatatccctccaaccttcagtgccttcaatgaagattatgttggaagtgggtggtcacgaggacacatggctccagcaggaaataacaaattttcaagtaaagccatggctgaaaccttttacctttctaacattgtgcctcaggattttgataataattctggatattggaacagaatagaaatgtactgtcgagagctgacagaaaggtttgaagatgtttgggtggtatctgggcctttgaccttacctcagactagaggcgatggaaagaaaatagttagttaccagctgaggtcatccctgtgctttctctgatgttcctgtttcaagaagaggttgattccagacaagtgaaacatacctgaagattctggtttggacattataaatggtctgacaagaaagtgattggcgaggacaacgtggcagtcccctcacacctttataaggtaatcctggcccgcagaagctcagtatctaccgaaccactggcgctaggggcctttgtggtacccaatgaagccatcggcttccagccccagttaactgaattccaagtgagcc

SEQ ID NO: 129667 - DNA, 455 bp, Homo sapiens
  Payload ID: 5356
  Gene Symbol: EXOG
  Gene Name: endo/exonuclease (5'-3'), endonuclease G-like
  ENST ID: ENST00000470291
  CDS Start-End: 1-47
agggcgctgagggagcgttgacagggaagcagccggatgattgttagctccataagacttgagactatgtctgttttggtctccatcatctaaccagcacagtacctggtacataattggcattcagatctgcagaaaaggctgtcttggaacaatttggattccctttaactggaacagaggcaagtgccttcaatgaagattatgttggaagtgggtggtcacgaggacacatggctccagcaggaaataacaaattttcaagtaaagccatggctgaaaccttttacctttctaacattgtgcctcaggattttgataataattctggatattggaacagaatagaaatgtactgtcgagagctgacagaaaggtacctggtgctgttctgggtgcttctgatacagcattaaacaaggcagaaaagagtaccctcatggagcatgcattat

SEQ ID NO: 129668 - DNA, 197 bp, Homo sapiens
  Payload ID: 5356
  Gene Symbol: EXOG
  Gene Name: endo/exonuclease (5'-3'), endonuclease G-like
  ENST ID: ENST00000630638
  CDS Start-End: 27-197
ggtaaaaggccggtacctcgggcaagatggctatcaagagtatcgcttcccgcctccggggttcccgtcgttttctgagcggcttcgtggctggggctgtagtgggcgctgcgggagctgggctcgcggccctgcagttcttccggagtcagggcgctgagggagcgttgacagggaagcagccggatgattgttag

SEQ ID NO: 129669 - DNA, 4626 bp, Homo sapiens
  Payload ID: 5357
  Gene Symbol: ENGASE
  Gene Name: endo-beta-N-acetylglucosaminidase
  ENST ID: ENST00000300682
  CDS Start-End: 1-551
ctcagttttttcgttttgatggctggctgatcaacatcgagaactcgctgagtctggccgctgtggggaacatgcctcctttcctgcggtacctcaccacacagctgcaccggcaggtcccagggggcctggtgctctggtatgacagcgtggtgcaaagtgggcagctcaaatggcaagacgaactcaaccagcacaacagggtcttctttgattcctgcgacggcttcttcactaactataactggcgggaggagcacttggagcggatgctggggcaggctggggagcgccgggctgatgtgtacgtgggcgtggatgtgtttgctcgagggaacgtggtcggaggccgattcgacacagacaaggtgggtggtggctttcgtccaagggccagcggcccagtgcctcccctgggacctcatttcctcatggaccttccattcccgtctgcacctcaaaggaatgacagcagctgttcttcccagagtggggatcccgtggcactgagaaacaggtgtcctgccccggccaagctatgtccccactgaaacccctttcccggctatttctacaatcagataatgtatttttgtgtgggtgttaccagacagaggcgcgtcgttcccccgctgtccggtcctcggcgggcctgggcctcctgtcccagctgcgttccttgatcttccccgtgagggaagcctgcggggacgcacaggggcctgcagcgcctctcactgcggctcaggggcgaggacgggggaggtgcccagggtttggggatcggtaggtgtcatgacgagggagcattttctggcaaggcaggtcacaccagcacagaggaaggagcggggccaggccggtgcccctggcgtgggatgcgcagggctctgcctgcctctggtctatcagtcctgcccgttcccagagccccagggatgttctcagcccttaatttagctttaaatgagtaaattaatccaataactaaagagcctctttactgcccgtgattctgataatcgaatgagaggtgtgccagaggacaatgggaccgcgcagccacagccagttggggcccagcccctgcccccctgcccttgcagcagcgctgaccgcctctcccgcgccctcttctggcgggcttgtggaacgacgggggtgatgcccagcagcctccagtcgttggagctgatccgaaagcatggcttctccgtggctttgtttgcccccggctgggtgtatgagtgtctggagaagaaggatttcttccagaaccaggacaagttctggggccgactggagcgttatctgcccacacatagcatctgctccttgcctttcgtcacgtccttctgcctgggcatgggtgcacggagggtctgctatggccaggaagaggcggtagggccctggtaccacctgagcgcccaggagatccagcccttgtttggagaacacaggctgggaggggatggccggggctgggtgaggacgcactgctgcctggaggatgcctggcacggaggcagctccctgctcgtccggggtgtgatcccaccggaggttggaaatgtggctgtgaggttattttccctgcaggccccagtgccacccaagatttacctgtccatggtgtataagcttgaggggcccacggacgtcacagttgctttggagctgaccacaggggatgccggcagctgccacatcggtggcatctcagtgttgaacgcagaaacaagctcaagacacagcctccgacccctccgggtgccccccaccaagctggccagatgggtgggccgctgcggccggcagctgagtgggggctgggtccagcactgctacgaggtgagcctgcgtgggtgcctgctgctagacctcctcgtttgcttctcacggccgccgggtagtcgggaggaggagagcttcacctgtcggcttggagagatccaggtggtggacgctgccagcctgctggcccctctgccccaggtgcaggccgtcaccatctctcacatccgctggcagccatccgcctctgagcgggaggggccccctgctctgctccagctcagctgcaccctgcactggtccttcctcctctcacaagtccgttgcttccgaatccactgctggggagggatgagtgatgactctccgggcagggagctgccgaggccagagatgcccatgttcctggggttggcttttgccacccagtaccggatagtggacctgctggtggaagccgccgggcccggccaggatcgtcgcatggaatttctggtggagcctgtccccaaggaagggttccgggtacctcaggccgagtggggcagggcagttctgctttattcagcccctgcatgagcggatgctaaggccgggtggtctcctggcctcgggctgaggcctcttcccggctgtctgcccctggcctgcgctggacctgctaagtgcccacagtggcagcgaggtcccggtcccggggctggggtgggagaccccgggctgagtgctgtggctttctggtggggggcgatggaaacaggaaaccaagcagtgggatcgcagcgttggtcactgcgaggcgagtggcgggctttctgtttctgccttgtccctccccacggtacctggttcccaggtgaaaatgaaaggaggggagaagttgagaacagaacattccataaaggatatttcctaataggctgcaagatgctgatgccgagaatgatgattttctttcctgcagatgaaactattagaaagggtcttagattgtggcaggtaggctttggagcaggcgccgagacatttctgagcatgaggacgagctacagcagctcctggggtggggctgcctgcgggatggcgggagaggatgccctggagaaccgtcctcccagtgtggaaggcccttttccctgaggagtgggcattctgggccagccggcgctggcttcgtgcctccacgtgggccagccccagctgctccgtgtttcctggcgttggcaatttactgtgctgctgagtgtgaggtcatctccggagcgttttcagcagcccctggctctgcggcgtctcttccgggctgtgggcatgcagggaagtggctctgaggcagtctgcgctgtggccctgcctctgcccagcgagaggccgtgggctctggacaagccgcccttcaggctggggtagcaggtcagtccaggcaggaagcagcacctgccccccgcgccagcccagccccagcctgagtgcaggagctgcaggacccgcgggggcttttccagctactctgttccttcacgtcctcccttctcagcctcgtccaagcaccgggaagacctccaggctgaccccttgagcagcagtcagcacaggtgcgtgggggcgtgagggaggcagggtcttcaccacaggcgccttcctctgtccttcctgctctttcttctctgcccaggccgctgcagctgcacagcctctgctacacctgggctgcctgggaggcttcctggtgtggtgtctggaccccacggccttgggtcatcctgtggctggtctggggtggggtctgttgtggtccttccacggtgtcagtggcctgaagtccctcgcttttggggggggggtctctcacccccaggccacatagggccagtggtaggggttccctctatgtcgggcagtgctgagggctgggatgctctgtgaccccagctggagcccacacctaagggctggcatccacatcatttcaccctgcagtgagggaagaggccaccaggtggcagcacagccacacccgttcccacgtcagaggagggcaaggctgggtactcagcagccactctgagccggggctccttccaggagctgaaatccacctgtctccatcttccttgcctgcctgggtactcatgccaagcagagactgggattaggggttctgtgctcttgcctaattaggaacattctcccatgtctcttgtgtggtcccagaaggagaagtgagtttgccaaggatatggggcaggaggctccctctgctgaccccctgcagcctggagccagcccggggactgtcctgggtggagggcaggtgaacacaagctgctgccggggactgtcctgggtggacggcaggtgaacacaagcggctgccgcatgtagccactcactcgactttttttcagctgtgaccattcccgggagctctttgagcctttctgtctcatttggaaccagggggaaccaggaaggggctcctggcctctctgtgtcctctgcagtgggggttgtggggggcgcagcatccacgccttgctgcccttctttcatgaagtctgttttttaagtgctggttcccccgaatattttatgcagaggagggaaaatttatagtggcaattattttctcacagtctggtgagcaggcaattaattaggagtaagggggcctagtagagcgtggcgtgtggcagaatcgcaccgccccggctccccagcccaccgccatgcagggctcgcgtgcgggaaaactaatatgccggcgtttaagcctgtgcccctctgctgggtgtaactgcgctgaaataaatgatctgacaatgtgaa

SEQ ID NO: 129670 - DNA, 1381 bp, Homo sapiens
  Payload ID: 5357
  Gene Symbol: ENGASE
  Gene Name: endo-beta-N-acetylglucosaminidase
  ENST ID: ENST00000311595
  CDS Start-End: 1-1097
ggcggcggcggccgggaaggagcatcaaagatgaagaagaagagacagtctttcgagaggtggtcagtttttccccggaccccctgccagttagatattatgacaaggacaccaccaaaccaatcagcttttacttgtcttcgctggaggagctcttggcgtggaagccccgcttggaggatggctttaatgtggccctggagcccctggcgtgtcgccagccccctctgagcagccagaggccccggactttgttgtgtcatgacatgatgggcgggtacctggatgacaggttcattcagggctcggtggtgcagactccctatgctttctaccactggcagtgcatcgacgtctttgtgtacttcagccaccacaccgtcaccattcccccagtgggctggaccaacactgcccacaggcatggggtctgcgtgctggggactttcatcacggagtggaatgaagggggaaggctctgtgaagccttcctggccggggatgagcgctcgtaccaggcagtggctgaccggctggtccagatcactcagttttttcgttttgatggctggctgatcaacatcgagaactcgctgagtctggccgctgtggggaacatgcctcctttcctgcggtacctcaccacacagctgcaccggcaggtcccagggggcctggtgctctggtatgacagcgtggtgcaaagtgggcagctcaaatggcaagacgaactcaaccagcacaacagggtcttctttgattcctgcgacggcttcttcactaactataactggcgggaggagcacttggagcggatgctggggcaggctggggagcgccgggctgatgtgtacgtgggcgtggatgtgtttgctcgagggaacgtggtcggaggccgattcgacacagacaaggtgggtggtggctttcgtccaagggccagcggcccagtgcctcccctgggacctcatttcctcatggaccttccattcccgtctgcacctcaaaggaatgacagcagctgttcttcccagagtggggatcccgtggcactgagaaacaggtgtcctgccccggccaagctatgtccccactgaaacccctttcccggctatttctacaatcagataatgtatttttgtgtgggtgttaccagacagaggcgcgtcgttcccccgctgtccggtcctcggcgggcctgggcctcctgtcccagctgcgttccttgatcttccccgtgagggaagcctgcggggacgcacaggggcctgcagcgcctctcactgcggctcaggggcgaggacgggggaggtgcccagggtttggggatcggtaggtgtcatgacgagggagcattttctggcaaggcaggtcacaccag

SEQ ID NO: 129671 - DNA, 2579 bp, Homo sapiens
  Payload ID: 5357
  Gene Symbol: ENGASE
  Gene Name: endo-beta-N-acetylglucosaminidase
  Uniprot ID: Q8NFI3
  ENST ID: ENST00000579016
  CDS Start-End: 1-2232
atggaggccgcggcggtgacggtcacccggtcggctacacggcggcggcggcggcagctgcaggggctggcggccccggaggcggggacgcaggaggagcaggaggatcaggagccgcggccgcggcggcggcggccgggaaggagcatcaaagatgaagaagaagagacagtctttcgagaggtggtcagtttttccccggaccccctgccagttagatattatgacaaggacaccaccaaaccaatcagcttttacttgtcttcgctggaggagctcttggcgtggaagccccgcttggaggatggctttaatgtggccctggagcccctggcgtgtcgccagccccctctgagcagccagaggccccggactttgttgtgtcatgacatgatgggcgggtacctggatgacaggttcattcagggctcggtggtgcagactccctatgctttctaccactggcagtgcatcgacgtctttgtgtacttcagccaccacaccgtcaccattcccccagtgggctggaccaacactgcccacaggcatggggtctgcgtgctggggactttcatcacggagtggaatgaagggggaaggctctgtgaagccttcctggccggggatgagcgctcgtaccaggcagtggctgaccggctggtccagatcactcagttttttcgttttgatggctggctgatcaacatcgagaactcgctgagtctggccgctgtggggaacatgcctcctttcctgcggtacctcaccacacagctgcaccggcaggtcccagggggcctggtgctctggtatgacagcgtggtgcaaagtgggcagctcaaatggcaagacgaactcaaccagcacaacagggtcttctttgattcctgcgacggcttcttcactaactataactggcgggaggagcacttggagcggatgctggggcaggctggggagcgccgggctgatgtgtacgtgggcgtggatgtgtttgctcgagggaacgtggtcggaggccgattcgacacagacaagtcgttggagctgatccgaaagcatggcttctccgtggctttgtttgcccccggctgggtgtatgagtgtctggagaagaaggatttcttccagaaccaggacaagttctggggccgactggagcgttatctgcccacacatagcatctgctccttgcctttcgtcacgtccttctgcctgggcatgggtgcacggagggtctgctatggccaggaagaggcggtagggccctggtaccacctgagcgcccaggagatccagcccttgtttggagaacacaggctgggaggggatggccggggctgggtgaggacgcactgctgcctggaggatgcctggcacggaggcagctccctgctcgtccggggtgtgatcccaccggaggttggaaatgtggctgtgaggttattttccctgcaggccccagtgccacccaagatttacctgtccatggtgtataagcttgaggggcccacggacgtcacagttgctttggagctgaccacaggggatgccggcagctgccacatcggtggcatctcagtgttgaacgcagaaacaagctcaagacacagcctccgacccctccgggtgccccccaccaagctggccagatgggtgggccgctgcggccggcagctgagtgggggctgggtccagcactgctacgaggtgagcctgcgtgggtgcctgctgctagacctcctcgtttgcttctcacggccgccgggtagtcgggaggaggagagcttcacctgtcggcttggagagatccaggtggtggacgctgccagcctgctggcccctctgccccaggtgcaggccgtcaccatctctcacatccgctggcagccatccgcctctgagcgggaggggccccctgctctgctccagctcagctgcaccctgcactggtccttcctcctctcacaagtccgttgcttccgaatccactgctggggagggatgagtgatgactctccgggcagggagctgccgaggccagagatgcccatgttcctggggttggcttttgccacccagtaccggatagtggacctgctggtggaagccgccgggcccggccaggatcgtcgcatggaatttctggtggagcctgtccccaaggaagggttccgggtacctcaggccgagtggggcagggcagttctgctttattcagcccctgcatgagcggatgctaaggccgggtggtctcctggcctcgggctgaggcctcttcccggctgtctgcccctggcctgcgctggacctgctaagtgcccacagtggcagcgaggtcccggtcccggggctggggtgggagaccccgggctgagtgctgtggctttctggtggggggcgatggaaacaggaaaccaagcagtgggatcgcagcgttggtcactgcgaggcgagtggcgggctttctgtttctgccttgtccctccccacggtacctggttcccaggtgaaaatgaaaggaggggagaagttgagaacagaacattccataaaggatatttcctaataggctgcaa
